United States Patent Application Publication US 2004/0214272 A1 - sequence listing, part 15

SEQ ID NO: 60399 - DNA, 3365 bp, Zea mays
  Clone ID: MRT4577_155085C.1
aattcggcagaggctttaaggctgtcacctttccccatcccctacgcccccccttcaggtgcaggggccacccttcctcctgctcccgcccctcaatcaatcacgacgccacagccgcacccccgcgaaccctagctcgcagtcgcaccgcgcgccggacgctgaccaggtgcctgctctatctcctgcggtggccgtcgcgctgccgccgccagacccgatccgtccgaccgtgccaagcgccccccctccggcgatcgatgcgaggcgccgcgggaggcggctcgggctcgggcaggctgtgaggagcctgtccgctcgctgcgtcgtgcgcctgccttccctcacggatcggcctcgccgcgcgtttgctttcccgcccacgcagggatcttcgcgagcggggagttgaagcgcgagatttgcgcggctacgattctgcgttgccgagggagcaagggaaccaatggctgcagcggtggcgatgcgagggggaagcagcgacagcggaggatttgacaaggttcccgggatggactcgggcaaatacgtgcgctacaccccggagcaagttgaggtgctcgagcggctctacatcgattgccccaagccaagctcctcacggcgccagcaactgctgcgcgagtgtcctatactctccaacattgagccgaagcagatcaaggtctggttccagaaccgaaggtgccgcgataagcagcggaaggagtcttcgcggcttcaggctgtcaacagaaagttgacggcaatgaacaagcttcttatggaagagaatgagcggcttcagaagcaagtctctcagttggttcatgaaaacgcgcacatgcggcagcagctgcagaatacttcattggccaatgacacaagctgtgaatcaaatgtcactacccctccaaaccctataagggacgcaagtaacccttctggactccttgcgattgcagaggagaccttcacagagttcctctcaaaggctactgggacagctattgattgggtccagatgcctgggatgaagcctggtccggattcggttggtattgtggccatttcgcatggttgccgtggcgttgctgcccgcgcctgtggtttggtgaatctagaaccaacaaaagtcatagaaatcttgaaagatcgtccctcttggttccgtgattgtcgaagtctggaagtgtttacaatgtttccagctggaaatgggggaacaattgaacttatctacatgcagatgtacgccccaacaactttagttcctgcacgtgacttttggacgttgcgatacacgacaacaatggaagatggcagccttgtggtctgtgagagatccttgactggttctggaggcggtccaaatgcagcttctgcacagcaatttgttagggctgagatgcttccaagtgggtatttagtgcgcccatgcgaaggtggaggttcgattgtgcatatagtggaccatctagatctcgaggcatggagtgttcctgaagtgcttcgaccactatatgagtcttctagagtagttgctcagaaaatgactactgtggcactgcgccaccttagacaaattgctcaagaaacaagtggagaagtagtgtacgccttgggaaggcaacctgcagtcctacggacctttagtcaaagactaagcagggggtttaatgatgccattagtggtttcaatgatgatggttggtctgtaatggggggagatggcattgaagacgttgttgttgcttgcaactcaaccaagaaaattaggaataccagcaatgctgggattacatttggagcgcctggaggcattatttgtgcgaaggcatccatgttactgcagagcgtcccaccggcagtactggtccgatttctgagggagcatagatctgaatgggctgattacaatattgatgtgtatttggcttcatcactgaagaccagtgcgtgctcacttcctgggttgcgacccatgagattttctggggggcagatgatcatgccacttgctcacacagtggagaacgaggagattcttgaagttgtccgccttgaaggacaacctcttactcatgatgaagcccttctttcaagggacatccaccttctccagctttgcactggaatagatgagaaatctgtgggttcctccttccagcttgtgtttgcaccaattgatgagcattttccggatgatgctccattgatttcctctggctttcgtgtcataccacttgatatgaaaacagatggtgtatcctctggtaggacgctagatttggcatctagtcttgatgtgggttctgctgcaccccaagcctcaggggatgcacctccagatgactgtaatttgagatctgtgctgacaatcgcctttcaattcccttatgagatgcaccttcaggacagtgttgctactatggcccgtcaatatgtgcgtagtgttgtttctgctgtgcaaagggtgtcgatggctatatctccctcccaatctggtctaaatgctgggcagaggatgctttccggcttccctgaagctgttacacctaccatatgggtatggcagagttatcactaccatctagagctggtgaagcattgttgaaaatgctctggcatcatcccaatgctgttctgtgctgctcctttaaggagaaacctatgtttacgttttttaaggagaaacctatgtttacgtttgcaaacaaggcagggctcgacatgttagaaacatcttttattgcgctgcaagacctgacgctagacaagatctttgccgagtcaggaaggaaagcaatattctcagatatctcaaaactaatggaacagggctacgcgtacctgccgtcgggcgtgtgcatgtcaggaatgggtcggcatgtatcattcgaccaagctgtagcgtggaaggtgctcggcgaggacagcagcgtccactgcctggggttgtgtttcgtcaactggtccttcgtttgacacgccatcccatggcctgtgtgatgagcaggccaatttttttgtatggtgatcccaatatggggaaaccatcagctgtgacagaaggctttatgttgcatgcactagttgtacgtcttgaatcgagtgtatttatgaagaaattggggggcaatagtgatgcacggctacacatgacccagcattaaccaaacaaccgcgtcgccagtttctttctattcgatcagggagatgcattttctggcaaaaaatcttctatttttttgttgcaaatttggtctgtatatggaactgctgctggacgccgagaaagcaaacatatgcggaaactcactatggctcgagaaaaaaacttatgaagaggttggatactgaat

SEQ ID NO: 60400 - DNA, 1413 bp, Zea mays
  Clone ID: MRT4577_155086C.1
gctcggcgcgcccccgccgcgggtgcccctgccgcgcccggccacaactgcggacgcccccccgtggacgcccccgccctcgaccccggccgcccctaccgcatccggccgcccccgccgcgggcacccccgcgatgaagctcttctttcagggacatccaccttctccagctttgcactggaatagatgagaaatctgtgggttcctccttccagcttgtgtttgcaccaattgatgagcatttcccagatgatgctccattgatttcttctggctttcgtgtcataccacttgatgtgaaaacagatggtgtatcctctggtaggacgctagatttggcatctagtcttgatgtgggctctgctgcaccccaagcctcaggggatgcatctccagatgactgcaatttgagatctgtgctgacaatcgcctttcaattcccgtatgagatgcaccttcaggacagcgttgcagcaatggcccgtcaatatgttcgtagtgtcatttctgctgtgcaaagagtgtcgatggctatatctccctcccaatctggtctaaatgctgggcataggatgctttctggcttccctgaagctgccacacttgctagatgggtttgccagagttatcactaccatctaggtatggaattacttaatcaatcagatggagctggtgaagcattgttgaaaatgctctggcatcatccagatgctgttctgtgctgctcctttaaggagaaacctatgtttacgtttgcaaacaaggcagggctggacatgttagaaacatctcttgttgccctgcaagacctgacgctagacaagatcttcgacgagtcaggaaggaaagcactattctcagacatctcgaaactaatggaacagggctacgcgtacctgccgtcaggcgtgtgcatgtcaggaatgggccgccatgtttctttcgaccaagctgtagcgtggaaggtgctcggcgaggatagcaacatccactgcctggcgttctgcttcgtcaactggtccttcgtgtgactgaagcccaacccgtcgggtggttatggcgagctgacccctttttttttgtatggaaaatcatcagctgtgacaaaaggcatatgttgcatgcactagttgaagaaactggtccaattgcttttttggtttgtcattccattcagatgttgctaggtgtggagtggaaatggggcaatagtgtcacggttacacatgacccagcattaaccaaacaaccgcgtcgccagtttctttctattcgatcagggagatgcattttctggcaaaaatctcctatttttttgttgcaaatttggtctgtatatggaactgctgctggacgccgagaaagcaaaacatatgcggaaactcactatggctcgagagtcttctaga

SEQ ID NO: 60401 - DNA, 5217 bp, Zea mays
  Clone ID: MRT4577_155087C.1
ggttcggccgggagtcgctggtcttcagtacaggacacctgttgcagcagggacacagccaccgccctcattctctatcttcttcctgggagtgcacgcatccctcccatggtggttcatccctccccatttttccccagccgacctttcccatagacgccgcagcacctgtttcctgcacgctggtcgcccctgcccctagccatggtcccgtcaggccgcccgtctcctacctccccacgccatatcttcctcacgacaccttccctccatctctctcttcccagccatggacgcccctcgctgtgagctcgctccagccctctccctcgccgagtccctctatgctctcgtctcgcccaggtctgcaccagcagctcgcccagcaccgcgcgccgtcgtcccctgcttggcgtccggcctcagtagctcgccctccccgcccagcagcaagcagctcctttcccctcgccatgaacgtcgtcgatcccctgctgcagttcctccacgtggtctggtcgtcgaccgcgcacgtcacctgctcgtggttatgggaaaccagcgagcctctcctcacgacgtagtttcctcgcgtcatcgttccgcccgtggaggtaaatcctgtgagatttagatgagaagaaagctttagcgaggcgcttgccaagtgcttggtgaatcgcctcaaccagatgtggttgtcgatctcgcggagtcgagtcgagtttagtcgtggtaagtcgatccattgttttcgttagtcggatgaatgattagttgtgtggatatataaggcttgtgctattaaattgatttgtgttgtgtgaatgaaattattttcatgagtatgtatgtcttgtattatgaaactaattagagatatgcatggtgcttgtaggtggattatgcctagagtattttggtaaagatatttctcaagtatagatgatttggttattgtatatgaattgagtgatcaagttaataatgtaaaaacaacgtttagtacttatagcgctttgccgataagatttattagtggttgagtgaatttctaatgtatggtgacatgaatgccttgttgtattatgtggttttagttcttctaaagataaagtgttgagtgttctaaatgttaaaagcatgataagtgtagaagttaaataagatctaagttagagttcttgttgtttggactgcatgtccaattttattacgtggctagttaagtaaagtaaaccgtgttttctgtagaagtattatatataaaacttgtagataatctttttaccttgcttgtgtaaaaatttcatgaccataggttcagtagtttaggagttatgatttttccaagtccagtttcagaatctgtccagattctgtactgatttcgaaaatgaccttgtttgtccaagttaaactgagaatcagctcttagtaattatagaagaattgtagtacttttcttaagctttccaacaaattttggatcaccccttttggtggtctagaagtcaagttatggctgtttgaaatgtgatgtttgaatctgtcaaaaatctggacagcaatgtgtgtttgaattaactgactttgatacacattgaatcgccttgagatgattataaatgaattgtagacaattctactagctttctaaaaagtctaggatcacctgatttggatatctgaaactccagttatgaaattttaaagtgagtggccgaattctgtccaaatctggacagaaattatgtttagttccgtttgacctttttaaagatcgaattttgttgtgatggaaatacaaaagttatagaggactttataagctttccagaaagttctagtttactatttttggatggatattttgtgagttatgagcaaaacaattgactatagtacagttgtccagaaattctgtaaatgtgaatgcttgactttactcttgtttggctaggatggattagtcaatttttgattcttgattgatgaatgctagtgaactagtaattatttaggccttctatggtaatagtaaacttaataatatggaaaaggtttagtagacatatatatctattagtaagttgatctggtcctcttgtggctataaacgtgatataagtgccttgtgtttgaatagcaaagtttagagttgaaatgctgattatatatataagtgttttagataattaagttgagaaaactaattaaaatgcttctatccttattctaaatcttaaatgtccgattctaataagtctaagattagtctaagtctggtaatcgattggtgtatactctggcataggaaaaatatagtcttcatgcatgattgtagtttcttgttcaaattaacttcggttaagctagagaaactcgattgttgtgtttcattgtttatcgacatctagcttatgctgatgagtattgtattgcgcctcgccattaagtacttagttctctattgcataggccgtaaagtcttatgttattgagatgtcttatttagtggtgtgtaattcaagtcatttagcaaagtggtttagaaggttagtagcttatttgtattcttgttctaaatttgaagtgtataaataatgaccttatgctttataaatcttttggtgttatgttcgaactaaagaaaatataggaactatatctagttttataattcttcatgtttggatttgattcgtgtaaattagagaacgtgatcattatgttggttgtgtatctctatctaatgcttggttatgaatgtttgtgatgtcttacttgaagtgtttcccctctatagtataagttatttattatttgctattcatgtccttactcatatgcattattgcatatcatctagatacgttaattaatcacgtgatgtggaggacatgtaatactcaaagttgtataaaaggaataaatagtgaattccctattttatgtgccacattgcatcataaaaagagcatccaagtaattgagagtgattacattacaaaataaatgataccaaaataaaataaaatgcatcatgttggagttttattgttggcgcatttaataaaatgataatgttgataataataataaaataataattctaaaggttgaatcgaatccctaaattaaaattagggttttgaaaatgagaagaagagaaaggatataaaaatatgaataatataattatattttaaaaaaaactggtatttcaatctcacagaagtaaaagggattaatgtagcacaagcttgaatttaagtttgagttcaaaatttaaacttggaaatagaagagagagaaagaaaatcaggaaaaagaaaaggaaaagtgaaggggttgcgtgtgggccggctgctgggatctcggcccatctggccagtagctcccgcgcggcccatccccttctcaccgtgcgcagggtcggctgacgtgtgggacctccgtgtcagccggttggttcatcgccaacgccgccgtatgcgaaggaagagggatccgtggagctcgggcgtattggttggagatccgttcgctgctgctagccaactcccgcgccgtacgcggtttccgctgtggttattcgccggtcgcccctgcaactccggatccggacgccgtcagctctaacctttcctcccctcgactacttccacggcgcgctcggctcaaagtccgccggtaacttcggcatggcgaccgcgcatatcctaccatgaccgcacctatccgaccatttaaacctccctcacagctactccgccccgctttttcttcttccctgcgctcgcgttttcctcccgtgctcgcatcctctctgctatcgcatcacgccgccgccacaaccatctcgcgccgtcgtcgtcattggggcccagggcttggttcaaaagcttcggactacgtcatcgtatgcgtacctggcgaatcggagcactacattgtcgtcgtggcgcgcgaattgctcgccggaactgattctcccccccgcggatctgggtgtgcgcgtgggcagcttcgccatttcttctagctctggtaatgactctcccacagcattggctaccctctaggttacatgatgcgccagttaaatttaggattagcacgccaggacgtggttgggccagctccggccaagctccgccgcggcgccccctggacatcgccgctggcaatgactgggtggaagaaatcacttatgccgttgatcataggatggacggccgagattaaaaccaagaatacctcttcgcgttataaaatctgagccctcggtttaggatcgtgtggcttagatcgtttagaaccctgtccgttgattcggtgatcaatggtagttgagagaagtaaccctatatggttgagctgatctaatcgggaccgcatattttagatcggacgatcagtttttgcccataccccttcgcgggtcaacattgctaaagagcccctctgctttcaggatatcaacccgccgtccagtggggagtgttctgagtctgagtacttttgcgtagaagcccctgacttttctgaaaaatgaggcccagtccagaggtgtttaaaaacagagaaatatttatagaaattcatttttaatacaaaaacaaatctagaaacttgtaaaatgcatagaaaattcattttaactccaaattgagccattccaatttctaaaattttgtaataatattctctatcatttagtgtatctgtttttacatgaaaacagtaagaaagttaatttctcacctaatcctattttaatcacattaaaccttaggaaattcataacttgaattctataactccaaatctaatgattccagttcctaggatctcattttaatgtgtagatttttactgtatattttattcatctgtttggtgtgatgttgatattggctatactatgtatgtattgtgttgatgcgaatagacgagcaagccactgtggaaactgaggttcaacaagtagaggtagctgagcaggagctcattgaaggagaagaacaggtggttcaggaggagccacaaggcgaggagtttgatctgatctaggtggcgtttctcagtcgacattggcgccaacgatccttagttcgttttatatttatctttattttgtaataagtcttccgctatgtaataaatactctgatgttttgtgacatttatctctatacactctgttattat

SEQ ID NO: 60402 - DNA, 697 bp, Zea mays
  Clone ID: MRT4577_155088C.1
cggccgggccggggcgccctcctgcactctccccactcaacaatcaaccacggcgtcacaaccgaaccctagctagcaccgcgcgccggagccccggagtaggtgcctgcttgccctcctgcggtggccgtcgcgctgccgccgcctgatccgattcgtctagccgtgtcaagcgccaccaccggtgatcgatgcgaggcgccgcgggaggcggctcgggctcgggcaggctgtgaggagaggctgtccgctcgctgcgtcgtgcgcctgtctgcgcgcgcgtctgctccgccgtccgcgccaagccgtccctcgccgaggggggctgcctctcacggccgctcggcctcgccgcgcgtctgcttcccaccacccacgcagggaccctcgcgggctggaggtcgaagcgcgagcggagagctaagagcaacaaggcgacgagatttgtgtggctacgattttgcgttgccgacggaacatgggaacaatggttgcagcggtggcgttgcgagggggaagcagcgatagcggaggatttgataaggttcccgggatggactcgggaaaatacgtgcgctacaccccggagcaagttgaggtgctcgagcggctctacatagattgccccaagccaagctcctcacggcggcagcaactgctgcgcgagtgtcctatactctccaacattgagccaaag

SEQ ID NO: 60403 - DNA, 182 bp, Zea mays
  Clone ID: MRT4577_155089C.1
ggcacttgattattgactggccaaccctaatggggatgttattgaacacttgggaaggcctttgacaaacacttaaatgattggagaccagaaccaaattgttgcctttaaacttcaaccaccagaatttccgcttgaccgcaacattaaaaaaccttgacctggttaccaatcttacccgg

SEQ ID NO: 60404 - DNA, 1915 bp, Zea mays
  Clone ID: MRT4577_15508C.1
gaccacccggccggggctcggttcggccacgccccaccagccagccagccagggacccgtcgctgccctctggcgatgagggatattacgggtctgccctgaccaccgcccacgcgcagccaggggtagaaacgaccgcgtcaccgtatttgacccctcaccgtcccacaccagtgtcggcgagtccctcctgtgcctcgtcctccccctttcccctccgagtccagcccggcgccacccactcagccgcggatccgaggcgcagatccgatccggcgatggcgtccacggcggcgaggcggctgcgggagctgcaggcgcagacggggaacaagacctgcgtggactgcgcgcagcggaacccgcagtgggcgagcgtctcctatggggtgttcatgtgcctcgagtgctcgggcaagcaccggggcctcggcgtgcacatcagcttcgtgcgctcggtcaccatggactcctggaccgaggcgcagctccgcaagatggaggccggtggcaacgaccgactcaacgccttcctcacagctcgcggcgttcctaaggagacgccccacgtcgccaagtacaactccaacgccgcagccgcctaccgcgaccgcatcgccgcgctcgctgagggaaagccgtggactgacccgcccgtggtcaaggagacgcccggatctggcgcccccgcccccgctaggaagccgcccgtgcacacatctgccgcctccggcggcggcgggtgggacgactgggacgacgattttcggccggacatgaggcggaatcagtcggttggatcgttcgccgccgcgggtgcgcagtcagggaggcagccgccgaggtccaaatcaacacaggacatgtacacgaggcagcaactggaggcgtcggcggctaataaggaggactttttcgccaggaggatggcggagaacgagtccaagcctgacgggatcccgccatcccagggcggcaagtacgttgggttcggatccagcccaccgccgtcggctaacaggaacggcggtgctgcccagggcgatgtcatgcaggttgtctctcagggatttggacgcctttcattagttgcagcatctgctgcccagtctgctgccagtgctgtccaagttggcacaaaagaaatccaatcaaagatgagggatgggggctatgaccagaaggtgaatgaaactgtcagtgttgttgccaataaaactgcagagattggaagcaggacttgggggatcatgagaggagttatggcgctggcctcacaaaaggtagaggaatatgccaaggaaggaggagtgggtggctggggagaggattggcaacacagcgagcagaaaagtgagccttaccaaaggtttgagcatgagaccaacggcaacagttggaattcctcccaaaattcttcatcgaagaacaattccagttcttgggacgactgggacgacccaggcaagaaagatgagcctgcgaaaccgcaccagagcagtgactcctgggctggctgggatgatgggaaggatgatggttttgatagccctagttacaacaatcacagcacctccaacaaggggagcaaccaaaacgggacatccggtggcacattttggacagaaggcggcttccgctgaaaccagtctcttttccatagagctatactttcagagttgttacatgccaggaaacgtgagggtccagtggttggtattatttgggatacttaaacagtcgggtgaaagggtttgtgtgttttgtaccatgtctacaactgttattatatctagtgagatatatttctgtggtcagatgccattcaacactgcccaaatgactaagaaatgtcgatttgaaactgtaatttactcgactttgtcgcaaaaaaaaaaaacacgcgtccggaggg

SEQ ID NO: 60405 - DNA, 2557 bp, Zea mays
  Clone ID: MRT4577_155090C.1
tctggttccagaaccggaggtgccgcgataagcagcggaaggagtcttcgcggcttcaggctgtgaacagaaagttgacggcaatgaacaagcttctcatggaagagaatgagcggcttcagaagcaagtctctcagttggttcatgaaaacgcgcacatgcggcagcagctgcagaatacttcattggccaatgacacaagctgtgaatcaaatgtcactacccctccaaaccctataagggacgcaagtaacccttctggactccttgcgattgcagaggagaccttcacagagttcctctcaaaggctactgggacagctattgattgggtccagatgcctgggatgaagcctggtccggattcagttggtatcgtggccatttcgcatggttgccgtggcgttgctgcccgcgcctgtggtttggtgaatctagaaccaacaaaaggcatagagatcttgaaagatcgtccctcttggttccgtgattgccgaagtcttgaagtgtttacaaggtttccagctggaaatgggggaacaattgaacttatttacatgcagatgtatgccccaacaactttagtccctgcacgtgatttttggacactacgatacacgacaacaatggaagatggcagccttgtggtctgtgagagatccttgagtggttctggtggtggtccaaatgcagcctctacacaacaatttgttagggctgagatgcttccaagtgggtatttagttcgcccatgcgaaggtggaggatcaattgtgcatatagtggaccatctagatctcgaagcatggagtgttcctgaagtgcttcgaccactgtatgagtcttctagagttgttgctcagaaaatgactactgtggcactgcgccaccttagacaaattgctcaagaaacaagtggagaagtagtgtacgccttgggaaggcaacctgcagtcctacggacctttagtcaaagactaagcagggggtttaatgatgccattagcggtttcaatgatgatggctggtctgtaatggggggagatggcattgaagacgttgttattgcttgcaactcaaccaagaaaattaggaataccagcaatgctgggattacatttggagccccaggaggcattatttgtgcgaaggcatccatgttactgcagagcgtcccaccggcagtactggtacgatttctgagggagcatagatctgaatgggctgattacaatattgatgcgtatttggcttcatcattgaagaccagtgcgtgctcacttcctgggttgcgacccatgagattttctgaggggcagatgatcatgccacttgctcacacagttgagaacgaggagattcttgaagttgtccgccttgaaggtcagcctcttactcatgatgaagctcttctttcaagggacatccaccttctccagctttgcactggaatagatgagaaatctgtgggttcctccttccagcttgtgtttgcaccaattgatgagcatttcccagatgatgctccattgatttcttctggctttcgtgtcataccacttgatgtgaaaacagatggtgtatcctctggtaggacgctagatttggcatctagtcttgatgtgggctctgctgcaccccaagcctcaggggatgcatctccagatgactgcaatttgagatctgtgctgacaatcgcctttcaattcccgtatgagatgcaccttcaggacagcgttgcagcaatggcccgtcaatatgttcgtagtgtcatttctgctgtgcaaagagtgtcgatggctatatctccctcccaatctggtctaaatgctgggcataggatgctttctggcttccctgaagctgccacacttgctagatgggtttgccagagttatccctaccatctaggtgtggaattactcaatcaatcagatgaagctggtgaagcattgttgaaaatgctctggcatcatccacatgctgttgtgtgctgctcttttaaggtgccagaagagttgtactcaagtccgcaatattccaatcttctaaagcataggcagatccctttgacaagaaaaacctatgtttacgtttgcaaacaaggcagggctcgacatgttagaaacatctcttattgcgctgcaagacctgacgctagacaagatcttcgacgagtcaggaaggaaagcaatattctcagatatctcaaaactaatggaacagggctacgcgtacctgccgtcgggcgtgtgcatgtcaggaatgggtcggcatgtctctttcgaccaagctgtggcgtggaaggtgctcggcgaggacagcagcgtccactgcctggcgttctgcttcgtcaactggtccttcgtgtgacacgccatcccatggcctgtgtgatgagcaggccaatttttttgtatggtgatcccaatatggggaaaccatcagctgtgacagaaggctttatgttgcatgcactagttgtacgtcttgaatccagtgtatttatgaagaaattggatactgcaaaaaaaaaaaaaaaaaggcccctagggcc

SEQ ID NO: 60406 - DNA, 310 bp, Zea mays
  Clone ID: MRT4577_155091C.1
aggggatcaaaattatgtaatgaagagtacccctgttttttggtacatgacgaagggtgaccctccatgggggcttaattataaacagaccccctgattttacctgacgaattgcaagaagcgcatgctttggattttcttatccggagagggcgctggtgttttaaacgaggagggcccccccccccaggatcccagggggggggagggcccaaatcaaaagcccaggggttccacccacgtatacctcgccggggggaaaccaatcatccttgttgtaaattgggccggatcccgccaccttcccccc

SEQ ID NO: 60407 - DNA, 2581 bp, Zea mays
  unsure (1)..(2581): unsure at all n locations
  Clone ID: MRT4577_155092C.1
tctgttctcgtgaatatgaccaacaattgcagcgggaggttgaaatctatcgggttaagttgcctggagagttgaagattggcgaaggaaagccagaaaatcagaatcatgcactcatcttcacaaggggcgatgcagttcaaactattgatatgaaccaagacaactactttgaagaagctctaaagatgagaaacctactagaagagttcaatcgttattatggaattcgcaagcctaaaattcttggggttcgggaacacgtcttcacgggttcagtttcttctcttgcttggttcatgtctgcccaggagacaagttttgtcactctggggcagcgtgttctggctgatccacttaaagtcagaatgcattatggccacccagatgtttttgatcgtctttggtttttgggccgaggtggtatcagtaaagcatcaagaataatcaacattagtgaggacatttttgctggtttcaactgtactctccgtggtggtaatgttacacaccacgagtatatccaggttggtaaaggtagagatgtgggcctcaaccaggtctctatgtttgaagccaaggttgctagtggcaatggtgaacaaactttgagccgagatgtttacaggctgggccaccgattggatttcttccggatgctctctttcttctataccacgcgtccattctatttcaatacaatgatggttgtgctaactgtctatgcatttgtatgggggcgcttttaccttgcactcagtgggcttgaggactacatcaacaagaacacttcctcttccaataatgcagccctgggagctgttctcaatcagcagttcgtcatacagctaggcctgttcacagctttacccatgattattgaaaattcacttgagcacgggttcctcactgctgtgtgggatttcatgaaaatgcagctacagtttgcatctgttttctacacattctccatgggaacaaagacacactattatgggaggacaatccttcacggaggagcgaaatatcgagccactggcagaggttttgttgtggagcataagaagtttgctgaaaactataggctctatgctcgcagccatttcatcaaagctatagaacttggtgttatattaactctttatgcatcttatggcagtgcatctgggaatacattggtgtatattctgctgacactttcaagttggtttcttgtgtcatcatggattcttgctccattcatttttaatccctctggttttgactggctgaagaattttaatgactttgaggattttctaaactggatatggttccggggtgggatctcagttcagtcagatcaaagctgggagaagtggtgggaggatgaaactgatcatctccggacgacaggtctatggggctgcatcttggaaatcatattagaccttcgatttttcttttttcagtatgcaattgtatatcggcttcacattgctgataatagtagaagcatccttgtctatcttctttcgtggacatgcatcctcctagcttttgtggctcttgtgacagtggcttactttcgagacagatattcagcaaagaagcacatacggtatcgccttgtccaggcaatcattgttgggagcactgtggctgctattgttgtgctgttggaattcacaaagtttcagtttgttgacacttttactagtcttttggcttttctgccgactggctggggaatcatatctattgctctggtattcaagccatatctgaggagatctgagatggtctggaaaactgtggttaccgtggcacgtttgtatgacatattgtttggagtaattgttatggcacctgtggctgtattatcatggttgcctgggcttcaggaaatgcaaacaaggatcctgttcaatgaagctttcagcaggggacttcacatttctcaaatcattactggcaaaaaggcacatgtgttttgagctaaatacatattccaactgaccattttccaaagtgagctgcttcgtcattctggaggactagtttgtctccatggcctatggtttatacaagctttatggcgtgtagagtagatggatgatagctcttccctgtacaggcaatctatttgtcgccgattcttcttaactttcgatatacacttggatgttcatgctagagatgatagtccatctaatgagatgtcgatgctgtccgtattcgtaaaatcgtaactccagatttttggtagcctttagatatctagttaaggctgtacaaaacttcatcatgagcgctattcaagctatggtttctgtcccctactcttttgttgtaaagggtacgatatttctgcatacctgcacatatctcagcgttatgtggaggactaatcctgtacacctaaattactgcctgaaatgtcatcttgcttggtccatatgtgtctcgctgctgggctgcatctaagctcctgtgcatgtggcacgttacgcgcgagatgctgacatgataatgccctattcgtctcgtgcttttatttatataaagcccccttntgtcgttggctgttngggtaataatn

SEQ ID NO: 60408 - DNA, 636 bp, Zea mays
  unsure (1)..(636): unsure at all n locations
  Clone ID: MRT4577_155093C.1
cggaacttccccatcttattctctaataatggaagatatttccgtgacgaatcggagatcgagaccgagtgccaatcctggccgaggcagttgcaaaccagcgaacccggtagaagctacagtatggccgtgcacagacagggtgattggttcgcttggcacgggcagctagcttcatccaagcctggccgacggtatagataggttttatgtgtacggggcggtcagtcaaactttttttttataaaattaaaataaattgctttgcatccgtctatacaacctccgcgttcaccttgcaagcagccaaacggatatttggataaaatcaatgcatcatgcattgattcaggatccacgtgattgattactggcccgtccacctccaggccggtaacacacgcgctctggcgtctgattgattatctgtatgatatgttctcattttcacatatggagacaacataattattttttacaccacttagctgcattcgtagagaagtgagcggcgcgtgtttatacgggtccaggttcccgngagccatgctcttcaggagccagcaaccactcatttttggatgagatggtgcggagaagaacgaatcagacggagaggaacccgttttttttctt

SEQ ID NO: 60409 - DNA, 138 bp, Zea mays
  Clone ID: MRT4577_155094C.1
ggcaacctttgcgacggccccgccgcatccgcggcagcgaaccctagctccgccagctgccgaccccaggaactagctcaggctgccgtgctgcctgcttgctggcgtcccagcaggctgactcctgcttttctctcc

SEQ ID NO: 60410 - DNA, 207 bp, Zea mays
  Clone ID: MRT4577_155095C.1
ttggagacgagtttgctgacaccatgggtgggtgaccagaaagccgtggctgtaaatggaaacatggagcttgatatggattcgctagggggctagtctgatgtagaatggcaaggccgattctttgctgcaggcatctaagataaagcggacgctgactgtataagtgctgacaaacatgcgaaggttgagctcaatatgttatgg

SEQ ID NO: 60411 - DNA, 212 bp, Zea mays
  Clone ID: MRT4577_155096C.1
cactcgtacgcccacacgttctcgttcatgaaaaactttagcttattcgcccactctgcgctctcttagtccagttacaatgatttctggagagtgctccatcatcaaatgtagttcttctccatcaacccaagctcctacacactcaaccatattcttcgataactcaaccatatacacaccatcactttccacaacatatataaaattct

SEQ ID NO: 60412 - DNA, 452 bp, Zea mays
  Clone ID: MRT4577_155097C.1
taacagtgcgtccccccgctgatgctacgccattgcaaagaagctttaggtgtcgccatcatgctcgctttcgctcgtccaactaaaatgtccccatgctgtccctgtattacgccaccgcttctacttccaactgccatgacgacaggtgttctgcgccccgaaggttttctcctgctgctgctcctccaggcgaccgttgcgcttgccgttccgcagcagcaggtgctgcagctgcaggacaccgtcctgatagacgacgtcgtgcaggaggccgccgaggagtggtaccacgggcggcaccggaggacgggcgtcgcgtacccgctctcgctaccggggagcctgtcgggcgtcgaggcccaccggggcgcggtcccgccggcagcctttcgaggtacggcgtgcgccggttcggcgagttctccgtgccgtccggcctcgccgcgcgc

SEQ ID NO: 60413 - DNA, 171 bp, Zea mays
  Clone ID: MRT4577_155098C.1
tatgcatatatctgttgaaatgctattatgttcaaataaaatatcaatagaccttatagggggtaattttaaaaattattcaggatgaaatattaatataatttaacattaaaacatattatataaattactataaatgtgcaacctcttttgaggttcctggattatata

SEQ ID NO: 60414 - DNA, 393 bp, Zea mays
  Clone ID: MRT4577_155099C.1
cctgagcttagaaactttactgatgagcaaggagcaataagcaatatacgaaacgaacagctaaaacaatataatattatatatttacattatttcatttcattcttaatggagagaagcgaaccatgaaggagaaggatagacacaattgagaccctagcaaccagaccagaagaaacctactgattcaagtaaagacgaatccagcaccaccacgaatagcaagcaaatgaacccggtgtcattatcaattatatcttgttgatcttcttggctatcacaacagggttctgcttggcaatctgctcccggccagccttcttgtagtcgaaagtgcattcgtgggagtcagcgtagcggtgcatggagcataatgttcccccgcaccggcac

SEQ ID NO: 60415 - DNA, 336 bp, Zea mays
  Clone ID: MRT4577_15509C.1
cccacgcgtccgggaagtttatttttctgttttctcatagtttgggaagaaagagatgcctgcttgtcaatggtagtgaatcatgcccgatttaggtcaatttatggttggatttatctcacctacaaatatgctttctatccttacactattagttagctttgttactcttgtggcccgaacctgtcagtttaagtatttcaatatttttgcctaagcctatagtgtgatgatgagaagtactacaacaataagctggagcttgaatggtccagtgtgaaagtaagttttcaactgaaatccttgaaatacattagacttgtgatctttttacaa

SEQ ID NO: 60416 - DNA, 361 bp, Zea mays
  Clone ID: MRT4577_1550C.1
gtgagaattgattttatgtatcactagtctgaatatgtctaacttgtttgagattgcctatgataaagatatcacagtggataaagccttttcttcggattttcgggcagtgaatttcagaagaagattacgagatgttctggaagatgattacaataacctcattacacaatgtaataatactgtgatttcggatgaggatgatagaacactgtggttattgggcaataaaggtttctctgttaaaaaaaaaaaaaaaaaaaaaaaaaaaaaaaaaaaaaaggaaaaaaaaaaaataaaaaaataaaaaaccaaaaaataaataaaaaaaaaaaaaaataaaaaaaagggggcggccccc

SEQ ID NO: 60417 - DNA, 263 bp, Zea mays
  unsure (1)..(263): unsure at all n locations
  Clone ID: MRT4577_155100C.1
cttcgcatgagtttttccctgattgggtttctcattcaaagtttttaacgagacaacatcaacacaaggtctatgtcgtatcatctatttttcccgtcgaggttttcaaggatgatacattatgacatagctattgttgtatttgaactaggatatgagtttatgtccctagatttcaaattgatcaacagtagagttgtggatctggataaactcgaagctgacctanccaagttcgacaacaggccctttttcctatgcca

SEQ ID NO: 60418 - DNA, 1785 bp, Zea mays
  Clone ID: MRT4577_155101C.1
cctggccgggaggcttggttaaaaaaatctcatcgtagtcatcatcaccctcgcaccccgaaacgccccactaaaaccccacttacgcgcgcaaacaaagcctaagcgcgcacacacacaccgggagccgcgcaccccacggcacactatctcgtggcgtcgtgggtgtggtcgtgtggctaaacctgttcgcggcgcgccactcgccgtgcgacacggctgcgcagcgatgtggcagacgcgcagcttattgctactcgttgcggtggtcgtcgccgccgccctccccgacggggcggtggccgcggcggcggggcggtgcacgacgtccacgccagtcaagacgtacgacaagtgcatcgcgctgccgacgcagggcgccacgctggcgtggacctacgacgcgcggaacgcgacgctggacgcggcgttcacgggctccttcatctcgccgtcgggctgggtggcctggggcgtgaacgcggacgcgccggcgatgacgggggcgcgcgtgctcgccgccttcgccgacccgtccacgggcgcgctcctggcgctgccgttcctcctctcccccgacgtgaagctgcaggcgtcgccgctcgtgtcccggccgctggacatcccgctgctggcgtcctccgcgtcgctcgtctcccccgcgcgcaccgtccgcgacggcgccagggtgacggtcgcggccaccatccggctgtccccgaaccgcaccagggtgcacttcgtgtggaaccgggggctgtacgtgcagggctactccccgaccatccaccccacggacgcctccgacctggcgtcgcacgccaccgtcgacatcctcaccaccgccaccgaggcgtcgcccatcgcctccgccgcgctgcagtggctgcacggttccctgaacgcgctctcgtgggggctcctcctccccgtcggcgcggcggtggcgcggtacctgcggccgtgcgcgtccacggggcccgcctggttctacgcgcacgcggcaatgcaggcgaccgggtacaccctgggcgccgccggcttcgcgctggggctggtgatgggctccgcgtcgcccggcgtcacgtacaagctgcaccgcgggctgggcatcgcggcggccacggcggggagcctgcagacgctggccatgttcttccggcccaagaccaccaaccgctaccgcaagtactggaagtcgtaccaccacctggtcgggtacggctgcgtcgtggtcggggtcgtcaacgtgttccagggcttcgaggtcatgggactcggcgcctcctactggaagctcggctactgcctggcgctcgccacgctgatgggcgcctgcgtggcgctggaggtgaacgcgtgggtggtcttctgccggaggcagcaggaggagaagcttatgaggagggaggtggaggacgtcgtcgtcaaggatagggcagccgccttctagttctagtgcttgtcttgctaccctccgccctccgctccgctgccaggacatgctggagcctagaggtttcggccgacgggggacccaggggctggtgggagcgacgtctcgaggatgcgggcacgctcacagtcacaggctcacagctactgggtggggagtggggacaaagtgccacggcgtgctctattttgtcgcatgataagagtgtggttttttcagatccttctcaatcaatatatatacagtagaaattcttgtacaattaacaccattggcttccaccagtttactcaacgaaatatatatttgtgaatgttgtatgttggatt

SEQ ID NO: 60419 - DNA, 294 bp, Zea mays
  unsure (1)..(294): unsure at all n locations
  Clone ID: MRT4577_155102C.1
aaaaaaaaaaaaaaaaaaaaaaaaaaaaaaaaaaataaaaaaaaaaaaaaacaaaaaaaataaaaaaagggcggacttatttaaaaaaatcaaagcccgccaacacatatattcggctctcacccttattcaattctattctcccttnccttttctctcttgctccattgtttaaacctggggagacccgcaaatttatttcattttacctaactttaacccttttgccacctttcaaaacttttgcaaattccccattatatccacttttcccaatctttctttttatttaaa

SEQ ID NO: 60420 - DNA, 418 bp, Zea mays
  Clone ID: MRT4577_155103C.1
cccgggtttctacccacgcgtccgggcatgatctccaactccaccagcgtcgtcgaggtgttctcccgcatcaacagcaagttcgacctcatgtatgccaagcgcgcgttcgtccactggtacgtcggcgagggtatggaggagggggagttctccgaggcacgcgaggacctggctgccctggagaaggactacgaggaggttgctgcagagggcggtggtgatgacggtgaggaagacgaggagtactgatctgcttgcatgaatctctttggctgtcgagcgaggttgcggtgtcgaaaaactttttccgtttgcgtcctgggtagtgttgttttttgctttcatgtcacttgctgaactgctgtagtagttgcatgtcataattgaagtatgtcgcttaagcactgttggttca

SEQ ID NO: 60421 - DNA, 367 bp, Zea mays
  unsure (1)..(367): unsure at all n locations
  Clone ID: MRT4577_155104C.1
cgtctcgaganaaggcaaggggcgccttcgctcgtccgtngcttcagtagggtggaccgtcctnncagcgactctcccggagcgatatgcctccactcgtnnattctgtcgtgccggacccgtgcgttngctcgcccggcgcctttggcgtcatctcnntggaagnnntcgccacgagcccttgcatatcgagcccgtgaattggagggatgatcccanngagtccctgaaggggcggctcgggagggttcgtggactcatctgcnntgctgctccgcgaatgccacaccacattcgacacccatgcgacnnctcttttttaaattccttaatgtggcgacgaattggcagaatggaaatgatgccg

SEQ ID NO: 60422 - DNA, 398 bp, Zea mays
  Clone ID: MRT4577_155105C.1
ccggccgggatcatcatcgtagtctaccgaggtagttcatgtgcacccctacgactacctccacgtcggaggcaggcgcgaacgcgccactcgtcaggtgaccacaacgagagaggacggtccatcatcgacgatgcgatacgcatactacgacatggcctgcgacgagggcctgctgccgatcttcctgagcccggtggccaacgctgtcgcgtacctcatcgagctcatcatcagcatcgagtatcgggtatttggatgggagaaccggagatgtgaatgaatctgactgcatgtccatactagcctgcagctctgaacaactatgagcgttgcgactgaatcataacccctggacgaaccgcacagagctgttgctgagcagtcacaacataaga

SEQ ID NO: 60423 - DNA, 185 bp, Zea mays
  Clone ID: MRT4577_155106C.1
ggggctagggggatccagagttatgattcattcactacacgcctcaccccaacggatacctcttacaatccattttgttacaaaaagagtaagcattacttcattattataacctccaccccggggcaacaagggctcaattagatcaacccaaccctgctatttctaatactaaatgaggcgaa

SEQ ID NO: 60424 - DNA, 203 bp, Zea mays
  Clone ID: MRT4577_155107C.1
aatacatttgcattgtattgtatgcacaggttgtgctcaccatcattatttgggcgggccgtgtagagaatcttgcgcaaactcttctttctttaatagaaatgcacactatcttgtgccgttcatttcaaaaaaaggacttgctgatgcaatgttggatgatgcatagtcaagctggggcattccctcctggtaagaaaatc

SEQ ID NO: 60425 - DNA, 182 bp, Zea mays
  Clone ID: MRT4577_155108C.1
gcctgctgcagccggcccggacgttatattgccgggtcgacgagctttcttttcggcgggcgcccttctttacttgtcgagagggcattccagggtgccctatgccctctggaggtcagatactgacactgctgtcatattgcagtgcgctgggccagctacccatgtgatgattaggatcc

SEQ ID NO: 60426 - DNA, 1240 bp, Zea mays
  unsure (1)..(1240): unsure at all n locations
  Clone ID: MRT4577_155109C.1
cccgcttggcatcccttttcccgtgccgggaaccctggccttaggaggccaggcgattctccgccgcctcgtctcgtcttcgctatgcaccagcacctccgtcgctccaacgccctgagcgcctccgtcgtttgattccggtttgcttctggtttctgccgcacaagggcatcgacgtcgtgctcttcgcgccggacgacgccaaggccacgcagaccgccgacccgaacaggaagaagatcaagctccatgcagggcatcacccaaggccacgcagaccgccggacgactccaaggccggatctccgtgcagccgtgcagggcatcacccacaagaagaagatcaagctccggcgagtacctctttccatctcctgtcgctgcctctaccatatctatctaaaggaacaaatttgagcgcatcttctgttgacagtgactttagtttgctattggtgctccagtaagaaaaatagatgtattttgttgatggtggcttcacaatctggcacatgactcatgaaaagctttgtttgacaaactattgtgaaggaacaagtatactgtcttttactacttcagtttgcttgacaaactattgtgatgatggataaagtgtgatgtgatgatggataaaccaatttactatgcttcagtttaaaaaaaaaaaaaaaaaaaaaaaaaaaaaaaaaaaaaaatttcgtagaaagaatcatatgctgaggaaaaaaaaaaaaaaaccggaaaccgagagattttcttaacaacaacagagcatgatgttagagaaatttggctcaagcgcaaaattaggttgcttcgtgggagtgatgcatggcctgaacaaatgatatgagcaaaattgcactatgcttccttgcagtacctctttccatctcctgtcgctgcctctaccatatctacctgaaggaacaaatttgagtgcatcttctgttgacagtggctttagttttctattggtgctctagtaagaaaaatagatgtattttattgatggtggcttcacaatctggcacatgactcatgaaaagaagctacaaacattttgttgatagtggctttagtttgtgttgatgcttcagtttgctgatgatgatgcttatactgtcttttactacttcggtttgcttgacaaactattgtgatgacggataaagtgtgatgtgatgctggatgaaataatttactatgcttcagtttcnnnnnnnnnaaggggaga

SEQ ID NO: 60427 - DNA, 356 bp, Zea mays
  unsure (1)..(356): unsure at all n locations
  Clone ID: MRT4577_15510C.1
agtgccgccgcccgctcaccctcatcccctaggcctccacttttccgatgggggcgacttcatggcgaggcggcacaaaatccaacatggccccttttgctccaccacccgttttttcttttgcgcctcaactgcccttctccctggtaggcgcgacagcaaggaggaggaggaggaaggtttncttggccaccgcggcaccaccgagcacgagcgcaccgccctatattcatactcgaccgcacctagcgaggcctcttgactgcccccagcgagcgcgcaccaactgtagcgcgctgttgatacaagattcggcctacagtactctcggagctaccgccagcagatactcgctg

SEQ ID NO: 60428 - DNA, 388 bp, Zea mays
  unsure (1)..(388): unsure at all n locations
  Clone ID: MRT4577_155110C.1
gactttctttttttttttttttttttttttatttttttttttttttttttttttttttttttttttttaaaatttagatctttaatccttttttaccgggagggcgcccgtttcagcctgagaactttttttttcccgggtaaatcctaaaaaatcgggaagatggccccccccatggggggcgattgccataaggggggggggttccccaaaacctgttggcttaatggccccaattgttggtgttggnggaaggcaacaatggttgccccattatgggggtggaatggcggcaattggtgctgttgccggaaggcctttatgtttcccccaacccggggggaaaatgggcacatttgttggtggcgccggaaaaaaacaatgtttt

SEQ ID NO: 60429 - DNA, 274 bp, Zea mays
  Clone ID: MRT4577_155111C.1
ggtcagtccctctcaagacttacttacccgatggtgacattgatgtcaatgcttttagtaatagtgaagaattaaaggagatttgggcaaatcttgtccgggatgcattggagcgtgaagagaaggatgaaaacgctgaatttcatgtaaaagaagtccagtatattcaggcagaggtcaagattataaagtgtcttgtggaaaacattgttgttgacatctcatttaatcaagtcggtggactatgcacactatgttttcttgaagagattga

SEQ ID NO: 60430 - DNA, 199 bp, Zea mays
  Clone ID: MRT4577_155112C.1
catgccaccgatcacagtacagcaaccagtgcatggtggtccgtggaccggggcctctgtagctgggcatggtctatgccggacgtcgaaagacggtaaggtcctcttcgactcgtgggtggataccgacttcatgaacggagatgactcaaggccgttggcatgatgatcatccggaaccagcggtgctcagtgctca

SEQ ID NO: 60431 - DNA, 318 bp, Zea mays
  Clone ID: MRT4577_155114C.1
cttaacaaaaaaaaaaaacaaagaacaaaactaaaaataaaaaaaaaaaaaaaaaaaaaaaaaaaaaaaaaaaaaaaaaaaaaaaaaagttttttcttttttcgcttcccccctttgggcgttttctgcggatatccaccacccccgggggccgttggggcctccttttagggggcccaattggccctatagtgggtcgtattacatttcattggccctttttttacaactttttcaccttgaaaaaccctgccattacccaccttaacccccttctcggtcatcccccgttcctcgcgtgttgtggtttccaagagg

SEQ ID NO: 60432 - DNA, 168 bp, Zea mays
  Clone ID: MRT4577_155115C.1
gacccgcaaaaagcaggaggacccacccgagagaaaccccccccgacaggaagacacggccgcaacccgccgacagggacggggcaaaaccccccggccagccggcggcgccacagccaaagctgggcgcaaccacggccatagccgcaaccagggcgaaatagcaac

SEQ ID NO: 60433 - DNA, 271 bp, Zea mays
  Clone ID: MRT4577_155116C.1
acacactctgcactccaggaagctacgttgactatttctcctcctctgtgtatcaagctgtggctgacatgctggagacgcaagagccctgatctggccacctggcaagagccgcatttatttctctgaataaatgtgctcctaaaaaaaaaaaaaaagggcggccgccaaaaatccaggtcaccagcccgggaattattcccggcccggaaccttgaggggtaaaacctttcccaagagcgagccgtgtaagaacttggcggaaacatgg

SEQ ID NO: 60434 - DNA, 533 bp, Zea mays
  Clone ID: MRT4577_155117C.1
gccggccgggcttcgcttctttccactgattccagtctgagcgttttctacactctaccatggatttaggatctagatcattaaggatgtcagcaacttgttcagagaaataagagtcgactacagtagccttgcggtcaaaggtttcaccagtttcaatataattggtagcaagttcatctacccttaaggacacatcaggatttcccatatccatggtcctcgggttttccgatattacttcttcgactatgtgcgcattcgaagagggttgtgtatcaattccacattgtgtttcatcaacttgttgttgatgtgcatttaccgtctttcttttctttaaaggaggcgaatccttattggttgccttacttctcccccttttattagtaggattttgagtggttttgtttggtacctccactctttcaggcgcgttcctagcaggaatgaaagactttattacacctttgtaattagtgaatgcatcaggcaggttatttgcggaaaaaaaaaaaaaaaaaaggccccta

SEQ ID NO: 60435 - DNA, 558 bp, Zea mays
  Clone ID: MRT4577_155118C.1
cttgggtgggggggggttttttttttttttttttttttttttttttttttttttttttttttttttttttttttttttttttttttttttttttttttttttgggcgaccaagcaagggcccacccccccaaccaaaaaattacctttacaagggggggggggggaaaaccccaggccctgaaaaaaaaaaaggggggggggggggaaaaactaaaaaggggcaaaaaggtacaggcccatgccccacgtaagcaaagcctaagaaaccccccgcccccggtctgggggaaggagggggcccccatccccaaggacaaggacaaggacttgcccttggccatcctggacaattggcccttaatttccttggacccccggtccaactccaccacccgggtttgaattttttggagggtcagccgaaaaaattcctttttgggggcggcgccgccgctccttttggcgagggccaccctggggggggcgcggggggcaacccccctcctctgcgtttgggactgggagcaaaaaaacgggttgggccggggctccttccc

SEQ ID NO: 60436 - DNA, 353 bp, Zea mays
  Clone ID: MRT4577_155119C.1
tcccatctgtacgccactcttcctctcaccacaatctatctagctacccttttcttaataacagatacaatacatttctcagctgtcttcatacaatttccacaacctctcatctacttcctcacttccttccttcctccaaaaactatcattccatatcatctaatcacatcctaaattatctcaaataccttcataaacaccccaccacatcatacaatacaactacacctaatcattacatatttaattaacaaacaacaattataccaccacataacaatccctataccttttatataactcttaataaacattcatacacttctcataataccccttcaaaccttcaa

SEQ ID NO: 60437 - DNA, 380 bp, Zea mays
  Clone ID: MRT4577_15511C.1
cccacgcgtccgatgagactgatataacttttacggtcctgttaaatatagagtgtgctgcactgattctcgttatgggggtggctacatggttgacacatgaaaaaaaaaaaaaaaaaaaaaaaaaaaaaaaaaaaaaaaaaaaaaaaaaaaaaaaaaaaaaaaaaaaaaaaaaaaaaaaagggcggtctcaattaaaaaacaattcattggtcgcctttaaacaaacttaatgtcttttttatggcggtaattaaataaacattgtgaccgggaaaaaaacaccgtttttgaaaggtaaaaccctttcagaacacttactgaattgtcagcaattacaatcatggaaaagcccctgtatgatcaaattaaaaagccct

SEQ ID NO: 60438 - DNA, 716 bp, Zea mays
  unsure (1)..(716): unsure at all n locations
  Clone ID: MRT4577_155120C.1
ccnggcccgggcccgggattcttgttactaaagtatattccgcctccctgtgtgtgtttccagttatatagttatacaattgcctgtcatggtatgctccgactatgagatgataatgataactgatggcgatgtcgtgtcctcccctggacacctggcgcgtttttggcataccaccgtgctgtgtattatagggtgcgtgactgacgataccatgttagccatgagccctgctgtgttgagacaccatccatctataatcttatctataccccaccttttgtggacaaaatcaacattaaaaggcccctaggtgacctgcgacatccagactctttatctacctttatctgtatcctaatgatgcacaacttggcgtaatacatagcaatactagatctatcctgtagagaaattgtaatcagatcaccattccacacaatattcgacccgcaacaataaatcgtaaactctgcacgtgactaatgatcagagataactcacataaattgcacctgcgatcaatggacgtttttgtcaacataaaccagcctggcctactgccttaatgaatcctcctaacaccggaaaacaagaagactcttatatgagcgctcttccggttactcactcacttactccctattctcattacataccctatagcaagatactttagcatcatcagaggcgagaatacgaatatcacagaatca

SEQ ID NO: 60439 - DNA, 363 bp, Zea mays
  Clone ID: MRT4577_155121C.1
ggtacagaatttttatttgtagggttttttcacctttttttcggtgagatcaccggctagttattttttttcggaaaaaaaaacgataacaccacgtttttttaccattaaaaaaaacccaacaatgggaaaaaagtccgggactacaaaccccctagaaagacgggtaccaaaccataccaacatatgggaggatctggaaaaaaaaaagctttacaggtaggaaaaaaggaatccgccatcagatggcccccggccggcaaaaaagaagtggcggttaaaaaggtatcggggggctttttagggggggacccccgctggggggccccaaaaaaaagggctaaaacctgatttcccttccca

SEQ ID NO: 60440 - DNA, 200 bp, Zea mays
  Clone ID: MRT4577_155122C.1
cccttaccaaaatgccgcttaagctcagcaattccaaagatgagtgctaaaaggggcctttttcccggggcctgattctagaccaccaaccactttttttcctttggcaacaacggttatacaaccggaaaactcaattcacagagagaggggtccaagaaatcaaacatgccacccttatgaaatttaaccagggggcc

SEQ ID NO: 60441 - DNA, 565 bp, Zea mays
  unsure (1)..(565): unsure at all n locations
  Clone ID: MRT4577_155123C.1
ccccgcgtccgcccacgcgtccgcccacgcgtccgcggacgcgtggngaaaaaaaaaaaaaaaaaaaaaaaaaaaaaaaaaaaaaaaagaaagaaaagaatataaaagataaaaagaattaaaaaaaaagtgaatgcggacgtaatagttgatttttttgtgtcatccttttttcatttcttttgtggggcttttttttacattagtgattgtttaaatccctggcgttgcccatctttttccccttgttgaacttgctcttttttgcttttgccgtgttttttttgatgccctttcttttggtttttttcaacttttgtacagcctgattggtgattgttacgcccctttttgtggcgttttattccctttgggggtggtggtttcgccctgtttgaccgctttttttgtggggtttttagcggcggctgcttttgtttttttcccttttttttttgccatttttgccggttttttcccctttgttttttttttttggctcccttttttgcccctattccttgctttttggcgcctggttttcattaaactggttccttttggt

SEQ ID NO: 60442 - DNA, 2169 bp, Zea mays
  Clone ID: MRT4577_155124C.1
cgggacacgactgctgggcctcggatatctcgtcctctcgcatcgaggaagaacgtaacaacaatgcgatacctggtgagaatcgcatgaatcccgcgaaccatcgagtttttgaacgcaagctgcgcccgaagcctaaaaaaaaaaatgggaacctcgaggccggccgggaccctgcccaccccgaacaataaccaacagcttcaccctcctcctccagtgcaggccgtcggcggctggcggcgtcatttctcctccttcctctggcctgccctgccctgcccgcgcgataaccatctctcgcaactcctcttcgtactcctcgtctccaacgccggcaacaactacagagcttcagcttcccaagcgcgagacatgcgtgcggaaacacagacggcggagtagcgtagcgccacgatgggattgccaagctggtaggtagccaagaagacatgagatgggggcgtccttgggctccgccgccagcaagaaccggcagcaggagcacggcggcgaggctccgcgaccagatccctgcaagaagacgcggctctcgacccctctctgcactatccacggccactcgaggctgatcccggggctcccggatgaggtctctctgcagatcctcgcgaggatgccgcggatggggtacctcaaggccaagatggtctcgcggagctggaaggcggcggtgaccggcgcggagctgtaccggctgaggaaggagctcggcgtggccgaagagtggctgtacatactgacgaaggcggcggcaggtgggcagaagctggtctggcacgctctcgatccggttagcaaccaatggcagaggctgccgctcatgcctgggatcgagtgcaggagtggcggcgtgtacgggctgggcttgcgggacctggtgagcgtcggcgtaggtatcttcgacgtcatcagaggctggctcgggcagaaggaactgtcaggcggcgtaccaccgttctgtggctgcgccgtcggcgccgctggtggctgcctctatgtcctgggcggcttctccggagcttccgcgtcgaagcgcgtgtggaggtacgacccctccgccaactcatggcgggaggtgagcccgatgcgcgccgggcgcgccttctgcaaggcgagcctgctgaacgacaagctgtacgtcgtgggcggcgtcagcaagggcgagaacgggctaatagctccgctccggtccgccgaggtgttcgacccggcgactggggcctgggccgagctgccggacatgctgttctccaagtcgcaggccatgccgacggccatagctgacctgctcaagcccgtcgccgccggagtgacctcgtatggggggaagctgcacgttccccagagcttctattcctggccattcgccgtcgacgtcggcggagaggtgttcgatccggagacgaactcgtgggagcagatgcctgcgggcatgggcgagggctggcctgcgaggcaggctgggacgaggctgagcgccgttgtggaaggggatctgtatgccctggagccggcgacctcctcttccggcggttgtgagatcaagatgtacgacgcgcaggaggatgcttggaaggtcgctgtgagccaggttcgtgctggggcatttgacgagtcggacagcccttgcttgcttgctgcgtttcttggaaagctccatttggtcgtcaaggatatgggcagcaggatcagtgtcgtgcagatggactctctgatgaagccagtggattcgccagccctttcggctgccacgacatgccgaaccccggatgtctcctcggagcagacacatgtctggaaagccattgcatcgaagaacattgcagctgctgaacttgtcagctgtcaggttctcagcatctgagttcgtaaaatcgagcttctctggaacttctttgtgtaagtctgtgcagtagatgtgtttctgccacacatctgaacatcagagactatttctttctttcagcaatgcacaattgtttgtgcaatctgcgtaattgttatctgtgtatataacatcacatagaactgaataaggttgacgcagctttgtccaatcccaaaggcaacggcgccgactcaatcaatcaccggaccaatctgaaccctgttcattgttccaaaaaaaaaaaaaaaaaagcggcc

SEQ ID NO: 60443 - DNA, 830 bp, Zea mays
  unsure (1)..(830): unsure at all n locations
  Clone ID: MRT4577_155125C.1
cattgggtacctcgaggccggccgggaggctgtgcccccgaacataaacaacagcttcaccctcctcctccagtgcaggacgtcggcggctggcggcgtcatttctcctcctgccaccctgcccaccccgaacaataaacaacagctctcgcctcctcctctctgcaggccgtcggcggctggcggcgtcatttctcctccttcctctggcctgccctgccctgccctgcccgcgcgataaccatctctcgcaactcctcttcatactcctcgtctccaacgccggcaacaactacagagcttcagcttcccaagcgcgagacatgcgtgcggaaacacagacggcggagtagcgtagcgccacgatgggattgccaagctggtcagctcttccaaatccaaaagaattgatttttttcttgtcatgacgattggttctttcaatccttataggttaattactctatctattaaatttctggaggtgcaggtaggtagccaagaagacatgagatgggggcgtccttgggctccgccgccagcaaggaccggcagcaggagcacggcggcgaggctccgcgaccagatccctgcaagaagacgcggctctcgtcccctctctgcactatccacggtagccacggccacccgaggctgatcccagggctcccggatgaggtctctctgcagatcctcgcgaggatgccgcggatggngtacctcaaggccaagatggtctcgcggagctggaaggcggncggtgaccggcgcggagctgtaccggctgaggaaggagctcggcgtggccgaagagtggctgtacatactga

SEQ ID NO: 60444 - DNA, 722 bp, Zea mays
  Clone ID: MRT4577_155126C.1
cattgggtacctcgaggccggccgggttcagtaagcagaatgcaatcacttgaagaaagtgctgaattgctacgagagagatgtttaaagtttcacaaaggttgtcgaaaatacacggaaggactaggggaagcatatgatggagatattgcattcgcaagctcacttgaaacatttggaggggggcataatgatccaatcagtgtcgcatttggagggcctgtcatgaccaaatttacaattgctttaagagaaattggaacatacaaggaagtactgcgctcccaggttgagcacatgctaaatgacaagctgctccagtttgtggacattgatttacatgaaatgaaggatgctaggaaacgttttgacaaggctacccttctttatgaccaggcacgtgaaaagtatttatccttgaagaaaggtacaaggactgacgtagcaactgcagtagaggatgagcttcacagtgctaggtctttatttgagcaagctcgtttcaatctggtgactgcactttcaaatattgaggctaagaaaaggtttgaatttttggaggctgttagtgggacaatggatgctcatcttcgttatttcaaacaaggatatgaactactacatcagatggaaccgtatatcaatcaagttcttgcttttgcacaacaatcaagagaaaggtctaactatgagcaggctgctcttcttgagaggatgcaaga

SEQ ID NO: 60445 - DNA, 956 bp, Zea mays
  Clone ID: MRT4577_155127C.1
gactcatgacctaatcaccaagatccaatccctcccccttcgagcaagaacaggcgacaaggctggacctgctgccaattcacaagtgcagcagcagaagcttgtcgttgcacaatggctactactgctgctgcagcccccgacctctcgctgcatatcagccctccctcgccgcccgatgatgctaggagcagtgacatgctcttctccaagcagacgctgtgcctcggactcgttcagacgacgacggcggcggcggcgcatgatcaggatggccaatgcgacgacgtccagcagcagcagcggctgcaccagcctagccagatccagaggttcaagaaaacctcgtcatcgtcggcgccgttgttatctgccggaggaggcacgacgagatctgggaacggcaacagcgggggcgggaagaggagctccagagcgccgaggatgaggtggaccacggctcttcatgcacacttcgtccatgccgtagagctccttggcggccatgagagagcaacgccaaagtcagtgctggagctgatgaacgttaaggatctcacattggctcatgttaagagccacttgcagatgtatcgaacagtgaagggaacgacggcagacagatcatgtgctgcaggccatgtccagatgagagacatgggctttctgcacaggggttgtgaactgaatggcttcgaagcgtttagcaacggtacttctaatgctaccgccaataatagggatggaggaccagcagaggcgcgcatcagcaagacgctgccgcccccccgccgctcgtcctaggccagcaggacagtgcgcggcgtctgcatccaggcttccccgacacggccatcagcagcagcagaccgtcatcctggagcgcaggcgtggcaagccgctggtcgtcgacgacggcggcggcgccttcgccgtcaagtggcaggagtagcata

SEQ ID NO: 60446 - DNA, 1084 bp, Zea mays
  unsure (1)..(1084): unsure at all n locations
  Clone ID: MRT4577_155128C.1
cattgggtacctcgaggccggccgggatttattgttataactatgtagtgggtcataactcacggaagcgttatgatatgcaaacgctcatttctttttgtctggaatgcagcacaagcagactagtttgttcactgtgatttgctaacatgtttattgactatttgctgtcatactctagcacatacattctatcttgtatgttgccattacacattttttccattctgtctgttatatacatgtaaatgatcagccacatgatgctgaaaaacatgttaataatagacatatgggttgtaaccccaggaggtgttttgatatgcatagcactcatttctttttgtctggaatgcagcgtaagcagactagttattcactctgttttgctaatatgtttattgactatatgatgtcttagtctggcacatattctatcttgtatgtctccagtacgcatttcccatttgtttgtcatatacatgtaaatgatcagctacaaaatgatgcttaaaaacctgttaacaataaacatatgggttgtaacccaggaagtgtcatgacatgcatagcactcatttgtttttgtctggaatgcagcataaggaaaatagttgttcattatgtgtggaaacatgtttattgatacatttgctgaagtgtggccaacattacctatcttgtatatttccagtacgtttaccattctgcttttgttatacatgtaatttgtaaacactcagtaagaagtgttatgatatgcataacactcatttctttttgccttgaacactttgaatatattttttttatgcttatgtagcaaatgcattattatctgcttgtcttgaactcttgtatatttccagcatatgtttcatagtttatttgctatacatgtgttcattgagctaataaaccgttcaatttgtatgtaatattgaaggggccagatatttttgcctcatacctggcagtgttctaattgatattacttgtattaaaggcctgnagtaatatgcctgttaacattttttttgtacagacataaggatgcctgttaacattttttttgtgtgtgcag

SEQ ID NO: 60447 - DNA, 319 bp, Zea mays
  Clone ID: MRT4577_155129C.1
ccccaaagaaggacatgaaagaccaggcccggcaaaagggacaaaagacgccccggccaaaaaaaagcgggggccaaaaacgccagccggagggggggattacaaaaaaaaaaatgaaccaaaaggacccgcacccccgggggcaaaagcaaaaaggggccggcgcccccaaaaaaaagcacccgggggtaccagcgaaccggggcccaaagggggaaaccgggaggggggagcagtccatttacaacggggcaacgggggccgccgaattcacttgaagaacccgagggcccacgcctcgggggaaaaacagggggcc

SEQ ID NO: 60448 - DNA, 275 bp, Zea mays
  Clone ID: MRT4577_15512C.1
gccgagctctacacccagttcattgtaggcggggccaggccaccagcggaactctacgccgaccgagcccaggcgcacatcaagctgggcagttacactgaggctgtagctgatgccaacaaagcaattgaacttgatccttcgatgcataaagcataccttcggaagggctctgcttgcatcaagctggaggaataccaaactgcaaaggctgctcttgaagtgggttcttcatatgcatctggtgactcgaggtttactcgcctgatgaagga

SEQ ID NO: 60449 - DNA, 304 bp, Zea mays
  Clone ID: MRT4577_155130C.1
tctcggcggtgccaggcatggaagaatccccccaccgaaaaaaagcaagcggacatacaaagagcgcgtgcactgcgcttggaataggaggatccaacttcgaaggggttcgaggactggggtggggcatatgagggacgggcaggacgaggagggataggagcatgacggtaagggagaagggtctttggatcgtagggggtggagtcaggacctgctacagctccagtgatatcctttccgaacaaagatgatcacgggggagtgcctagggggagaaagtgactacgcgcaggcagaacct

SEQ ID NO: 60450 - DNA, 1177 bp, Zea mays
  Clone ID: MRT4577_155131C.1
agctgatgaacgttaaggatctcacattggctcatgttaagagccacttgcagatgtatcgaacagtgaagggaacgacggcagacagatcatgtgctgcaggccatgtccagatgagagacatgggctttctgcacaggggttgtgaactgaatggcttcgaagcgtttagcaacggtacttctaatgctaccgccaataatagaatgcaggcagctgccgggtcgccggcagggaagcatgctgaggtagcctggttcttgcggccacccttggcacaccagagtagtggtggtggtggtggtggtggtggggcggtgccgcttccgctgccgctgccctgcccctacctcatgtctgcccaccacaaccgctacttgctctcacagaatcagggatggaggaccagaggcgcgcatcagcaagacgctgccgcccccccgccgctcgtcctaggccagcaggacagtgcgcggcgtctgcatccaggcttccccgacacggccatcagcagcagcagaccgtcatcctggagcgcaggtgtggcaagccgctggtcgtcgacggcggcggcggcgccttcgccgtcaagtggcaggagtagcatcagcagcggcacggaacagccagcagcatgcagctggacgatgatgacgacgaacaagcagaagcagcagcagcagccgccgtcgacgtcatcatcatcaagggtcgtcgcggtaccgaacctggagatgagcctggggaggcaggggtggcaacacgacctgcaggatcaccatccgcagcagcagcagcagcagcgcagcggggagtccacggcgccaaaagagctgaccctcctcaagtgcttgtgaaataataatgatagctaatacttgatcggctaataatcacttatataattccaccgtcgagatgagcttgcgagaggtgttcaaggcttggaagcaaattatcgaccgcgacgttagctagagacgacgttgtactcgtttggtgctaccggcttcacgtacgtagttgttttctactcctcccatctatatccattattagctatatatttagcttcattttctggtatatgcatgtaatttgagctgatgtggagacgacgactgttagaaataaacgagctacctttctcaatatatatacggtgactaattttttt

SEQ ID NO: 60451 - DNA, 618 bp, Zea mays
  unsure (1)..(618): unsure at all n locations
  Clone ID: MRT4577_155132C.1
cgatcccanaatccganagagagagctccacaggccaggtccccatcgccgcggcgcctgccccccctgctcccgcccggtagtagcctcgccgccgccgctgccgagatggggttcgtctccttcgtcgggagggtgctcttcgtcgccgcgttcctcctctccgcctaccaggagtttaatgaattcggtactgatggtgggccagcagctaaggcgctccagcccaagttcaatgtgtttgtcaaaaacatctctgctcaactaggagtagctgtgccgcacattgagctgaagcatgtgattgctgctacaattggtcttaagggtcttggaagtctcctttttattttgagcagctctctcggtgcttatctcctgttgttttaccttgctttgatcactcctatcattcatgacttctacaactacgatatggagaaggcagaatttgcgcagctctttgggaagttcacccaggatgtggctctgattggagctctcctcttctttctgggcatgaagaactccatcccgaagcggcagggcaagaagaaggctgccaaggcgaagacgaactaaggctctttagatagttgcacgccacaggcggtgtcg

SEQ ID NO: 60452 - DNA, 213 bp, Zea mays
  Clone ID: MRT4577_155133C.1
ggcctggcagtttcagacaggtagaccaacaaggagctggtgatgttaatgtaggacatgctcaaagttcaaatgctagtttagctccaatggtgcctcctccaccacaagcttctgcatctcctgatctcacattgaagctttaagtttaaggcttaagaaaatgacgatacatacacaagcaaaggccttcacaaagtaataaataagtgg

SEQ ID NO: 60453 - DNA, 151 bp, Zea mays
  unsure (1)..(151): unsure at all n locations
  Clone ID: MRT4577_155134C.1
tnncccgtacgcntncgtnnnctcggaattcggctcgngnntcaagtnacatatacnntggtntncngtggnaanaatancgnggcattcngngncnaagtatanttgccggtccttatctntcctcatctggagctncatgtgtacncta

SEQ ID NO: 60454 - DNA, 142 bp, Zea mays
  unsure (1)..(142): unsure at all n locations
  Clone ID: MRT4577_155135C.1
cggagcacgcaccagctaccggatcccctttcgtaacttcgcctgcaacaacagcagctgccgtcaccgncgtcgcacgcgattgctcgccaggatcggcgccagaggaaagcgccgtggatcggtaccaagggggggagaa

SEQ ID NO: 60455 - DNA, 364 bp, Zea mays
  Clone ID: MRT4577_155136C.1
ggtttggtttttttttttttttattttaaaattgatgtttttgagatggttaaagataataatagtgtcaaaattaaggtgtttttgatgggaagggggtttaaacgggcgcgtgggtttttcccagaaaaaagggaggggttcaagggggggagaaggtaaaagtagagagagtagggtgggaactggggggaagggtggtaaaagggggggggggggagaaatggaaattcgggaacaagtccatagaggatacaagctggaaaaataaagggggaagaaaggggtggggaataagggaggtaaaggatattaaggggggaaaggggaatgcccggaaataagcaaaaaaaaaaaggggggg

SEQ ID NO: 60456 - DNA, 173 bp, Zea mays
  unsure (1)..(173): unsure at all n locations
  Clone ID: MRT4577_155137C.1
caccctagcttgcttgtttcctgccggcggtgtgccagagttggtctccncctcttcgctactcgccttatgctgccaccacacctgatcaacgccgtggcactgaagcactcctgagggtggcacacggcacgcacgcacgagccagccgctagtgaccccactccgccgct

SEQ ID NO: 60457 - DNA, 247 bp, Zea mays
  Clone ID: MRT4577_155138C.1
cggacgcgtggggcattattctttttttgttctcagcccatgtaggaggaggattggatccgggcccactggtcatgggactgaatggcgtcttcctcctcccttcgtaactttccagacccgaccgcattagcccggggcaacattgcgaaccgacggcggcaatggggatcggtgagcacttcaagggcgtcaagctacactgggcgagcaacattgcctttctcgactacttcaagaaggtcta

SEQ ID NO: 60458 - DNA, 1746 bp, Zea mays
  Clone ID: MRT4577_155139C.1
ccggccggggaatagatagaaaaaaaaaaaaaaaaaaaaaagattgcgtccaataggatttgaacctataccaaaggtttagaagacctctgtcctatccattagacaatggacgctaaaggtatacagcagctagcagaagcagcatcacgatcccggcccggcggcgcgtacgtcgacgaggaggaggaggacacgtacgtgcccagaaaggcagagctagctgctggcaccatggctcccgtgagcatcagcgctgttccgttcctcccgacggcggcggagggggagacgaagctgcgcgcgtcgttcgtgcgcgaggaggacgagcgccccaaggtgccgcacgaccgcttcagcgacgaggtgccggtggtgtcgctcgagggcatcgacggcgcgcggcgggccgagatccgcgcgcgcgtggccgcggcctgcgaggactggggcatcttccaggtggtggaccacggcgtggacgccgcgctcgtggccgacatggcgcgcctcgcgcgcgacttcttcgcgctcccgcccgaggacaagctccgcttcgacatgtccggcgggaagaagggcggcttcatcgtctccagccacctccagggggaggcggtgcaggactggcgtgagatcgtgacctacttctcgtacccggtgaaggcccgcgactactcccggtggcctgacaagccggcggcgtggcgggcggtggtggagcggtacagcgagcagctgatggcgctggcgtgcaggctcctgggcgtgctctcggaggccatgggcctggacacggaggcgctggccagggcctgcgtggacatggaccagaaggtggtggtcaacttctacccgaggtgcccgcagccggacctcacgctggggctcaagcgccacaccgaccccggcaccatcacgctgctgctgcaggacctcgtcggcggcctccaggccacgcgcgacggcggccggacctggatcaccgtgcagcccgtggagggcgccttcgtcgtcaacctcggcgaccacggccacctcctgagcaacggcaggttcaagaacgcggaccaccaggcggtggtgaactcggagtgcagccgcctgtccatcgccacgttccagaacccggcgcccgacgcgacggtgtacccgctggccgtgcgcgacggggaggcgcccatactggaccatcccatcaccttcgccgagatgtaccgccgcaagatggcccgcgacatcgagctcgccaggctcaagaagcaggccaaggccgacaagagtgccaacaaggagttcgccgactccaagcctctcgacgccattcttgcctgatatggtagggggcgcgcgactaccgtaccgatccgttgctattgctgcgtgtgatttcatcatctataagaacatatatagctacgtgcgaccgtgtggtgattaattaaggtctgaataaaataatggccgcacaaaactaggaagcgatcgatcaccccagataaatgtatgtgcgttcccttttctttcaagatgtgtaatttttcaacgtgcggttccagatatgcatggactggaccggagtgcattgtaattcttttgtttcccctgttgaatatgcaagaggtgtgcatgtctttgtatgaacgaacgaactagacacacttgtatctgctcccttcgttcaataaatatacgacgccgccgttgatttttttttttcaaaaactcgaaaaaaaaaaaaaaaaa

SEQ ID NO: 60459 - DNA, 293 bp, Zea mays
  Clone ID: MRT4577_15513C.1
ggggttggggtttttttttttgggtgttttttttttttgaggacaaagcccaggctttaacttgggttttccaatagataatggtttacattttgtccataaaacaaagccgaactggggggggctcactgcaacaaaaaggggggaaacggttctgaaccacccttggggtcaccataggggccgcaaagacaaaacacaggaatccttttggatttggggttatgcagttcacattccatttcattttttactgggaaggaatgggtgtattttttggtggtggaataccc

SEQ ID NO: 60460 - DNA, 862 bp, Zea mays
  unsure (1)..(862): unsure at all n locations
  Clone ID: MRT4577_155140C.1
gcccgggcccgtnagcacttagcccccaacaacaacaacagcaccaacttccactcctgcaaacccaacccaacccaacccaccaccgagcacaagaaaaaggagagccatcggcggcggcagaccatcgtctaaagagatagtgaggcagcaacgatggggaggtcgccgtgctgcgagaaggcgcacaccaacaagggcgcctggaccaaggaggaggacgaccggctgatcgcctacatcaaggcgcacggcgaggggtgctggcgctccctgcccaaggccgcggggctgctccgctgcggcaagagctgccgcctccgctggatcaactacctccgccccgacctcaagcgcggcaacttcagcgacgaggaggacgagctcatcatcaagctccacagcctcctgggcaacaaatggtctctgatagcagggagactgccggggaggacggacaacgagatcaagaactactggaacacgcacatcaggaggaagctgacgagccgggggatcgacccggtgacccaccgggcgatcaacagcgaccacgccgcgtccaacatcaccatatccttcgaggctgcggcgcagagggacgacaagggcgccgtgttccggcgagacgccgagcccaccaaggcagcggcagcggcgatcacccacgtcgaccaccatcaccgtagcaacccccaccaccagatggactgnnggccagggaagccgctcaagtgcccggacctgaacctggacctgtgcatcagccccccgtcccacgagggacccatggtggacaccaagcccgtcgtgaaagaggaggccggcgccggcggtcggcgtcgtgggcctctgcttcagc

SEQ ID NO: 60461 - DNA, 399 bp, Zea mays
  Clone ID: MRT4577_155141C.1
tccactcgtgcgataaccctttcacagactctttttcacaacccttgctacacacctatcgttggtaacttaccttgctctgtccaatcttcttaccactaactatcaatattctatatttactattgcaaccaacacgtggttacctacacatcttctactacctatcaacccatttgtttcctattctcctgctcttgctcacctatgcagccctactttcatacaacttaccattctttatgattactttgttcaagaaccattacactatctaaatcaatgtttgctcaatcacttaaatcaataccatgcaatgatcgaacaacatcatacttgtagatcgaaattaaaacgacatggaacctgaaatcttcataatcgatctctattttatac

SEQ ID NO: 60462 - DNA, 2744 bp, Zea mays
  unsure (1)..(2744): unsure at all n locations
  Clone ID: MRT4577_155142C.1
caccgacgcattcgttcgtaggctgggaattcntttcnagtgctgattgcagatctccaggtgggatatacttgcacgggcacagaaggatccagatctattcaagcctacaatgacctttaactcattgtgtttgttcagtgtcttctatcttgaagtagataatgatcggggcctttattgcaggtcttctcatatttttggatgagcttgtcacgtggaatatgtgttgagtaaacttatctaatttacaaaatgctagtatacgaaccatgataaaattcagataattcttatttaatctgcagtgatagaagacactgggcatgtttgggatgtgggagatttaagcagatatgggtagaactacagtactacagtctacaactttcatttaatcgaacttgtttctgcttcaactgaagctttaattcttgtgctgttggaatttctgttctgcagatcatttagctcaaataattggtagtccaacggtcacgatacttgttatggttagggatttctgtgcttttgtctactttatctatgttgttgtggttggctggttgcttttacatgtggttgtatggtaagtttggcaattggaaatccctgtagcgaaaaactgggccctggtcagaagtcattctggttgtgttggtttcatcacttgcttccagtgatttcagatctgaatggttggctaacattctgccctctatggatattgctggtatagcagtagtgaagcacaagatctggatctatttggtactgtatatcaaatgatcatagtatgtggttgtgtcctttatgtaccaagactatgtatcctcttaatgtatcgctcttggtaaccttttaatataaagcttcctttatcgatgcanaatgaaaggtgggctggttttgtcctcctagatgcggaaggaaaggtctgctggttatggagagatcggttgaagggtggagatttgtttacgttcgttggttttgttttgttacatggatattcttatgtcaatcatgggggtgtgaagatagccacctgattaattagaagcttgatgattgtccttgattggaaaaatgatgtagaggcaacataggtgatgttttggacgtagattgaagctttgactgaactaacttcatggcatgctctcttttattggtactcttaaatttcttgtttcttatttctgggcgggtgttcttctccagcaactggattacagcaactggattgcatatggatggatttggggcctgatttggattctgcttctgcgtcagcaataataattctgaactattcagggttccctgtgtttgttcaataactaacctaccctgtcaaatgttctttgaaaatttagttccctcataaactatctacaatgattcgattgtaatctgcagttttggaggcatcgcaatggagataggactttgcagttgaacttgttggcggagaattggacttcctatctcttcttgttttttaagtttgggctggtgtttctctccaacaactggagttacaacaggttggtcttgctgattgtagatctctaggtgggatacttgcatgggcacagaaggatccagattaatacaacaacctttaacctattctgtttgttcagtgtcttctacctggaagtagataatgattgtggtcattgttgcaggccttctcatattttagcatgggcttgtcacacggagtatgtgtggggagtactaaactttgtgtttgttcagtgtctactacctggaagtagataatgattggggtcattgttgcaggccttctcatatttttgcatgggcttgtcacacggaatatgtgtggggagtactaaacttatctaatttacaaaacgcctatgagttgttttgtgcttcaacaatctaaattacaagggtgcttctaattcatttctgtcaacagtcctatccagtttctttcttcaaccagtagctctttgtgctgcaacaatctaaattacaaggatgcttctaatccttcatttctgccaacagtcctatccagttactttcttcaaccagtctttcaagtttgtgcagatgtggcacacagaagctgagatagaatctccaaccatcggtgctgtcttcaaagcccatcactgttccattggccatttatttgatttgccttggatttgaaggttttttaaggctatcactgaaccaaaatagacaaaccatagatggtctctttggaaaatgtagatttagcacttgaaattttaaagttcagtctgatcctgatcataatatgtgcctatcttccgaactctactacctccaattttgctagccagagaactttcagatagtgtgcattgaagttcaagcttgattacttgtactgatctgctgtttcggatgctttggatgctccatgctagttatataatccacatgatcacaaccaagacgatacattgttcagagattgcactaactactgttcctgaatattgactgcatatcactttccatttcacttgtgatttggattgttggtggtttgcttggtttccagttatttgaaagcattaatgcttggatgttaggagtgatgaggcactcattacgatactcttcaatctaaccatttatattggatccacttggagctaaggttaggttactcctttgcactacctttattttgaagctgtccttgntaatctgcatggctcatctga

SEQ ID NO: 60463 - DNA, 528 bp, Zea mays
  Clone ID: MRT4577_155143C.1
ggactgggtagtcacctccgtgtcccattgaacctgtggcaccggtgagggaggctaacgaggctgatgttacttggcagaccagagaagggactttgctcccataaagatgtgatatgaccttgagcataaaaagtgggtcactgccaacaagaagtgtttggctgtgataaagaacacaattgtgcctacaatagtgggcttagtcccagagtgtgagcctgtcacagagtaccttgacaaaataaatagtcagttcactggctcttcaaaaacatatgctacccagttgataaagcagctgatgacagagaggtactctggaggtggcagtggcataagagagcacatactaaggatgagcaatatggcatcaagctaaaaccaatggatctggctctcaaggatgagtttcttatccatataatttttgcttccttggcaaaggaatttgatacttttgttgttaactataacatacagcccgagaagtgggacttagagaagctcatagctatgtgtgtgtag

SEQ ID NO: 60464 - DNA, 307 bp, Zea mays
  Clone ID: MRT4577_155144C.1
cttccccggaagtgcttccgagaataagttttcttatctgattgtctaaaacctataacgggtgtatcgtagtggttgttatcgttaaacttttaacggtcattctatttcaaaagttttgcattttgcactcaaaaaaaaaaaaaaaaaaaaaaaaaaaaaaaaaaaaaaaaaaaaaaaaaaaaaaaaaaaaaaaaaaaaaaaaaaaaaaaaaaaaaaaaaaaaaggggcggcacccacaaaattttaaaacccggtccttctagagttaccagtttccctttttgggggcgtttttaaagttggg

SEQ ID NO: 60465 - DNA, 290 bp, Zea mays
  Clone ID: MRT4577_155145C.1
ctcaccaaaattggaaaagcttaactgtaaaaggcagaggttttctggggttaaagatagccccagtgccagttaaggaacccagttaaagattggtccggtttgagtaaaaaaagccgaggtttcacggaagctttccccaagcctaaaaaaggtctttttttattaaagagaacatggaaagatctgcaaaagagggatttgttcctttacaacccaaaccctttttttaaaagctggccccgtttccaggacctgtgtaagcaggtttaaattccgtgttaaccctg

SEQ ID NO: 60466 - DNA, 353 bp, Zea mays
  Clone ID: MRT4577_155146C.1
tcgtaggcttctccttacttccacaggaagtgtacaaacctggaggggaaccatcagggtgggggtcttagccgtccatctccttcctttcccctcgagtccgcacgtacacgcacacgtcggacgctatcgttgacagccacacgcagcaggtataggtaaaaggagcctcgcatgcgtcacccccttgctatctgtcaccttcggcgcatcagctacaatccctccagcttgtcgaacctaaccaaccgccagagaatgcacatttttgcacacatgattgttttagggcagcatggacccactacacatctcaacacccaaagcctgatgcacattcttaccaacactca

SEQ ID NO: 60467 - DNA, 316 bp, Zea mays
  Clone ID: MRT4577_155147C.1
taataatttttctttttttttttttttttttttgggtgttttttttttttttttcctggaaaacccacaacggcgccctgatttttttttgcaaagcaaaaagacaatttcaaaagggcataaacctataacccttacgaaatttacaagggcacgctgaaaatgtttgcaaagcaaactgtcatgaaaaggaccaaaaaggggatggccccaattaaagaatttaaagaggtcaaaattaacggggttgctaaaacaaaattggagccaaagccccgcggagaaaaaatgtgggaggttacaaccaccttaatgg

SEQ ID NO: 60468 - DNA, 244 bp, Zea mays
  Clone ID: MRT4577_155148C.1
agtgaatcaatttccatgtctgaatattatcgaccaaagaaactgcgttcacaaattctatacttatcactagcgttccttcttggacccacaacacaacaatgtttcacacacagctggtggatcgttatacccaaatcgattctctagcagcaaatttatgtgatgttgtgacacatatacctactgtcgataaagttgccatagccaatgcaaatcttcaacacccataactccatcttca

SEQ ID NO: 60469 - DNA, 587 bp, Zea mays
  Clone ID: MRT4577_155149C.1
gcaccggcagcgctccacaggcccaacctgccgtccacggcgcgaaagaagagccgcgaacccgggagtcctgcctgtcctcgtcctcctcccccttgccatccgccgcccatggcgtccgcgtccgcccccgaagtggtggtggtcttcgacttcgaccggaccatcatcgactgggacagcgacgactgggtcatcaccaagctcggcgccgccgacgccttccagcgcctgcgcccaaccatgcgctggaacccgctcatggacaggatgatggcggagctccacgccagggggaagacgcccgaggacatccgcgactgcctcaggagcgcgccgctcgacacgcacgtcgtttccgcagtcaagacggcggcggcgctggggtgtgacttgaaggtggtgagcgacgccaacaccttcttcatcgagaccgtcctggcgcaccacggcgtgctcggctgcttctccgagatcgtcaccaatccggcgagcgtcgacgcggacggcaggctcaggatctcgccgttccacgaccccgcgtccgcgccgcacggttgcagcctctgccctgacaacatgtgcaa

SEQ ID NO: 60470 - DNA, 225 bp, Zea mays
  Clone ID: MRT4577_15514C.1
tgatgatctcccccgaggacccgtgcaagtgcttcgtcaagcgcgtaatccggatgcacgggtactccgtcacctaccttgtcgaccccggcataagcgactgcttcttcagaaccgctgttgtaccgcaagatcatgtctgggtgcacggcgataatatctttgcttctcatgattccaggcgatttggatccccgccttattggctgattacacggaaaatat

SEQ ID NO: 60471 - DNA, 764 bp, Zea mays
  Clone ID: MRT4577_155150C.1
tccgggacggcaccggcagcgctccacagggccaccgggacgtcctcgacgccggccggaccggcagcgctccacaggcccaacctgccgtccacggcgcgaaagaagagccgcgaacccgggagtcctgcctgtcctcgtcctcctcccccttgccatccgccgcccatggcgtccgcgtccgcccccgccgtggtggtggtcttcgacttcgaccggaccatcatcgactgggacagcgacgactgggtcatcaccaagctcggcgccgccgacgccttccagcgcctgcgcccaaccatgcgctggaacccgctcatggacaggatgatggcggagctccacgccagggggaagacgcccgaggacatccgcgactgcctcaggagcgcgccgctcgacacgcacgtcgtttccgcagtgaagacggcggcggcgctggggtacgcaccaccacaccatgccgaccacgttctcacctgccgctgcagcacttgcgtttgggaccgaccgaccgatgttctttgatgctggcaatggcatggctgctgctgctcccgtttgcaggtgtgacttgaaggtggtgagcgacgccaacaccttcttcatcgagaccgtcctggcgcaccacggcgtgctcggctgcttctccgagatcgtcacaatccggcgagcgtcgacgcggacggcaggctcaggatctcgccgttccacgaccccgcgtccgcggccgcacggttgcagcctctgccctgacaacatgt

SEQ ID NO: 60472 - DNA, 555 bp, Zea mays
  Clone ID: MRT4577_155151C.1
aaaaaacctaggagagagtcgccgcgcaggactcaccagactgtctctcgtcatggcggcctccttccagatgacgaccttctactgcgccgactgcgacagaagtgagcacccagtggacaggctcggcgtactccacccattttaccgctccgctgagatgcagtttcaccgatggaagggacacctgtgaacactgccaactaccactgacttccctgcttattctactgactggcactacttcaagcactgtgtcctggagcgagagaagatctagtagaaaagattcataggaactcccagaggttgcccaacacttatggaagacgcggcagatgaaagtgttactaccacctcactgtctgctttgagtggtaggcgacattacagcgacgtccgcacaccagactgtctatacggtgatcatggctgtcgaaaccacactaggaacgagcataactgcttagagagctggtgagcaggacccaccgtctgcccttctagctgcatggcgctagaggagcacatgtactgctagtatcatcacatgca

SEQ ID NO: 60473 - DNA, 1287 bp, Zea mays
  Clone ID: MRT4577_155152C.1
ttgggtacggcgaggcgcgatactgcagtctccgcgccattccggccgggcgtccagacgtccaccctttctcgcttctcagaccatcgtcaccatccctcccctcggcctcgcgttcgcagcggtcagcgcctccgagatggagctccacctctgcctccgtctccacgtgcgcctcactcctgccgcgaagccaccgccggcgcccgcggtgcttccagttccagcctcccgccgccttcggatgggtggaagctacggggttgctcttaggcggcacacaaggcgttcgaatcgggcaatccacacttccctagccgacggcgagcagggtgtcgctgtcgacgctgtgaaggagaggagcgtctcggtgatcctgttgtctggaggccagggaaagagaatgggggcaagtatgccaaagcagtatctacctctactgggactaccaattgcattgcacagtttaaaaacattctgtcaactgaaggaagtcaaagaagtcgtggtggtgtgtgatccagactacattgatgtatttgaaggttctattaagaacttgcaactacctcttaaatttgcacgcccgggaaaagagagacaggactccgtttttaatggacttcaggaaattgatggggattcggaactagtttgtgtccatgattctgcaaggcccttagtttcttctgaagatgtaaaaaaggtcttagaagatgctgcagtacatggagcagctgttcttggtgtgcctgttaaagctacaataaaggaggccaatagtgattcttttgtcatgaaaactcttgaccggaaaactctatgggaaatgcaaactccacaggtcatgaagccaaatttactcaaagatggttttgagcttgttaaacgggataaccatgaagtcactgatgatgtatccattgtagaatatctaaaacaccctgtgtatatcacggaaggctcctatacaaacattaaggtcactacgcctgatgacttgctactagctgagcgcctgatgaatgagaaatagagctgacatgcaaaattaactgtttgcttgattttatagacatacgattttgtagcagtacagcattcacccgcacttctacaggttttgaaaaccctcatgcacgagataactgactgctttgtaaactttctgtcattctttctagatatatcaataaaaaatggaacaattgtataaaaaaaaaaaaaaaaaagcggccgagattaaattatagctgactgctttgtactttctgtcattctttctag

SEQ ID NO: 60474 - DNA, 393 bp, Zea mays
  Clone ID: MRT4577_155153C.1
ccggccgagctctgcgaacccacccctctcgtgccgagctccgcgtttccccacccgccatcccgcccttcgtgtttccctgcccactctacctctcgcctatcatgccgccccgccatctgcttccgtcgcaagggaaccgatgatctcgatggatccacccgccatcctgcccgcgtttccccgcaaaacaaatacccctagcaccctccacaccggcggccttgttgggtcctactcctcctcggctgtgcctgctggggtagcggcggtaggaactaggtaaggggagggaagggggtgtatgaggtagagcagaaccgtagcggtgacgccatcacacacggatctggaccaccagatctcgcagctacaggattgcaagtccatgcc

SEQ ID NO: 60475 - DNA, 434 bp, Zea mays
  Clone ID: MRT4577_155154C.1
ggaaggggagccattgggggaactttttttatatatatttaaaaaaaaggaaaggggggggcaaaaaggtttcccacctcaaaaaaaaaaaaaagacccaaacaaaaacaaggggcccgtttaattaccatttactaacccaagagggtttgaaaaaaaaaaatttaaaaagggccccttcagaggccaccaccaacacaaagcaaatgggtcccacttaaacggggtttttttggcaaaaaccgcccaaagcttggggtcaccggcactggccagggtactggccaaaaacaaaacggtgaaaaacttaaaattaaaccgggccgttaattttttcccccccgacaaactggaagggaacaaactgggcaaaaattaatctgggggtttgaaaactggaccagaaaacctttaacaaacgggtcttttaaaaa

SEQ ID NO: 60476 - DNA, 1298 bp, Zea mays
  Clone ID: MRT4577_155155C.1
gcgctgcgaacctcgaggccggccgggaccatcaccatccctcccctcggcctcgcggtcgcagcggtcagagcctccgagatggagctccgcctctgcctccgtctccacgcgcgcctccctcctgccacgacgccaccgcctttccaggcggccgcggtgctcccggcctcccgccgccttcggacgggtggtagctacggggttgctcttaggcggcacacgaggcgttcgagtccggcaatctgcgcttcaataaccgacggcgagcagggcgtggctgtgaaggagaggagcgtctcggtgatcctcttgtccggagggcagggaaagagaatgggggcgaatatgccaaagcagtatctacctctactaggactaccaattgcattgtacagtttaaaaacattctgtcaactgaaggaagtcaaagaagttgtggtagtgtgtgatccagactacagtgatgtatttgaaggttctattgacaacttgcaaataccccttaaatttgcacgcccgggaaaagagagacaagactctgtttttaatggacttcaggaaattgatggggattcagaactagtttgtgtccatgattctgcaaggcccttagtttcttctgaagatgtaaaaaaggtcttagaagatgctgcagtacatggagcagctgttcttggtgtgcctgttaaagctacaataaaggaggccaatagtgattcttttgtcatcaaaactcttgaccggaaaactctctgggaaatgcaaactccacaggttatgaagccaaatttactcaaagatggttttgagcttgttaaacggttagctttagctcttagctctgagcaaatgaaatttatgatactgttatacttggttttgagcttgttaaacgggataaccatgaagtcactgatgatgtatccattgtagaatatctaaaacaccctgtctatatcacggaaggctcttatacaaacattaaggtcactactcctgatgacttgctactggctgagcgcctgatgaatgagaaatagagctgacaggcaaaattaactgtttgcctgattgtatagacatacgattttgtagcagtacggcattcacccgcacttctacaggttttgaaaaccaaaatagttatggaactcatgcacgagattaaattatagctgactgctttgtaaactttctgtcattctttctagatatatcaattaaattatagctgactgctttgtaaactttctgtcattctttctaaatatatcaattaaatgggacaattgtat

SEQ ID NO: 60477 - DNA, 439 bp, Zea mays
  unsure (1)..(439): unsure at all n locations
  Clone ID: MRT4577_155156C.1
agcacanccgacgggagtgcaagacgccactcgggttggatgacgttgctccaccttctcaccgtcgacagggcggcacccagagacgttcgaccagtccgtggcggcgatgatcaagctgatgaccgacggcagtgccagcatcacacggttcaactacgccgccgtcatagaggccgccttcgggttcgcggcgctcaagatcagcccgctggacgtcagcacaaagatcctggagctcatggccgagtccgtgaactggctgatccagtggcacaagtccggctactccgaccctggaaacagcggcggcttcagcggcagctcttcgtcccagacgtcggtggaagatgcgtcgcggatgggcaacctggcagtcaacatgttcatcaagctcgcggaggcgctgcgcaagacgagcctagtccggcgcgaggag

SEQ ID NO: 60478 - DNA, 377 bp, Zea mays
  Clone ID: MRT4577_155157C.1
aataaaaatcttctccctctctacctgcactctattaaaatacttgccatccacaatcaccttaccaaacaccaactctccttgaacaccgataattaaaataaacctcataattatcttccccataatcaattacactatcaatgcctatatcaattaaccaacatttatcctgtcaattttttctcataaattactatcatcttatacaaatctatcttcatccaattactatttatcttatcaactacataatgaaaaactattactttttacttatttaaaaaaaaataaaaaaattccctcctttctatataatccaaccttacttactcgtccattcaacaatatacctccttctatattatcatcctaaa

SEQ ID NO: 60479 - DNA, 381 bp, Zea mays
  Clone ID: MRT4577_155158C.1
tgtaccatggccttaaacaaccttcattccggagtaatcgaactaaggaacgaaggtcttgagaaagataaaatattaaactcattgctaaataaaataaaagaagacgaagctacttccaaagcccaagctgaagcccagaagtgcgaaattgaagatcttcagaaacagctagctgaagcgaagttaaagtgtgcaattgccgaagctgaccaagacgccagtaactattagaaaaattattgggagaagacagttgtagaactccggtcttcaaaagagaaatgctacgaaaaatccatagaatgtgtgcaaaaaaataaaatctagcttcgccaatgttggcgcattctctagcgaggataatttcgtaaggggcga

SEQ ID NO: 60480 - DNA, 354 bp, Zea mays
  Clone ID: MRT4577_155159C.1
aggatatattcaattgaaatgggctcactattgtgctaggcaattgaaagtaaaaagtataaagctgcattttgcgctctcagtgaggtttaagtcagggaaatgaggcatgcacacaaaataacgagaaagtagtataatagctgtgatcattagttatcaaaataagtgaatgagctaataaacattgttagaataataattgtgttcttagatctcagatgctttaatgaaaaatgttatcttgaggtcaactttgacaaatggggagataactgaaaaacatctgacattctaggtagggaaaacagaagcaaatgcttaaaaatgggaataagtatgtattctgtacac

SEQ ID NO: 60481 - DNA, 117 bp, Zea mays
  Clone ID: MRT4577_15515C.1
ttgacggccccctagcttgcatcaagtacaaaattggtagccaccggctaatataccctctcgggggtacccacgatcgaggagagcctgtgtctacctggtcttgcaacaggggct

SEQ ID NO: 60482 - DNA, 263 bp, Zea mays
  unsure (1)..(263): unsure at all n locations
  Clone ID: MRT4577_155160C.1
ctgccgagagagggaagatggtgcttgatgggccagagcagatggaactggaagaggggaaggaggcagtggactccgtcaatattatcttgcccaggatggaagaactccagttgattgtgaatgacaagagtcagaacctccggagactgcaggcccagaggaatgagctcaatgcaaaagttcgtctgttgcgggaggaactgcagctgctgcaggaacagggctcctacgttggagaagtcgtgagggccantgagaag

SEQ ID NO: 60483 - DNA, 261 bp, Zea mays
  Clone ID: MRT4577_155161C.1
cagcaaacgtattcacatcgtaaaaataaaatgacagcctttacaacatccacaatacacaaactttaaacccacaatccacaaattgaacacaacataaaatcggaggacttccaacctccgagtgcacaaacaccccataaaacatagtgtacacaaatagtccattacagcgcacaatgagacacaaaactgacatcttcacatataggggtcatcggattagctaccactccctccagaagcgaaaaattccctgac

SEQ ID NO: 60484 - DNA, 250 bp, Zea mays
  Clone ID: MRT4577_155162C.1
ggttggtgaacaccgtttgggctggggaaattactgaatgggacaaagggacaccctctacagcatggggggactgactttaacaatgaacagttaaaaatttaaggggcgaaaaaaaaaataagccccaaatctccagggaggtaatgagcacactgccgaactggagcaaaactatcaattgtccgcgatgaatataatgtacgcacgaactaatcctctggacaactaaaccaggccttgataaaga

SEQ ID NO: 60485 - DNA, 421 bp, Zea mays
  unsure (1)..(421): unsure at all n locations
  Clone ID: MRT4577_155163C.1
actcattttaataaagctcgtacgccttcattacccttctctaattcctagatcgacccactcgctcgttcatttagtctctaaaatcnacagggggatccttttcatacatatacatgtttgtaaatattccatcataacaagtaaacattcttaaatttacgtttttaataactccctttccatcataaacaaaaagaacatcttttattttatatcttttattactcattttcactatactaattttatatttacacatttcctttattaatcatctttttattttctcctatattttatattttatttttaattaacttatttttcatctctataatacctttattattaatcttttatataatttttcttattttttcttttatactaatactatatctttttttattttttttat

SEQ ID NO: 60486 - DNA, 396 bp, Zea mays
  Clone ID: MRT4577_155164C.1
ccccgggggactagttcaacgccgggccttttaacacgggggggcgatgattgccatgggaaacttaaaattgagtcttctacggtgcctggactgatagcgaaattccagaacgcgcatctgttggatcactaaagaaaactgttgtcagggaagtgactagcgatcttggaggtcggctacgagttggtgtcctttacacatggaaagaaagttagagatgataataaatccgtagattcacgctggtattggtcaagaggatatgctggacaacctaggctcatcacttgaacccagctggacacgcaacccacaagtcccagctactggagacattaactacccggaagccattggtactgctgaacccccttccaggattggacctgctga

SEQ ID NO: 60487 - DNA, 484 bp, Zea mays
  unsure (1)..(484): unsure at all n locations
  Clone ID: MRT4577_155165C.1
acctcacccatggttctcgccgcgcccctcttcaagctggcaactccacctcgaagtccgttgcgcgatcctgcttctcccttggctcacgcactcgattttcctggtgccgcgccctgctccatccgcgcgtccctggccccggcatggaactcgcccagtttgcgcgtcgagctcggcctctgcttctcttgcgttgtgcccagcccccggcgttgagattcctccatgaccgcgcctggtctttacttgagctcagctctggcctctactccagctcgcccccttgtttgttctcgccgttgggccgggtctgcttggtcgccgcgcccgtgccgagctccctgtgcgcgtagccgtgcccctctgctcgcgtggccggttccttgtttgcgccgcggttctctcccagctccctgccgtgtgctcgcccgaccgtacgctcgctctgctcgtncatgccggctgctgcgcgtgcgtctac

SEQ ID NO: 60488 - DNA, 372 bp, Zea mays
  Clone ID: MRT4577_155166C.1
ggtttctctcgtctttctcctccctctcctgacttttcttctagacatctcgcgggtcttatcgactccaacaagaacacactacacaccagccagcgagatagcgaacgctaggaacccagtggccatctttggagcggccatgacgctggatcagaaccatgccatgccgatgcagcccccggccctgcagcccggaaggaagaagcgacctcgcagatcacgagatgggcctacgtcagtggcagctgtcatccagcggtgggctgagcgcaacaagcatttggagtatgaggaatctgaggaggcaaagcgaccaagaaaagcacctgcaaagggttcaaagaagggctgtatgaaaggaaaaggggg

SEQ ID NO: 60489 - DNA, 1476 bp, Zea mays
  Clone ID: MRT4577_155167C.1
cctcgaggccggccaaaaaaaaaaaaaaaaaaaaaaaaaaaagggcttttggattctggtttctctcgtctttctcctccctctcctgacttttcttctagacatctcgcgggtcttatcgactccaacaagaacacactacacaccagccagcgagatagcgaacgctaggaacccagtggccatctttggagcggccatgacgctggatcagaaccatgccatgccgatgcagcccccggccctgcagcccggaagagcatatggagcagagggcagtgctgtggtgcatggttccatcagaacagtaggaagaagcgacctcgcagatcacgagatgggcctacgtcagtggcagctgtcatccagcggtgggctgagcgcaacaagcatttggagtatgaggaatctgaggaggcaaagcgaccaagaaaagcacctgcaaagggttcaaagaagggctgtatgaagggaaaaggggggcctgacaatactcaatgtggataccgtggagtgaggcagcgtacttgggggaagtgggttgctgaaataagagagccaaatcgtgtcgacagactctggctgggtaccttcccaaccgcggaggatgcagctagggcctatgatgaggcagccagagcgatgtatggagacttggcacggactaacttccccggacaggatgcaacaacctctgcccaagctgctctagcatcgacctctgcccaggctgctccaacagctgtcgaagctcttcagactggcacgtcatgcgagtcgacaacgacatcaaatcactcggacatcgcatccacctcacacaagcttgaagcctctgacatctcgagctacctaaaggaaaaatgtccagctggatcatgtggtatccaagacggcacacccattgtagctgacaaggaggtctttgggccgttggagcctatcacaaatcttccagatggtggtgatggttttgatatcggtgagatgctgaggatgatggaaagcgatccacataatgcaggtggagccgacgctggcatgggacagccctggtatcttgatgagctggattcgagtgtcttagagagcatgctccagccggagccggagccagagccagagccattcctgatgtctgaagaaccggacatgtttcttgctggcttcgaaagcgctggtttcgtcgagggtctggagcggctaaactgaatttctgatgtttgaccgttgatcctcatcccacttcatgtctgagcttgtgaattcggaggcaaacattggcagaacttataagctctagcaattctaggctttacattcctctgtgatagttctctatgcatgggaactgggtttgcttcacaatttttgtaagaccagaagtgatgtaaatagttcccaccttgtggaaggacaagaaaaaaataaataaaaagagtgcttgctttcgttcctaaaaaaaaaaaaaaaaaa

SEQ ID NO: 60490 - DNA, 320 bp, Zea mays
  Clone ID: MRT4577_155168C.1
cccacgcgtccgacaaacttaaagttgatatgaatcatctgatactcatggccctaatactgagtgacatctactgaataactaaacatatgttccgaacctataacaactttgtacatgactaccttaatctgaattatcggaccagttactccccaccttagacacgctaattaggttcttgctcctgttcagaaccgaaaactattcctgatctcgtatagagtcatgataagtcaattatccacacaggttactaattatactttacttgctaagctatgctaaaaattgacagctcgaatcttgcatacatgctc

SEQ ID NO: 60491 - DNA, 357 bp, Zea mays
  Clone ID: MRT4577_155169C.1
ggaaaccggccgcgcccgccgtccgactgcatattcttattcatacttagtttcttctgtcccatttggccctctgcggagtgtttactctgctgcggggtccagatacttgagctcactccgccgccattgagtcgaagaagaaagcaggcaaacataaccgataagatgagttttcgaaggctttgaccggcagaaacaccggttaccgatcaaatgtcatgttgatggaagggtttttctcattgtgagcttcttctgcatcttgtgtgccaattcacctctgttcttttggttgcctaaattgctgctttatgttttgtggcatcgttggattaagatttgtttgaacattta

SEQ ID NO: 60492 - DNA, 321 bp, Zea mays
  Clone ID: MRT4577_15516C.1
gcccgagggaggggggtcccgtctttttaacggaattcgtttttttgcaccaagcactcattgctttcttcgacctcctagaagcaaaagacggtttttggagagatactgggctgtttcttgtctggactgtaccttgacatccacatctttaaatccttgcccctctaatactctctgatgaactgaggaatctctgcaggggtctatctgctttccccacaaaacctggtccagaactgttgcttggatcaccgtgctcattttgggctgtgaaaaaactttcgaagtgcttgcaaccattggccccccacatctagt

SEQ ID NO: 60493 - DNA, 373 bp, Zea mays
  unsure (1)..(373): unsure at all n locations
  Clone ID: MRT4577_155170C.1
naaaaaaaaaaaataaaaagnnaaaaaaaaaaataaaaaaaaaaaaaaaaataaaaaaaaaagttataaaaataaaatataaaaaaaaattaaaaaaaaaaaaaaaaaaaaaaaaaaaaataataaataaaaaaataaaaaaaaaaaggggggggcctttttgggggtcccaggtttccttccccgggcttgcaaggtattattttttttttggggcccccaaattaaaattcctggcccgggtttttccaccgtgggggtggggaaaccccggggttcccccaattaattcccttgggagccctcccctttttcgccgggggggtaataaccgaaggggccccccccgttcccctttcccacatgtggcccc

SEQ ID NO: 60494 - DNA, 189 bp, Zea mays
  Clone ID: MRT4577_155171C.1
gaaaccctaggaggcccagtctgtgtaacatgggccaagcccatgaagctatgcggccgaaggttacagaatctaggccgtgtaacatgggccctttctctgttacgtgggccaagtccatgtacaatccatatttttatgtactgggtccttcctactgtgttttacgaatctacgtacacgcacatg

SEQ ID NO: 60495 - DNA, 620 bp, Zea mays
  Clone ID: MRT4577_155172C.1
gccggccggttctggaacctcacaggctcacacccacattctcgtgcggcacagcaccgacgtgatagcagagcagagcggagagctgcagagcaagttatgcgagggcgtcggcgtcgtacgacactcgacagccatgagcaaggacaagcaccacaagcacgagcaccacctggggtgttgctgcggctgcatggcgccgtgcctcctggcgctggtcctcatcgtgtgcttcgtctcgctgcgtgtggtacctgtggctgcgcccctcgaagccgtccttctacctgcaggacctgcaggtgcgcaggcccatctcgctgggcgatccgtcactgacagagtaggcgcacgtgacgctggcctcccgcaaccacaacgaccgcgtgatcatcgttcatacaagcgcctgtacgtgttcgtcacctacctgcgaaatgtcgagcactcgtgacccgtgactctgccgccgcagtaccatgaccaccgcgacttcaacgtcatgccccccgtgctggcggccgagtacgtgtccgatgacgcctactgtcgccaacatcatggaactatgacaggcgccgcgatcctactgcgcgctgcatggatcaaggtaggacaag

SEQ ID NO: 60496 - DNA, 463 bp, Zea mays
  Clone ID: MRT4577_155173C.1
ggagaacgacctgtaacaacaagatgtggatcttcgggaagacgatgaaagggcaacagcatcaccctcgaggtgccagagcagcgacaccatcgacaatgtcaaggccaacatccaggacaaggaaggcatgccgccgaaccagcagagaatgatctttgccgcgaagcagctgaaggatggtcgcacccttgcgcactataacatcaaaaaggagactacgctccacctcgtgcttaagctccgggtcgtaatcattgagacctctctgtaggcgctctgtcgcaagtacaaccaggacaagatgatctgcgcgcaaatgctatgtacgactgcaccctacggctgacaactgacgcactacgaagtgagatcacaggaaccagttgatgggcaagaacaagatcaagaactgaggtgctgctcctacccattttcatggacaatgtggagcctgattgct

SEQ ID NO: 60497 - DNA, 939 bp, Zea mays
  Clone ID: MRT4577_155174C.1
aattcggcacgaggatcaattccatcgaggtggcagattcgaattgattaatccgttaacaagaaaatatactagtcaccacccctctctcctctttcgtcgccatcaacgaccgcttccactccgcctgccgctcccttcctcggcagcagcccgcccgccaccgcgtgaattcgcgggggctacaaatcccgccccgcccggccctgccaccgcggcatctcacctccatccaccaccgtcgtcggccaaggaaaaggaaaaggaaaagaaaggagcggggaagcggggcactggagcagtgaccatggtgaggctcccgtacgtgaccgcgctcaccacgctcttcagctacggcctcctcttcgccttcggccagctccgcgacttcttccgcaggatcctcgacgcccgcaagcccagcaacctcaagggctacgcgccgatctgcttgggactcgaggatttctacacgcgacgcctctacctccgcatccaggactgctttggccggccgattgctagtgcaccagatgcttggttcgatgtggttgagcgctactcaaatgactgcaacaagacactccatcgtaccacagcaacaaccaaatgccttaacttgggttcctataactaccttggttttgctgcggctgatgagtactgcacccctcgtgttattgagtcactgaagaaatattcggctagcacgtgcagtgttcgagttgatggaggcaatactaagttgcacacagagctcgaagagcttgttgcaagatttgttggtaagcctgcagctattctttttggcatgggctatgtgacaaactctgctatcattccagcgctggttgggaagggaagcctgattattagtgattcactgaaccataattctatagtcaacggagcacggcgacagcaacggcgacagcaccg

SEQ ID NO: 60498 - DNA, 187 bp, Zea mays
  Clone ID: MRT4577_155175C.1
ggtctcttggttttttgagtgattattttggtccgtttcctgtagggggtccatcttttcatagagcgagcccggttacacctcggcgtcaacaacagataaaggcggcgacaggggcaaacagccaccgggggagaaactcgaaactgacacaaaccggaaagatcagctgctcaacctggggggc

SEQ ID NO: 60499 - DNA, 234 bp, Zea mays
  Clone ID: MRT4577_155176C.1
gtattccactatttttttatcggttctccattggggtttacaagcgggatttcttctttttctgatttgaggattaattccccttcttacaaatttatatgtacaataaatgcttgccgaggaattatgtcccccacggatagaagaaaaaatggccaaacggcgcttgctagcctaaacaagtttcggggaccacccaaggaaacctaaaaacaaccttttttttttggaaaa

SEQ ID NO: 60500 - DNA, 669 bp, Zea mays
  Clone ID: MRT4577_155177C.1
atgattaacatccgtcctctgtccgtcctaccccaccgctccctcggtttggctgtctcccctattacgcacacgcttctcgctccggattccgtattccctccgctctttccctaccgaacggagccatgatggacataggcaaggcgatcggatcaggcgccgccaagaaggccacgtccaggagctccaaggctgggctccagtgccccgtggtaaggatcgccaggttcctcaagggcgccaagtatgccgagagagtccgcgccggcgcccctgtctacctcgctgccgtgctcgagtatcttgctgctgaggatcttgagctggccgctaatgcggcacgtgacaacaagaatacccgtatcgtaccgcgccacatccagctcgccgtccgcaacgacgaagagctctcccgcttgctgggcacggcgaccatcggtagcgctggtgtaccgcccaacatccataaccttttgctcccgaagaatgccgtgggcacgagcgccaaggctgcggatggcgacgaggactaatgccttgactacgactggtgagaccttcaggatggtgccgtatcaacatgtgtctgtgcactacgttaagagccgcgtgaatgtgatcatgcgggctgctgtaacaatgctatcacaaggatctcctgtgctt

SEQ ID NO: 60501 - DNA, 222 bp, Zea mays
  Clone ID: MRT4577_155178C.1
ggaaaataacaagaaatttttttacacaaaagagttggctttttaaatatgtccgtcctaaagctggttgccgggaaaaataaaccgctgctgggaagggggggggccctccttgtcctggattttaaccttgacattataaatggggtctgaagactccacctaaagggggattgttttgccagtaaaggtgttgacaaaaatctggatgcctcccctaag

SEQ ID NO: 60502 - DNA, 632 bp, Zea mays
  unsure (1)..(632): unsure at all n locations
  Clone ID: MRT4577_155179C.1
gtttatatatataggggtagtaggtgtatatccagatcttgatcgaagaaactccaanctgcagacacgtacactagctagagtccatggaaaaagtggtcgatctacttgtcccaaactgattgggtgtcctggatacctacaattctgcactagtgttgccgtcgtcatgcatgcataattgacaacttgagatagtttattcgattacgatactactgcaaatttataggaaaaaaaaacgtatttccccctctataatctgaagatctacaggcatatgcactgatcgatctacactgaccaactcaatcatttacggcgtcactgtccagcaggaactcgaggacgatgatgatggaactcttgtcgtccatgaaagagttatctttcgagatgtcaaaatgatttttacctctgtctataaatccggccatctctgctaaagaatgccattctttcttctcgcgaaatcaaatatttttaaccttataatcgaatatgtattaaaatatattaattagcacctgatcgctaaatatgtttttattatatatatatatatatgacctaacctcttaccaaaattatataatgttccgaantatatgatccccggccggcccctcgag

SEQ ID NO: 60503 - DNA, 380 bp, Zea mays
  Clone ID: MRT4577_15517C.1
taaaagggttccccaagggttttcgggcctggggaaatttttttattccgggggggcctatttgatgaaaaagggggaatgaaaaaaaaaaaaaaggggggttccttttaaattttaacccaaaatccccaatttctacgaggtggagaaaaaaatggaaaaaaacccccccctaagggtgggggattggtgggtaaaaaaaggaccctggccaactttgtgaaatttttttttcccgttaaacttggcggaaaacctaaccggggggggcaggtgtttccccccctcccggaaaggggcccgtttgggggtggggggtggggggaaaaacccgggggcccccgggtccggtttggggggggccccttttggcccctttt

SEQ ID NO: 60504 - DNA, 311 bp, Zea mays
  unsure (1)..(311): unsure at all n locations
  Clone ID: MRT4577_155180C.1
tttttttttttattttttttttttttttttttttttttttttttttttttttttttgggcaacaacgattttttttttctcatcatttttaattgggtgcctngcccaaacaaaaacattgacaacccactgttacacaacgcaaccagccagttaagttagccagtcagcccgcccgcccaacaagctttagcttgcagcctttgcacacactttggtggactggacctccatgggttttcatccgggtatgcatgcttttctccggcgggtccatgcatttttttttggcccccccaccggggaagagg

SEQ ID NO: 60505 - DNA, 1809 bp, Zea mays
  Clone ID: MRT4577_155181C.1
gcgggtaagacagcctttggagttttgtattaaaaagaccccacacaggtcgagaaaacctctaaaccctacccaactcatacgcagcagcatcaaagcccatatgagaatgaccgcgactgagactaagctttagacctgtactttggcgtgggacaaacgatgggatatttttttaaccacagtctgacattcgctcccacaaccaggacatgaggaagtgctactcagactacctaaccaacccggctagaggcccttacgctatttgtaatgttcaaactgactgcctagcaacatactacaggttcacaataaaaacatggctatcatttaaggtacaataaagtgcagatattagttctcctccctcgagtgtcagcaaagcacacggatataaacttctcctagacgatacacggatagatatggagctttcatcaggattcaatcctgccagtaacaaggtggtggtgcatcacttcacttgccttcctcgatgatcctgatggctttgttcacagcagcggttttctcatcggggatggctccaccctctgggagatcaaatttcctgcggctcagtgatcgctgcttccctggggggctgagggtccacaacctccagcattgcttcgagctcctctagcatagatttcttcgcggtcctcaccatgtagtcaggtccctcgagcgcatctacggtgatgagcagcacgatgatcttctcagagaacctctggcgctcttcgtggtcatgcgcaatgcggtgcctgtaggagatgttatagaacagggacctgagctccttgagcttggctttagccacagctaggtcacgcaggcagcgaagcacctgggagcgatgagcaaggtgagccctgtaggtcatctggatgagcaatgcagcgtcctgcggtgagagctccttcctctttcccttgcccgttgcccttagcaaatgcctttttgatggcgacgcatccagcatcattgtcttccgagatctcctcgatcttgacggtggcgaaggggcatttcttctccttcttgacagccttcacctccttcttctcattcttgttcatggtgatcttcttggccttgttcttgtcggccgcgcgctcctcctcttctttgtcgctgtcgctggcggtgaagtcctcctcccacgtgtaggcctgggaccagggctcgagacatcccttgcccttgaccgcggcaccccacttgagcttcctggcgctggctgcggaggatccgcccttggcctcccacttccacttgcggtcgaagccgtcgtcgtcgggggacttgatctcggcctcccacttgagcgtccgctccccggcgcgcggcttctcgacggaagtccacttgaccttgcggccgccggcctcagtgacataggtgcgcttccgggtggcggggggtccggggcggcggcgcgcggtggcgacggcgacctcgagtgcggcgacacggttggtgaggtctcggagaatgagcggggtgggggtgaaggccaagaaggggtcgagcgccggcgcggggggcaggaggaggtcatctaggtcggggaatggggaggcggcggggaacggggacgggtaatctgagacgccgtcaaggaggaacgggcaggaggaggaggaaggtggcggcggtgggaagggggagaaggggtcttcgaggaggcgtaggaagtggcgatgggaagccatggcgaaagcgacggcgacggagattggtgggagcggagcagatcagatggtttgggagctgggactgggagtgacgtcccggccg

SEQ ID NO: 60506 - DNA, 670 bp, Zea mays
  Clone ID: MRT4577_155182C.1
cttacaacaatttcatatgactgcaaagaagcacctgttattcatgaatggacctatgatgcaatgtgccatgatctactcgaaatggatggcaacaaatacatttatgaggtatcaaagatgggttcggaacctgaaaagaaggaatctttattagaggatcatgatcctctttggcttgaacttcgccatgctcacatagctgatgctagtgagaggttgtacgaaaagatgaacaattttgttgccaagaataaagcagcacaactttcaagatggtggtgaagtctcaacacgggatctgcagaaaatcgttcaagcattaccccaatacagtgatcaagttgagaaattgacgctacatatagagattgctggaaaaatgaacaggtgtatcagggagtatgggctccgtgatattgggcaattggagcaggatttggtttttggagatgcgggagcgaacgaagtcatcagtatcctcaggtcaaagcaggatatgagcccagaaaacaaaatgaggttgctgattatatatgcaattgtatatccagagaagtttgaaggtgacaaaggggaaaaagtgatgcacttagcgaagcttccacatgatgatatggatatattaaatggcttaggatacttgaatggttcaaatacaaaaaaatca

SEQ ID NO: 60507 - DNA, 434 bp, Zea mays
  Clone ID: MRT4577_155183C.1
cacaagcagcgttctttctttcattttctttctttaatgatttttttaagtgttttttaatattttttttttattttttcttttttatgttttgtgaatgattttgttgtggtgcttgttgatggtttatgtgatgtggatctacggtggtgcagtactatttacaaaaaaggggtgttctccactttaaaaccctaaaaaaagcaaaaaaaaaaaaaaaaaaaaaaaaaacaaaaaaaaaaaatttattttttttcaatttgtgagtgctttttaaaaaacaaaaaagaaaaaaaaaaaaaaaaggggggccccgggggggggccccccttggggtttttcccaaaaccggggggggggtcttttgttttttgggggccccccccccctccgcggggggggggttaaaaaatcccgggggggggtttttaacc

SEQ ID NO: 60508 - DNA, 1390 bp, Zea mays
  Clone ID: MRT4577_155184C.1
gcacgagcgccggtttgcccacctggacttcagcttccagcgcatcgttcttctccgtgctcgccagtgggttgctgacagagatggtagtggccgccgcggccgcactctacctcgctgtaaagcccctgcccctcgtcctcgtcctcgtccaccacagccgccccgcgccctcctccgcgccccgcctcccccgccgaaccgcccgcgcccggccgctgcgcttcctctcctgctcgacctcagcgccgccgctgttcgcagccgtcgcatccatggactcgccgccccagggttaccgcaccaacgtcggcatctgcctcgccgacccatccctcaccaagattttctcggcttctaggatcgacattcctagcgcgtggcagatgcctcagggtggtatagatgcaggggaagaaccaagggcggctgccttcagggaattgagagaagagactggtgtcacatccgcagagatcgtggctgaggctcccgtctggttaacatatgatttcccgccagatgtcagaaccaaactgaatgccaggtggggaaccgattggaaaggccaagctcaaaaatggtttttatttaggcttactggaaatgacgatgagattaaccttaatggtgatggatctgagaagccagagtttggtgaatggacatggatgacacccaaggaagttatcgaaaaggcagtcgatttcaagaaacctgtatatgaggaagcattgaaacactttgccccctacctgcagtcagatccagccgcttcatcatagaagatttggccaatttgcttgcatccctgctgtatctggacccccaataatttgacacgacgcaatgtagccatgaggtgtgctatacaatttgatagtgtgtggcctgtttgagtgaattatatatgccagcattggatcctcgccctctacttagtcacataagtatacaataagtggtggaaacagtttcagccaatctggaacatggtggccagtgtatcttgtctgccaatgactgaatgctttaggttgaagcaataccataattccagagagactgcggtacagcaacctcaggttatgtggggggtcgtcggcaaaacgacgctcgtttggcattggctacggcagaaactagtgtctggctgccattggttgtgggaggagcagaggaaaacaaattgttggttacactctgtactactgcgtcatgatattgtcggctttcgctttgtggcttttggaggaaaactggagatgtggcagctttggctttacgcatcttggaggaacaggagatataaacacacgcatttcgtttttttttttgtaaaaaaaagcggcccacgcatttcgtttttttttttgttgagcccctgtgc

SEQ ID NO: 60509 - DNA, 1277 bp, Zea mays
  unsure (1)..(1277): unsure at all n locations
  Clone ID: MRT4577_155185C.1
ggccggccgggnaaaaaaaaaaaaaaaaaaaaaaaaaaaaaaaaaaaaaaaaaaaaaaaaaaaaaaaaaaaaaaaaaaaaaaaaaaaaagcggcagagctcgagcactcgacaccagcgtctaacgggatggcgagcctgaccatgccgccgatgccggcgtggccgcggcaggacgccatcgacctccacaaagcattcagagggttcggttgcgacagcacgacggtgaccaacatcctggcgcaccgcgacgcgacgcagcgcgcgctgatccagcaggagtaccgggccgtgtttaaccaggacctggcccggcgcatcgcgtccgagctgagcggccaccacaagcgggcgatgctgctgtggatcctggacccggccacccgcgacgccaccatcctgaagcaggcgctcacgggcgacatcaccaacctgcgggcggccacggagatcgtctgctcccggacgccgtcgcagctgcagatcatgcgccagacgtaccgcgccaggttcggctgctacgtcgagcacgacgtcaccgaacgcacgtccggcgaccaccagcgcctcctgctcgcgtacctggccatcccgcgcgccgagggccacgaggtcgacccgtcgacggtgacgctggacgcgcgcgacctctacaaggccggcgagcggcggctgggcaccgacgagcgcgccttcatccgaatcttcagccagcggagctgggcgcacatggcggctgttgcccgggcgtaccaccacatgtacgaccgccccctggagcgcgccgtcaagagcgagacgtcgggcaacttcggtttcggcctcctcaccgtgctccgctgcgccgacagcccagccaggtacttcgccaaggagctgcacagggccatgaaggggctgggcaccagcgactcggtgctcatccgggtggtggtcaccagggcggagatcgacatgcagtacatcaaggcggagtaccacagcatgtacaagcgctcgctcgccgacgccatccacgccgagacgtccggcaactaccgcaccttcctcctctccctcgtcggccgcgaccgcacctagtgatgacgatgatcgctgtttcgtctctcatctatgcctctagtagcaacaacgtacgaggcgacactgggcgccattgccactcgcgtgtgcttgctattcctgttatctccatggaaatcttcctccttgtaaatactcctacttgttttcttgggatagttgttcgaataatggtgtactggttgcattgac

SEQ ID NO: 60510 - DNA, 1195 bp, Zea mays
  unsure (1)..(1195): unsure at all n locations
  Clone ID: MRT4577_155186C.1
ngaagcctttccccctcgtcctcgtcctcgtccaccatttccgccccgcgccctcctccgcgctccgcctcccccgccgaaccgccagcgcctggctgccgcgcttcccctcctgctcgacctcagcgccgccgccgttcgcagccgtcgcatccatggacgcgccgccccagggttaccgcaccaacgtcggcatctgcctcgccgacccatccctcaccaagattttctcggcttctaggatcgacattcctagcgcgtggcagatgcctcagggtggtatagatgcaggggaagaaccaagggcggctgccttcagggaattgagagaagaaactggtgtcacatccgcagagatcgtggctgaggctcctgtctggttaacatatgatttccccacggttgtgagaaccaagctgaatgccaggtggggaaccgattggaaaggccaagctcaaaaatggtttttatttaggcttactggaaatgatgatgagattaaccttaatggtgatggatctgagaagccagagtttggtgaatggacatggatgactccccaggaagttattgaaaaggcagttgatttcaagaaacctgtatatgaggaagcattgaaacactttgccccctacctacagtcagatcccgccgcttcatcatagaagattcgaccaatttgcatacattatcttttttttttatttggaaactaccctgctgtatctggacccccaataatttgacacgacgcaatggagccatggaggtgtgctacaatttgatagtgtgtggcctgtttcagtgaattatatatgccagcattggatcctcgccctctacttagtcacataagtatacaataagtggtggaaacagtttactgtaatgaccgctacagatgcaccagtcgcatgattgggcctgtggctctagtttcagccaatctggaacaaggtggccagtgtatcttgtctgccaatgactgaatgctttaggttgaagcagtaccataattccagagagactgcggtacagcaacctcaggttatgtgggggataccggatactagtgtctggctggcatttgttgtgggaggagcacagaggaaaacaaattgttggttacacactgtactactgcgtcatgatattgtcggctttcgctttgtggcttttgaggaaaactggagac

SEQ ID NO: 60511 - DNA, 176 bp, Zea mays
  Clone ID: MRT4577_155187C.1
ggggtaggacttaaatcttgatcatctaaatcccttatcacatattactcaaactacaaaacattacattttctcttcttatatatatctactaaatgatcacttataaaattgatttatctttttaaaaacaaaactatacacaatattttcaaattctacactgtaaaacaccc

SEQ ID NO: 60512 - DNA, 1738 bp, Zea mays
  Clone ID: MRT4577_155188C.1
gcacgagccggagcgagagcgagatggtaggggggccgtcgcggccgactctgccgcgctgtaaagcccctgttcctcgtcctcgtccaccacagccgccccgcgccccgcctcccccgccgaaccgcccgcgcccggccgctgcgcttcctctcctgctcgacctcagcgccgccgctgttcgcagccgtcgcatccatggactcgccgccccagggttaccgcaccaacgtcggcatctgcctcgccgacccatccctcaccaagattttctcggcttctaggatcgacattcctagcgcgtggcagatgcctcagggtggtatagatgcaggggaagaaccaagggcggctgccttcagggaattgagagaagagactggtgtcacatccgcagagatcgtggctgaggctcccgtctggttaacatatgatttcccgccagatgtcagaaccaaactgaatgccaggtggggaaccgattggaaaggccaagctcaaaaatggtttttatttaggcttactggaaatgacgatgagattaaccttaatggtgatggatctgagaagccagagtttggtgaatggacatggatgacacccaaggaagttatcgaaaaggcagttgatttcaagaaacctgtatatgaggaagcattgaaacactttgccccctacctgcagtcagatccagccgcttcatcatagaagatttggccaatttgcttgcatccctgctgtatctggacccccaataatttgacacgacgcaatgtagccatgaggtgtgctatacaatttgatagtgtgtggcctgtttgagtcaattatatatgccagcattggatcctcgccctctacttagtcacataagtatacaataagtggtggaaacagtttactgtaatgaccgctacagatgcacccgtcgcatgattgggcctgtggctctagtttcagccaatctggaacatggtggccagtgtatcttgtctgccaatgactgaatgctttaggttgaagcaataccataattccagagagactgcggtacagcaacctcaggttatgtgggggagtcgtcggcaaaacgacgctcgtttggcattggctacggcagaaactagtgtctggctgccattggttgtgggaggagcagaggaaaacaaattgttggttacactctgtactactgcgtcatgatattgtcggctttcgctttgtggcttttggaggaaaactggagattttttggcagctttggctttatggttcttggaggaacaggagatataaacacacgcatttcgttttctttgtagtgaagtgaagcacgcacgcacgttgcttttccttcactccatcggccaccaagttattaatgcattgcatgccagctggcccatctgattcctagcgacaggaacatcattaagcaactagtactagagtaatgtaggttgatgtcgatgatgtgtcccctcagaatttttgttgacactcgttgctggacctggacctgactagatggcggatggggggccattaccatcatccattcattgtgcgtgcagtactcctgctaccgcctccacggctctccatccatccatccatttgcatgcatgacccatcaagtatggaggaagcattacactacacatgtcttggccgaccacaccaaagagcgaaaacaaaaggtttattggaaaaaaaaaaaaaaaacataggccctcga

SEQ ID NO: 60513 - DNA, 413 bp, Zea mays
  Clone ID: MRT4577_155189C.1
aaaaaaagcgacagcccgaatttgcattaacaaggccattacaaacacgattccccctggggtctccaaaggtttccaggggaaacaaaccccctcccaaaaaccaagaggggggggggacacctagcaggtagacacccgaataactcgagcggaggggaccaaacccccgggatcttgacaaccttgggcgccttggccccaagggcggggtcggacgggtgcacccccttaaaaaccccgaagacccccccgggctccgggggggtcttggggacccccaacgggaagttgccggggggggaggggggggccttgaaggtccccctcgggagccccccctgggaacctctgcccccgggggggaacccaacggcgttttcctaaccgggggagcccccccggcccttggg

SEQ ID NO: 60514 - DNA, 1593 bp, Zea mays
  Clone ID: MRT4577_15518C.1
acgcactctgacccccgcccccgccgcagcgagacgagagcgcccgcaccaaggcaagccgaggcggcgagcgggacaggtagcggctgcctaccaccgccagcctccgcccacccaacaacagcaccaccaccacagtccggtcccgtgccttccaattcggtcgtcccacgcatcgattgagcccgcgcacgagcccatcgctttcgctttggcgtcttcgagaacccgcaagcaacctatatagcccgccgcgaattccgcctggcttcctcgtcgcccgcctcgtcgtcgcgccgcagtgagaggagggggaggcgatggatctcaacgaatgcgagaggagggggccggcggggccggatccgctgtcgaggcaggggtcgatctactcgctcacgttcgacgagttccagaacacgctcggcgggatggggggagggcttggcaaggacttcggctccatgaacatggacgagctgctgcggagcatctggaccgccgaggagagccaggccatggcgtcggcttcggcctcggcctcggcctcggtgtccgcgctgggggcagccgtcgacggcggggcggcgctgcagagacaggggtctctcgcgctgccgcgcactctcagcgtcaagacggtggacgaggtctggcgggacttcgtgcgggaggcgccgcccgggacggctggcggcgaggagccgcagcccaaccgacagccgactctcggggagatgacgctggaggagttcctggtcagggccggggtcgtccgtgacaaccctgccgcggcagctgctgctgtccctgcgcagccggttgctccacggccgattcaggcggtcagtaatggcgcctccatctttttcggcaactttgggggcgccaatgacgccggggctggagcgatggtgtttgcgccggtggggatcggggatcaggccatgggcaacgggttgatgcctggggtggctgggatggcaggtggtgcggtcaccgtgagtccggtggatacgtcggtggcccagctggattctatgggcaagagcgatgaggatctgtcatcgccaatggctccggtgccatacccctttgagggagtgataaggggaaggaggagcggtgcgggtgtggagaaggttgtggagcggcggcagaggaggatgatcaagaacagggagtctgcagctagatcccgtgcccgtaagcaggcttatacaatggagttggaagccgaagttcagaaactgaaggaacaaaatgcagaattgcagaagaagcaggaacaaataatggagatgcagcaaaaccaggtcccggaattggtcagcaatccatatgcacaaaagaagcgatgcctgcggagaacattgacaggtccctggtaactgagttgttgttgatcggactcgacaggatatttaacattatggtacttgtacattcttcaggatttggagaacccaaatttctgttgtatattagcgatcaacagagtcgaatgtaccagtgcataactttcttctcctgacactatgaaaaaaaaaaaaataaaaaaaaaaaaaaaagggcggccgccaccgcggtgga

SEQ ID NO: 60515 - DNA, 682 bp, Zea mays
  Clone ID: MRT4577_155190C.1
tgctctgcctgttctcggccttataggactgagaaacaaaggcctgccccgccgaaccgccagcgcctggctgccgcgcttcccctcctgctcgacctcagcgccgccgccgttcgcagccgtcgcatccatggacgcgccgccccagggttaccgcaccaacgtcggcatctgcctcgccgacccatccctcaccaagattttctcggcttctaggatcgacattcctagcgcgtggcagatgcctcagggtggtatagatgcaggggaagaaccaagggcggctgccttcagggaattgagagaagaaactggtgtcacatccgcagagatcgtggctgaggctcctgtctggttaacatatgatttccccacggatgtgagaaccaagctgaatgccaggtggggaaccgattggaaaggccaagctcaaaaatggtttttatttaggcttactggaaatgatgatgagattaaccttaatggtgatggatctgagaagccagagtttggtgaatggacatggatgactccccaggaagttattgaaaaggcagttgatttcaaagaacctgtatatgaggaagcattgaaacactttgccccctacctacagtcagatcccgccgcttcatcatagaaagattcgaccaatttgcatacattatctttttttttttgg

SEQ ID NO: 60516 - DNA, 487 bp, Zea mays
  Clone ID: MRT4577_155191C.1
acatgttaactctcttgctttttttatttttattttaaacagtttaaaaaattttttttttggaaaccaaaaaaaagctctgtcttgctcacgcgtggggagaggtttgaccaacctactaagtggaagaggccagctaataacaggctactctacttacaacacacagagagagagtgacagacagagagggccctctattggctattgcggccccggcgccgggttcccccaactacctggtgctgatggccacgggggaccggacccagccacatccgttctcctctaagatgaggctgcacgagtgggggttttagaggacccacatgccgtaccacaagtcgtgcataggcgacgcgtgcataccgggcgggcccaattagtcctgctgcaggaagtaaggctcccgggccacagccttctgttacggtatgtacaggtactacggcgaccactgatttccccgctgccgatgacgctgctg

SEQ ID NO: 60517 - DNA, 331 bp, Zea mays
  Clone ID: MRT4577_155192C.1
gacagggaacatttgtgttttatttattctttccaatgactttacagttttattggctcattttttttcttaaaatgaaaaaaactccacggccattttttgggttgtgccctggacataattgcttcccccccccccaccccttttttttttttttttttcaaaaaaaaacctttagttgaagtttctccaacaatgttttcttacccaaacacaaagcggttttggaggttcccctctaaaaagcatttgcccccccaaggcccccccatttaaagcctcccttttttcttaacagcccgcggcctccctttttttattttatcctttt

SEQ ID NO: 60518 - DNA, 112 bp, Zea mays
  Clone ID: MRT4577_155193C.1
atccacagggcgttctagcagttgcttctttaggatgcggatcattacgtcgtacatatatcccgatgtgtctgagtgaatctttgactgttctgggggagggcagcgggcg

SEQ ID NO: 60519 - DNA, 540 bp, Zea mays
  Clone ID: MRT4577_155194C.1
acaccggccctgcgcacatttaccccaaaaaagagaattctccagcgcacaaaagcgcaactaaggaactaaaaacaaaacgagcaaaaatgtggggagcaaaacatgcgctcccaagaaccaaaacacgagtttcccccaaaaacactaaaatgtcccaaagggggcgcgccccataaaaacggaaaagcggcaaaaagaagaaaaaacccactacgcaataagcgctaaaacgggaagggcacaaacgaggacacaaacctttacaccgggcacaccccactacggggtgagcactccgcacccctttttggggtgatcaaaaacagaaagggccttttcgagaacacccgcctggaaacccacaaaaccctttgtggaattcagaacagaaagagttacagaccccataaccccagtgggggaacgaaaagacacccctttaaagaaaaaaacacccccgtgggagacacaaaaaatgccccctatatcgaacaaagcgcgcgcgcatttgtgataacacagggcaaaattttcacc

SEQ ID NO: 60520 - DNA, 375 bp, Zea mays
  Clone ID: MRT4577_155195C.1
ccgccaccgtcgccaccatctataccttcacagggagcatcggcggcactggaacgcgatttcgagcaggcgcgcgagctgtttctgacgcacaacgaaaaactacctgaagcgtcaacatcagtatcggcgccaccgctagcgcagtcgccggctcgccgcttccggtggacaacgagatactaccgtaggcgccttcatcgcagttgacacgcgtgatgaagcttggataggacagtgttaacacgtcctgtggggcggtctggaactggatcagttcttcgagaggttcttcaaagatactttcgtcatttctttttctgcatccttatcgaaggtatagtgcctcgaactgatcgaccttagctgcgttct

SEQ ID NO: 60521 - DNA, 642 bp, Zea mays
  Clone ID: MRT4577_155196C.1
aacttagaggccgtccagatggtggtgttggcaaagcagtgaatatgttcaatgttaaacaggtagataagaaaatggtgaagacacgtgcctttcaggaagcttgcatttactctgtggttgatgagctggctaagcatttggcgcagtggagctactctgttgccttcatcgagatgtcctttttgccacttgttcaacttcggaacttttgcaaaaccatcaaggctgacagatttcgaaaagagatgaaggatcttattcgtcaggtagaggcaaatgttgagttcataagcgcaaagcgtgccggaattacattcccccccaatgatccagctgtagattcatttctacaggctgagaaggaagtacggtcaagccctctctcagaatatgttgctactctacatcagagagcacagaacagaatcgattctttggatgagacaagtgttatcgtgggtgcagagtcctctaccttttcgaagaggctatcagaggcacagaagcaacaggaggaacatgatgatagtgaagaacccattgctttcagtaagaacttgttggcggagaagaagaaaacaaaagctgcaaaggagaagagcaagaaacgagcccgtgacgacgatgatgtgcctgcgg

SEQ ID NO: 60522 - DNA, 572 bp, Zea mays
  Clone ID: MRT4577_155197C.1
cccagcgtgcgatcgaaacactaccacataaaagcacactagcgccccaacaaaggcagccattatattgagcctatcttatgctgcctaggatgacaggaagtgctggtacaagctaccatgatcaccggcaagggcgtaagactagctataggtatccttgttgcacgggacctataacgaacgagggctacagcttgctgaaaacccaacgcttcaaccctacaggatccaacaggcaagcacaggtggcatgttacctttatcaccctagtgcctccaacattgatcagacctatgacatcagttacctctggtgcatgtattgccacaaaacatcaaggcacaacaactacaacatcttgtgctaacaaaccttgctggctactctcagcaacaggagtttcttccattgaaccaactaactgcattgaactctgctgcttattagcaacaacaacaactaccattcaaccagctacctgctgactaccccaatcaatctcttacatatcaaccaactagcagaatcgaactctgctgcttatttacagcagcaacaactactacca

SEQ ID NO: 60523 - DNA, 525 bp, Zea mays
  Clone ID: MRT4577_155198C.1
ccttaagataacttagaataaaacctgcacaggggtaacagcatccatcgatccgcagtccatgctgtttgatgcatgggtctgcctgtaaccgaggatgaacaccgcactaaccactgcacacagagcgaccttgcagtcaaaaacacagatgggcagcaacaaacacgccacgacccaaaataaaccctgtggactagggtcaacatctacaggaccgaacaggttaactttgaccgcgcgggcccaaccgttgagttcatccaggtcctgacagatttctcgtagacaatcgtcacggttgccaccttcctaaccacctacaccacgaccgtatcatgcgtcgacaccgtagcccccaacaccggagcaaactcaacctacatgacagagcctgacagcacgatatccagcggctacacaggcaccaccgtacccaccaacgaatactccaacgccggcaaagaactggtcctcgtttacggtgatgttgaggccgtccatttcattgccgagaatgccctc

SEQ ID NO: 60524 - DNA, 464 bp, Zea mays
  Clone ID: MRT4577_155199C.1
ggccaaaaaaaggggaggggggggcacaaaataaacaaaagaggcttaaaaacccaaaaattttaaaaccaggggacaaaaacaaggggggatggaaaggccccccccattttgatttcatttaaaacaaaacaattacaaaatttacgggggtaaaaagctaaaaacaaatgcgggggaccaggaaagaggcatttcggacatccaacttatgcacaatcctaccaaaaacttgccctaaaagaaaccccccaagccattgattttaaaaaaccttttgatcactagggccaaaaaagcaagaggcaacccaagggcggccaagggcaaaaacccgacatgctttggctttgggggggaaaaaacaacattctgcaaaaacaaaggaacccttggaagggtttttttacgggtcgcttaaggcacttgggggggggcaaccccaacgggggaggcttaacccg

SEQ ID NO: 60525 - DNA, 831 bp, Zea mays
  Clone ID: MRT4577_15519C.1
cctcgaggccggccgggacacctgtccgccgccgcactctgacccccgcccccgccgcagcgagacgagagcgcccgcaccaaggcaagccgaggcggcgagcgggacaggtagcggctgcctaccaccgccagcctccgcccacccaacaacagcaccaccaccacagtccggtcccgtgccttccaattcggtcgtcccacgcatcgattgcgcccgcgcacgcgcccgtcgctttgccgtcttcgaccacccgcaagcaacctatatagcgcgccgcgaattccgcccggcttcctcgtcgcccgccgcagtgagtgagaggaggaggtcgatggatctcaaggacggcgagaggaggggagcggcggggccggagccggggccgctgtcgaggcaggggtcgatctactcgctcacgttcgacgagttccagaacacgctcggcgggacggggggagggctcggcaaggacttcggctccatgaacatggacgagctgctgcggagcatctggacggcagaggagagccaggccatggcgtcggcctcggcgtccgcggcgggggcggccggcgacggcggggcggcgctgcagaggcaggggtctctcaccctgccgcgcacgctcagcgtcaagacggtggacgaggtctggcgggacttcgcgcgggaggggacggctggcggtccggagtcgcagcccaatcgacagccgaccctcggggagatgacgctggaggacttcctggtcagggcgggggtcgtccgtgacaaccctgccgctgctgctgctgtccccgcgcagccggttgcgacgcggccctcgag

SEQ ID NO: 60526 - DNA, 453 bp, Zea mays
  Clone ID: MRT4577_1551C.1
cacgcctgcgtgtaccgggcccctaatacacggtcgacctagtctttcttatctagcacatagaaaggcctttcttaccaacggggggccctaacatatatacacaacctatgctactggaccattactgcatgagatgtttcagagagcctaccacccacaatggtgacagcgcctatagctgccgtgcttgccaaagcccgctgaccaacagggactaatggttgcgaaaaccaaagggtgccaccctacaggacccaacacggaatcaacggtgacatctgaccttgattacccaagttcctgcactaacaccagctctttacagaaggtacctttggtgcattgattgaaacaaaacaagagggcacagctactacaacaactaatgctagaaaaccttggtggctactatcagaaacatgagtgaattgcattcaaccaactagctaa

SEQ ID NO: 60527 - DNA, 296 bp, Zea mays
  Clone ID: MRT4577_155200C.1
agcctcgcaacatcgagagcacactgccgtatcaacgatggcaccaactgtatggagcttgcttatgctgcttggtctttatgctggtgctgctaccgcagccattgaggcacaatggtaacaagatggtatagctctattgcttgcctcatacctatcaccagcggtgtcttcagtatgagaaaacccagctgttgaagcctacaggatccaacaagccaatgcatcaggcatctcaccagtataacccttggtactagaacgaccgtgagccctattacaggacttacctttgg

SEQ ID NO: 60528 - DNA, 243 bp, Zea mays
  Clone ID: MRT4577_155201C.1
ctgaaatgtgcatgcttgcaacatgtctaatatagattatatttgagtggtatctttgttgaagaacatgtgaaattagagttctggtgggcttctagaacacacactgctcctcatctttactttctctacataaatcctcaatatgttggtatgttccgtgacccctggtttagctaccttatacatggatgtcgttacagaaatcaactagttgtctctgaaggacaggctggtgcagtg

SEQ ID NO: 60529 - DNA, 340 bp, Zea mays
  Clone ID: MRT4577_155202C.1
cgggacggatgaacatgccgatctggggaaataatgtacattcttgcaacaaagcccccaagctcaaagagaaaacagtgcgagcttgtggggatttaaacacttaactgaggtgccaaacctgcatatgaatcagaaaggctcattctaatcttgtccgtacaaaacggggtcttaatttagtttcgggctggactgatcagggccaattaatgctcggtaggatccattgtttggactacaacttcttaattgaacccaaggcccaagtaaagacagcgtgtgcacgtttgggaacggctaaattaattcgtgaggaggtgagaggaaattttgatac

SEQ ID NO: 60530 - DNA, 116 bp, Zea mays
  Clone ID: MRT4577_155203C.1
gcacccaccgcgcctgcttcagtctgcagctagcttgaagaggctgtgtaaactggcgcgccagtcgcccgtcgatgtggcgtcggttagttggctgctgttgctgtgcgtataaa

SEQ ID NO: 60531 - DNA, 718 bp, Zea mays
  Clone ID: MRT4577_155204C.1
aattcggcacgaggcttcgctcccctaggtcgcgagcgagcgacggccgactgcgcgagaccgcgagtgaccgccggtcgagccccgaggccggagcggctcccccgcaggcctgccctcgtctggtcgccgcctcgccgcgcagcaaccccgcgacccgctgcccggccggcccgcgttactgagcagccgtgtgcattactgcatttgtagacagcgcagctactggctgacccgactcccttctctcccaattctcagcgggcgatgcaggcgaagaagctgaccctgctgcagacggtggcagctgcgggagtcttctctgccgtctccttttggtatggcttcatgtttggaagggagtccgcgcggcgcgagcttggtggcatcatagacgacctccgcagcaacaagcccaccaatacccctgccggtcccgatgctcattcgaagccatagtggggtatggtattctgttgttcctcctttgccgtattaaatctaaatggtggtcaagcttgtcttgtggatcctgctaggctgtacacggaagaactagccttggagctaccagtttttttccccttctttcataatgtgtatacggcttgaacatcagtttttagactgaaaaaaaaagttaacctgccacaaaagacaaggaagaaaaacaagataaaaccctttttgatagaaaaagggaatgggaaaagtaatc

SEQ ID NO: 60532 - DNA, 188 bp, Zea mays
  Clone ID: MRT4577_155205C.1
tgcgagatggagagagagaaggaaacctaggcagctttccgtttcgggaaattcccgggcgccccgttcgcgctgccccgctgctcccgccgccggttgccaagcccccgcacgctctgcgcggctcgctcccggtaacgtgttgccctctttcgccgcggcgaatttcgctgtttggatcgtgcgat

SEQ ID NO: 60533 - DNA, 343 bp, Zea mays
  Clone ID: MRT4577_155206C.1
tcgcgatgcacaagcggagacggtcctcgagaggcgcgtggaggtggcagttcctgagatgggctgaggcggcggttctcgaggggcacgcgtggtggcggctccgcaaagggcacacggtggcggtggccccctaggcgtgcgacggcggctttatgcacattaggggtgccactgcccgtgcatgcctctggccaacgtcgctcgtgcctcccgaggacgacattctccgatccggaggctttggggcatcctcctccgacgacctcatctgctccatgcgttatgcattctataatatttttatgtcgaccggtgcaattttaatgcattccatttgagt

SEQ ID NO: 60534 - DNA, 546 bp, Zea mays
  Clone ID: MRT4577_155207C.1
cgcgttactgtgcagccgtgtgcattactgcatttgtagacagcacagcgcagctactggctgacccgactcccttctctcccaattctcagcgggcgatgcaggtgaagaagctgaccctgctgcagacggtggcagctgcgggagtcttctctgccgtctccttttggtaccccctcaatctcccgcccccctgaggattctcgctggttctgagcatcctagatctcccgtgccatgcctcttgtgctgcaggtatggcttcatgtttggaagggagtccgcgcggcgcgagcttggtggcatcatagacgacctccgcagcaacaagcccaccaatacccctgccggtcccgatgctcattcgaagccatagtggggtatggtattctgttgttcctcctttgccgtattaaatctaaatggtggtcaaacttgtcttgtggatcctgctaggctgtacacggaagaactagccttggagctaccagtttttttccccttctttcataatgtgtatacggcttgaacatcagtttttagact

SEQ ID NO: 60535 - DNA, 347 bp, Zea mays
  Clone ID: MRT4577_155208C.1
tttttatttttatttcattttttctttcaccaattaaaatagggggacattgggatctttttttttcccccaacaccacacacaaacacactatacttacatccagcgcattgaatgaatcacaaacactccatagagcagaaaacataggagactaacaactgtcacaccctctcttacacaaacctataaagacacaagtatggcactcaattaacacccccttatggtcggacaaacacctccacaagctagaaacattataatcccatccatacaggccaaaaccacccattaaaacaccccggagaggggccaaaaaaacatctttaaccttgggcccaaaa

SEQ ID NO: 60536 - DNA, 647 bp, Zea mays
  unsure (1)..(647): unsure at all n locations
  Clone ID: MRT4577_155209C.1
aacgcgagaaagaaaacgtgcggaaacaaacaaggaaggagaaagctcgaggcttcctctgcccccgagcgaatcccacccatcctctcttcctccccccacgtcttcctccgctccacccctttcctcctcccagctcccgtccgtccaccgaatccgagccgcttgttccctccaaacggtggggcgcggctccgatccgcccgatccgggtcgctctcgaggctccggcgcgcgcggcggcggccggtggcggcgatggattcagaggacgacacgcgcgactccgccgacgaggacttctacagcggcggcgaggcgggcctcgccctcagcgacgacggggacgcggactacgatttcgccgaccgcgactccgatgactcggatgacctaatctcccacaggcagcagcaaaactacagtgtactgagtgaaactgacataaagcaacatcaagcagatgacatgaatcgggtttcaactgttctttcaatttcgaaatcagaagcttgcgcccttcttcgcagttataactggagcgttagtaaggtgcatgacgagtggnttgttgatgaagcacgagttcgtactgccgttggtttaccggagaaacaaaacgaaatgccaaatgaaagagaacttac

SEQ ID NO: 60537 - DNA, 515 bp, Zea mays
  Clone ID: MRT4577_15520C.1
gagagagcagctcactcccgctgcccagtcctcgacactcgcccactccgtcgccaaccaatgagccttcgccatggagctatcgctcctcaaccccgacagcgacgcaccgccaccgcggcggccttgccggttctgcccctcgcgcggagcttagtggtacgataacatgagttagcttaagacgatactatcatggcgagcaaattgtaaactatggagaggtgttgcgcgaatgaaatataatataagttcctaaagcctggtatgtaccaaacaatctcaaacatgaagaggtgtatcttcctaaagaagatagataagtcagatggacgagtcgacaagagttctctagaaaaagatttctaaaaagactgtaatacaaatgatttatataagcattctacaaaacttatgccatgtccagaagggaaacactgccaacattatcctaggaagattgtttaaagaaggatttctgggatatggagtttgactggtacttctattatgat

SEQ ID NO: 60538 - DNA, 613 bp, Zea mays
  Clone ID: MRT4577_155210C.1
agaacgccttctctagaccatcctcctcaccattttccatatcctagccataccctcgccgccggctgcgctatgcctgccaatctcctcccgggggatgggcgggacgcctttcaccgtgtgatccttcgggaaggggcggctcaccactgccctggaccgccaagatcggcccaggtggtctctccccgaagaacatgggacaggaccttgcccaggagacagcccaggactgtaacgggctgcgcgccaacgtacctctcactgtacataaccggcagactacggttgccagacccccctcctgcgccgcgatcgtcataactgcgctcaaagaccccaagagggacaggaacaatgtcgataacatcatgctcagcgcgcacatctgcctctacgacgacgtgcacatcgctaagaccatgaggaacaggtacatggtctaggagttggccggctccgacatggacatcctcggcacctgggactaccttgggtgcaccgtcgagagccaggaccacaaggacctgcacatctggattgatgacggcgaggtcaagatccccgccgcttgcaaactagacgtcgaaggggaccttcattgaggctgctg

SEQ ID NO: 60539 - DNA, 2024 bp, Zea mays
  Clone ID: MRT4577_155211C.1
ttgggtccctcgggccggccggggaacagtcttccagtccaagtcagccgcccgccgcccccaagccgtagcccgccgccgactgcagcttccggctccggcgtgcgctcagctcaactgctccaagcctccagctctcgcttgccgcccagctgccacccgccaggccccatcccctcaactcctccaagcctccagcttcctggtgttgtgctacaagagtagacagatgcggttcagttcagttgactgcacgaaatctacttatccgatcgccaagtcaatgcctcctgcttccaaggttccttccaacgcaacagcacccagctggactggagctcaacaagtattgcccagagccccagatcacaaccacaatcgcttaggaagaggatcacagacaactgacagcgtatccatcgttgcaaatttccagaaatttctgcacatccaattgaacttctccactcctacaaatactcttcaaagcacacaccagtacgcaacactacaacagctatcaatctcttggaaaaagagaagcaagaagaggaacaaatctcctcctgtcttgaagaaacaatccgttaattacacatgaaggaaagaaagaaacgaaagccacccaacggagctagccaggccaccaatggagccggagctgagtcagctagcagctacccggacttcttggcccggaggatagtgcacttggtccgctggaacgcggtggcggcgacgtcggggtccgacgagctgcagctggagcgggcagacgacgacgagcgggcacttggcggaccggcccttgtactggagcaccgtgtccagccgcatctccacgccgcaagctgcccgtgtcgtttctccgcccggaactcgcccaccccgggcctggtcagcttgatgggcttgcccacgccgccgactctcacgctcagcgtcgccgtcttccgcgccttgtgcttgaaccccggcacggacgcggagtcgtcgaagcgggtgccgttgaaggagaaggtcacggcgagcgcgccgtactcgatggcccggtacatgttggggttccggagcgacaccgtggcggtgacgttgaaggagatggtggagttggacgccgggtcggcgggcgccagcgcgaaccgctgcagcacggcgtcgtcggccgtggccttgggcgggaacaccacgccgaaggcgagcaccaggacggtgatgaggcctcccacgacgacgatggcggcggcccagatggcgagctgcgtccagctgcagtcgtcacagcagccgtcgcccttgccgccgcaccagccctcccagaacgccatggccgcccgcgctgctcgggtgtgggggtggtcgggtgggggacgcggatcttgcgggcctctggctggctatccaaggcaacggtgctgcttggtgttgagagaatcaatcgccctgcctgccactcaccgattgttattgttgaagaacgaataaaagagggagggccagccggccaggggacgacgaccaagacttggttggggtcatcgccggacgcgggacacggaggaaggtcacactcggggaaaccagccacccaccaatccgaaatcttggagaaatggaagggcattgcaagtgaaattaatcaggattcaggagacgggttgtgtcgctggacggagatgctgctccacttccaccggccgccggcggctggttggtgagccggcgcactttagggctggttcggttattcccaatacacatggattggatgagtttgaaaaaaaaataagaaaatgtttgacttgtttgtgattcaaactcatccaatcccactcaatccacatgtggattgagagctatccgaacaagcccttactgggggagggccgcgccagcgcccgtgccaaatcgggtacagtacttactccattacaaaattagttgtcgttctcgaaaaatcaacaatgtttaactttaatcaaatatttatatatttataataaataattagtattattagatag

SEQ ID NO: 60540 - DNA, 269 bp, Zea mays
  unsure (1)..(269): unsure at all n locations
  Clone ID: MRT4577_155212C.1
tcggaggcggttggcgctgcggcgcggcccgatccggcagcgccggcctcggttgccgcccgggcgccacctggggaacgcggtgccgtctcgggggacccctcatctgaggtgaaccgtgtcggcggcggtatttctaacggccacggcgacgaccgggcggctgccgcggctgagaaggctgagaaagcacggaaacgcanggtgaggagtgagttgcggcgccgactggcgggggagctcgaccaggtccgcgtgctctccaagcg

SEQ ID NO: 60541 - DNA, 856 bp, Zea mays
  unsure (1)..(856): unsure at all n locations
  Clone ID: MRT4577_155213C.1
gcaacggcangaaagcggtaagcgggaccggcagcgacgaagtagactgcggcgaggtcgtggacgggatcgagctcaatttcgacgccgcgccgctgccccccgagtggcaacgctgcctcgacatcaagtcggggcagatccactactacaacacgaggacgcagaagcggacgtggaaggaccccaggggggagccggagtaccgcgccgccgccgaggaggaggaggaggaggactccgcgaattgcgcgccgccagggctggacctggagctgaacctcacgttcgagccgcgccgggctgtggcccacgagaagaagaggcccaaaccccccgcggctaataaggcgacacatgaccgtcgtcgtcagcccgcggaggaggccgaggacagcagcagcggcagcagcagggagatggtggccggcgtgtgcatgcgctgccacatgctggtgatgatgtgccgcgccagtccggcgtgtcccaactgcaagttcctgcacgcgccgagccgccccgtcgccccggagccggagccggagccgccggtgccactgctcaagctcggcctccagctgctctgctgccgggactagctggctggctacatacgctgcatgccccaccggcagcgtcgatcatcaaatcaaattaaacgggagcgcgtcgtccgaccgacctaccatggatggttttattttataccgtgctcccccccggcctagccatgcgtggacccaagtggaacacagtagagcgcgcgcgcacgtgtgtgcgtccgcatgtgcaaggggtggggtggaggggctcaggatcacgttacgtaattatattaaaggcagcgtaatccaat

SEQ ID NO: 60542 - DNA, 160 bp, Zea mays
  Clone ID: MRT4577_155214C.1
agaaaaacggacaccattctgtacagaaaggattatgggacaacgtattacgaacacagaagctagcccagtacacacacctagaaaattgcaataagtgaggaggcaacggacggcgatctagacatcacgagatactagaccacatttacgcagtagg

SEQ ID NO: 60543 - DNA, 812 bp, Zea mays
  Clone ID: MRT4577_155215C.1
gggtacctcgaggccggccgggactctcctcatcccgctgcgatcgacctgctcccttttcccaccgagcccatggcggaccagctcaccgacgaccagatcgccgagttcaaggaggccttcagcctcttcgacaaggacggggatggtaaggttcccttccctcctcccctcacacccctgttcgtgttccttcggatcggatctcagtggtgatgttagacgtccgcggctgcctacgtagtggcattgccgcccgaaaggtttgtttaggtggggtagatccgaaacaggccggatctggaccatgtccgcggcggggcggcgggacttgatcgcgtagctgtcgtgtgcatttctccctaccagtggcggaatcggcgatgtggacctaagggctaaggcttatctgctgccttgaccatttcgtcgctgacaaaaacaaagtgacaatcatgccgttctctgtttgtttatctggatcgttattacgctgtgaatcctgcgatatgtggctaagtgatttttcttctttttctgggggcagtttagcctttgacccagtcctaggtgtggtcactaggactgtgtagcatgatgagtgaggttgcagcaggctgattgctagtggacgttttttccccaatttgataggttttcacgctccaggttgtgcaagtaattttgctagtgattgtgtgatccatcttcaacgttgaaccttgtttttcccctaaacccccaacagaaatcttgccccgacttctattgcaaaattgtaacgcttagcaccctgattgactcaattcctg

SEQ ID NO: 60544 - DNA, 368 bp, Zea mays
  Clone ID: MRT4577_155216C.1
atagtgagtcgtattaaacgcggcgacctcaggaaccggatcgggctcggaaggatcggcgcggagcaggatctcgtgtcaggcgttcgtcaaggaggacctgaggtgcgagatcgacggacaccatcgcagcgccgccgccagcatcggtcacgacggcagcgcttgggcgcagtccgagagctgcgccgacttcgagcctgaggaggttgctggtatcatagaggactttgatgaacctggtagtcttgcaccagctggtcttttcgttggaggtacagagtacatggagatccaaggtgaacctggagttgtcagccgaggaaagagaggcactgggggcattacgatcaggagaggcggcaggt

SEQ ID NO: 60545 - DNA, 491 bp, Zea mays
  Clone ID: MRT4577_155217C.1
gacgcctgcggttccggtccggaattcccgggtcgacccacgcgtccgatctggaccgtgcggacttgctcgtccctcagctctcctgttaggcgtctcttttctccaggaggaaaaaatggcagcagcagtagtggatccgcaacagagcgtggtgatgagagtggccaacctgcccttggtgagctctacctacgaccttgtgtcctccgcttatgtcagtacaaaggatcagtacccgtatttgagatccgtgtgtgagatggccgagaagggcgtgaagaccgtgacctctgcggccatgacaagtgccctgcccatcatccagaagctggagccacaaattgcggttgccaatacctatgcctgcaaggggctagacaggatggaggaaagactgcctattctgaaccagccaacgtccgacattgttgccagtgccacaggtgccgtaactgtcgcgaaggatgtggcgtccactaccatggcgt

SEQ ID NO: 60546 - DNA, 343 bp, Zea mays
  Clone ID: MRT4577_155218C.1
cgactcactaagggagctggtaccctgcagtaccggccgaattccggggcggcgcgttttggtatacggcgatcagggcgacgttaggttccggcggagccccgcggacgcactgattagctcacaggaccgacgccttcggacaggttcaacgctaaacagcgtcaccgtctccggacgcgtttttcagaatatgaaagtgactggggacctttcctgggcaggcgcaagactccaccgtgagggcgacaccacccttacctgctaggagtcccaggcctgcttttgctcctggtaccaccaggtggtatcaacgacgacgacggtgggggcggcggcgccc

SEQ ID NO: 60547 - DNA, 1014 bp, Zea mays
  Clone ID: MRT4577_155219C.1
gggtacctcgaggccggccgggaccacattattgtcttgtgttgcccgcaacccaagcggatcaaaccctagatctcgtccccgttcctccgatcctcatggattcctcctcctcctcgtccagcctgagccagcagcccgagttcgattacctcttcaagctgctgcttatcggcgactccggcgtcggcaagagcagcctcctcctccgtttcaccgccgactcctttgaggacctttcccccaccataggtgttgacttcaaggtgaagatggttaccattggtggcaaaaaactcaagcttgccatctgggacacagccggacaagagagatttaggaccttgaccagctcttactacagaggggcacagggggttattatggtgtatgatgtcactcggcgggaaacgtttactaatctttctgatatatgggcgaaggaaattgacctgtattcaaccaaccaggactgtataaagatgcttgttggaaataaagtagataaggtaatcaattctaaactctgtctgcaccttttatctcttgtttctgatcgagcagcccctgtcgtgttttaccggccgtttcattttggcaggaaagtgagagagctgtgacaaaaaaggaggggattgaatttgctagggaatacggttgtttgtttctagaatgcagtgcgaaaacaaaagtaaatgtagaacagtgctttgaggaacttgtgctaaagatattagacacgccaagcctcctcgctgatgcttcgtctggggccaagaagaacatcttcaagcagaagcctccggaagccgatgccgctgcaagcagctgctgttaacatgcttttgccatgctaattccgcgtcctcccgtggatgatgacgatgatatctttgtttggtgtgtcggtttattgtttcttcttcttttggtcctgtatatgctgaatttattacacccacacataactgtacgttggcagcagctatataatatatcgttttttgttgtttc

SEQ ID NO: 60548 - DNA, 313 bp, Zea mays
  Clone ID: MRT4577_15521C.1
gggacccgctggcgccgatgcgcaactacccgacgtacggcttcactgcccttggcgccggctccacgtcactgccgagccagccgatgctcccggtgttggcgccgtcctccctgcaccagcacccgctgctgaggcaccggcaggcggtgcaggctgccggtctcgcgtggcgcccaaggccgacgtgaaggtagagggcagcgttgccggcggcgggatcccgtcggtgtaccagcagatgatccgctgcgggctgcgtctgccccaccagatgtagatacttaacagtggagaggattagagtgattct

SEQ ID NO: 60549 - DNA, 1076 bp, Zea mays
  Clone ID: MRT4577_155220C.1
tacctcgaggccgccggccgggagagcaggtttgccttcgccttcacaattcgcaccacattattgtcttgtgttgcccgcaacccaaagcggatcaaaccctagatctcgtccccgttcctccgatcctcatggattcctcctcctcctcgtccagcctgagccagcagcccgagttcgattacctcttcaagctgctgcttatcggcgactccggcgtcggcaagagcagcctcctcctccgtttcaccgccgactcctttgaggacctttcccccaccataggtgttgacttcaaggtgaagatggttaccattggtggcaaaaaactcaagcttgccatctgggacacagccggacaagagagatttaggaccttgaccagctcttactacagaggggcacagggggttattatggtgtatgatgtcactcggcgggaaacgtttactaatctttctgatatatgggcgaaggaaattgacctgtattcaaccaaccaggactgtataaagatgcttgttggaaataaagtagataaggaaagtgagagagctgtgacaaaaaaggaggggattgaatttgctagggaatacggttgtttgtttctagaatgcagtgcgaaaacaaaagtaaatgtagaacagtgctttgaggaacttgtgctaaagatattagacacgccaagcctcctcgctgatgcttcgtctggggccaagaagaacatcttcaagcagaagcctccggaagccgatgccgctgcaagcagctgctgttaacatgcttttgccatgctaattccgcgtcctcccgtggatgatgacgatgatatctttgtttggtgtgtcggtttattgtttcttcttcttttggtcctgtatatgctgaatttattacacccacacataactgtacgttggcagcagctatataatatatcgttttttgttgtttttaaaaaaaaaaaaaaaaaaaaaaaaaaaaaaaaaaaaaaaaaaaaaaaaaaaagggcggccgccgactagtgagctcgtcgacccgggaattaatccggaccggtacctgcaggcgtacag

SEQ ID NO: 60550 - DNA, 665 bp, Zea mays
  Clone ID: MRT4577_155221C.1
ggtaatggtcaggaattcccgggccgacccacgcgtcagcccacgcgtccggcaatttgttatctgccatgcataactagactggatggtcatggctcaaactaacttactttttgcctacggctgaaacatttagacaggcagcttaccatataaatgtcacctcctaggtggctaccctgactaccttttcgcgggggggggggggtgactttttttttactgcaagatctaataaactactgtggcgtttaaatttgtatatttccagatgacattcatcctgcgcatgatgaacaataaatcaaggttgtcggtaagtgaaaatagagatcaagattcaacgaacacaacacagatcctgatgtttagtggaagtttgctgcctgtaatgtttctgtcaggcttattgggatgtggagctggaattttagcatggaccaatgctttaggtgtataggtgagagattaagtagagttacataaacccaaaaaaaatcacctaggacgtagcagttatagcacagagagaatacttgatggacttctcatttttaggaagatgacccggcttaaagttattttgaactcctggtcttgtaatatgcctttttaatattttaagctctattcacagacatatggaaacatgatgctataccggg

SEQ ID NO: 60551 - DNA, 344 bp, Zea mays
  Clone ID: MRT4577_155222C.1
tcggcttttttcttcttccttggacagttcacgaggtgaccacatatatacccccacggggccccccacctcgcaatctccttaacccggtcggtttatttggcttcttcttggcaatccgagagcactcggacttccacttggccaaattatggtggattgaccggattgcgggaggccaggcttgaagcttgagatttcttctccggttcgacccggcatgggccgggcttgaccgggcgcttcttggctttttctttttcggcctttttaagcggcttgtcgttggatggagcaagcaccgccaaaccggaagaggaggaggaagatggtcccccgtgatc

SEQ ID NO: 60552 - DNA, 840 bp, Zea mays
  Clone ID: MRT4577_155223C.1
ggatcgaatgtcacatctttactacataatagaagttctatacaaaataaataaataaatacattataaggagacagcggtccagcaacccaaagttgactgggagacgacggcctagacctctcacgaactcgtcacagcatcctccaagcgcctcatcctgcggtacttgttcttgaccggcaatcgcagaatgaatacccctggccacggcgcacagcggacatgcggaggagcatgcatttcgtcaacaaattccaagatcttcggccgccaaaccgccgcagaaagttcacctgcccggacctccacgcacggtgagactttccggtacgaatccgtggactatggtgacgagcccacagtgccggacccagcgaccctccagcgcacaggagcagccgcaaacacgcaactgccctaccggcaccgcaacagctgcccaggagcgatcccagtccgtcttcccaaccctgctacgcagggcgcgccgtggttaggcccccagaagcaactgctgcaagcttgagtggccctgaagccccgacgacgaccatggccatgcgtatggcgcgatttctttctctcctcggcgcggcgacgattttttttgttctctcttgaattcgtgctcgccggtgacctcacgctttcagatcgtgcgtggttaaggcttcaggggaaagcggtgtccagccatggcttgctagatggattagagggggggtggcgaggacccgatttatagcctggggggcgagcgcacggaacagccagagtaatcgagcagcagatatctcggcgggttgttgcaacgaccgcaaagattgctgggatctt

SEQ ID NO: 60553 - DNA, 432 bp, Zea mays
  Clone ID: MRT4577_155224C.1
aaagggaacaatttcatagggtcgggtttaaaaacaaaacatcccgttcaagaccaagtttttaacttggtaaaccataggtgctcaaaaaaaatgggtgggggggaaaatggcaagggtccaaaccctccagtttcctggaaattttaacccttattggaaaatttaaaacagccgggccccctttcccatagggctttttagggacaagcattttacattttgccaattttttttcaagagcccccccgggaagttgcccctcttttgccccttttggaaaattttttttttattcatgccccagttgccaacagcaacccccatgcaaaggcccttttttaggtggaacttaactggagcctttgttttattaaccttggactcaagggattcctggggtgtcaccaagggagggaattttcctgcccc

SEQ ID NO: 60554 - DNA, 836 bp, Zea mays
  Clone ID: MRT4577_155225C.1
tttttttttttttttttttgaatatgacacaggatcgaatgtcacatctttactacataatagaagttctatacaaaataaataaataaatacattataaggagacagcggtccagcaacccaaagttgactgggagacgacggcctagacctctcacgaactcgtcacagcatcctccaagcgcctcatcctgcggtacctgttcttgacctggcacttgagaaggtaccaacttgctcttcagatgacacgtgacctcactgctaaaccggcaatcgcagaatgaatacccctggccacggcgcacagcggacatgcggaggagcatgcatttcgtcaacaaattccaagatcttcggccgccaaaccgccgcagaaagttcacctgcccggacctccacgcacggtgagactttccggtacgaatccgtggactatggtgacgagcccacagtgccggacccagcgaccctccagcgcacaggagcagccgcaaacacgcaactgccctaccggcaccgcaacagctgcccaggagcgatcccagtccgtcttcccaaccctgctacgcagggcgcgccgtggttaggcccccagaagcaactgctgcaagcttgagtggccctgaagccccgacgacgaccatggccatgcgtatggcgcgatttctttctctcctcggcgcggcgacgattttttttgttctctcttgaattcgtgctcgccggtgacctcacgctttcagatcgtgcgtggttaaggcttcaggggaaagcggtgtccagccatggcttgctagatggattttcccgcccgccggctcgaggtcccaatg

SEQ ID NO: 60555 - DNA, 121 bp, Zea mays
  Clone ID: MRT4577_155226C.1
cgcacgccgtacgcctacgtgatcggcatgacgtctgggaagggcaagcttacgtacacgggcttcccacggtacatgtcctatatggcggcaggtaaagccatgtgactggccctggacc

SEQ ID NO: 60556 - DNA, 799 bp, Zea mays
  Clone ID: MRT4577_155227C.1
tgggaccctcgaggccggccgggaaattttcccgcctctaaccgccttctcgggctaccacgctgatccggcgtcgtctgcggtccttccgaccaactcttcaatcttgtgaattgcttttcgcccagttagggcagatcaccattccttgcaggagttcgttgccgtctctccaatcctccctggctcgactgctcagtggtgactgatgtggtccactgccctgccctgcacctgcaagttagtttcactcgtgatccgtcagcttgccacccagcaaccgctgattatcagaaatccacttctcaaagcttcaaggagcatccttcgaacaagttcctgattccttcgcctcccgccctccccctttcttctcgggcatccttgtccgttgaccacagagggaagaaatctgttccgggcaggcaggcgcattctccgccacaatggacgatggagctgacctcccctgccagttgctcttctcccacccggagatgcctcacagcttcgacgagttcttcagcggcgccacgaccacgaccacctgcacccacacgcacagctgcgaccctccgggcccctcggccgccatgcacacccacacgtgcctgcacacgcacacccaggtcctgggcagcggcggggaggacgacggctcagcgaagccgcggaggcccctggggaacagggaagccgtgcgcaagtaccgcgagaagaagaaggcgcgcgcgtccttcctggaagggggagtcaagaagctgcgcgccgccaaccagcagctcgtgcggcggctgca

SEQ ID NO: 60557 - DNA, 326 bp, Zea mays
  Clone ID: MRT4577_155228C.1
atcgcacaagtaaacccaacctttatgcattttcttaaaaatgaaaatatccggtggaaggcggatccatgatggactactcggcaccccaaactcatatacacctgctacggagacataatacggctgatcgttggaccatttatgtgggagtggagcttctattctggatgcacaacacgagtttgagtggttgctacaaccccacacagataaaggtaaaaaggtacgacttcctcttcaatctcctccaaagagggttaaacaaggatcactacacatcaacgattctaccagctaaaaggatgtcgcttaatcgcacaatg

SEQ ID NO: 60558 - DNA, 208 bp, Zea mays
  Clone ID: MRT4577_155229C.1
cccacgcgtccgaacaaaaaattagatataataactaataacaactaaaaaaaagcaggaaaaatctccaaaaaaactaggcctccacactatcaacaacccccatctctacatctgcctaaatccatcatcttatcacttctctaactctccctaccactaatctaccgctcctccttctacaacttcgcgattctaaaaaccctgg

SEQ ID NO: 60559 - DNA, 446 bp, Zea mays
  unsure (1)..(446): unsure at all n locations
  Clone ID: MRT4577_15522C.1
gaagaatggagctcttcaggcctttctagttaaacacatcaacaattgggtgaccagagcatactgtgacaagcaactcaagatttaccaaagtctattgtttgcaatgttcatggtgttaacccaaagttcctgaagattggagaagaaataactgtcaatagggggagtggggagcctccattttccaagggagcatattttcttgggaagatggtttgngccaaaggttatagggaactcatagatttgatggctaaacataaaagcgacttagaaggattcaagttagatgtatacggaagtggtgaggactcgcaagaagttcaatccactgccaggaggttagatttgagtctcaattttttcaagggaagggatcatgctgataattcacttcatgggtacaaggttttcataaatcccagcattaatgatgtctgtgc

SEQ ID NO: 60560 - DNA, 360 bp, Zea mays
  Clone ID: MRT4577_155230C.1
tttccagattttttaaaacccccacgccaacaaccgggggagcttttcaaattttacgcaaccctcaaacgctcattgccaccgtcaagtcagcacaagaacgatgacccgacccaacggctccacgatctacatgggcaacctccccggcgacatccgcaagagggaagaagatgatctattgtacaaatatgcacttatagaataaattgacatcaaaattccaccaacgccaccaggctttgctttagtagagggggaggacgcacgtaatgctcaagatccactataaggccatgatggattcaactctgatgaccataggcaacggaagcgaaaagcccatggaggacgaggcac

SEQ ID NO: 60561 - DNA, 413 bp, Zea mays
  unsure (1)..(413): unsure at all n locations
  Clone ID: MRT4577_155231C.1
gaggnttccgtcgaaccccccaggcgggactaaagaacaagctttcacggaatgttcctttcgacgtggaacgattgttcccaaggctgcaaaaaaaaaaaaaaaaaaatttttttcttcttttatttatattacccaggagagtcccggtctgggggtgttcttttgagacaaaacttttgggtggggtaattccagatccaacaaggcgagctgttgcagggtccatttccattgcccaaatttattggggccccccccccccacatgggggcccccttccggaagaaccccccgtgtgttttcgattacccaacattaatttttattttctcgggtttatccaactttattcgacgatcccctttggaaactcggaaaactggttttgttattctaacgcattttttttt

SEQ ID NO: 60562 - DNA, 451 bp, Zea mays
  unsure (1)..(451): unsure at all n locations
  Clone ID: MRT4577_155232C.1
cccacgcgtccgcccacgcgtccgcccactcgtccggcaggtgttacgtgttttgcgcctcgttcatgtgagtgctttctctacatattatacttgcgtcctgacaatcctataggttcctgtttactggcaaaccataagacggtgtctaacaattcactcatatgatcatctaatacactgttttgcactgtacattgtgcaattcgcagattgaaatttgaatataggtacaaggatgggtaaacactggagatagctagcctaaagatgaattttagatatattatgtatgagatagctagcctaaagagggagttttagatatattctgtagttgatattcgagtggtcatgcagttacgatccctcatgtttagagataaatgataggaagacaccttgtctttcgntcatgtttaggttgaagtttagaaattacgatgtatat

SEQ ID NO: 60563 - DNA, 470 bp, Zea mays
  Clone ID: MRT4577_155233C.1
cctagctgtggtgatctgaaccatttatctctgcaccctgcactggcgagacctgctgcctaaggttccctgggcagctgaactccgccctcagggaaggtggcgctgaacctgttccccttaccgcgtctatcatctttttcatggcccggattagaaccactgacttcccgagcgttaccagcacttcccgcccttacattccacgagctcacacattcttatgtgggcatgccaagaacaatgttgtgtgccgatggccctcctcatgggcgttacctcaccgtctcatccatttctcgcgctatgatgagcacccaggacgttgactagcatatcatcaacgtgcaaaacaagaactccaactacttattggatgttatccccaacgccgttgagtcctttgtgcgcgacataccaaccaaggggactgacatggaatccaccttgatcgagagctcgagcttcat

SEQ ID NO: 60564 - DNA, 390 bp, Zea mays
  Clone ID: MRT4577_155234C.1
ggaggacgttcagagattcaccctaaggaaacgaccacctaccgccagacatgtggaaaaacgtcacaaccacacagaggatctgctgccagcccactggctttggtttgcttatcaacaggccgattttgatgagcgcacatgaccctgttggcacaaaggacggaatctaggaaccgagcatggcccagccttcctgctactggacatacctggatgaccgccccatcaatgaggacaaaagatgccgacagggtcagcaaccctcagcaggccaaccctcggccctaaaaggaaagccttgacatcttagtggcgctgccaaaacaactgtctgattaataaaccgaccacggcgatctgcgcattaaaactatgcatgctttccgt

SEQ ID NO: 60565 - DNA, 205 bp, Zea mays
  Clone ID: MRT4577_155235C.1
cttgcttctttacacaccatacgttcgaggagcagggtcatcacatccatcgggcgggcttgccaatctattatcaatctactgtacagtttagtgccatgcctcaattattctaatccataatgtagttttctttctaaatatgtaaggatatcccaccaatatgtcttgcttagacatattctacaaattttcaattaataat

SEQ ID NO: 60566 - DNA, 500 bp, Zea mays
  Clone ID: MRT4577_155236C.1
atctctctctgcagcggcgggagacggctcagcttagaacctctccgtctaagcctctacgaggatgattcttcgccgcatatagagctttggatctagatctctcttctccccgattcctcgattgtgacgggaccttccatacgaaaaattatccgccgagtattgcgtgctgcctgagatacagggcggaagaatgttggaaccttcctcggtactcacagtccgcaaaggagatctggagatgtgtctgaggctgatctccttaagctgatcgtagcccttgcacagaggattccagagatcgtgctggtagtgtgcgaggaaaaaaatgacttggcggacggaaaagataagtgattccgcgagtgcgatgtgatatagcatttcttgacaaactaacataaaactgaaccaatgattacgtattctgtatcatctaacggatagcttaccacaagaacaaaggtcacgtgaaaagtaagtgtaagtatgattct

SEQ ID NO: 60567 - DNA, 105 bp, Zea mays
  Clone ID: MRT4577_155237C.1
agaagatggattcatgcaatatgttctcactctggtccatccagggtgagaagatggattcatgcaatatgttctgatcattttgcatgaatccatcttctcacc

SEQ ID NO: 60568 - DNA, 318 bp, Zea mays
  Clone ID: MRT4577_155238C.1
atgtcgagaatcgaggcccaagctttttttttttcttatgtcttattcattgaagtgggaagtatcatcacatgcaccttcactctcataataacgctgtttaggcgcgaacacgatttaactataagctttttgacaacagggtggtagcttctaactgggggtgcgcgctggttaactgagcccacaccgtgttgggagccaaccccttgttagccgatgctttttgttgattcttggctgcccccctgcggggtgtttttgcccgggggggcgcctcgccctgcttctcccccctctgcgggcctctctttttcc

SEQ ID NO: 60569 - DNA, 146 bp, Zea mays
  Clone ID: MRT4577_155239C.1
gcaccatgtcgctctgagacagagacactgatcatcctgatcctttcgcacaacggccatactgaactagtgacctggtctggagccgtttcatagctgcggatcataatccccattctttccatggggttgattaacacatttag

SEQ ID NO: 60570 - DNA, 423 bp, Zea mays
  Clone ID: MRT4577_15523C.1
ataaaaaatcaaaaaaaaaaaaaaaaaaaaaaaaaaaaaaaaaaaaaaaaaaaaaaaaaaaaaaaaaaaaaaaaaaaaaaaaaaaataaaaaaataaaaaaaaaaaaaaacaaaaaaaaaaaataataaaagggggggcccccccaaaggttctaattttattttcctttcaatgcaatttcttctcttttcaaaagtttcccaaattttcatttaaggggctttttttttaaaactttttaaggggaaaacccttgggtttcccaatttttaccccttttaaaaaaatccccttttcccaacttggtttaaacctaaaaggccccaccctttttccctttcctaaaattttccaaccttaaagggcatttgtgaccctcttttttaggcgacttaaactccgttggttttgggattttcccc

SEQ ID NO: 60571 - DNA, 886 bp, Zea mays
  Clone ID: MRT4577_155240C.1
ccggccgggaatatagattgcagctgcagcagttcaaacagcttcaaacagctgtatttattaatctgaagccaagtcttacatgtgttttaactcacgaacccaccacatcacagagggcaagccggcgaagtttgaagagcgacggccgacgactgaagcaataatggccgctcctctatgctcttccgtttccgtgtctctcatgctgctactgctagtgctctcggcctcggcctcggcggcgtccgccgcggacgggaagctgatccacctccacttctacttccacgaggtcgacgccggcacgcccaacgccaccgtggtcaacgtcgccagcctgcacaagaacgcctcgacgttcggtgacctgaacgtgttcgacaacgcgctgcgggagggggcggacccggcgtcgcggctcatcggcagggcgcaggggatcggggtgcacgcgtcgctggacgaatccggcggcctcaccgccatcgactttgccttctccgactacggcgagtacagcggcagcacgctggcgacgacgggacacttcaccgtgtcagccccatcggagcgcagcatcgtcggcggcaccggcaagctccggttcgcgcgcgggtacctcaccagcaggctcctcagctccacggacacctccatcgtcgtcgtcttcgacatgtacttcaccctggcccactggcactgatagtcgtccagtgcacggacttacttttttgttgttgttgttgttgttgaaattgtgcaagacgtaaactgttccaataaaagggcattaaaaaatgcaaaaaaaaaaaaaacagagacgagataagccaccaatagatactgggaaatttgggtataaaaaaaaaaaaaaaaagcggcc

SEQ ID NO: 60572 - DNA, 607 bp, Zea mays
  Clone ID: MRT4577_155241C.1
taatcaagagttagataaattacttggtaatattccctatctcaatggtggtttttttgatgttcatcagttagagattaaatatgaaaatatccaaattcctgatgatgcttttgaacaattatttgtcttttttggtaactgggattggcatttagataatcgtattactaagaatcagaatgaaattaatcctgatattctaggttatatctttgagaagtatattaaccagaagcaaatgggggcttactatacgaaggaagatattacagaatacattagtaaaaatacaattattccttttctatttgatgcgacgaagaaggaatgtgaggtcacttttcgtgccgatggggaaatttggtcgctactgaaagaaaacccaaatcgatatatttatgatgcggttctaaaaggtgttgatgtagatttaccgctagaaattgcagcaggaattaatgatgtttctcagcggcaagattggaatcaatcagcatcagacgaatttgctctaccaactgaaacttggcgtgaacatattgtccgtcgtcagcgttgtttggatattcgggaaaaactcaaatccggcgaaatgactagcatc

SEQ ID NO: 60573 - DNA, 731 bp, Zea mays
  Clone ID: MRT4577_155242C.1
atccttaaagggcaagccggcgaagtttgaagagcgacggccgacgactgaagcaataatggccgctcctctatgctcttccgtgtctctcatgctgctactgctagtgctctcggcctcagcggacgggaagctgatccacctccacttctacttccacgaggtcgacgccggcacgcccaacgccaccgtggtcaacgtcgccagcctgcacaagaacgcctcgacgttcggtgacctgaacgtgttcgacaacgcgctgcgggagggggcggacccggcgtcgcggctcatcggcagggcgcaggggatcggggtgcacgcgtcgctggacgaatccggcggcctcaccgccatcgactttgccttctccgactacggcgagtacagcggcagcacgctggcgacgacggggcacttcaccgtgtcggccccatcggagcgcagcatcgtcggcggcacgggcaagctccggttcgcgcgcgggtacctcaccagcaggctcctcagctccacggacacctccatcgtcgtcgtcttcgacatgtacttcaccctggcccactgatagtcgtccagtgcacggacttactttttgttgttgttgttgttgaaattgtgcaagacgtaaactgttccaattaataacagggccttgctggctgcactgcgctatccaaagtcacagagacgtgataagccaccaatagatactggggaaatttgggtac

SEQ ID NO: 60574 - DNA, 401 bp, Zea mays
  Clone ID: MRT4577_155243C.1
caccacgcatacgaggcagcattggacgggcgcttgagcaacatcgtccttgccgccgggccacccgaatccatgtctgtactacaggctccttgttctttctacttgtgatggtcacgacacaatataccgtgcgcgattacaccggcggataggtgcccttgaagcagcatgccaccaatgaggtgtcgatgtaggacccggacaccgacggcttgaacaaatcggccgcttccagccatggaacgaagcgctataccagaatcgcccgtgccaggaacaacacagagctgctcatatctatggtgcccttataggggctaaccctcaaggtacaacaggagttgaaaaccgagctgccggtgcagaactaagtcgctgtggcgaaccttgatgcctac

SEQ ID NO: 60575 - DNA, 376 bp, Zea mays
  Clone ID: MRT4577_155244C.1
attcgtctcgagctcatttccccacccttctttttaaatccccacctctacttaaccagggggggcctatataaaaggaggggcggcaaggttccttcaccaaagttctagcctcgttgggaaaggataacatccgatgtggaggacaaggcatctacaccactgttcaccaactagtcacccgacgtccgccgaaggagggaccaaccaaaagcaattctccccacacaccccctcaagatcgccaccaagacccaacatcctgagcgcttcatctttaaggacacacacttcctgggtgtacttggattagcgggactttgctatttattgggtgccagaccacaagatgtgccatatgagcactgcctgttct

SEQ ID NO: 60576 - DNA, 301 bp, Zea mays
  Clone ID: MRT4577_155245C.1
aaaaaaaatattatttttgatatttaaaaaaataaaaataccaaaaaaaaaaaaaaatataaagggggaatataaaataatgaggggggggaatatatttaaaatatataaatttaaggggcggccgttttaaagaatccaatttatcttacccttccttctcaatttaatattttttttattagttcaccaaataaaatttaattggcctgtgtttaacaacgtttgtactggaaaaacccttgcgttttccaaactaattcgctttgaaaaaaatccctttttctcaagtttgtcataa

SEQ ID NO: 60577 - DNA, 768 bp, Zea mays
  unsure (1)..(768): unsure at all n locations
  Clone ID: MRT4577_155246C.1
atcagtcacttggaacaggtgtttgaactgctctctgctgatgattggaaggttaagctttccaagtgcaagtttgcctaacaacaggttgcctatctaggacatgttgtcaattcaaagggagtgtcgactgatccagttaagatcgaagctattgcaaactagccagaaccttcttgtgttaaggaattgcgtagcttcttgggcctcgccgattattatcacaagtttatacgccactttggcattatctgccaacctctcactgcattgctgaagaaaggggttctgtacatttggaccagtgaccacacatgtgcatttcataccttgaagactgctcttactcaagctccagttctgtccttgctggattttgcttccctgttctttatagaaaccgatgctagtgcagttggagtcagtgccgtgcttatgcagcattgtcacccccttgcctttcctagcaaggtgttgggtcccaaatctcgtggcttgtcaacttatgaaaaggagtacctcactgttatcctgccagtccaacagtggcggtattaccacgagaatgcaatccgccgatccagaacgaggtaggccttccacaaaatctaaagaaatagtgtgccaatctgttgtgggaatcggcnagggctgaagtttgcccggatatgctgaccggtcaggctttgcttgtaacatatttgacatttttgaaaagtatgcatgcactgtttgagtctactccantgcaaaagttgcttgacccga

SEQ ID NO: 60578 - DNA, 994 bp, Zea mays
  Clone ID: MRT4577_155247C.1
cccagttcggttcccccatatctagcggtcgacgctccgccatccttctccaggactgccaagccaaccagcaagtcgatcttcttcttcggctcttcctctgctgacatcgctcgctcggtttcttgttggatcgtcgagcccggccggagagcagaggcagctaactgacagcagcgcgcgcgcagaggagaagcgaaatggcggcggcgacgatgggcgtggtgcgggtgctgtgcggcgcggagaaggagcgggtggtgggcgcgcacaaggcgcccggggcgtgcccgcgctgcggcggggccgtggtggccgtcgacgtggagagcgagcggcgcgtcctcggcctgccgctgtgcctcaagagcaagcgcaagtactcctgcacccgctgcctccgccgactcgtcaccctctgcggctgaaggatcggacgaggcacacaccctcttgttgccagcgccaggccgccagccggccggttgtcgccgatgaagcagctccgatggctcgagagctcgtcatttgacaagttaatgatccgcttcagtttcttgactaagggtgcccgtcaatgtcctgcgcggtatggccagcgtgttcctcctaatcagtggcggacctaagtccagacaatcctgggctcttgcccaggctcctattcctgctgcttcaacgatgtctctctgcttcaacaagctagctaatcggtgcttctagctagttccctgtaataatgtaaatgatagtacgtactccctccgtttttttttattagtcgctggatagtgtaattttgtactatccagcgactaataaaaagaaacggagagagtaattatcagggctcgtagtcgtatggcgaccggcaccggcggtcagcagaggcggcgagccggcaaccatgcgaaaaagaggccgctcgctgcggccgtcaccatctttgctggaaatagtgtgtaaaactattcatgtaaaaaaaaaaaaaaaa

SEQ ID NO: 60579 - DNA, 1998 bp, Zea mays
  Clone ID: MRT4577_155248C.1
atgaatacagagaaaattactaaggaaataatggagggtttgtctgaagattctgatgacagtgatagttatgatgtggagagtggagataaagattctgaagattggccctggcgaccaagccatgccatcttcggaaaatcgaccattaaacaaagtcatattgacaccatgagaggaagatactttcgcgacatgtctctcgtgagggttggaggagacaacatcatccctgctcctgaggaaaacgaagttgttgtctatcgaagctttttgaaggctggtcttcggtttcctttgagcaaatttgtggttgaagtattgaagatattccatatcttccttcatcagatcacccccgaagctataattaggatggggatttttgtctgggctgtaaggagccaggggctggagccgagcgcaaaatttagagagaggtttcatgagccaaatgatgactggtttaaatgtattgaagctaccagtgatgagctacttgggacatacgccaaggctgaagataatgctttgtccgtagctttcgggggtcggggcaagaaaagattgaacagggtatttgatgcgattagcttcgtataccctgattaccactacccgctacgaggtcaagggaaaaatagaaagactaccgcttcggccaccacaactgagccgaagggcaaaaagatgaaggttctgacccacaggccgcgttatattgaaccggccgtagtacctgaatttggcgaagggacctcttcagctgccaaagcaagacaaactgctccgattgtgcagagcgttgaagaggcaactgtagtgccgaagaggaggaggatggccagcgtgctagacgctgttatggagactataaaggccttgacccctgctcctattaagaaagttgccgaagctgccaagggccaggccgaagacgaaactgagccttcagcgcacgctgaggcgaaggctgtcgcgcctgaagataaagctgatcaacaaacttcagataccagcatgacagcaaggcaaggtatagcagaaaaagcaaaatctcctaccctcgaagccccagctgaagctgttgattatatttatcgacatgcttcggggaaaaaaatatccgaagaagaaatcatggaagcaagacattatactcaaaaactgaaatacccgaaaggagccttagtttttaacgacagtaatgaagatgatttcccgtactgtctcccggataacaaagaaatatccgtttgccgggagatagctaaaagtatgggatttccaaaacttgaagaaggcctttcagttttgtcgaaggatgatcttgctgatagcctagcgtacaacagtataaagggcttaattcttagtaatgccctgagggcacagaagaacgtcgaagacgaaggctatacaatggctcttaacaaccttcgttcagaggtgattgaactgagaaacgaaggtctggaaaaagacaaaattttgatttcattggtgaacaaagtaaaggaagacgaagctaattacaatgctcaggctgaagcccagaaaactgagattgaagaccttcggagacagctgactgtggctaatgagaggtacgcgcttgcacaggctaaccaagaaatcgaacttcgtgaatccaaggaaaggtgctttgagaaatccttggattgcgtgaagagattaaaaactagcttcgccaaagtgggcgcctactcttctgaagaaaattttatacgaggcgaccccaagggcgttgttgaatggataagtggagaagctgaagccttcgaggaaattttgaatgatcgcggagatatttgtgtgttttccggcgcgtggggaatctcagctattctggagaaagccggatgtgatcacgttaaggctatagcccagaccgaagttgtcttctccatagaggatacgaaggatccttcagtcgaagtaactctaatgggcgggaagttttataacgatgtctag

SEQ ID NO: 60580 - DNA, 550 bp, Zea mays
  Clone ID: MRT4577_155249C.1
aagggggggggggggggggtaccatccaccgcgtattttacttcacctcgcccgaggctgagtcactaatggtgaagctcgatcaacctgtattcctactcgatccgtaaaaccaccccgaccccttactttcatgacgcccgcgcactctcgccgcccactgctcccaacattggcaagtgcgcgggggagcgcccactagacgagtcccatactatcaagtatccacaccgtggacataccgacaaatcgcaggaacggaacagcacaacaccgagagctactaatcgagtttatacgtttaacttacctccgcacgcccgtggacgtccgcaaccgactacatcggctgcggggttattttagtttttaccaattgggttgtgtataattagtaaccctggttacaagtctagacatgaaaatggagacgctataatcagtatcaatgactacaggggttcaaggtcggtcagttggtttaggaactaccacttcaacgggtcctattccgacccctagtcaagaactgaagacaagtctatttggt

SEQ ID NO: 60581 - DNA, 750 bp, Zea mays
  Clone ID: MRT4577_15524C.1
ttgggtacctcgaggccggccgggaatatcccatccatcaccgttagatagctgttcctaatcaccgacgaataatctcttcttcacctcactaacaccgagctagcagctcactctgacctgcaactatgtccgctcgctcctcctcccaacagctgttctcgccggcggtcctgacagcgatgctgctgctgctggcggcgagagccaggacgtcgtcaccgccggggagctgagacaagatgacgacggcggtggcgccgagcctcgttcacctcatgtctagcgcgctgtccccctccgaggggtgctgcagcggggagcactcgctcaacagccgcgtgtcgaagacgatggaccaccagggcacctgcaactgcctacaagagacatgactcacgagatcggcggcggctacaacatgaacaacgtcgccgacatactgctccagggcggccaacaccgtactaccagaacaacaaggccaacggcgacagctgcagaattcacctgaacaggcgaacctcaccaccagggacccaagtccttcaaggtgatcttaccctaccatcgcaagcatgcatggaaccatgaacccgaccactgcaagcaacatgtgaggaggaaccgcagtgacctccacaaaacaagaacagccgcagctgctatggagacaggcactgacagcgcaactgcggaaaggcggctccgcggtctaggaccagacacgaacgctagcatgaacaacgc

SEQ ID NO: 60582 - DNA, 1506 bp, Zea mays
  Clone ID: MRT4577_155250C.1
cagcaagattggtggagatgcaggatgagttgaagtgcatacaagaagagaaggatgcagcgctaacacaactgaagctatcgagacttcagtacaaaatcttgagaatgaggtgacacgactgaaatgggagttctccgtccagctagaaaacaattccaccttggacaagcagttggaggaggcaatgttgaaagtgtctagcctacatgagaatcttgagaaggcccaagctgaagcagcttgtcaacttgatggcatgagtacaaaaaccaaagatctagaggagacaatcaatcaattgtcttctcaaaagactaagttggagaaggatgtgaaaattatgattgaagcatgcacagaaaacatgtcatgtttggcaggatttgaagatagagttacacaaaaaatttcagatcaggaggcaggactgaaggttctccaccagagccttggaggggctgttggtagctgtcagaggcttcagtatgcatatgatgaggtgtccacaagggcatcacatcttgagatacttaagaggagtcagatggagcagattgatcagctagagcagaaaaacacagaaactgtggagaaacatcggcttctggaagaggaaaagttatctgcaaataaggagaatattaagctacaaaagcatgtccaagaccttgaagttcagctccagctagcaaagcagaagcttaaagttactgaggcagaaagcaaatgcaaagaagagagatatgaagcgtcagtggaagcactgcgggcagagatctgtcatcttgaacaattagtacagcagttttcagggagagtcagcttgctggaaggaactctcatgcaggttaaaggacatgctgagtcagtggtctgtaaatgggctgacaaattggatgagctagaaacaatctgcagtcagaattttgtgctcttcattgaccgctcatctgcatgtagtgacgagcttaaaatcctgaggaagaaggtacatgatcatcttaatgaacagaaggaacttgccaatgcgaacaacgagctggctattaggttcaaagagaaagaaatggtggtgtcagaaatggtgaagagtgctgctgaggcacagacaaagatgctccagctccagaagacggtggacgagaaagaagacgagctagcagctagagtgcaggagaagagagaagccatcaagcaactgagcgacaccattgtttaccacaagaactatagcgatgacctggtgcgctacatccgcagtcagagtcgccctcgcctcccgttctgcctttaaatctgaaagtcaatgaaagatgtaaaggcttaatctagctgtgatttttttttttttgcagtaaggagaccattgcaatttttcttatgtatcatatatagggctcgaatactttctggaggtagccatatattcagtggcttgtgtattctattcgctactaaggggactgctgtagtaattgatttattcgttttgcctttccaaaa

SEQ ID NO: 60583 - DNA, 1348 bp, Zea mays
  Clone ID: MRT4577_155251C.1
catgccctacctcaagtcaggacttcctcgtctggcacctttaactgcggcccacttatcggcgacccgtgacagtctcatgggctttctcgtgtagcatcatttccgctacccaaatctctccgtccacggcgacgcccgacggcatccgtcagccagcaacatctccaccacaccctccccgtccccgacgaagaagcacagcggagaggcggccgaagccgacgcctcaccaagtcaccagtagcttctccgcgctcgtgcgcgccttcccgcacttggatgctccctgcgccggcgcctagagcggcggccgtctagcgggcgcccggagggtgaacccaccgatggccgacgctctccttccacgccgcttcctcgcgccgttgtcagtcgtatccggagcctcttcatcagcctcttcgtccccgccgtgtctttgggtgctctcgtcgcccggctccccgcgccggccgcgcctggcggccggtcacccgcaaccccggcctcgccggttcactcggcacaagacttatgcagcagagcgtggtgagcaactgaaatggtgggagaaaaatgctggaccaaatatgattgacatccactccacagtggagttcttggatgcacttagagatgctggagacaatcttgttattgttgagttctacggaacctggtgtgcttcatgcagggctctctttccaaggctctgccggacagctttggagaaccctgatatattgtttctaaaagtgaattttgatgaaaacaaacctatgtgcaaacgactgaatgtcaaagtccttcctttcttccatttttatcgtggagctgacgggctacttgaggctttctcctgttccttagctaagtttcagaagctgaaggatgccattgcaatgcacaacactgctcgttgcagcattggtccacctgttggagttggcgatgttgacttgctggataacgcgagccctcaagagaaacctgcagaagctagcccacggtagattcatgagaatgagctccacctcatccacttctacgtcctgctcattgttttcttcactatagatctcaatgtaatcagttgtggagaacataagtagcctcggttcatgaatcagatgtatggattattgtaacgcattcttgaaagggaaaaacatgtattatagcgtgataactgtaccttttgtgtttgttgtacagaaccatagaattgtacttcattttaggtgaagacgcctttgaacatttaagctccatagagggccgttttgaaaaaaaaaaaaaaaaaaaaaaaaaaaaaaaaaaaaaaaaagaaagggcggctgctcgcgat

SEQ ID NO: 60584 - DNA, 272 bp, Zea mays
  Clone ID: MRT4577_155252C.1
gtgcgccgctcgaggcggccggtcgggaactaaaaaataatgatgctttcgcaagcgctgaacttgcagatgctatgatgaatggactgttcactaccctgtgtaaaactcgctaaacatcaatcgagtccagttgctgtgatgtgttgtgaaatctatccataatcattgctacaataaagacttgatgcctacggaacaaaagaaaaaaagaaagtccctacggacaacaatctgtctctaaaactaacaggatatcgcaccgtgatgac

SEQ ID NO: 60585 - DNA, 571 bp, Zea mays
  unsure (1)..(571): unsure at all n locations
  Clone ID: MRT4577_155253C.1
aaacaggcganccaccacctccccctctttccatcganccattctccaacacanctaaagaaacgatttttttatcaatcaaccaccccatcccacccctacttttactaacaccttattttctacatctatctccatcacctcctttcttcttccatcttaaccacaacttttcctccttttctcaaaacactacactcccctacttcaatacctacgacattaccaacatcatcaattacttctaccatccaatacactcttctcctacattcctattcctttcactctaccaaattcatcttcatccaattctaaccttatgccgtcatccgtgacaataatctatcactattcatcaccctcaataatacaattcatgcactcatttatttcatctactactaaccctatacaccttttcatttccaacattctgtcttaaacgcttttctactaccctcttaaacatttcattttactactaccaactactcttaaatcaatttaaccaccataccttctaatttttactttcaataatttctacaacaaacaaatgccttcttcc

SEQ ID NO: 60586 - DNA, 248 bp, Zea mays
  Clone ID: MRT4577_155254C.1
taccttcctaattggggggcgaccatcttcctagaaaaagaactcaccttttgtgcctatgatatgtactgatgtttggggaggcctagactgcgggtggccaattatccagtgaggaggccattggaccttactgagaggtaaacttgctggaaagatctgccacaggattccaaactcaaaagacggggatgtttttgagaaggatggcatatctacaactgcgctttgctgttgcgatcttgatg

SEQ ID NO: 60587 - DNA, 363 bp, Zea mays
  Clone ID: MRT4577_155255C.1
ggggcacaaaattgcttactacacactcgaaacaaaaactagtggggccagggcgggggccacatttttttaaacgacacaggggctttacgggccaaccccaccgatgggctgtaaaggggggccaaataaaccccgacggggggcccactaacccgacacgggatcgggacaaaaacacattttttattcgaccacaaaaaaaaaagaccctcctaccctcctttactagggggggcccccccccccccgtaggacacgacgggaaccccaacacaaaagcggggttttcctaaaaacctatgccgggcccattccctgcttttgcccgggcaatggcaccaaaacggggcaccccagggg

SEQ ID NO: 60588 - DNA, 284 bp, Zea mays
  Clone ID: MRT4577_155256C.1
gggggccaccgcagattttttaaaaaccttgggcttggggccaaacgcttttaaaaaacaggggtctaatcaggggtgaaaacctgggataacgctttgaacttgggaccactaacccaaaaaaaggggtcttattaggacacccatttgggggccagacaatccatgggaatgctttaagctcccacgctcttgcccttttttctttggagctttttcatggaaaaaccaagctttttaccctcaaggggggacccattaactggggccccctggccaggggg

SEQ ID NO: 60589 - DNA, 386 bp, Zea mays
  Clone ID: MRT4577_155257C.1
aaacccatatctatgtgcggcttcatatcatattaatcttgagtggtttcttacggccaatagataacagcccactaaaaagccgaggggcaggggagaggaatatacctaacgaaggtataaaccagaaaaactggtgtgtttagaaggagtccagataatcagcctatttacaatctattattgtcagctcataaagagccacgaacaagtggcagcaacgcaggacgtgatcccaatatcccatcagcacagatgccttgcttgcctccgtccgtttggatgggagccctacctcagtcaaatgcattctggcccaaatgtccaaaatctggcgcctgggatggatacctggcccaagcaatttggtggattccatccaaaca

SEQ ID NO: 60590 - DNA, 523 bp, Zea mays
  Clone ID: MRT4577_155258C.1
gccatgactctccgaagtctaagaagagaaaggctttgaaggatgaatatatgaagaggatagtggaagcttttgagacccgtactgccagctcaatcaaaactaagagtgaccctgtccgtgaagaaatagctagtcaattaaagactgtcattgatgatggtaatgcagaaggcagcgacgagcacttctttgctacacaactgttgattgagaaacgctatcgcgatgtgtttgcgacgttgaagactaaggagggtagggtttcctggctgcgtcgcgcgtacgagatgattgacaggtcaaataagtagtagtaattgagagttagttttggtctctgggagtgaagagatgtcctaagctttctgtgcaaaccagtttgcttgtttgaatgtcggtttcaaatttcctgaactagttattccaagctactcttgggagttaccttgtttgtggattgacgtatttgttacaaataaagttgttgcctgcaaaaaaaaaaaaaaaaaaaaaaaaagtt

SEQ ID NO: 60591 - DNA, 471 bp, Zea mays
  unsure (1)..(471): unsure at all n locations
  Clone ID: MRT4577_155259C.1
cgtactttacttgntcctctanacggccggggtgggggggggggggggttttatacatggacccagtgttctgcgttactataggcggcggaacatatatagattagtcttaatactaactcatagctgactacaaaaatctaaacaccaaactttacttgcccacaaatttatcgaatttcatgggggggggggaactatccctaataatatatcattttatgttaaaaccaggggtgaactggttgtccttctacggcatcaattttatgtgactgctctgaacagaaacaccttaaactgcgacgtcatacctgttgttcatttagacagatttctacgaactggaaactactctaaggatgaataacactaaaacgattgccataagtggtgactctatcatttagaatagtaaaaccgttattcatgagttcatctccatgattattgtggttttaaaaattggca

SEQ ID NO: 60592 - DNA, 319 bp, Zea mays
  Clone ID: MRT4577_15525C.1
ccggggtggttttttttaaatttttttgggttaaacaccccacaaaccccaaaaaattaccccctattgggacaatttccaagaaaacttttaacaaaacctcttactaaaacccaaaaaaaacccccccacattttttcaaaccgagttccaaattcaccggaaaaacaaaagggaaaaaatataccttccaaattttttccaaaaggcccaaaaatttaacctccaaattttttggcggggtaccttttggttccacttccctttacacaaattttggcaacacccggaaccctttttctacggaacctttcaaaaa

SEQ ID NO: 60593 - DNA, 372 bp, Zea mays
  Clone ID: MRT4577_155260C.1
ccgagactggctggcccgtcagcggtgacaaggagaacttagccgttgcctcgaccaacaacgcaaagacctactgggacgaggttggctgtggcatgcttttcgacaaggtcaacacttactggtacatcctccaggatgctggaaagaccacgcccagccccagtttcggtcttgtcggttctgagctctccaccactcctctctacaacttgacctgcccggctgtttccgcctctacttctgctactagctctgctgcttcgactgcttcccagggtagcgctaccggcacatccaccgccactggcacccctggcgccgcttctggtacctcgacccctctgggaacccctggctccgcaacaactt

SEQ ID NO: 60594 - DNA, 588 bp, Zea mays
  Clone ID: MRT4577_155261C.1
tttttaccaaaaatagttaacattattcacatattttattatatgaacctaaatatcaaaacattatgtttaggtacatttataccttcgccttggcagaaaataataattcccgagcaattgcgtttgcaattacaggattgcgtgaacagtaaaggtgtactgttcactatttataggcacagaacgcaacctgtaggaattttctttcatgccccttacaaaagattacaatcatgactcaaacccttatggactaaaaagtcattctacttttaagtcggttcgatccttcatcttcggatacgccataataccgaagcttcatgaatggtaattttggtatctcgtataaacaggctttgccgaaggtgtttggcgacggagcatggttccaacaaccctgtacacaaaccttagccactatacgattagaacatatggattatatattcgaggttggatggcaacatcattagaacgctgtagctcaatacatagatgacaggatagagcgacgataacctcttccttcgctagccgaatagaagatagatcaaatctcactattaggagctaagataaacg

SEQ ID NO: 60595 - DNA, 230 bp, Zea mays
  Clone ID: MRT4577_155262C.1
agcagtggtaacaacgcagagtacgggggaattctagtgagaaactggcgtccctccctcttgtcaccattattggcttagagcggcttctgcctctgaaggtgcagcactgtcttcttttgcaggctgccatagctatcatacatatcttgttatcttgccaaaaaaaaaaaaaataaaaaaaaaaaaaaaaaaaaaaaaaaaaagtactctgcgttgttaccactgct

SEQ ID NO: 60596 - DNA, 379 bp, Zea mays
  Clone ID: MRT4577_155263C.1
gcttctcaaccggatatggtagcaccggatcatgtagaacgctgcacaatccccggggccgtctccaagatggtgaacgttcctaataccaagaagacgtactgcaagaacaaagagtgcaagaagcacacactccacaaggtgactcagtataagaagggcaaggatagcctggtctgcccagggatagcgcccttatgaccgcatgcagtcaggatatggtggtcagacctagcctgtcttccacaagatggccatgtccaccaagaactttgttctgaagctcctattccagagctgctagcaatatttacagcatgccacctacagatgcatattttcctcttatgctggttacatctaaggcaggcacgcatct

SEQ ID NO: 60597 - DNA, 139 bp, Zea mays
  Clone ID: MRT4577_155264C.1
agctgaggcacctgcactacctccccggatttaccgactcgtcccactcgtccgggtatatccaactgatcttgataaagttaggttgcaagctgttttaaaggcttacactgtctagagcttctcccttcttaacttt

SEQ ID NO: 60598 - DNA, 357 bp, Zea mays
  Clone ID: MRT4577_155265C.1
ctcgcgtgtcgatacaagcctctacagtgacgtcgtgtcaaagtgagcattccgaattcgctgcgatttctcgagatcacgacaacatcgactactcttggtaccccctttcgtgccatagatcgtttctagtgacgttgggaagatgcgatgctccagggatggggatcggtgtcgggacgaactacccgtgcgtcagcctgtggtcaaacgagcgcgatcgacatgaatcggcagtaggactgcgaaccaaacgagctgtcctatgtcgggatcaccttcagcgaggtgctcatcggcaactccggcatcagcgacgtccgcattcacgcaatcatcaacgtcttcgatcacaat

SEQ ID NO: 60599 - DNA, 185 bp, Zea mays
  Clone ID: MRT4577_155266C.1
aagtagagggtttttaatttttttataaccttttttaaagctttatccgaatacaaaccggttaaaaagagattctacggcgtctcaatacccaccttataatcttcaaaacccatacaaaactctgcacaaaactacccaatactcacaaatttttgagaaaaaacctatgtaaacaatccaaa

SEQ ID NO: 60600 - DNA, 584 bp, Zea mays
  Clone ID: MRT4577_155267C.1
ccgaggaggcacacccccccaaattttaataaacagcataaacagcggttacctttgggaagaaaaacacagcgtcagctccgggggaatttaaaaacaaaaaggctgcaacaacacaagaaaaacagggcctttttatttttgggacgattcctgccttctttaggatctcccaaaaaaaaaatttcgggggctccaaaaagggcgagcgatgtaaattttttggggggggaaatctttgagactgttgggccggtttttcagggggggggttctcagatttttgagaaagtttgggggccgcgccattttcgaacggggcactaactaaagagttttggggagaaacggtttcagagcccactatttttgggaccgctttcacaggctgcgtttttaaaaaattttttttgtcgaggttttttttttcccgggaaaaaaaatggaggttgaggggccttttaccacccaggcatgggggggggatcaccagaagtatttcccccaggaggggggtctggttctccagagatcccccagacaggatcatgagctgggggatcacagcacctccagatttcccc

SEQ ID NO: 60601 - DNA, 133 bp, Zea mays
  Clone ID: MRT4577_155268C.1
aaactctgtaatctgaaactttgcacacccagaataaaagttttcgatttcaaagaagaaagcgaagataatgaaattgaaacccatctcggaggaaaaagccttagaagaatacaacataccatacatttta

SEQ ID NO: 60602 - DNA, 460 bp, Zea mays
  Clone ID: MRT4577_155269C.1
agggttcggccaagcgttcggccaagccttcggtgggaaccaaaaggcttaagaaggtggtttcatttggttgggggttaatcgaccttctggtttggggcttggtggccaaaaggattttaccaggcaattaaaaagggccttggaattaaaaattaaggtcccctactggaaggcttggagggccctgaagcattggttaaggtcaaaggtccccttaaaatcaagctttctttccaggtggtccaaaggttaggcttggaaaaccatgaaaataggagggggcattggggaatggagttaatttggtccgaataatactttcaaatcatgttctaattaacattaataaccttcctcaaacctttaaattaatctatgacctatctatggccatcatttggggtggaaaaaccagatgcaaattattatggcaacaatcttgttactattgttctac

SEQ ID NO: 60603 - DNA, 1420 bp, Zea mays
  Clone ID: MRT4577_15526C.1
tttacagttctcaaaagagcggcgtagcatcattccagctggtgatacgtctcagttcataccgtcaagagaagctgatatagcaatattggaagaaccagaacatctcaattggtatcatcatgggaaacgctggactgacaagttcaaccatgttgttggtgtagttcatacaaactacctggaatatatcaagagagagaagaatggagctcttcaggcctttctagttaaacacatcaacaattgggtgaccagagcatactgcgacaaggtactttgtatagcttagttgttttgttaattacacggatgcccatgaacactcctaatgttattcatctataggtcttacgtctttctgcagcaactcaagatttaccaaagtctattgtttgcaatgttcatggtgttaacccaaagttcctgaagattggagaagaaataactgccaatagggggagtggggagcctccattttccaagggagcatattttcttgggaagatggtttgggccaaaggttatagggaactcatagatttgatggctaaacataaaagcgacttagaaggattcaagttagatgtatacggaagtggtgaggactcgcaagaagttcaatccactgccaggaggttagatttgagtctcaattttttcaagggaagggatcatgctgataattcactccatgggtacaaggttttcataaatccgagcattagtgatgtcctgtgcacagcaacggcagaggctcttgcaatggggaaattcgtgatctgcgcagagcatccatcaaatgagttttttatgtcatttccgaactgtttgacatacaagacttcagaggagtttgttgcgagagtgaaagaggcaatggatagagaaccccaaccgctaacccctgagcaaagatacaacctttcgtgggaggcagctactgagagattcatggagtactcagaccttgacaaggttctgaacaatgaggctgctcagcctggacaaggtaggaaaagaaagaataaaagaacctcacagcctaatttgtccgacataatggatggcggtctagcgttggcccatcgatgcttaactggcaatgaggttctcaggctggcaaccggagccattcctggtacccgggactacgataagcagcactgtgtggatatgggtctcttgcctcctcaagtacagcaccctgtatatggctggtgatgactgatgagcacccaaagctaatcgtaggtatatatgtacataataccccatgtcgctcttatgtcgactaatgtttggagtattgtaattgtagcatgcatgacgacctttgcccattgttttgtactctgtaataaggttctttctccttaaattggagttttatcgcagaaatgtgtagtacatggacatc

SEQ ID NO: 60604 - DNA, 266 bp, Zea mays
  Clone ID: MRT4577_155270C.1
tgtttttttttttttttttttttttttttttttttttttatttttgctttttaatagtggttaatccagaaaatggttcaaaattttggtgacaattgaaaggggcccatgggaattttttttgtgaacatttgtacattggaaggggaaagactgtttttgttgtttccaacatgtttgtcaccaatttttttggccattgcaaattgatggggaccacagttttgtttgaataactttaacattcaagattttcacactgggga

SEQ ID NO: 60605 - DNA, 274 bp, Zea mays
  Clone ID: MRT4577_155271C.1
aaaaaaaaaaaccgcatgttaatctttgattaatgggcacatcacgggcatgtacaaaatactacgtactctcactggcggacacgcgtcacgccttattcgttctggatgcagccccattaccatgtttgctataggaaaggggatacacacagggggggggcgggacgtacacataatggggaacactcggagctcggaggcccaagagggaaactaggggggcccccatggcctgcaaaaaaccctggttggccctcctcgctggaaactg

SEQ ID NO: 60606 - DNA, 420 bp, Zea mays
  Clone ID: MRT4577_155272C.1
cccatcgcgtccgcccacgcgtccgcccacgcgttcgacgatcgcatgtgcggacgctttagctttagtgagtgaacaccaaccgtttggtgccgactactaacccctaccgatcctcgcctgctgcaaacatggctaccttctgtgtgctctccaacgtcgccaattccacgcagctataccggtcccgcgcttctctgggcaagccgatgaaggggcttggcctgagcatgggccgtgagcgcgcccagttgagcattgagtgccaggcggccagcagcatctccggcgaccgcgtccctgacatggagaaacagaagttgatgaaccttctcctcctaagagccatcttgttgcccaccgtcggcatggtcgatccatacggagccttcttcgtccctgacggattcgggaacgcct

SEQ ID NO: 60607 - DNA, 1187 bp, Zea mays
  Clone ID: MRT4577_155273C.1
ggggacggcgagacgggatgaagagcgaggagtaagagaaaccaaccaaaaccacgggaaggagacgagacggggggaaaaacactgcgcaggcacaggcagggagagacgtaaagccgccgcttcgtgcgcgtcgacgtcacctcgccgccgggggccgtctcgccgcggggtcccttagggctcccttccgtcgccggactgggcggtcgccggacggatcgggaagcgacgacctgaggggactggctgggatggccgggaagaagcgcaaggcggaggcggcacgcctggaggagacggaccgggcgctctacggggccttccggggcgccgccaactcgctctcgcagctctacacgctcggcatgggcgcgcagaaggcctccttccacgccggcgaacgccacgccatggaaaaactttatgaatggatcctgaggcagcacgaaaatggtttgaggctaacagttgctgatgtagcctcccatatccagcatgagattcagtatggaggtgacaatgcatcagcctctccaaggtcacaataccctagccaaagcactgcaccgacaatgcacattcccaacacaagcaaccagcaaccatcgccaagcttatttgcttcaggaaaccctgggttgacacagtccaagaattccatggtcttttcaagcgcattatccagccccatccggcggagcctgcaaccttaccacctagagcaggacggggatgcagggtacttcgcgaacggtgcaagccgcgatgtgaaccccacggcttcgaatgattcgtccatggacatgcactcggacagcccagctcatgactcctactgagcagctcccaccatggaaccagcctcaagaacagcacttcaagtggaagaagtctgctgtcacagccttcccaggcctagtagtaatattcaatttaacaccttccatagcctctcttacactaagcgtgtgatgtcttgtgttgttactactacttaccacttgttgctttgcgagaattatgtaatttgcatgtactatactatactgtaccatttgatttatctgtgcatattactgctgttggtacaaaaaaaaaaaaggaaacaaaccactgaaaagaattaacagcttggacagtttgtggtaccagaaaaaaaaaaaaagcggcctcgagctcagctt

SEQ ID NO: 60608 - DNA, 690 bp, Zea mays
  Clone ID: MRT4577_155274C.1
aatcccctagtaccatctaacatccacggatcgccgccacctctcctctaggaccgacaaagtccgccggtcctaacctcctgaccccgccttgccgtgggcgctggcgttggggagacctgctccggcgttattcctccacagcggccacctagcacgacgggtcgacgagcagggttgtcaccggatctggcgactccaagaatgaccgccagcggatctggtgagtcatgaagcccacgaccagatgtgtccacccccgagccgtgacaagcatgatggttgaagagcaacgacgattgctcttcttctggacctccgtcgagtatctgccatttgacggtttccgcgggctagaccttggcagtggtctagtcatatcaaaagcatcatcgaagatctcggagcatctcccttcatcgtccacctgcatttaccaactgaacctaccaatgtatacctccttcgccatgatgttgagccggctacagaagatcacccaggagcatgtgagcaacagctttggtgagatatgatcttcggtgatgatcttctccgggaaagaactcaaaaggtgttcacatgcatttgcagactaaattaagagtgaatttttgtttttcccctaaattgacagttgtgacattactcatccctttagtataatttcattcggtatatcccatttag

SEQ ID NO: 60609 - DNA, 1082 bp, Zea mays
  Clone ID: MRT4577_155275C.1
ccggaaaaaacccgggaaggagacgagacggggggaaaaacactgcgcaggcacaggcagggagagacgtaaagccgccgcttcgtgcgcgtcgacgtcacctcgccgccggggcccgtctcgccgcggggtcccttagagctcccttccgtcgccggacggatcgggaagcgacgacctgaggggactggctgggatggccgggaagaagcgcaaggcggaggcggcacgcctggaggagacggaccgggcgctctacggggccttccggggcgccgccaactcgctctcgcagctctacacgctcggcatgggcgcgcagaaggcctccttccacgccggcgaacgccacgccatggaaaaactttatgaatggatcctgaggcagcacgaaaatggtttgaggctaacagttgctgatgtagcctcccatatccagcatgagattcagtatggaggtgacaatgcatcagcctctccaaggtcacaataccctagccaaagcactgcaccgacaatgcacattcccaacacaagcaaccagcaaccatcgccaagcttatttgctccaggaaaccctgggttgacacagtccaagaattccatggtcttttcaagcgcattatccagccccatccggcggagcctgcaaccttaccacctagagcaggacggggatgcagggtacttcgcgaacggtgcaagccgcgatgtgaaccccacggcttcgaatgattcgtccatggacatgcactcggacagcccagctcatgactcctactgagcagctcccaccatggaaccagcctcaagaacagcacttcaagtggaagaagtctgctgtcacagccttcccaggcctagtagtaatattcaatttaacaccttccatagcctctcttacactaagcgtgtgatgtcttgtgttgttactactacttaccacttgttgctttgcgagaattatgtaatttgcatgtactatactatactgtaccatttgatttatctgtgcatattactgctgttggtacgtgacaagtgcaggaaacaaaccactgaaaagaattcacagcttggac

SEQ ID NO: 60610 - DNA, 1718 bp, Zea mays
  Clone ID: MRT4577_155276C.1
cgagacggggggaaaaacactgcgcaggcacaggcagggagagacgtaaagccgccgcttcgtgcgcgtcgacgtcacctcgccgccggggcccgtctcgccgcggggtcccttagagctcccttccgtcgccggactgggcggtcgccggacggatcgggaagcgacgacctgaggggactggctgggatggccgggaagaagcgcaaggcggaggcggcacgcctggaggagacggaccgggcgctctacggggccttccggggcgccgccaactcgctctcgcagctctacacgctcggcatgggcgcgcagaaggcctccttccacgccggcgaacgtcacgccatggaaaaactttatgaatggatcctgaggcagcacgaaaatggtttgaggctaacagttgctgatgtagcctcccatatccaggtaagtttgcaatcgttccttgatatgtttctatacaaattgacaatacaaactcaggtaaaaaacctgcatatattgccatttcataggtcatggttagttctaaattgtgtgctactgacttgttgccttaatgaacaatagtttatgacaaatgagatgagatgaacttgttgttcttgcagacttaacttcgatcctgttcctatcctctgattattttctttgcctttttacatatccagccatagcatgtttgcatacagtttcaccattgttcttccttttgcgcatattcaggcaaagaatgattacacacttatgtatcatctgtgtgtagcatgagattcagtatggaggtgacaatgcatcagcctctccaaggtcacaataccctagccaaagcactgcaccgacaatgcacattcccaacacaagcaaccagcaaccatcgccaagcttatttgctccaggaaaccctgggttgacacagtccaagaattccatggtcttttcaagcgcattatccagccccatccggcggagcctgcaaccttaccacctagagcaggacggggatgcagggtacttcgcgaacggtgcaagccgcgatgtgaaccccacggcttcgaatgattcgtccatggacatgcactcggacagcccagctcatgactcctactgagcagctcccaccatggaaccagcctcaagaacagcacttcaagtggaagaagtctgctgtcacagccttcccaggcctagtagtaatattcaatttaacaccttccatagcctctcttacactaagcgtgtgatgtcttgtgttgttactactacttaccacttgttgctttgcgagaattatgtaatttgcatgtactatactatactgtaccatttgatttatctgtgcatattactgctgttggtacgtgacaagtgcaggaaacaaacccctgaaaagaattaacagcttggacagtttgtgaggtgatcttgatttaaaaaaaaaaaaaaaaaaaaaaaaaaaaaaaaaaaaaaaaaaaaaaaaaaaaaaaaaaaaaaaaaaaaaaaaaaaaaaaaaaaaaaaaaaaaaaaaaaaaaaaaaaaaaaaaaagggggggccgttttaaagaaccaaagtttacttccccgggattgcaaggtaatagtttttttttggggcccccaaaataaaattaacgggccgggttttaaaaacgctggggattggaaaaaccttgggtttcccaaattaaatcgcttggaaaaaaatccccttt

SEQ ID NO: 60611 - DNA, 278 bp, Zea mays
  Clone ID: MRT4577_155277C.1
aaaaaaaatggtgaagcacggtggtctcggacgagctggaaaagtaaagcgtcaaactcccaaagtacaaaaggaagagaaattgaagcaggctaccggtcgtgccaagaagagagcgcaattcaatcgacgcatgaatctcggaaagaagaagggacttaactctcaagccgcgtagggatgaaatcgctaactggtcccctgttttgtttgtgcttcaataacgaggaataaaactacgtttatgtcgtaaaaaaaaaaaaaaaaccaaaaaagaa

SEQ ID NO: 60612 - DNA, 382 bp, Zea mays
  unsure (1)..(382): unsure at all n locations
  Clone ID: MRT4577_155278C.1
agctctctggcattgatgaccgcctgcgtggctcgtggggcgaacgcgcagcggtcgctagcatattcttgcctgcaactcagctgctcggggtcataccatcggctattacttactcagacagtggtggattctagaaagaacgcccgctctggtgagcttgcttccagtcgggcccgaacatactattcatatcaggtgcgcgtgctttgtctcgttgctaggaatcacgtgatccaaccaggctctcgtgcactctcgctcagagtagggatccttggaaattgcgtcctataagaagggattcagcacgcttatatggcatgnatatgagttnctctccctggtgtcaaaaaccctgttagtttgtgtgggtagttgc

SEQ ID NO: 60613 - DNA, 195 bp, Zea mays
  Clone ID: MRT4577_155279C.1
cgggtcgacccacgcggttttcctcgtgaagccgaaagatgagccgaaggtactcttctagcatgggggaagcagccgaagcccccataaacattgtcgactgagcgctggacaacactggcgcccactcggtgtagtgcactaccatccttagcgaaacagtatgcctagaggagaaagaaaatctcaatgggg

SEQ ID NO: 60614 - DNA, 1149 bp, Zea mays
  Clone ID: MRT4577_15527C.1
gaggccggccggctcacgcggccggagacttctaggctgcttccatatgcgtgcgagtgccagccgttatggagcaaaaaagctctgccagccttaccgtccctacggcacgacgcctctaacgtcggcgaccgcgacgacgatgaccccgcgtatcccctcctcgtgtgctccgttcgcaatcgctgcctccatctcctacagagcggttgtgtcgtccgagcattgatctgaaccagcacagtttatcagggacgtagcagtgagttggttatagagaactcagatttgatggctaaacataaaagcgacttagaaggattcaagttatatgtatactaaagtggtgaggactcgcaagaagttcaatccactgccagaaggttagatttgagtctcaattattttcaagggaagagatcatgctgataattcactccatgggtacgaggttttcaaaaatccgagcattagtgatgtcctgtgcacaacaacagcagaggctcttgcaatggggaaattcgtgatttgcgcagaacatccatcaaatgagttttttcatgtcatttccgaactgtttgacatacaagacttcagaggagtttgttgcgagagtgaaagaggcaatggatagagaaccctaaccgctaacccctgagcaaagatacaacctttcgtggaggcagcgactgagagattcatggagtactcagaccttgacaaggttctgaacaatgaggctgctcagcctaaacaaggtaggaaaagaaagaataaaaaaacctcacagcataatttgtccgacatcatggatggcggtctagcgttggcccatcgatgcttaactggcaatgaggttctcaggctggcaaccgaagccattcctggtacccgggactactataagcagcactgtgtggatattagtctcttgcctccttaagtagcaccctgtatatggctggtgatatggctggtgatgactaatcgtaggtatatatgtacataatacaccatgtcgctcttatgtcgactaatgtttggagtattgtaattgtagcacgcatgacgacctttggccattgttttgtactctgtaataaggttctttctccttaaatttggagttttattgcagaaatttgtagt

SEQ ID NO: 60615 - DNA, 317 bp, Zea mays
  Clone ID: MRT4577_155280C.1
tatattcggcacgagggttaggtatgtggcatggccacccctttttcctcttcctacctgctgtgcgaaaccgagcactcaaaccctaacttaaggtatctgtgaattcggatctgatctattttttaaatggctgcgcaagtgtaaacccatgccccttactgcgttagaccctgccacacgggtatttgccgccggcggtggtctgtgtagccaccataaccatggtagaggccagatacttggtgggattttatgccgttgaactattgaattcgtgaaccctcgtggcacctaatatgagattattgggcacc

SEQ ID NO: 60616 - DNA, 485 bp, Zea mays
  Clone ID: MRT4577_155281C.1
tcaagcactccttgttctgttcgtctcgccgtgggcgacttctctacgcttcaaatctgtgctgctcgccctgcatacgctcactcctcgtccatcgggttttggcgtgttcgcgtttatcgtcgagtcgtcgaacccgtcatctactgctcgaatcccacctcgccagctcgctccagacacaatctcatcgtcgttccgcgagtcatcaagaaatcccaagaattaggtgaagacgaagcccatagtgtggtgttcaccaagtacgcgaacaagtcgtcgagcgtcatcctcgtatacgccaagtccccaagccatgaagacactctagtgttagccacacatcaccagctcgacaaaataaatcccatgggtatctgatcgagaagtgaagctgtgtacatcactcgccagacatgtgtgatcaaagatgtcaaccggaaaccatcgtcgtgctcgtgactatcgcgtcgaatagtcagggt

SEQ ID NO: 60617 - DNA, 295 bp, Zea mays
  Clone ID: MRT4577_155282C.1
aaccccgggtctacccacgctcctgcctcaggcagcttcttggttgatcgatggtggtatcgcattccaaccggaaaagtcctcactttttgcacataaactatgtgttcttgcaagatcgaagtggagcatgaagccctgcttagttgggaacgaattgttgtttgtagtcatgtatatagctgtttatactgtaattaggggggtgtcgtttctcgatgtcatatgatacatcagcaatcctgatcaagtaattatttacttttcaatccaaataatacatgattttcatcag

SEQ ID NO: 60618 - DNA, 324 bp, Zea mays
  Clone ID: MRT4577_155283C.1
cacaatccccagcacgctgcgacactgtgccgtacgagtggcatgttcctcaagtgctgagcagtcaccggtggtgaccgacagtatcagcaatccaggaaacaagcagatcgacagctgcggtcgacgagcgctacactcaatcgcactcgctcatcacagtcctctactactgatttgccagacacaaactcatctggacatccatcacatgcccatcttcgccaaaatatgccataactacctacacaaagtcacagcgcctgtaactatctgaacacacagctttgactgtatctaatactcttgctatcgcaatttgtc

SEQ ID NO: 60619 - DNA, 832 bp, Zea mays
  Clone ID: MRT4577_155284C.1
ccgggcccatgccgaagaggaaaaagcgaaggacgttccagcgggtcttgataaagatgagtccgatgaaggtagtgaggaagaagttgtgtttgaagaggatggcaacgacatccggctatacatgtccaaacgggctatgtatttcgggcagcccatggcacgacatgtttttggtccgtcacgagcacgacatgtctcggtggtgggcaggcatgggccaacacgacccgttgtttgtgtcatgcttgggtcattggtgtggcacaacgtgttggctcaagcacaacccgtttttttattttacagtacatatttatgtatattagaaataactataatagtttaaacgtgaatgaaatttgattcacttacctagagtagagcgtataagcccctagagcggtcccaccttggttcgaaccccctgaggtcgtgaaggcccattttaggatattttttgctcatttttcttctcactccggtcaagcacgacaagcctcatgccgacctggtacaatgtggatccatctgtgttgtgtttgggcctgagacgcggcacggtggcctgacatggcctgactcgttagctagccgggcctagacgtgtcaggtcgaaggcgggctcgtgctaggctggcacaacccactcatttggacatatatacatccggccaacgaagcctagccatgttggctttgacaagtcaatgattaagaggggcacattaaggtgatgaagaagctgcggtataccaaagacactgaaatcatcaggcttagtgttggaggacactgttcctcgactgcagaataatgaggcagctttctg

SEQ ID NO: 60620 - DNA, 1957 bp, Zea mays
  Clone ID: MRT4577_155285C.1
gggtacctcgaggccggccggggtgtttttttttttgctttccgattttcgtttctctctcttttcctttccccccgtccctctctttctttctctcttggaattggaattggactcaaaagtttcggcggccttctccatgaacacggtggcttcgctgcctttggcgccgcgcctactcattaagccctccctcgcctgcttctccagaaaggacgtcgcccgctatggcgggatcaaggtgtacgccgtgctcagggaagacggggccgagttcgcccggaacaacaacctgggggccctgttccaggtggacgaccccgggccgcgggcccccgtcaagaagttcctggacgtgaacgaggctctggaggtggtccgcttcgacatccagtactgcgactggagggcgcgccaggatctcctcaccatcatgcttctccacagcaaggtggtggaggtcctcaaccctctggcgagggagttcaagtccatcgggaccttgaggaaagagctcgccgagctacagcaggagctggaaaaagctcacaatcaggtccatctctcggaagccagagtctcatcggcgctcgacaagctagcgcatatggagaccctggtgagcgcatcatccacagccgagccgcccacttcttcctccctggctgcaactgcaactgcaactgcaactgcaagcagcaccgcccgtgtccgagccaagaacaaacagccacgtcggaggcttgacgtgtccggcccagtgaagccttacaaccccagcctcaagaacttctggtacccagtcgccttctctgctgcctccttcagtatttacggtccacgcagagatagtgatggagctaccagttgaacatggactcctcctggacaatctcctggaccttgctcatgctcctttcacacacacgtccacctttgccaagggctggagtgtgccaaggtatgtatgcattgtatgcataccttccataccacttcttcaattcgtcaggaagctcagctgactgtgttccttcagtttggtcaagttcctgacacccgcgtctgggctccaagggtactgggacccgtacccgatcgacatggagttccggccaccgtgcatggtcctatcgaccattggcatctccaagcccgggaagctacaagggaagagcacgaggcagtgctccacgcacctccaccagctccacgtctgcctgccctcctcccggaacaagaccaggctgctgtaccggatgtcgctggacttcgcgccgtggctcaagcacgtgccgctcatgcacctgctgtggtcgcatttcgcagagaaggtgttgaacgaggacctacggctcgttcttggccagcaagaggggatgatcgacggcgccaacgtctggaactggccggtgtcgtacgacaaactcgggatccggtaccggctgtggagggacgccgtcgagaggggcgccgacgaccggttgccgttcagcagcacccaagctgagagtttgtcgtagcgaccggaacgggacgggacctcttcctcgtcgcatttctccgcaagacgacggacggacagccagagttaatgtgacctaggcgtacgtgcgtctctctctctctctctgcgcggttcatcgttcacctcgggctgctgcgcactgaaggattctggaagggtgaaggttgacggccggagacgatgatgggcagcatcatggtctatggtgtccacatgcatgtacactactagcgacgacggcatcatgggatgcaattgtaatctgagattgatctcttttttttttcaccctttctgtgtaaagattcagcaaattgttgcgttactcttccaaagcatgtataatcaactacggagaagtgttcatatatataaatatgagaaattgcagctattgctacagttcaaaaaaaaaaaaaaaaagcggcc

SEQ ID NO: 60621 - DNA, 334 bp, Zea mays
  Clone ID: MRT4577_155286C.1
aaaaaaaaaaaaaaaaaaaaaaaaaaaataaaaaaaaaaaaaaaaaaaaaaaaaagaaaataacaataaaacaacatgaatggactattcacaatcaaacaaacacttaaatacacatccaacacaaccaacataaatttatataaaccaaccatacacaaccttccttcaccaaccactctatatacaactacataactatcaccattcacaacaatcctattaataaactcctatttcactatcacatctcctgcaattgccattcttaccaatactcctacacattacatcctcaacatataactatgcatacaaatctcataaataacct

SEQ ID NO: 60622 - DNA, 1943 bp, Zea mays
  Clone ID: MRT4577_155287C.1
cattgggtacctcgaggccggccgggctttccgattttcgtttctctctcttttcctttccccccgtccctctctttctttctctcttggaattggaattggactcaaaagtttcggcggccttctccatgaacacggtggcttcgctgcctttggcgccgcgcctgctcattaagccctccctcgcctgcttctccagaaaggacgtcggccgctatggcgggatcaaggtgtacgccgtgctcagggaagacggggccgagttcgcccggaacaacaacctggaggccctgttccaggtggacgaccccgggccgcgggcccccgtcaagaagttcctggacgtgaacgaggctctggaggtggtccgcttcgacatccagtactgcgactggagggcgcgccaggatctcctcaccatcatgcttctccacagcaaggtggtggaggtcctcaaccctctggcgagggagttcaagtccatcgggaccttgaggaaagagctcgccgagctacagcaggagctggaaaaagctcacaatcagcaggtccatctctcggaagccagagtctcatcggcgctcgacaagctagcgcatatggagaccctggtgagcgcaccatccacagccgagccgcccacttcttcctccctggctgcaactgcaagcagcaccgcccgtgtccgagccaagaacaaacagccacgtcggaggcttgacgtgtccggcccagtgaagccttacaaccccagcctcaagaacttctggtacccagtcgccttctctgctgcctccttcaggatttacggtccacgcagagatagtgatggagctaccagttgaacatggactcctcctggacaatctcctggaccttgctcatgctcctttcacacacacgtccacctttgccaagggctggagtgtgccaagtttggtcaagttcctgacacccgcgtctgggctccaagggtactgggacccgtacccgatcgacatggagttccggccaccgtgcatggtcctatcgaccattggcatctccaagcccgggaagctacaagggaagagcacgaggcagtgctccacgcacctccaccagctccacgtctgcctgccctcctcccggaacaagaccaggctgctgtaccggatgtcgctggacttcgcgccgtggctcaagcacgtgccgctcatgcacctgctgtggtcgcatttcgcagagaaggtgttgaacgaggacctacggctcgttcttggccagcaagagcggatgatcgacggcgccaacgtctggaactggccggtgtcgtacgacaaactcgggatccggtaccggctgtggagggacgccgtcgagaggggcgccgacgaccggttgccgttcagcagcacccaagctgagagtttgtcgtagcgaccggtacgggacgggtacctcttcctcgtcgcatttctccgcaagacgacgaacggacagaaggaaaacgtccactgggccggcgcacacgacagccgcggcccatctccatttcagcctctagcaattccttctccgcatccctgtgctctggcgtcttcagtctcctgacataggcgtacgtgcgtctctctctctctgcgcggttcatcgttcacttcgggctgctgcgcactgaaggattctggaagggtgaaggttgacggccggagacgatgatgggcagcatcgtggtctctctggtgtccacatgcatgtacactactagcgacggcatcgtgggatgcaattgtaatctgagattgatctcttctttttttttcaccctttctgtgtaaagattcagcaaattgttgcgttactcttccaaagcatgtataatcaactacggagacgtgttcatatatataaatattgctacagttcatctgccccgcaaaaaaaaaaaaaaaaaagcggcc

SEQ ID NO: 60623 - DNA, 1011 bp, Zea mays
  Clone ID: MRT4577_155288C.1
ggccgggccggggctcccgattgtcgtttctctctcttttcctttccccccgtccctctctttctttctctcttggaattggactcaaaagtttcggcgttcttctccatgaacacggtggcttcgctgcctttggcgccgcgcctgctcattaagccctccctcgcctgcttctccagaaaggtgggtctccctctttgattgtctatatggatggagtatgtatgttgtgagttgagattgatcaaatcctgcctgtctctgacgacgccgatgccgatgctcggtcggtgcgtgcaggacgtcggccgctatggcgggatcaaggtgtacgccgtgctcagggaagacggggccgagttcgcccggaacaacaacctggaggccctgttccaggtggacgaccccgggccgcgggtgcccgtcaagaagttcctggacgtgaacgaggctctggaggtggtccgcttcgacatccagtactgcgactggagggcgcgccaggatctccccaccatcatgcttctccacagcaaggtggtggaggtcctcaaccctctggcgagggagttcaagtccatcgggaccttgaggaaagagctcgccgagctacagcaggagctggaaaaagctcacaatcagcaggtccatctctcggaagccagagtctcatcggcgctcgacaagctagcgcatatggagaccctggtgagcgcatcatccacagccgagccgcccacttcttcctccctggctgcaactgcaactgcaaccgcaaacagcaccgcccgtgtccgagccaagaacaaacagccacgtcggaggcttgacgtgtccggcccagtgaagccttcaaccccagcctcaagaacttctggtaccccagcgccttctccagcgatctcaaagctcctgacaccatggtgccaatcgactgcttcgaggagcagtgggtgatcttcccaggcaaaagacgaagggccgggtgtgttcaaaacacatgcgcccaca

SEQ ID NO: 60624 - DNA, 516 bp, Zea mays
  Clone ID: MRT4577_155289C.1
gaactctactccgtgtctccgtaccttcaacgtacgctccccggactatttgtacttaatgaacgagttgtacttttgggtcgctggcgctggggtttcttcagttatatacctgttggagcaaccaacgttggctctatcaaactaaacttcgacgctgaactgcggacgaacagtcttacgacagatacagctgcggatagagcagctgccgaagcggccaaacgcggcgaagcctataccggatttgcagaagccacttattacaatgctagcccggccttgcgcggacatccactgcagcgcggtgaagagatgggagggttccagctgggtagtaccattgtgcttgtctttgaagcgcctatgggagttcgcaagacctttgatgaaggctgggatggtggtagagaaggcggttggtcttggaatatccaacaaggccagaaggtcaaggttggtgagaagcttggtcatataaaattatagtcgaataatcgctggttgtttgcatgt

SEQ ID NO: 60625 - DNA, 2188 bp, Zea mays
  Clone ID: MRT4577_15528C.1
agacgaacttgacttgagaatcgcaagcgtgcttcaaagttctggttatcatgctgatgatggtttctggagtgaacctacaaagtctgaggtctcagacgataaaagacatgtggctatagtcaccacagcaagtttaccatggatgacaggaacagcagttaatccattgttccgtgcagcatatctcgcaaaaggtactagacaagatgtgacactggtagtgccttggctttgcaaatcagaccaagaactggtatacccaaatagcatgacgttcagttcaccagaagagcaggaaacttatataaggagctggctggaggaaagactaggatttgaatcaaacttcaagatatccttttatcctggcaagttctcaaaagagcggcgtagcatcattccagctggtgatacgtctcagttcataccgtcaagagaagctgatatagcaatattggaagaaccagaacatctcaattggtatcatcatgggaaacgctggactgacaagttcaaccatgttgttggtgtagttcatacaaactacctggaatatatcaagagagagaagaatggagctcttcaggcctttctagttaaacacatcaacaattgggtgaccagagcatactgtgacaaggtcttacgtctttctgcagcaactcaagatttaccaaagtctattgtttgcaatgttcatggtgttaacccaaagttcctgaagattggagaagaaataactgccaatagggggagtggggagcctccattttccaagggagcatattttcttgggaagatggtttgggccaaaggttatagggaactcatagatttgatggctaaacataaaagcgacttagaaggattcaagttagatgtatacggaagtggtgaggactcgcaagaagttcaatccactgccaggaggttagatttgagtctcaattttttcaagggaagggatcatgctgataattcactccatgggtacaaggttttcataaatccgagcattagtgatgtcctgtgcacagcaacggcagaggctcttgcaatggggaaattcgtgatctgcgcagaacatccatcaaatgagtttttcatgtcatttccgaactgtttgacatacaagacttcagaggagtttgttgcgagagtgaaagaggcaatggatagagaaccccaaccgctaacccctgagcaaagatacaacctttcgtgggaggcagcgactgagagattcatggagtactcagaccttgacaaggttctgaacaatgaggctgctcagcctggacaaggtaggaaaagaaagaataaaagaacctcacagcctaatttgtccgacataatggatggcggtctagcgttggcccatcgatgcttaactggcaatgaggttctcaggctggcaaccggagccattcctggtacccgggactacgataagcagcactgtgtggatatgggtctcttgcctcctcaagtacagcaccctgtatatggctggtgatatggccggtgatgactgatgagcacccaaagctaatcgtaggtatatatgtacataatacaccatgtcgcccttatgtcgaccaatgtttggagtattgtaattgtagcatgcatgacgacctttgcccattgttttgtactctgtaataaggttctctccttaaattggagttttatcgcagaaatgtgtagtacatggacatcaaaagttcatgactccagaagactgtcagcacaatatttgtctgcttttgccattgaattagagaaacatagtcttaaaaatttaagagcatctctggccgcagagggcgcgcctgtgccaacgacggaagcaaagaagctggcgtcctccatcgcgaggtccaagcaggagatcacagaggacttctcgtcgattggcaggacatggcccccgcggcggtctaagaagagaccaggtgcaacgacaactcaatgtaagaattgctggattttgtctcccctccaaattcagtgtttcatgagattttttcccttttcctttaattttcctatatcacaaagaagaaccgaaaggcgagaggatttcatttcacaggtcgacttgcttctaccatctggttgtttgtggacagtattttggtgctgatttcgttatctggagtgatgttaaaaagaagaagag

SEQ ID NO: 60626 - DNA, 223 bp, Zea mays
  Clone ID: MRT4577_155290C.1
ctattttcaaacccaacaaaaactttcattaacctacaacactcactttctctaattactttaatcacacacctcctaccacacattactatactttgcttccaacacccatttaaacacccctaattactaccacatacaatttctataaactccctccctcaaccaactaccccctcccaaacaactttacttccacatttaacaatacaaaccatctcaa

SEQ ID NO: 60627 - DNA, 207 bp, Zea mays
  Clone ID: MRT4577_155291C.1
gcgtcctcctccgcgagggcaacgccgtcgccgcgctctggctgccgccagcttcgccgcgctcctcatcggccgccgcgacgacgatgccgcacgccgcgcttcctagttcgagctggctgtagcctgttgtagcatcgcccccccttttacacctcttcctcctcttctctcaagctagatctccagccatgttgttcctctccg

SEQ ID NO: 60628 - DNA, 554 bp, Zea mays
  unsure (1)..(554): unsure at all n locations
  Clone ID: MRT4577_155292C.1
ggccgctcgagnngccggccgggccctgggaaaaaaaaaaaaaaaaaaaaaaaaaaaaaaaaaaaaaaaaaaaaaaaaaaaaaaaagaaaaaaacacccaaaaaagacccccatcacccccgaagcttatcgaaaacacacgaaatccagaggaatgcccgaaacccaaataaaacatatggaaaaccaaattacccggcgccgggtgcccggtcccccttctaccaattgaggggcccccccctgggggggactgggtaaatcgtgttgaaacacatcaccctttcgggggggggccttacccccctttaggcccctttaagatattcccttctcccgcctcctggggccttaatgtaaaaatggccattgttggggaaaatatggggtttggaaaagcttaatggttataagaaatccccttttttttttatggggtaagtctaaatttggaaaatccgttataactttccacaattttccgaaaaagggaggaacggggaaaaaactgggaaaaataattttctaaaagggaacggggtctcttttgtaaa

SEQ ID NO: 60629 - DNA, 324 bp, Zea mays
  Clone ID: MRT4577_155293C.1
ctcactgctgtgacacgaaagcttctcttaccacatcatttacaagctcctgcgctcgtgaaacatgaatgcaccgactatatattaacatctgcctgcacacgctagcctccaaacactgcgctacctcacgcatcaacatcattcatgggaccttgatatactctcctcaatccttgtctggaacggaactaggtcttcatatcaacaacgctcttatcccacagcacatttgtcttaccatttccagcgctaccgctctcattcatcttcatcgctcaccatctgaacccatcctaacttaaagactcccggcatgtctta

SEQ ID NO: 60630 - DNA, 1797 bp, Zea mays
  Clone ID: MRT4577_155294C.1
cattgggtacctcgaggccggccgggacaacccgactgagcgacgctagagtcgtgcgtcgtgtccccttggcgcggcgcccacctctgacctcgccactggagatgctgctgcgccagagctgaactaaaaccccgggaaatcaggcagcaggccgccggaggaaatggagcagctggtgggagttcaccatcaccaccactcgctctcccctcgggctcctcgcaccccgacccgcccgcagccgcagccgcagccgcacccgctcctccaccatctcccgtccaacaggttccgggatctccactcccagattcacaatcacattcaccccgcggtccccgcggccagcagggtgctccgcgccaccccgcccttcttcctcatcctcctcgccgccgtctacctgctcgcctccgtcaccatcttctccgcccccacgccgctgctccgcctccgattggcctctcccaggccgctgatcctcccgaagcccgcgccaccgccgccgccgcctgcgccggagctctttgatctagacggcgggagtgtccgggtccgcctcaccaatgtcggcgccgccgtcacctcgttcctcgtcccggacaagaacggggttctcgctgatgtggtgctcggattcgactcgctggatccgtacctgaatggaacctcaccttactttggctgcattgttggtcgagttgcaaatagaatcaaggatggaaagttcactctaaatggggtgcagtacaatctgagtatcaacaacccacctaacactcttcatggtggatttaaagggtttgacaaaactatatgggaagtcgccgagtataacaaaggggacaagccctcaatcaccttcaagtattacagtaaagatggagaggaaggttacccaggtgatgtttctgtcactgcgagatactcgcttctcccaagcgcgacactgaagcttgagatggaagctataccactgaacaaggccacacccatcagcctagcacagcacacctactggaacctggcaggccacagctcaggagacgtgctctcgcactcggtccagatctggggctctcagataaccccggtagaccagacctcaatacctacaggcgagctcatgccagtgaccggcacccccttcgattttctgaccgggaccaggatcggaagcaggatcgaccaggtccccggcggttacgatcacaactacatggtcgactccggcgaagtgaggtcaggcctgcggcatgtggcgcacgtcgcggacccgtccagctcgagggccctggacatctgggccgacgcgcctggcgtgcagttctacaccggaaattctcttggtggcgtcgtgggcaaaggaggcgcggtctatgggaagcacgctggcctctgcctcgagacgcagggtttccccaacgctgttaaccagccgagttttccctcggtcgtgtttggccccggtgagaggtacagccatacgatgctgttcgagctctctaccgagtgagtcatgtagcccgtctgcctgcccgtgtagatagatagatatacaccgtttttattttccttgttgttttgtgcttgcgagtagttaagaaactgtggcgcgcgcggcggttgttcaattgattcttggtttagggctgaatgttgtagcaggaatgcagcaagactagtaggaaaggaacggatttgaggggaggtactaggttactaggtctgcatctcgttctgatgtgaacctgtcacttgtgtgtgttgagtatagttcattcaggatttagc

SEQ ID NO: 60631 - DNA, 276 bp, Zea mays
  Clone ID: MRT4577_155295C.1
agatcagtagacctctgatctcactgtccagaactacactctcctcatcgttgttcgtccaccgccttcgctgaacttttcaagtactttgtctagatgagtaccggttctgcgggtgtcttcctgcaccgtggaaaccaggctctcatggatgattctgcagtgccaattggcttctcaatgacgagctacacgacaggtaaccagtttcagagtcggataacatttggtagaccaactgggttcagcagtgaacaatagcagcatccatggccg

SEQ ID NO: 60632 - DNA, 265 bp, Zea mays
  Clone ID: MRT4577_155296C.1
gggcgctaggagctcaaaaatgaatttttttttataacacaaccaggcgggttcacatagcattcagcaagaaaaaaaaatgcttcagtttccctgccaaaaatggcactcattaaagaaaaaacttgggacggcccctggattaaaaaataataaactcccatcggtttttcaaacataaaaattttcggggggtggaaacttgggcttggtaaaaattctgggggggccttacatacccaaaaaatttcattggggcctgggg

SEQ ID NO: 60633 - DNA, 190 bp, Zea mays
  Clone ID: MRT4577_155297C.1
caactcaaattttcaaatcgtcttacaattataaaagggttaatttgaccacgcaaacccagtaaagcaggaagggttgccatgccagccatgcttgaactaaattataatgaggccttgcgtcgtcccgacggaaatggaattatctagtctagcagtttacctttgaactatttatccggacccgggg

SEQ ID NO: 60634 - DNA, 615 bp, Zea mays
  Clone ID: MRT4577_155298C.1
cactccgctatacccccgcccgaatcgatggagattagggctccgccaacgagcctcaggctcgcgccgccgcccgcctccgccagcttccgccgaacaccgcttaggaccttcttccttaacggcagcgtttcacttaaagttgtgcaagtacgacaatcaaatgtcaacagatttaagtgcaatagcatacaaagtaacctctttgatagactaacgagggttgccaggtcctacgcaaatgcagttctaagttcatttgaggacccctcgagacttcatccgtcgatgatgatctttcacagctgaaaaaagaactctcgggaagctctttgaaaggggagctcccatcaggcagaagagcggccagcaactcaggcgccgggcgccctttccccgacctagagattgagagcgagctaaacgagctgcggaggaaggccaaagaatactagagagtagagactctccaccaaccatccttcccgggcctgacagaatctctcatttccaagtacatatagcacagctgcagatttgctccatcgcgccttggaaagttggaacagaggtgcgccttagactgtcactgtcaaagggtatatggagtcgccc

SEQ ID NO: 60635 - DNA, 598 bp, Zea mays
  Clone ID: MRT4577_155299C.1
gatgaataaacaaaattaaatttaatgttcaaaataaaaaaaacaaacaaacgtaacttgcgtaacaacttagcgaggcaaggtggccccgacaaactactccgcccgtctacacgctgtagaacggcgatttgatcgcgttgaggtcgacgccgcggagcctcgccgacgactccagctggcccctaagggtgttcttctcgcgaagcctcgcgaactcggctcgtcgcctggcctgctcggcgacctccgacaactccacgaagctgccgctgcgcctgccgccggcctcgggctcggtcaccgggaggccgtgcaggctgcgctgcgtcgtcgcccactgcgccatgcgctcctccccgccgtagttctttttcgtcgtgaaggccgtcttgttctgcaggagattgttccaggccttgccagccaacacgtagcggatggcgaacttgaacaggtcgagcgggacgaaggtgacgacgctgtagagccagatgacgcccgcccacccccacccgattcctctgatgtgggcgaacccaaagtcggcccacactgcaatcagagtggcaacgatctgcgcgatcacgaacgctgc

SEQ ID NO: 60636 - DNA, 625 bp, Zea mays
  Clone ID: MRT4577_15529C.1
ccttctggtataggtctggccagcgcagaccactgccattgttcacctgatgtctatccattgggaggaaagagagcacaccttattcaggctgtgcaaccgtctctctttggcttgcttggatgatcagactgaaacagtccctgatttgaacatctgagcctgctcagccgtcgccgtcccgtctgcctcctcacccggacaagaatttggactatgagcgtcaccctggagtctggtttctttccgactcctccagcagccaagtcatttttctacacttgtctcatctggagaaagcaatgtgtgcatgcttactctacatatccatggagtcagtaggggtccatcatcgtggcgtagcattgtgtggtttgttttaggttcagatttcgcgatctgggcgtacaaccagggctgcctgcctgcttgcctgtccctctttacccaatgcaatccaaggttttgttaaagttaagcaggtaggcaatgaggtcgtttggttttttggtgtcgtggaacaggatgatcagatgcgcagccctaatcgctgattgccagccagcctacctgtctgtctttctgaccaagtaaccatcggtctatttcttatggtagctttcgt

SEQ ID NO: 60637 - DNA, 260 bp, Zea mays
  Clone ID: MRT4577_1552C.1
gggtgctacaaccacaattgcagcggcttcgggcagaccaccaacaagattgcaattgtggcggctatcacctcggactcgggggacaatggcaggcagttcgacataactcttatgctatgcaaggacccaaagcactggcactggttgcttgagctgttcccggacctaaatgcacgatactggccggcgcacctcttcagacacctggatcaacacagccaacatggtgcaagttagacgcgatgtagacaacaccc

SEQ ID NO: 60638 - DNA, 871 bp, Zea mays
  Clone ID: MRT4577_155300C.1
cattgggtacctcgaggccggccggggtttctctctctccgctatacccccgcccgaatcgatggagattagggctccgccaacgagcctcaggctcgcgccgccgcccgcctccgccagcttccgccgaacaccgcttaggaccttcttccttaacggcagcgtttcacttaaagttgtgcaagtacgacaatcaaatgtcaacagatttaagtgcaatagcatacaaagtaacctctttgatagactaacgagggttgccaggtcctacgcaaatgcagttctaagttcatttgaggaccctgagaagattctcgagcaggcagttctggagatgaacgatgacttgacaaagatgaggcaggccacagcacaggtcttggcgtctcaaaagcgacttgagaataaatacaaagctgcagaacaagcttctgctgattggtatcgaagggctcaacttgctcttcaaaagggtgacgaggatcttgctcgcgaagcccttaagcggcgtaaatcatatgatgacaatgcaagctccttaaggtcccagcttgatcagcagaagggtgtagttgaaaatctgatttcaaatacccgggttcttgagagcaagatagcagaggccaagcagaaaaaggatacgcttaaagctcgtgctcagtcagcaaagactgccacaaaagtgagcgaaatgttgggcaacgtgaatacaagtagcgccctttctgcatttgagaaatgggaggaaaaagttatggcgatggaatcccaagcggaggcactcggcccattagcaactgacgatctaagaaggaaagtttgcactgctcgagacttcatctggtcgatgatgatctttcacagctgaaaa

SEQ ID NO: 60639 - DNA, 368 bp, Zea mays
  Clone ID: MRT4577_155301C.1
aaaaaaaaaaaaaaaaaaaaaaaaaaaaaaaaaaaaataaaaaaataaaaaaacaaaaaaaaaaaaaaaaaaagctttttcctatcctccatcggccatgtctaaggggttgaatcttgcataatatacatcccacttgcgtgcctatttctgacttgaattacacaggccctaattcctccctttacttgggacgtgtaaaaggtaaaactgtccctttacttaccaccacttggattggaaaaccccttcctttctccaacttatatgggttgggacaaatccccctttatccaccttgcttactaacgcaaaggctctatggaaaatgcattcccccctgttttgaaattaaatagaaaggggct

SEQ ID NO: 60640 - DNA, 1547 bp, Zea mays
  unsure (1)..(1547): unsure at all n locations
  Clone ID: MRT4577_155302C.1
agccggccggggctttccattcccatcgcttctcttctcttctcttctccacacgaactcgccctctcgactcttgagagatagagcgaggcaccaagaagggaaaaaaaaagggacaggaaaaaaaaatcattctcgtttcgctctgtccgctagaccccgcccgaatcaatggagattagggctccgccgacgagcctgaggctcgcgccgccgcccgcctccgccagcttccgccgaaccccgcttaggacctccttccttcgcggcagcgtgtcacttaaagttgtgcaagtacggcagtcaaatgtcaacagatttaagtgcaatagcatacgaagtaacctctttgataggctaacaagggttgtcaggtcctacgcaaatgcagttctaagttcgtttgaagaccctgagaagattctagaccaggcagttctggagatgaacgatgacttgacaaagatgcggcaggccactgcacaggtcttggcatctcaaaagcggcttgagaataaatacaaagctgcagaacaagcttctgctgattggtatcggagggctcaacttgctcttcaaaagggtgacgaggatcttgctcgtgaagcccttaagcggcgtaaatcatatgctgacaatgcaagctccttaagatcccagcttgatcagcagaagggtgtagttgaaaatctgatttcaaatacccggcttcttgagagcaagatagcagaggccaagcagaaaaaggataccctaaaagctcgtgctcaatcagcaaagactgctacaaaagtgagcgaaatgttgggcaacgtgaatacaagtagcgccctttctgcatttgagaaaatggaggaaaaagttatggcgatggaatcccaagcggaggcactcggccaattagcaactgacgatctagaaggaaagtttgcactgctcgagaattcatctgtcgatgatgatctttcacagctgaaaaaagaactctcgggaagctctttgaaaggggagctcccatcaggcagaagagcggccagcaactcaggcgccgggcgccctttccccgacctagagattgagagcgagctaaacgagctgcggaggaaggccaaagaatactagagagtagagactctccaccaaccatccttcccgggcctgacagaatctctcatttccaagtacatatagcacagctgcagatttgctccatcgcgccttggaaagttggaacagaggtgcgcctttgactgtcactgtcaaagggtatatggagtcgccgagtttctcggcattttcccgtcgacggacatttgtacagctagccataaattgttgtaaatcactacgctccctagagcccttttttttgcgtactacgtatatagtcaaagtttgaagtttccgcgtcgtggtttttacccccattttttccgtgccataacatgtgttttgtgactggagacttgggatcctcagccaggtcgatcaaatactccctttttttcttcttcttattgggggcgccncccgggtgtttttttttt

SEQ ID NO: 60641 - DNA, 1515 bp, Zea mays
  Clone ID: MRT4577_155303C.1
gcacgagacggcccaagagacgcgcaatgggaatccgacccgaaatcgctttccattcccatcgcttctcttctcttctccacacgaactcgccctctcgactctcgagagatagagcgaggcaccaagaaggggaaaaaaaagagggacaggaaaaaaaaatcattctcgtttcgctctccgctagaccccgcccgaatcaatggagattagggctccgccgacgagcctgaggctcgcgccgccgcccgccgccgccagcttccgccgaaccccgcttaggacctccttccttcgcggcagcgtgtcacttaaagttgtgcaagtacggcagtcaaatgtcaacagatttaagtgcaatagcatacgaagtaacctctttgataggctaacaagggttgtcaggtcctacgcaaatgcagttctaagttcgtttgaagaccctgagaagattctagaccaggcagttctggagatgaatgatgacttgacaaagatgcggcaggccactgcacaggtcttggcatctcaaaagcggcttgagaataaatctaaagctgcagaacaagcttctgctgattggtatcggagggctcaacttgctcttcaaaagggtgacgaggatcttgctcgtgaagcccttaagcggcgtaaatcatatgctgacaatgcaagctccttaagatcccagcttgatcagcagaagggtgtagttgaaaatctgatttcaaatacccggcttcttgagagcaagatagcagaggccaagcagaaaaaggataccctaaaagctcgtgctcaatcagcaaagactgctacaaaagtgagtgaaatgttgggcaacgtgaatacaagtagcgccctttctgcatttgagaaaatggaggaaaaagttatggcgatggaatcccaagcagaggcactcggccagttagcaactgatgatttagaaggaaagtttgcactgcttgagacttcatctgttgatgatgatctttcacaactgaaaaaggaattgtctggaagctctttgaaaggagagcttcctccaggcagaacagcagtcagcaactcaggtgctgggcgccctttccccgacctagagattgagagcgagctaaacgagctgcggaggaaagccaaggaatattaggttcattccttgtcgattcagcaggcctgacggaatctcatttccaagaaaatatagtgcagctgcagattgctccattgcgcgtttcgaaagttgaaacacaagtgcgcattgactgtttgttaaagagtatggaatcggctaatttctcggcattttcccccctcgagtgacatttgtacagctatccataaaattgttgtaaatcactactctctctagagcctttttttcatactatatataaagtcaaagttcgaagttccccaaaaaaaaaaaaaaaaaaacgcaatactcgtgccgaattcaaaaggtcgaccgctccatagtacacaagctaaggtctgcgtgcagcccccgta

SEQ ID NO: 60642 - DNA, 211 bp, Zea mays
  Clone ID: MRT4577_155304C.1
tcgctagagccagctctcccagaacacgagcacggggcgtacaccaccctcctggctgacttgctgctcgtggctgcgttcgcagcgcctgcgcggacttgatcacctcgcgacctgcaagcactgttgagcatgaagcaagcgctagggaacccgtcaacgctggcgacgaggaccccaacgtagcccgacttgtgctcgtgggaccacc

SEQ ID NO: 60643 - DNA, 523 bp, Zea mays
  unsure (1)..(523): unsure at all n locations
  Clone ID: MRT4577_155305C.1
ttgatggtctcaacttccacaagagttaattggatacctctctacgctcggcttgacttgcaagcacccagctacgaatgaccgttgtcatctcgcgcttttcaccttatccacctggggggcgactgtgaccgggcgggggtcctgccacccgtggcttcgcgttggccgcctcgctctcnccngcggcctcctgccttgggggcatcccctccctgncgctgcctgctctcctcattcggcccgtgcctccgtcgctgcctgtggctgtcctcgcggcccctcggccctcgcccttctccctgccccgcccgcgctctcgcccnctccttcccgcctttccttcctgccgcgcttcccccccctggccccccgcgctccccctccccttgccctcccctttcctcttgctcttcccgcccccccccccgcctcccccccccccccccccgcctggccccccttcccccgcctccctccccccctcgtctcccccccccccccccctctcccgcccggatat

SEQ ID NO: 60644 - DNA, 706 bp, Zea mays
  Clone ID: MRT4577_155306C.1
ccgcaaacccatcttcccctagcccaagcaaaccgcacacgccaccatgttcctcacgaggacggagtacgaccgcggcgtgaacaccttttcgccggagggacgcctattccaggtcgagtacgccatcgaggccatcaagttgggatctactgcaatcgggttgaagacgaaggatggggttgttcttgctgtggagaaacgtgtgacgtctccgttgctggaacctagcagtgttgagaaaatcatggaaattgatgagcatgtaggctgtgccatgagtggccttattgctgatgcaagaacattggttgagcatgctcgagtggagacccaaaaccatagattctcatatggggaaccgatgacagttgagtccaccacacaagctatttgcgatctagctcttcgctttggagaaggtgaagaagagtctatgtcacgaccttttggagtttctctccttattgctggtcatgatgaaaatgggccgagcttgtactacactgacccatctggaaccttttggcagtgcaatgccaaggcaatagggtcaggctctgagggtgccgatagttccttgcaggagcagttcaacaaggagctgacccttcaggaggctgaaaccattgctctatctatcctgaaacaggttatggaagaaaaggtgactccaaataatgtcgacatcgccagggtcgcgccg

SEQ ID NO: 60645 - DNA, 414 bp, Zea mays
  Clone ID: MRT4577_155307C.1
ccccgaacaaaccatttttggttatccatttatttggcactcaagacaaacccgtttaacagagtttaaacccatcacaggagggcacatgtaaggggggttcgagttttcgggatcttcccaagctacaagacccattttactaatcccacagatggggtttttaaagcccaggaattgattcggggttgtatttttccgatgtcgacagtccgttatccaccccggggggggtttttgattgatccagagcattcagcgtttgaaggtcccagtgggaggcattcctattgggagggggggggcttggattgctgattttgcttgccaggaagcgcctgatgagccctttgaggaagggagccattgtgtttggcttgactccaaaaaaacatgattccttcctgcccatgc

SEQ ID NO: 60646 - DNA, 798 bp, Zea mays
  Clone ID: MRT4577_155308C.1
ggtaccctcgaggccggccggggttgggacggtaccgcaccgtccaaaaaaaccctcacccaccctcgactcccactctcgccgccggagtgaggggctgagcacagaaccgggcaatcccccccccccccccccccactcttcctcgccgctgccagatgctccgccgcagcctccccgaggccgggtccttcttccgccggctccttggccgcgtctcgaacgagggcgggcttgctgccggctcctccgcgtctgtccgacatttcgtcgaacagcttgtaggcggcacggccccgatctcccgcgtcccctccgccctcgccgtcgcctccgcggagcgtgggaccggaggaagcaacggcgcttccttgacggtccacttccttcgccactcctgcggcctcgaagaagccgacgccgcgaaggcggccgagcgcgtgcacctccgctccaccaagaacgcgcacgccgtggtcgcgctcctccgcgacacgctcggcatgccccccgcctccgtcgcgcgtctcgtctccgcgtaccccgcggtcctttcctcggtcacactcggcgctaagttgaacttctacctccgcgagctcggcctctcctccgccgagttgcgccgcttcctcctcgcgagcccccaccgcttcctcctcgcggggatcgagactcgcctgcgccccaacctcagcctcctcaaggaccttctcggcaccgaagagaacgtgctcgccgccgtcaagcagtccatggagctcatctacgacaacctcgagatcgtcctgcttccca

SEQ ID NO: 60647 - DNA, 336 bp, Zea mays
  Clone ID: MRT4577_155309C.1
cttcattttttttttttttttttttcttttttttttttttttttttttcttttttaaatttttttttctttttcttttttccagaacatactatccttattcttatattgtatagcctgttgtgcctattgagcggccaacgcacaccacggcgaaaaaaaaactgcccgtttcccagaaaaaaaaccccccaacccaattgtaaaagggggcccaaccccgcgcggggagaggcgccctaagccgggggcgcgcctaaagcccctcgcccaccgactcgctgcaaaagtccgttcggctgaggggagaaggctcacccctcccaaaggcggaggg

SEQ ID NO: 60648 - DNA, 213 bp, Zea mays
  unsure (1)..(213): unsure at all n locations
  Clone ID: MRT4577_15530C.1
gggaaatagcatggcaggnaatagaatgattaatattactgtgggtagacctagaattgttggggtagtaaaagagntgnntagatttttgttcattttaattctcaggggggtcttatgcttttgtgttttgactatntttggtgcaggggtaatatgataaatgaaatttgataattttaactgaataatggtgaataaatttatgacagg

SEQ ID NO: 60649 - DNA, 354 bp, Zea mays
  Clone ID: MRT4577_155310C.1
gaagaagccaccgccgcttaatcctggaagccgccgtcttgttttccgggctcgcggttgcaagggccagccccggaacctggtgggtgccggggtgggccatccggaaaaaccggttcccaagttgccgttggtccgtgaccagccggacctggggaatggggccgggcttcccgtggccggagctgaaaaggaaatgctgccggaggctggcggccatcccggcgtactgccggggcacggggctgagcatcctaatggacggggcgatcccgccgggcccggacgcccagttgaagggccgcctaaaggacctgccggcctgcccgcggaaggtgcaaaggggattcgccg

SEQ ID NO: 60650 - DNA, 689 bp, Zea mays
  unsure (1)..(689): unsure at all n locations
  Clone ID: MRT4577_155311C.1
ctcgccaagggcatatgccaccacttcgtccgcacggggacttgcaagtatggggattcatgtagatacttccatccgaagccagatggtgccaatccagcagtctgattttattgcgaaccaacccaatttcgttggataccagggagtagacataaattcttcctcagaaagaattgtgatgtatgacaagctagatgcttatcatattctcacttcagtcagctgtcatgccatgatgtgagcccttgccacacaatcatcctatttggacattccaatttactccatcatgtgccagcgggtccattggttagtgacttggcgcctaccagagactgatcgtgtgctgtttggatgtttcgaggctatttgattgcaagcggtcctgtcggttggtgcctcaggatgactaggaaggagggcctacagattaaagaccttaaatttgtttggtttggagctgttgtcagcttcatggcctgcaggaaccatgctcctgatgctttctctgaattttgaaatgtcgtgatgctttcaagtgcttaagcttccagggcagcatagggttcaccgattgcaaatgctccatcatgatttatctcgttaggctgttntgggtgaacccggaaaattgagaggatctatgggggaggaatntncnnttactatttaaataggaaggggat

SEQ ID NO: 60651 - DNA, 471 bp, Zea mays
  Clone ID: MRT4577_155312C.1
atggcgcagggcacttctctggttcgagctcgagctggtgagctgctgtcgcccatggccagcgccctactcagcgagcatcccttgccgacgtcctccctcgcctcgccagccgagctccttcttggccgagctctcctcatgcccgtcgcgcctattcccatccagatatcgtgccctttctccagtgcagcagcactgctgcggggtttccttgtcgcgctcgtcgtcggcctccaaccgggtgtgcgtagccctatccgtgacgccgtcgaaacccgtggtgagaaaacccccgctgcccttgctgctattatttttgtgctcggtaaaactgttgaacggttgtgtgtgtctaattcgcagctagccgtcatgtcgcgctccgcgccttacccgttcaacaaaatgccaagccacgtggacaacccatgcggcaagtctcgactcgttcaggttgaatccatgtga

SEQ ID NO: 60652 - DNA, 403 bp, Zea mays
  Clone ID: MRT4577_155313C.1
gacaccccacaaaaaaaaataatcccttgcgcaggggcttttttttttggtgggggaccagtccatcagcacccctttgggcattcgatccttgattgaccaagagcccgcccccgggaacatttggcttttttggacccgctcaggaatcacccccatcgggaccgggtcccccccctggaaaaaatacggggggggggctcctttaactgccccctggttgttaaggctccccacttccaggttggggtcggccccggccagggcaataggctaaaagcctgccttggggatctccggccccaggttgataatacccccgttcactcccaaggggggctgtttttccaccccccccggacggcgggtgaatgtccctcccggtgcccctgctggggggtcc

SEQ ID NO: 60653 - DNA, 400 bp, Zea mays
  Clone ID: MRT4577_155314C.1
tgctgacacgcgggcagcaccctggcccggagaacggtaaccacaggggctgctccagtgctcccacgagcccctgttccgcttccgccgtcgggcgttcgcccgcaggccggagcgcgctctgtggctcgctcagcgctgtccgcggaccgcggccccctgcagccctgctctgtcttccgcccccaaccccctgctccgatgctggctgcggagctgtctgctccctggatatcagcctgacgctatgtcaaccacttctgccgcagcccctcttctctcggcctagagatccggaccagcgccggagactacgtgtcgtttcgcatgcagcgacacatatggctatatcagccctgccgtcataacgctagcagagaaaggagaagatgcatgaatg

SEQ ID NO: 60654 - DNA, 187 bp, Zea mays
  Clone ID: MRT4577_155315C.1
tcgtttggctaaccgtctgcatgagtcgcagggggggtttgttggggaccggtgagcttggtgcagggcaggagttggtccatccaagcgcatgtaggtgctgtgcctggctgttatctctcatgtgaccaaattggtgaggcactgggcacctagggtctataccgatccggagttggcgcttgac

SEQ ID NO: 60655 - DNA, 557 bp, Zea mays
  Clone ID: MRT4577_155316C.1
tccggagaagtcagaaccgtccatcataccctctgaaccactccaaattcccaattctgcttgtgtttctcttgacctgcggcgaaggctgtagcttggaactgggcgcgttgatgtgtgcgagtgcgattagcttgaaataagcgcctgtcaccgatgtagtatgatgcgcgagcagactttggaccaacgaacagctgatattatatgcccctgcagaggctggctgatccctgatgccgaaatattttcggtttagtgcctctcagtcattttcgacgacaaggtcctctttttttttaattttgacttggcacaggccgtagcattgcccctaccattcaaatttccagttgcttatagtttgctgaaatcgtctttgttcgtgcgatggattatatgtatatcagtggcttgcatgccctgcagaatgtctactaggtgaaatgtctctcgagatatccactacagttgtcatggatttcgtcgtttaaaaaaacacgcacgaatacacagctgccatggaaattggaatcgcagctcccagtttccagcag

SEQ ID NO: 60656 - DNA, 913 bp, Zea mays
  unsure (1)..(913): unsure at all n locations
  Clone ID: MRT4577_155317C.1
gccggccggttccgcaatgttagttccaatttgccatatatctaacagttgtccataaggtcacccttttgataagcctttggcagttctaagatagcactatttcattgcacacccaccattatggattattttttaagggttactaacgcggcctttcccaagccattaaattttgaagtggttaaatataatttctcagccataaaactaacctaattagtctagcgcggtggaaaaaaccatctgtgggcctaaattagaagctcgtgggatcgaatttttgtgctcttttccccacattttttagatttaaaagggggttcaatataaaaatgggagcaaaattagaccatagaattggtgcctagaaggttgagggattgaattcaagttcgtgatattttcttctaacattttttaagacatacaagtagttcccattaaaaaattggggcaacatcaaacacgcagttggggatcgatcggaattcggaaggattgcagaatgaatgctcctgaatggaccagctgactagatggcaattgaagttgcagtgctactaatgaatttatcaagtcatttttactggagtttggaacaaaaaataccagagctcatatattccggtaattctgtccgggaatgcaaaaaacatgtaaaatggaactagaatccctgagagatatgatgtatgggtcatacattgaaaatcccttgtaattttgagaacaggtaaacagaaattatgnngaaaggtagccttggtgttatcagatgtgttgaccttctagggggtgtttgggaacaagtttttctgtagtattgaaagcatactgtagtattgagcaatactgtggtattatatactttgagggtgttggaaactcatctgaaatctctgtatactaa

SEQ ID NO: 60657 - DNA, 700 bp, Zea mays
  unsure (1)..(700): unsure at all n locations
  Clone ID: MRT4577_155318C.1
gaccatctgaaaaaagaggcaagcttccttactcgcttcttctcgaatatatatgttcttgcttgtcgcgggacatgtatatgcatccatctaaactgctcattttgacggtggtggtcaccggcgccgctgcggcgcatgaccacccttccgctagcactccggcggcgcagttctggcagcaggccctcccgggcacgccgatgccggaggccatcgctgacctcgtccagaaaggcatcgaccactcgccgctggtggagcgatacccttcggcgcccggcctcagcgcgtgcggcgcatggagcaacctgtgcacgcgcagcgtggcggcggggacgggcatcttcttccacgaggcggaactgcgtccgggcagcgccatggcgctctccttcccggcggaagtggacacacccatcctcccgcacgccgtcgccgccgccgctccattcgcgaacctgacggccgtcttcgccacgttcggcgtcgccgggggctccgccgaggccgagcacgtgcgggacacgctcaggtggtgcgaggcgccgccgcggccgngcggcgagcgcgtggccgcctgcgccacgtcgctggaaagcacggtgcggagcgccacgcgcatgctcggcgccgccggcggtgacggngggggtggggcggcggccacgtcggcgcgcctccgcgctgggctgccgcg

SEQ ID NO: 60658 - DNA, 531 bp, Zea mays
  Clone ID: MRT4577_155319C.1
ttgcgatgtctcccttccatcttatctctcccctcacctctcttcccttccctcgcctgcaccgaccgcgccatgagcgggggacggcggcgcggccgctccgtcttgcgtactgcgacgacaagggcaagttcgtgatggtccccgaggcggtggcggcgctgcagctcgtcaagggccccgtcggggtcgtctacagcaccgtgcctgcgaagaaatcacggtgcgtgcttggtgtgcacaccacgcctggagacactcacgcggttcatcagaaattcagaatcatcatccgcaagttgatgtcgtcgaggtactatgtgtcatttgcgtcccagctggagtatatggcatcagcatttacttcataagcattagtgatgtagttagttagttctgaacctcccccaaatcaaatacggttgcagttgtagcaatagaagcgagtggttggagtgcgtccttgtcaaatcaaattaaactatatatatggactttgtcatgtagtagtaatatgattctctccctacg

SEQ ID NO: 60659 - DNA, 244 bp, Zea mays
  Clone ID: MRT4577_15531C.1
cgcatcatgaggcactcatgcattcagaagcaagggttcatgcaacacaaactgaccagatttattccactgccaagcaggcaataaatacatcagtgaccaaaggaacttgcactacagatgagagttcatccggcatggattgtgcttgtaatgaacatggttcatgtaatgcttcagtcatggaatgcagtgatgattccggttcagagaatgaaattttccgagtcaagcgcaggtccac

SEQ ID NO: 60660 - DNA, 283 bp, Zea mays
  Clone ID: MRT4577_155320C.1
gtgaactatagagatctatgacgtccatgccgcgtacgtaaagcttgatcccttaacgggcgccttggtttttttttttagtcaacaaagttagtgtccttggaggaggaatggactaatgggatcactttggggtaaaaatagcaccctttagacgaggggaaaacctttacccctggaactatctttaagagactcgaaaaagcctaggccggagggactttaagcggagggcacttattacaacttggatgaactactaaccctgattttttatgccccc

SEQ ID NO: 60661 - DNA, 225 bp, Zea mays
  Clone ID: MRT4577_155321C.1
aggggggaacaaagaaggcagagtgctgtaggacaattcaccaacattattgccaaaaccggtttaaccgaattttaaacacaaaatccctgaccaaatccttttgctgattttacagcctcaatgctatgcgacatgcaaaaaaagaggaagactggagtgccttttaagagcaagtgcaaatttaagcttcaatcctttttttttagagtgcttcaccagcct

SEQ ID NO: 60662 - DNA, 906 bp, Zea mays
  unsure (1)..(906): unsure at all n locations
  Clone ID: MRT4577_155322C.1
ggnnggganacccacacccggccgcttttttttttttttttcactgcatgttcaagaggcacacaatcaacaaaatttaatctgtactagtgtattgccgcgcgccctgcgcacggtgttaaattcgtccgtgagatcttaatttgtacataaataagaaataaagaacatactctctactcattacttcttccagcgcgttatcatcgtccgaccatcgataaagctcgagctttatcatgtgccttcagagtgatgctagaagtcagaaaatatcaaataccagtgccaaatccatttcacaattactatgacaacataccttaaggtcttccttctacctttgagttgtacataaccaaaagtttcatgtgcatgatgagtacagatgtgataatggcaaactaagaagaaagtctgggtggtgtttgcttctttgcatgtgacatttaaactaatggaaacctattactattgcatgtgttcttgaagcaggaacacatgaaaataattaatagttttgatatgcacctgttgccatcaagcacctagctaggcatcgcagacattccatacttgatgaagaatctaccaccaactcttccagggtgtggtatccacaacttggtcgaaaacaaaaacaataattttgttgtacattgcatctgcaacactattctccattgaataaggcacgattggcgcaagcgcgtgcgtatgggtacccctttgtagtaaaatctctaaggtaggacatattgtaccttgtgcccagatcaaattctgccagatgaagcgtttgtgctgaagccgagcaaacgaggaagccgacatggatgaaatgaaagcgcgtagagacccacgcgtccgcccacgcgtccgcccacgcgtccgcccacgcgtccg

SEQ ID NO: 60663 - DNA, 455 bp, Zea mays
  unsure (1)..(455): unsure at all n locations
  Clone ID: MRT4577_155323C.1
cggccgggaaaacaatctgtcgcacttcgggnacacttctccctccgctgcatctcactttctctcccggctgtttcgtcttccttggctttcctcctctctacgcgctttcatttcatccatgtcggcttcctcgtttgctcggcttcagcacaaacgcttcatctggcagaatttgatctgggcacaaggtacaatatgtcctaccttagagattttactacaaagaggacctcagatcgttagagacttcgctaacgagagcttgccggattgtttaattctctttaggggtacccatacgcacgcgcttgcgccaatcgtgccttattcaatggagaatagtgttgcagatgcaatgtacaacaaaattattgtttttgttttcgaccaagttgtggataccacaccctggaagagttggtggtagattcttcatcgagtgtggactgtct

SEQ ID NO: 60664 - DNA, 391 bp, Zea mays
  Clone ID: MRT4577_155324C.1
gggggccccaaatttggaccgatgtttttacctttttttttgggcctttcccaaacatggaaagggtgggggccccaaaattttaaattttgccagcataaacaaaagtaactttttcagggactggctgaaaatttgttgtttttcccaaaatttactgtcaggcccggcagggagtgacaaaacggacttcggtagcgggggagccttaatatttttgcccacaatacaatcaaaggtccctttttttttaaaatcaaaaacaagtcacatgaacaaattttttttttttgccccctttgccgatgcatgggaaaatattaaattcttccaagcccgtgcaaagggaacagggagctgttttaaaaccggggcaaacttgggattaaat

SEQ ID NO: 60665 - DNA, 241 bp, Zea mays
  unsure (1)..(241): unsure at all n locations
  Clone ID: MRT4577_155325C.1
acacccccaccacccccttatcctacaaaatggccgccgccgccccaagattttcttataaaaaaccataccaccccacatanctactnattccaccccaaccnttcctctctctaatttaataaaaacctctattctaccccacatcttcaccttcttccacnacaatatatccaaaaacatccttcaaccctattccntctccaaactcccctttcaccaaacttcatcttaatccttt

SEQ ID NO: 60666 - DNA, 395 bp, Zea mays
  Clone ID: MRT4577_155326C.1
ggggggaaccggtttcttggggaaggggccaaaaaagagatgggagccggggggcttggggaagggaacaaacatgtgtttcttggaaaacaactgcctggatgggggatgggaaaacggagttgaggatccctatgttggggaagggggggggttttttggcttcggctccggctttggcttaaggtctggctttggctttgggggcacaggtttcttggggaaaaggtctaaaaggggctttttgaaccacccccacagggttggggacccacaatccttcaagggggaggttgtctttccagggaccaccacaaaattgccctttgaccaatggggcacaatttcggaaggttttttaccggggcacgggtttcccccaactctgtgaaact

SEQ ID NO: 60667 - DNA, 445 bp, Zea mays
  Clone ID: MRT4577_155327C.1
gggaaagggaacctcttattttgggggggccccctccctcatccaaaaaatttttttttggattaccaccaaaaagccatctaaaagggggccccccccaagatgggttggggggagggggcccctcggtctgtcaaaacaaggtggacaaagggcaacaattgttgtagttgaaaaaggggtggggggttacccccaaaccgctgggaaaaagggaacaactgttgctgggtcaaaaaagaaacacgggttgctgcaactagctggctaaaagggagaagaatttgctgctgcaaaaaaacagcgggggtcaaggcggccaattggttaaaaggaaaaaattgtttttgcttaaagtaggcaaaacctacctggctgaaagggaaaaattgttgctgcaaaaaaaccacagggttcaaggtaaacagttggttgaaaggaaaaa

SEQ ID NO: 60668 - DNA, 157 bp, Zea mays
  Clone ID: MRT4577_155328C.1
aggaaaaccctttgtcccattcttgccacttgtttacttcggaacggggcagttctttttagccgtgaacagggcagctttaacgggacatttacattttgcccttaaaatgggtgggccacaacgatcaaatgttttttttcaacggaaacggggc

SEQ ID NO: 60669 - DNA, 381 bp, Zea mays
  Clone ID: MRT4577_155329C.1
cgcaaaaaggggccaaatttgaaaacctttattaaacccaaaccaaaggggggggaaaaaaaaaaaccattattcggcaccccccccccggttaaaaagcgtctcgctcggaaaaaccgggatacaggtcttccccaacggcccaaacctgggaatggggagcccggggaaaaacctttgcgggaaagccaacggggcccaaaaaaacaaaatggggggaaaaaacctgaaaggccccaccctcctgttaaaggccacgggggggcccctgggggggcttaaccccttttccccccccgtcctggtcctggggggggaaccccccaaaaacccgtgggccccccccctttttttgaacggcctgggccccaaaaattttgg

SEQ ID NO: 60670 - DNA, 422 bp, Zea mays
  unsure (1)..(422): unsure at all n locations
  Clone ID: MRT4577_15532C.1
acggagaattgngtaccgggcccccgcgccgaggcaaacgctatatttttttttttttttttcattaaacatgccaacatttatttcctcatgggggaaatattctctacctggtggacatacaatcccacgaaaaccaacaaagggcttctccattatccacaatctcttaagaccacttatatcatgctctggggttcatagcacaaacacaagaaagaccattccaactccctcaagctttcaacctaatggtagacctcctatgtttgattcaaatgttcatgccaagttggggaactcaacacacatgacaaatcagacttcactctcttttaacagggaagctgggagtaaaaacaaaattgaatcaatcctaggcacaatctgacctttttcacctcccaagcctcaatagtgaa

SEQ ID NO: 60671 - DNA, 615 bp, Zea mays
  Clone ID: MRT4577_155330C.1
aaatgaactattgaaatacaacaatcttctatgtagagcctctagttctattatttcacccaacaggttaactaattggttttagcacaatactgaactagaagattcagttgtattgagtgaatatgtggataaacttcatgttactgcatcctaacttttatttcaatgtgatgatgcttagcttggacaaccattttttttcttcctatatagttccattcagacactttactagagtcttttttagtatttagctgtcatctattagtactttaaaggtcatatgagaaatttgagtggtcctgatattctatcaatcaagggcaggcctggtgcagcagtgagagtgtctcactgagtcaccaggtcacaggttctaagcagcctccccgcatctgtgggggaaagcttgcctcggtttatcccttccctagaccaccccactcatgtggtggaagcctttgacactaggtctgtttttctggtattctatcaataacccttatgttccagccagtggttattgacaattttctcatacaatacagctgcaacacatgggaatatgtcgtttagcctgatttctgcagctgatgctcttctgggctcatc

SEQ ID NO: 60672 - DNA, 152 bp, Zea mays
  Clone ID: MRT4577_155331C.1
gtgtgttgttggaaccaaattttatcccggacttttttttttttaaactggttacagatatacagtggaatttaccttttttgatgacagggtctttatcagggggggagcaggggatattccccagccgttgttggggtaccaaaggggta

SEQ ID NO: 60673 - DNA, 254 bp, Zea mays
  unsure (1)..(254): unsure at all n locations
  Clone ID: MRT4577_155332C.1
gcacgcgtccgtaagctagatcctatacagcagggcggccgccctttttttttttttttttttttcatgaatagcaatggctctnataggccctgataactgaagacaaagacccgcctaagtaaaactatcccaagcaccaaagtcccaaaccccaccaatttgaaacactggcaataacttcttcttccccaatcttaggagaggttgcaccaccaatataatcatgttgctatgttgtagctctcccccaa

SEQ ID NO: 60674 - DNA, 375 bp, Zea mays
  unsure (1)..(375): unsure at all n locations
  Clone ID: MRT4577_155333C.1
ccaatcacagggcaaaatatgccgaccaataaaaagaggggcaaaaaaacattgtctttttgctcaaccagaaaccagtaaacagggcacaaaaatccttaaatatttttaaaaatccaagccagggcaacaaaaggggctactactggggaggaagggataactatgctgagggcccacaatttttttaaaccttgaacccaggggtgttcctcctgccacgagccttttgaaacttccttcctttggagcgcacaaatggttggggggtggttggggggnatttaaggagccttgccgaagggattaaagggttcaggggaatttttgggggcgttaaagaggagtgggttttttgcaaggggagaagggaaa

SEQ ID NO: 60675 - DNA, 1310 bp, Zea mays
  Clone ID: MRT4577_155334C.1
ttctgaatcgagccgccgaaaagcgctacgagaaggcgcaggcgaagccagcggggagagaaaacgggcggctcgcgcgcggcggcggcggcggcggcaatggaggtcacctcctccccctcgccttccgcgccgccgccggcctcctcgaagccggcgctccagctcaaccccgcggccgtcctcctccgccgcctgccgaccccgaccccaacagcggcgacgcccgtcaccgcgacggcgccccccgcgcggcccgccaccgcgtccaacccgctcgcggccttgctcgtccccttctggcgcgggctgcggcgagcgccgaaacagccggtccaccccgcctccgccgccgcggcgcggagggcggcggagcagcaggaggcggaggcgcggaggcgcggcagctggtggggtgcgcggtgccgctgttccggccgtacgtggcacagctgccgtggcacggcggcgcgcgggcgtggctgtcgaagctgttcccgcgctacggccactactgcgggcccaactggtccagcggcaaggaggccggctccgtgctctgggaccgccgccccgtcgaccacctcgacttctgctgctactgccacgacatggcctacgacacccacgaccaggcccagctcctccgcgccgacctcgccttcctccgctgcctcgagggcagccgccacacgcccgcgcgcgacggcatcgccgccgcagccatctaccgcgccatgtgcatcttcggactgaagacgatcctgatcccgtatcggacgaacctcgtgcggctgcagacggggcccaactacgcggatttcttcgccgatttcgtgaagagggtcgcgtcgtcgtcgggcaggccgaccggcggcgagaagcagaggctgtgaacgaatttgctcgcctcgtcctacatgtaaaggtggtagatcgagccgaattggttggggccttggggggatgagatcgtagtgattgtctatataggtagcttgagtttttttttaatccagatatggccagggaaattgagtcttcctgtgtgtgtgtgtctaattgaaatttaaactttggggtttctactgtgaatatagcaaatgtctaattgggtaacagtgggttgcatagctattagcaaatgtggtgatgccctttgttgaaaagagaatttgagcttcaagaccaaatatagggatggcaacgctgtaaacaccgggtgtatatcgttgtttcaggttggacagaagctagggcaacttaggccaaacaaggcagaaatttcacaagaatcatacatgaattgt

SEQ ID NO: 60676 - DNA, 378 bp, Zea mays
  Clone ID: MRT4577_155335C.1
ctgatcccgtaccggacgaacctcgtgcggctgcagacggggcccaactacgcggatttcttcgccgatttcgtgaagagggtcgcgtcgtcgtcgggcaggccgaccggcggcgagaagcagaggctgtgaacgaatttgctcgcctcgtcctacatgtaaaggtggtagatcgagccgaattggttggggccttggggggatgagatcgtagtgattgtctatataggtagcttgagtttttttttaatccagatatggccagggaaattgagtcttcctgtgtgtgtgtgtctaattgggtaattgtagcaactgattcgaaatttaaactttggggtttctactgtgaatatagcaaatgtctaattgggtaac

SEQ ID NO: 60677 - DNA, 283 bp, Zea mays
  unsure (1)..(283): unsure at all n locations
  Clone ID: MRT4577_155336C.1
agncggcaaaggccgtcgctgccaagagcaccgcccccaagccggccaaggccgccgccgccaagtcaaagaccgcagcggctgctaaccaaagaaggccgctgctgctgggaccaagcgcaaatgtgcccgagttacaatgtcgtaggcgaagctcaggaagtcccccgtcgccaatgccaaggccaagccgaagaccgtgaagtcctctgactccaagatggcacggtaagcctcgcattatatcggttcctttaggtctaagctctgattgtggttagtg

SEQ ID NO: 60678 - DNA, 306 bp, Zea mays
  Clone ID: MRT4577_155337C.1
tcgggctggtattctgacgcccacaaaccacgcggagaaaagacgagactgaacgccgcgagttcacgtcacgatggagaacggcgcctacgccgtcgataagccgacgctgtgcaacaagccctcgccgtcgttccggctacggagcggcagtctcaacgcactgcgcctgcaccgcgtgttcgaactgttcgaccgcaacggtgaccgcgtgatcacgctccacgagatggtctccgtgctcgacgcgctcggtctgggcgccgaccgatcccgcctggaggccgtggctgtcggagacatacc

SEQ ID NO: 60679 - DNA, 504 bp, Zea mays
  Clone ID: MRT4577_155338C.1
cacgcctgcagtaccgggccgctaattacagggtcgacctcagcgttcggtttgatgcatcatggggtgatcctctaggtgggtgctgcattacaccaacaggatctgcactgttgactaacaaagctcgttagcgcagttgctcagagagagctagtgatggccctcagaatgagttgttacctccagtcacatatagaactcagttcgagcttgaacaaaacgtgtcttggcacgacaaatcacatttaacactacagagatgcaaccatatgcatctacatggaaagtgataccaacggctcgctttgaatacaatacaagctggcctgttctgactcgctagcagacagagaatgtcttactactggattaagcctgcaccaaacgagctcttcgcatcttctgattacggatctgatagtgaaaatgttgatgaacttcttggcactgttgcatttcataatgttatcgaaccctctggcgttgctataagtgaacacc

SEQ ID NO: 60680 - DNA, 241 bp, Zea mays
  Clone ID: MRT4577_155339C.1
gggaacgatacagagaagattagcatggcccctgcgcaaggatgacacgcacaaatcgagaaatggtccaaatttttgtatgctattttaccaataagatctatgtgactaatattgtccatcagatttcattgttatccatcttttgttctatggcatgctccacagggcctgcttgatctttcaggtgggcagacacatataggaatcaagagaatgggagagcttgatctaaaagcat

SEQ ID NO: 60681 - DNA, 103 bp, Zea mays
  unsure (1)..(103): unsure at all n locations
  Clone ID: MRT4577_15533C.1
taaagaaagctcggacgcctgcacttaccgttccgtaattcccgtttccacccacttgnctgtgtattgcgcatttgcaaacacacccgcaagtgcttctctt

SEQ ID NO: 60682 - DNA, 571 bp, Zea mays
  Clone ID: MRT4577_155340C.1
cggtaccggccttcccgggcttttttttttttttttttttttttttttttttttttttgtgggggggtttttttttttttttttttttagggggcccaacgtttttcattttattttttcacagaattcaattcccaaccttgaagctagaaaaacaataatggaagggggtcttgcccaagtttttcataaaaacttattcatttcatcattggggggggggtttaatttatttgtttctcacggacggggctcctgggtcaactttttagggccctatgtttgagcagctcgatggggctcatgggcaaaaaaccaccttttatttggtgccccccgggcaagggtaggggctgggggcgtcccccttgggatagctgtaggcgcccgggcaaagccccttgaaaaacttggagtagtcgggaggcccccagttgttccccccccggccggggcaacaatactggtccgttttgaacacggggcaggggttgtcgcaccccccgggggcctgcagcgcgggggggcactgggacgtgaccttggggtcccaacgcggcccccccttggg

SEQ ID NO: 60683 - DNA, 460 bp, Zea mays
  Clone ID: MRT4577_155341C.1
cggcaaaaaaaaaggggttttcaataaaaaccggaatcccctttttggcccccttacttggatgggggccccccttaataaaaaggaaaaaattttaaaccccccaccgttttttaatttaggtcaacaaaaagaaaagtcccccgtggttggcacccaaaaatttttatcttaataaacataagcgggaacaggtaacccagaactccccccccaacaaaaaaaaaaagttccttttcggccataaaaacaaaaaggggctgtgtgggggggaaccccccccaaaccgccaagtttaacaaagctcctattttgggggggaaggccggaaaaatgggggcggggccacgcctggggagggggccaaaaaggttatcattgggcccggaccctttgacctcgtcctggaacaaaccccccattagggcgaaattggaaaggggcccctttttaatcccct

SEQ ID NO: 60684 - DNA, 330 bp, Zea mays
  Clone ID: MRT4577_155342C.1
aactaatatttaatatctatcgcccctccctattctaaccaaacatatactatcaaggagggatggaggacagacagtgcctgccttttctccaaacatattaactaattaattaccactcacttgcccgccccaattaattaaagaaataaatgctgacatgtatcttgcaatgcatgcacgatcaatgcatacctagctgtttctgccgtcattcattcatcacagaacctcgctctttcttgttgaggtggctcattataaatcatatttattatccactctctctagctgatattaatgagttcttaccaactttaccgcccgcta

SEQ ID NO: 60685 - DNA, 476 bp, Zea mays
  Clone ID: MRT4577_155343C.1
aaggcaaattctgttcaacatccatttccctttgttgtttccccctaagagatttttttgacccaacgtaacccttccacattctccttttgtttcgcccttacccttgttttacatgtgttttacaacagcacggggcaacaacaaaattttttgaccgcttttggagcccagttacaataaggggtgtgccaacagattaattttgtcgacatcaaacacaccggggcgaaggcaacacctaccaacaggccaacgaccctttttcgcacgttcaaccccaatgagccccttaaaaccccgccaaaacttgggatcaaagccccccacccttttaccattcagtagtcaaacccattattttccatctttgcaaggattgcacttattggggcgcttggcgcttcaagcccttttaaaacggcagcggcaagggctccaccccagctatttttggcaccatacacccaatttgc

SEQ ID NO: 60686 - DNA, 560 bp, Zea mays
  Clone ID: MRT4577_155344C.1
gggtgggggtttttttttttttttttttttttttttttttttttttttttttttttttttttttttttttttttttttttggcaaaattttttagatttttggatgaatatatactattaaaaactggagattacaccagttgggaacatatatgggggcaataccgggataaaaaaatggacatggtactaaaggggagaactccagtccttatggagatttgggaaatccaatcctgtttttgccgaagtaaaaaaaagggggggggggacccataaaaacattaccaagttttcagagaggaccacgagggggggggacgtaaaatggcataaacccactgatgcaaatagtttggcctggttggtccaacttaaatatgtactggtttggggttaaggggaaagttttgtttggtatggggaatgcaaaatttggcatttttgaaatctgatgggaataaaaagttgacttgccattgggggtagggagacgctcacagagctgattagcataattcaaaatgagtttttttgtgttgtttttaaggagctgattt

SEQ ID NO: 60687 - DNA, 614 bp, Zea mays
  unsure (1)..(614): unsure at all n locations
  Clone ID: MRT4577_155345C.1
gcagagctgtatcttcagtggtgtgatgaagctacagtaggggagatcactcatgctaggtatggatctccttacccttggcctctgaatcatattttggcctatcaaaaacagtgggaagtcaaacgtaagatgaaagctattggatggggaaagaagactctggaccaggtcttagaggatgtagaccagtgctgtcaagctctctctcaaagactgggaacacaaccgtatttcttcaataagcagcctactgaacttgacgcactggtatttggccatctatacaccattcttaccacacaattgacaaatgatgaactttctgagaaggtgaaaaactatagcaacctccttgctttctgtaggagaattgaacagcactattttgaagatcgtggtaaaggcaggctgtcatagagttatgtgttagtctcaggagtcttaacttttgaaatatgttttacttgaatgttacattagatattggtgtcagaattttaaaaccaaattactgctttttgaaacctcaaattatataatgtatcttatgtatgtgctttatattgntatttgtgtatacattaaaataattctgaattatttaatctgat

SEQ ID NO: 60688 - DNA, 662 bp, Zea mays
  Clone ID: MRT4577_155346C.1
ggccgcttttttttttttttttttacttggaaagggttttatctcacgcaggcaggcagacctgatccatcgctacttaaaactaggagtgcttaagatgccaccagatttccggaagcacaaggacactcacagatacagtgtgatctcagaaactacagtatacgaggagcaccaaatcatggccggtgccccacgacggaaactccgctccattcctgatcctaccctgggcgctacagtgagaggatggctactgttcctgccatggacagatgggcccacatccggcagtgacccattgtgtcacgtgctgaaaccaagatgccatattacccggtgttctcgacgacggtattgcttcagctgctgccattgacattgcacggaaccgccgattccggcaccgcccttgcctggatctctagtgaccaaacgtggagatcgtcgcgcgcgcagctagaaagagagctctgacgccggcgtgcctgcggacttgaagaggccgtattagcgattatacaccaacccgccattgacgttctcgttgaagagcgcgaacacgtaggcgcggaccggagccctgtgcttgagcggcgtgcccttgccctccggcaccaggcgcatcgcgttgctgatgtagcgcgctgcgatcttgcgcg

SEQ ID NO: 60689 - DNA, 187 bp, Zea mays
  Clone ID: MRT4577_155347C.1
cgtggcggcgcggcgcgcccatgcccggttcgcgcatgttcttcttcgcctgcgcgggggtggacggggccgtgtacgcgaccggcggccactacacctataagaacgcgctgcgctcggtgctggcctacgacccgggcgcctacgcgtgggcggggcttcttttctattttgaggatcgctacta

SEQ ID NO: 60690 - DNA, 321 bp, Zea mays
  unsure (1)..(321): unsure at all n locations
  Clone ID: MRT4577_155348C.1
caaactcgcctccttaccatcctttcccgccggcgcaccttgatggcttcctcctccacagaggctaaggctctctccgggaccggcgtcccnctccctctctctactctgacgctgcctgccaaggtcgccttgctctccctgattcctcctgctccggcccaacgcctttctctcaagcgtggcgcgttgctctcacccccagaacgcatccggtcggtgcggttccttgctgctatgagccctgagattctggcaactcttgacaaagtcttatgatccaacaatgtgggtcttgttattaatggcaccaatgacttc

SEQ ID NO: 60691 - DNA, 1543 bp, Zea mays
  unsure (1)..(1543): unsure at all n locations
  Clone ID: MRT4577_155349C.1
tgttggtgccacttagatctgccacaactgggagcaaggtcttgttgaccactcggatgaaactagtagctgaggttctgaatgcgggttatttggtttcgcttgatggattaagaagcagtgattgttggttgctgttgaaggaagttgctttgggtggagaaaccatggattttccacctgagttgcaagaggttgcaggaactcttgttgcaatggtgaagggttcacctttagctgctaaagctattgggcaaatggcaaggagcaccaggagcacacggaaatggagaaccctggtgaacacagaaattagtaatgatatcattatctcttccatccaactcagttataaacacttgccgggtcatctccagcgctgctttgcatactgcagcatatttccatcaccttggaggttcagtcgctctcagttggtcaatatgtggatagctctcggtttcattcaatcatcagcagaagggaaagggctggaagaattagggcaaaaatactttgatgatctcctatcacgatccttctttggtactgcaaataaagaccagcaaacatattacttccttgatgacctaatgcacattttggcacagcacttctctgctcatgattgtatgaaaatcaacgagggcatccctgttgtgattccaccaacagttcgtcatctgtctgtttcaaccgattatttaccacagctgaagagcaaatacaggttgggaaggctgcaaacattgttagtcctcagaagctcatcgttatcttcaggtcatttccctagaaaacttctggccaaatttaagaacttgcgggtcctggatctgagtggatctgatattgtagaattgccagaaagcattaatcagttggtacatcttcattacctagctatatgcagtataactaacaaacttcccaagactatatacatgcttaaacatcttgaggtgtgtgatatacctatattcttatttcatgatgatcatcctagaggtgttggtaaatctgctacagttaaacgtctcaaaacatgctgtggcaagcaggcaaggtcagttaagtccttgattgatgtgcaaggactgttataggaattggattaaccttcacggcttattagtcatttgatcagccaatgtctgactttcagaatcaaactttacagtaatcccagcagcaggcatgaagtgcaatttttcttttcaattcgacaccttcaagctctagaatccatttctactcagcctgtttctgtgatttggtgtcaggataactccagtttggtggatcaagaatatggttgttcacatccatctaaacttcaaactattttgtgttggtttgtttgatagtcccaggttggtactttgcaacctttcaagccctctttattgcaggactacttggctgttttgcctaatccgcaacttaaagtagagttaatttaattttacttttaatttttttaatttccattggnaagggaatccaatttgggtttccacggtnaacnggtgcaacaagacgg

SEQ ID NO: 60692 - DNA, 954 bp, Zea mays
  Clone ID: MRT4577_15534C.1
tcgagttttttttttttttttttttttggataagtagaaaattactgaaaaacaatcgatgtggttcaacttaggaattacattgttgttacaagtgatgtgacataggaagtcccagagcaacaatcctctcgagtagcgtgcagtacaaatgtacaatacataccagggccacttctacatgtgggccaccaggtcctttctaaaataaactggtatcctagtcctaatgtaaacagacaatgctactatgttcaactgggaaatgcaacaatcactgtcctcagatcaagaggaggcaagtgggattggtctcacggcaccctgtatgcggcggaacgcagtcttgatccgttccttcagtgtagcattctcacattccacatagccactcctcccgtccaagtgtgccacatttccatccacagatatgacaagtctcccttcctccacaactttaacatcaccgaaaagtgaagccataagagcatacaccaccttttgagccgtctcctctttggtcttcactgctccttccaccggaacaactttgggaccttcacgaccgacgttcaagatcatagccaccacagaatcagacaccatatcgctgatggggtcggacagccactgcagcgtgacatagctttctgagtccaggcgaaccgtcactcttccgtgcacgatcagcgctggaacatcggattcttccgccgctggctccacgctctcgtatatctgctccagtctgtaccttatgacttcaaaggaaccacagtaaggaaccgctatgctgcatgataagttagctgtggccccctgcgtgatcactcggagatcttccgtagccatgtatctggtatgtgcatcccttcctcccgagtaggccgccggaggactccccggcctctgggtcctttttttccagcctgccgacagtcttgtcccttttct

SEQ ID NO: 60693 - DNA, 331 bp, Zea mays
  Clone ID: MRT4577_155350C.1
gggagaccggggccccaaatggaacacaaaaggggaaaggggggtaattttagcttcaaaaacaggtaacacaaaaggacccaaacaggccggaaacacggccaacggaaaaaaaaaaaaaactatgcggaagggggcccaagggacactgaaggggcccaaaccaaagggaaccgggtaaagctacagggcaccaaagggcttgaacggggaaaaaaaaacgcaaaaccttggccgggggggcagcaaaaaaaccaagccaaaaagggttacggaaccccgattggggcccaaagaaaagccgggaaattaatcagctaaaccaaaaccg

SEQ ID NO: 60694 - DNA, 233 bp, Zea mays
  Clone ID: MRT4577_155351C.1
tcgacacgcgttcggccacacatacggttctatatctcaaacattcaatctagggaatcttagagtactttcacttgcatccgatttcataaatcttttataaactaacttaaattcaatccactgaccaatattaataaatgctgttactttaaaaaacttggatctacataacataattgacttccaacacatacaactatcgcaagatgtcttaataacaatcaaactta

SEQ ID NO: 60695 - DNA, 355 bp, Zea mays
  Clone ID: MRT4577_155352C.1
ctctcgctacgtttccctgcggttgtctagggcgtggggggagtacccgccaattgcaaaggaggaaacaacgggcgtgtccaatatacttaagtgaccacaggatattagtacaaactttcctattgtctcacaattacataaatatgggaggcgtcccatttccattttgcaatataaacacggaaaatttacaacaacgatttggtagacaaggttccaaaatttggaacaactttacttgcggtacttgaaaaaacctttctccaactagaatatggtctacaggaggcccgttttattgattcagcaaactacaaaacgctttatatcttcaactgctggtcagaaattg

SEQ ID NO: 60696 - DNA, 1713 bp, Zea mays
  unsure (1)..(1713): unsure at all n locations
  Clone ID: MRT4577_155353C.1
cggccgcgngggtgcagcaccatctgctgttgccctagcagaactcttacaggtgatgaaaatgtggatatgtggaatggttatgttaacaatgatgatcgggcacttttgaaggtgataaagtattcatcgcctacttctgctggagcagagtgtgttgatcttgactgtagctgggtggagcaatgggtgcatcgagcaggaccacgcaaggagatatactatgagccagaggaagtaaaagctgctatagttacctgtggaggtctatgtcctggtttgaatgatgtcatcagacaggtccttatcttaagaagtgtccagacatttctgcatttcaaacccaaaattcttgacattcatgtcgaacatcaacatgaataagatagtattcaccctagagacctatggtgttaagaatattgttggaattccatttggttatcgtggatttttcgaaaagggcctcaaagaaatgccgctttcacgtggtctagtggagaatataaatcttaatggtggaagttttcttggtgtttctcgcggtggagctaaaactagtgagattgttgatagtatacaggccagaaggattgacatgctttttgtacttggtggaaatggtacccatgcaggagcaaatgctatccatgaagagtgccgtaagagaaagctgaaggtttcagttgtagcagttccaaaaacaatcgacaatgatatacttttgatggataaaacatttggttttgatacagctgttgaagaagcccaacgagccattaattccgcatatatagaggcacgtagtgcttaccatggtattggcttggtcaaattaatgggaagaagcagcgggtttattgcaatgcacgcttccctttcaagtgggcaggtcgatgtctgcttaatacctgaggtcccgttcactctagatggagaatttggtgttttgcggcaacttgagcatttgctaaagagtaagggattttgtgtggtttgtgttgcagaagctgctggacaagtatgctaaaattcacagctgtctggatctactccaagaatcaggtgcgactgatgcatcaggaaatgtgatattgagtgacattggtgttcacatgcaacagaagattaagatgcatttcaaggacattggtgttccagctgacgtgaaatacatcgatccaacttacatggttcgtgcatgccgtgccaacgcatctgatgcaattttgtgtaccgtgctcggacaaaatgctgtccatggggcatttgctggtttcagcggcatcacttcttgcatctgcaacacgcactacgtgtaccttcccatcacggaggtcatcacagcaccgaagcgcgtgaacccgaacagcaggatgtggcatcggtgtctcacgtccactggtcagcctgacttccactgatctgccatcgtcactgcataaccaaattcgcatagtttgaggtactagatgatttacaattctttcgctgatgtgctccattcacatcgtgaggttccaagattagttaataatgctaaactgagtggacttgtctggtttgttcacgaaggtggtgttgtccattgttccgaagctctggtatttgagaaatttgcatatttaacactataaagatgtgactccacagatttgccattttcaagatgggctacgcaaaattgccacctgtttcattgtcatgttgntt

SEQ ID NO: 60697 - DNA, 311 bp, Zea mays
  Clone ID: MRT4577_155354C.1
ttccacgcgaccgcccacgcgaacggccacgcgtacgaggacgcgagggcacggcccgcagaaccaaaaaccccaaggagcagggcgcgccgacggaggcccacacgcacaaggccaaggacaaaaccccgcaggcccacaagcagacggaggaccagcagcggcacggcaggaacgagccggcgcacaccaagcccgccaagccggagcacacggccgcgcaccgggaggagggccgcgaggacaacggccgccagaaggccgagaggcagccgggccacggacggacggcgaaggaggagcacgaccac

SEQ ID NO: 60698 - DNA, 404 bp, Zea mays
  Clone ID: MRT4577_155355C.1
ctcttacaggtgatgaaaatgtggatatgtggaatggttatgttaacaatggtgagcgggcacttttgaaggtgataaagtattcatcgcctacttctgctggagcagagtgtgttgatcttgactgtagctgggtggagcaatgggtgcatcgagcaggaccacgcaaggagatatactatgagccagaggaagtaaaagctgctatagttacctgtggaggtctatgtcctggtttgaatgatgtcatcagacagatagtattcaccctagagacctatggtgttaagaatattgttggaattccatttggttatcgtggatttttcgaaaagggcctcaaagaaatgccgctttcacgtggtctagtggagaatataaatcttaatggtggaagttttctt

SEQ ID NO: 60699 - DNA, 1207 bp, Zea mays
  Clone ID: MRT4577_155356C.1
gaaagctgaaggtttcagttgtagcagttccaaaaacaatcgacaatgatatacttttgatggataaaacatttggttttgatacagctgttgaagaagcccaacgagccattaattccgcatatatagaggcacgtagtgcttaccatggtattggcttggtcaaattaatgggaagaagcagcgggtttattgcaatgcacgcttccctttcaagtgggcaggtcgatgtctgcttaatacctgaggtaatataaatgtagcttttactatgtttaaaactgccatatgttttcctctcacatgtaagcactaacagaagcttacaagttacaatatgaatgaaggtcccgttcactctagatggagaatttggtgttttgcggcaacttgagcatttgctaaagagtaagggattttgtgtggtttgtgttgcagaagctgctggacaagtatgctaaaattcacagctgtctggtctctatctacttctgttccatgtatatagtggcaataccgataagatgcaaaaaacctatagtttgactcgttttcttttaccttttgttacaggatctactccaagaatcaggtgcgactgatgcatcaggaaatgtgatattgagtgacattggtgttcacatgcaacagaagattaagatgcatttcaaggacattggtgttccagctgacgtgaaatacatcgatccaacttacatggttcgtgcatgccgtgccaacgcatctgatgcaattttgtgtaccgtgctcggacaaaatgctgtccatggggcatttgctggtttcagcggcatcacttcttgcatctgcaacacgcactacgtgtaccttcccatcacggaggtcatcacagcaccgaagcgcgtgaacccgaacagcaggatgtggcatcggtgtctcacgtccactggtcagcctgacttccactgatctgccatcgtcactgcataaccaaattcgcatagtttgaggtactagatgatttacaattctttcgctgatgtgctccattcacatcgtgaggttccaagattagttaataatgctaaactgagtggacttgtctggtttgttcacgaaggtggtgttgtccattgttccgaagctctggtatttgagaaatttgcatatttaacactataaagatgtgactccacagatttgccattttcaagatgggctacgc

SEQ ID NO: 60700 - DNA, 289 bp, Zea mays
  Clone ID: MRT4577_155357C.1
ataccaacatgtctccttttgctcggaacgtcacaccgcccggtctccgatctccgatccccgatcccctcgtcgatccaagatgcagatcttcgtcaagactctcactggaaagactatcaccctcgaggtggaatcctctgacaccattgacaacgtcaaggccaacatccaggacaaggcccgcattcccccggaatatcagaggctcattttcgctgccaagcagattgaggacgggtgcacatttgccgattcctattccataacgagatccccctattccttt

SEQ ID NO: 60701 - DNA, 455 bp, Zea mays
  unsure (1)..(455): unsure at all n locations
  Clone ID: MRT4577_155358C.1
gcccatcccagctgccctcggcgctgcgcatggactcggcaccaaccncccccgggggcagacgccgccggccaaaaaacncccgaaggagggccggcacccccagcaaagcgaaggaggccgacgaagcgcccaaccaccagacacaagagcggacacaagcccacaggcgggggcggccggaagccccnggnacggccccgaccgagagaggggggggggcccanagcccgacgagccccagagcgaccccaccggagagggcgccgggaaccacgacaggaacaacggcgacanggagcggcaaacacgagacaagcgccaagaaccagcaggaggaggagagacacacacgcaggggcaggccaggggcgcanggnggcgccgcccccgaagagaaaacccgagacggcggaaagaancggggaagccgcgcggaggaaggggcaggcccc

SEQ ID NO: 60702 - DNA, 281 bp, Zea mays
  Clone ID: MRT4577_155359C.1
caaaaactacacggggagtggttatgttgtgtacgcaagttcaataaccaagcttgagccgccccctacctagaggtctattggaaaaaaccactggccaacaatgaactattcatttgcttacaacggacaaaacccagagcctgttttgtaccactatgcaaaacaacacaaaacgacatgcagttgggtccagcccacgatagcctttcttacagcgggcacaaaccgcaggcacgccaaagaaccgtgcactagggttaccacctaccacgagaaca

SEQ ID NO: 60703 - DNA, 1625 bp, Zea mays
  Clone ID: MRT4577_15535C.1
aattcggcacgagggtccaagctggtgaaggagaagcgcttctgggtggcctccttcctcgtcgtatgggcagcagcgctgcagggccacatgatgtggatgcagcgccaggacaccttcaagcacaagtttggtatcgaccaagcagacggacccgatgctcaggattcctcatcttcgtcttcgtcttcctcttcttacacgcttggctggtggtattacgacctatacttatgatgatgcccagcgccccagccccttgcttcccttcttgcatttgctgatgctcctgaagccttctacatatctgtgaagcatggcgttgaaggtgccagaggaaaagctatatcagcagcattattgcagtctgctcattacgatcagttgaatgtggtggggattcctgtatgtgctggacaaatttcttatgcgttgcaaattattattggatgacaatgacatgcaagaccacacaactgctgatcataataagaattgtcttgataaagcttttgcggttatagatattatgaatagtgctttgttacttgttgttcaaaacaatgagacggaccatatcaacatattaaagatgtgtgacatgctgttctctcaattatgcctgagaattccatccacaaatgcgatgcaagttaggggtcttcagtcccttggtcaactttttggttatacatctaagaacatcgatagtcatttggaaacccttgcatctcaccaaagtgttggaaacaagaatctttgccagagtgagacattgcaagatatgggcatggatcaatctggtcaacccactttattctgcgaagcatcaatggcaacactactgagaggacttgcaatagctcccattcagcttagcccgtgtaccaacttctttatttttctggccattgatacagcctgaaggggcagccagcgatgacattgcattgggtattgctgttggtagcacaggaagaggcaaccttcctggttctacatcagatattcgagcagcgcttcttttacttttgattggtaaatgcacagctgatcaggaggcactaaaggaggtagaaggcaatggggttcttcaggggccttctggatgacacagattcaagggtagcatatactattctgctgcttttcttttgaagagaatgatgacagaggaactagagatctaccaacggatgcttgaaagcctcatctcaaaagctcaacagatgctatgcgtgtgtttggttgcaggtcctgtggtagcctggcttactacatgccttcccgcatggagatggttgagcatacatgcatcgatgcaagttacgtatttgtgaaagtcttttacctgcatgcagggatacgcgtgaaatggccgtacgtgatgggccatgctcacatgagcccggctacacggacaggcatccaatcaccacctatgtgaatgatgtaaattatcgatgggggcatgtacatgcctctgaatttgtttgtttattctttgttagactagtcactgtccaagagagtcactgtggataatcctgtgttatggacagagacacaattctacaattttgtattgctgaaccattcattgagatcttgcatttgcatgtatg

SEQ ID NO: 60704 - DNA, 334 bp, Zea mays
  Clone ID: MRT4577_155360C.1
ttggttggacctttgggctgattatgtgctgttatgtgctgttattgctgcctgacctgatcgtacgtattgtatggttctcgcgaccattctgatctgatcgtaccgattgtatgttggagtgtcaatttggcggctaagttgtttgggtccgtaagtgtcttcctatgagctgagttggatgtttgtgcatagtgggtgatggagggatagattgtgggtctgagcggagtttgtcctccatatcttctgccggaatgagctagctaagtgaagttcccctctagttcttcatgatgggatatgtcagtggtcgcctctctgccgtgtggtc

SEQ ID NO: 60705 - DNA, 239 bp, Zea mays
  Clone ID: MRT4577_155361C.1
caaacactcccatccgatacggcggtcaccaccgcgcagagcttcatccaccatgatcatctccaagaaaaaccgccgcgagacctgaaagcacatgttccatgatggggagctatgtggcaggaaggactacaacctcggccaagcaccccaaggttgacgagacctagctgaaggcgttcacactcatggatacatccctggctacgaagcatggcaggaagacttgcttgtggacg

SEQ ID NO: 60706 - DNA, 957 bp, Zea mays
  Clone ID: MRT4577_155362C.1
gatgaaaaacagaatgataatagggtttgtagagatgggggacggcatgatttttaaacttggccaccgcaggttgcttcataaaagcactattcagaatgtagcaccaatattggatctagcaattgctgattaccatggtgagaaacaggaccagatgtttgcatgttgtggaatgtcccctgagggctctcttcgagttttaaggaatggtgtcaatgtggacagacttctgaaaactgaagctatttaccagggtgtcactggtttgtggactttgagaatgaaggcaactgatgcctaccattcttttctcgtgttgtcatttgtggaggaaaccagaatactgtcagtaggactaagttttaatgacatcagtgatgccgtgggattccagcctgatgtttgcactttagcatgtggtttggtggctgataatctgctagttcaaatttacagcaaaggtgttaaggtctgtttgcctacagtatacgctcaccctgaaggtgcccctttaacttctccaatttgcactgactggtatcctgctatcactatcagtgttggtgctgtaggacataatattgttgttgttgctacatctaatccttgttgcttatatgtccttggtgttagatcatcatcttcttaccagtacgagttgtatgcaacacatcatgtgcaattgcagtatgaagtatcatgcatatcaatcccacaagaggattgtatacatgataatgtatctttcagctgtggagagggtgatgacatttgtaagaacccccctcctaaagttaatgtttgcaagtttgctgttattggaactcatagaccttcagtggaaatcatctccttggaacctggagaagcattaagggtattaactattgggactgtatctgtgaataatgcacttggcgcacctatgagtggttgtatacctgaaaatgtcag

SEQ ID NO: 60707 - DNA, 247 bp, Zea mays
  Clone ID: MRT4577_155363C.1
gcgggcgaagtcgggcctcttcgtgggcatcaacaagggccatgtcgtcaccaagcgcgagctgcctctgcgcccgtcccaccgcaggggaaagcacgaaagggtggatggcagggcctatcaagagtgtgcttgtctataaacgatccactttagtgcagcacccttactgcaaaatgaaaagaaaaaaagatatgccaaaaacgtgccatcaaaaatagaaggcattatttccaatctgagttca

SEQ ID NO: 60708 - DNA, 314 bp, Zea mays
  Clone ID: MRT4577_155364C.1
gcgccgtcctgctgggggcgacggcggacgacgcggcggcggcggcgtaactcatgcaacccgtcggtgctgagcgcgtgcgcgcacgcgttgttcggcaggacggacacgctggggtgctgcgcgatgatgaacgcgcatgaggcgagcctatgccagtacaagctcgaacacgtgaaccgcgcctacgacaacggacccgccgagcagcgcttcaccctcacctgggggctacacaaatgaagtgctgatagacctagatactacatgcgcttgagacgactctttggagatggtctggaatgctcgtctac

SEQ ID NO: 60709 - DNA, 160 bp, Zea mays
  Clone ID: MRT4577_155365C.1
cggacgctgggacgagctccgccgcgatggcggcgccaccgcgccgatcactccttgtccttctctccgggagcctagtcttcgcctcccttgtagccctcaccacagccatctacgaggaccaggtcggccacgcggactggcatcagaagtacattgg

SEQ ID NO: 60710 - DNA, 708 bp, Zea mays
  Clone ID: MRT4577_155366C.1
cattgggacctcgagccggcgggagatttcgaaaaaaccgcgtgcggccatgattgccacgcagagcatatacatcactctagcgttcatgtataaggcatggattaccggcaaccatgggccccctgtcgttcgatatctacaaggaggccgtcgacaacaatgaactccgccacatggacatggaccgcaacagcgaacatagatgacaggagatgacacacagtgctagaaatgaaggacatctggctgctgttccccgcctcccttgacaagaaagacaagaaccagtgcatggactagcatggcgtgaatctgaagacgctctgcatggcaacgggcatgaccaacttgatctccgtcatcatcttcctcatgatgatattagtcaagctaaacacggagaagaacaagaggccgaggagcctgatcaagatcttcatgacgtgcgcatgggggtcctcttccatgatgatgagtaatttcgacgccttcaaaataatacatggatgaaccgacgctctaaatctgctctgccacgacggctgccgacacgaggacgtccagggcgctcttcctcgtgggtactaccaccttgtggacaatctgaatcatcacttacgaggcccttctccatgacgatgctgagctgctggctcatccagtacagatgcaagtactaggccatgctccgagtatgaccatgtc

SEQ ID NO: 60711 - DNA, 1114 bp, Zea mays
  Clone ID: MRT4577_155367C.1
ccgggggaggcgaatctctcgctaactgtcatcaatggcggccgagcccaagatcctagagctctccaacggcaagatcaccgcgaggatctccaactggggcgccaccatcacctccctcctcgtccccgacgcccaggaaaggcatgtcaccttattttggctgcatagttggccgtgtcgcgaataggatcaaggatgggaagtttacactaaacggacttgagtattcattacctgtcaacaatggacctaacagccttcatggtgggttgaagggatttgataaggtcgtgtgggatgtcgtggagcacaaagatggcgaatgcccttcaataacttttcagtatcacagcaaggacggggaagaaggctatccaggcgatgtaaccattcgagcaacatactctcttcctgaagctactactctaaggcttgacatggaagctacaccagagaacaaagcaactcctataagcctggcgcagcacacctactggaacctcgcaggtcacgcccgcggcgacatcttaaaccactcgctgcagatctggggcaagcacatcactccggtcgatgagaacacaattcccaccggcgaggtaatgcccgtcgatggcacccctttcgacttcacgacggagcgcaggattggcgagcgcatcgacggtgttcctggagggtatgatcataactacgtgctggactgtggcgacgagaaggacggcctgaagcgtgcggccaggctgaaagatccgtcaagcttgcggaccctggacctgtggactgacgcacccggcatgcagctgtacactgccaactacgtggatggcatcggtggcaaggcgggcgctgtctacgcgaagcatgctggagtgtgcttggaaacccaggggttcccgaatgccatcaaccagcctgagtttccctctgtggttgttcggcccggtgagaagtataagcatactatgctgtttgagttctcgggatgttgaatgaatagtgactggacagcataaattgatgtaaaacatgttgaatgaataaacaagcagaaggataagctgtgaaaaaaacgccccagtttgcttcagattaaaaaaaaaaaaggagg

SEQ ID NO: 60712 - DNA, 406 bp, Zea mays
  Clone ID: MRT4577_155368C.1
gggcaaactggttttaacatttgctgcaaccagttacaaaattttttaacatatttttgttttatttggctggtgttgtctcaatttacattacaaatttgggatgcaaatttttaacttattttcgccttttgggcgtttaaaaaggtaccttgacccgatttcttgcctaccaaaaaattaatatggggatcacctttgttccatggggcatggccatagcattttattagtttccatagccagagttgtccattgggtttgcgacaggggcaaccttcggtttctttattttgaccaccacaacatttgatgtcaggaaggttttggccaccgacgcggggtgctccaagcagaattttaccaacttgggggggtcaatgataccagcagccattaggttctt

SEQ ID NO: 60713 - DNA, 1214 bp, Zea mays
  Clone ID: MRT4577_155369C.1
gatcccaggctagtaaagggcccccgctagtaaatcgagctcggaggcgaatctctcgctaactgtcatcaatggcggccgagcccaagatcctagagctctccaacggcaagatcaccgcgaggatctccaactggggcgccaccatcacctccctcctcgtccccgacgcccaggggagtgtcgctgatgtggtgctcggattcgatggcttggatccgtacgtgaaaggcatgtcaccttattttggctgcatagttggccgtgtcgcgaataggatcaaggatgggaagtttacactaaacggacttgagtattcattgcctgtcaacaatggacctaacagccttcatggtgggttgaagggatttgataaggtcgtgtgggatgtcgtggagcacaaagatggcgaatgcccttcaataacttttcagtatcacagcaaggacggggaagaaggctatccaggcgatgtaaccattcgagcaacatactctcttcctgaagctactactctaaggcttgacatggaagctacaccagagaacaaagcaactcctataagcctggcgcagcacacctactggaacctcgcaggtcacgcctgcggcgacatcttaaaccactcgctgcagatctggggcaagcacatcactccggtcgacgagaacacaattcccaccggcgagataatgcccgtcgatggcaccccttttgacttcacgacggagcgcaggattggcgagcgcatcgacggtgttcctggagggtatgatcataactacgtgctggactgtggcgacgagaaggacggcctgaagcgtgcggccaggctgaaagatccgtcgagcttgcggaccctggacctgtggactgacgcacccggcatgcagctgtacactgccaactacgtggatggcatcggtggcaaggcgggcgctgtctacgcgaagcatgctggagtgtgcttggaaacccaggggttcccgaatgccatcaaccagcctgagtttccctctgtggttgttcggcccggtgagaagtataagcatactatgctgtttgagttctcgggatgttgaatagtgactggacagcataaattgatgtaaaacatgttgaatgaataaacaagcagaaggataagctgtgataataatgcactagtttgcttcagattattgtagaggggtaaggaaaaaaaaaaaaaaaaa

SEQ ID NO: 60714 - DNA, 513 bp, Zea mays
  Clone ID: MRT4577_15536C.1
cagaaccccaatataacaagtgcccaaatcttgcttcgttatacagctaaaatagcgctgcaccagctggaatcaggcatagcgactaaatgatacactaccgggacctaataaacaaacaccacggcgggagcttaatggtcgacaattgaaatggcttctggctgaaggtaaacggccctccacaggcccctttaaaaggaaaaccagctcaagggaccccgctcccggaaaacctcgatggccacctccgaggggtggcgccgcctggatttcaaagtggaacccgctaagctgggccttgagacggtccttccactgggagaaaagaattttatcacgtaggcggcatgcttagggggaccaggcaaggaaaaaaatttggctttcttgcacattccccccagcaacaaaatcaaaatcatccaccgcgtatcggtggtcattctccgggagagaggccaaaaaatatgataggtttcaataggagcccctgtcttcacccaaccacct

SEQ ID NO: 60715 - DNA, 556 bp, Zea mays
  Clone ID: MRT4577_155370C.1
tggccccgagcggaaggggatccacctgcgccccctgccaacttctcgggaaggtaaaaatcggtatgtttggtcgtcggtgtggaatgtgaattcttcgatgttcatcgtttggaagtctccagattctggatgtcgtcgccgccatggcagaaaggaattccaaaggctccaagagcacgccgccagcctgtcgactcttccatctcagttctcagatctgctcatcatcatcatcgtcatcattcactcctttctcctttgtcaggttagtactggcgctcccgacccattcattagcaggagatggatagataacgccgcagtctgcagatcctgttcatacagtccgtccctgtgtggtatagatggtcggcagcagccattatatttgtgatgtcacgtttctgctcgagcctctacagaatggcagggagtagggactaggtcgctatcgagacgacactgttccattcgtgacgtctcgtgcttatctcttcaatgagatctgccctgttcgtcttcagtcaatttttcgctcttggtgaagattctt

SEQ ID NO: 60716 - DNA, 269 bp, Zea mays
  Clone ID: MRT4577_155371C.1
caccagctccagcaccaaggcgcaggggagattttgacagcaaggggggtcaccaacacccaagccggcagaccatagcttacctgatgccactgggccctaaccatgcaggcagggacccaagtggctacaacaggcagggcggcgatcacgcggtggacgatgcctccgcggggcgaggcagaagatccacgagctgcgaaaccggccgaggaaccggcggcggaggctacaaccagatgcaggggggggaggagcacccccgaaca

SEQ ID NO: 60717 - DNA, 878 bp, Zea mays
  Clone ID: MRT4577_155372C.1
ccggccgggccgggactccttttcattcgcccgccgcttcgctcacgctcacgccgtccccagtccccactctcccccgcccccctcggccctcgccccacgcatgagaggagagcggccggacctggaagcttctccgcggcgctgcgtcgccagctcgcagcggtgactggtgtcctttcaacttgaccttcgccaccgttagctagactcgttcgcgatctcagattgcaaggtgattgcgaatctggcttggccacatagagcttttttggagtggtgctcctcagaagatggttttctgagagtgctttctgtctactgtaaattgatgaaattttggtgaacatatactatggaaaaaaatatagctcactgtcctgttgggggcaatggtgagattgaaaatggtgcgagctctagtcagaatcctgagtctcttgagcattcagttttgctgtctacatctcaaacgatgccaaataacttggggataaggaaaaactataaaagggcagcaaacagaggtaaaaaaggttcccaaggactaacaggtcaagcatatactttgatgtcatctaatagtgatgtcagggtgcttcgctccacatcaagttcaaagacaacatctactgagcatgttcaggctccagtacaaccggctgccaagagaagaaaaatgagcagagcctcaaacaaaagttcgactgatgagttttcacaaattcgtaaacaagttagatatattttgaaccgaatgaattatgagcaaagcctaattgaagcttatgctagccgaggctggaaaaatcaaagtttggataagatagacctgagaaggagcttgacgagccaatcagaaatctacgatgcaaatt

SEQ ID NO: 60718 - DNA, 196 bp, Zea mays
  Clone ID: MRT4577_155373C.1
tagtttctagcacgaggccaactacgtactctcgggctcacgcgaggccacaaccaatcacatctcctccccctgaccccctcccaccagcgaggacccttccccaagaactgcccctagccctggagcgagagataggtacaggcaggagcccaataagagtacctcatcgcctctctctctttgtgctcgaaaa

SEQ ID NO: 60719 - DNA, 5044 bp, Zea mays
  Clone ID: MRT4577_155374C.1
accgaaaatgcgtttgcatgaaaagcaggtacagacccatggccgcacactgaaattacaaagtcctctgttcgcatcacgcaagaggtttggtacaacattccatcttaccagaaaattcaacatcgatgaaaacaacacacatcttctgcagtacactgctgtcgttacggagccgtacgcttttgcagtgccaggagtcgctgcaaacaaatctgaaggataactaattcctatagagcgccccagaaatcagaggaagctctcagttgcctaagaacggaaagcaacggccccacacacacacaaaaaaaaaaaaaaaactgaatgatgcgcttgttagttgactggcacgaactaatgagaggcagctagctgacttgtaaagttgtaatggtatatctatgttttttggctgccgtcatagagccatacaaagccaaagtttcaaggtccatagcaccggcagcgaaatcacgacccgacctggaaatttcaggagcagtccaaattctggctcatatctttgtctacaaacttcatcgtcccatttttttcttcctcaactcctgctgtattgccttttgccttgccttctctgcaagatcaggccccggattctgatcctcagcagaatcaacttttgaccctcccacatcacttccaggggttcttgatccaacttttgaagacactgcttctttagagatggtagtacccccatttaggcatacattagattcttccaccacagtcccctcaggttctttaggttccatactagctgtcacttgactattagtattttgggggctatgcttatctagactgatgcctttcctggaagaagctacccttgcggaatgacgcctagtttcaaaccatttgttaacctgacgaaatgttaaccctagttcttctgccagactttctttaacagaacgactagggtatggttgtgtcttaaaatgttcatgtagcttctgattaattactgggccaaaatgtcctttcctggctgtgctgttgctgccattagaagtaaggtctccaggtttctcatctactgaaccatgaatagaatgcaagctttttttagtgctttgtgtagtcagttcatcattatggtgcacaactctggagccttttcccgcaggagaattggcttcaccctcttcattgctttttattattggcgtgttcttcccagaccattcttcatcatcactagaatcagatgatgcttcaccatatgcctcatcatacaactttttgtagtccaaccgttcagcttgccgtctccttgaatctggtaaaacaacaccctggtctatttcagtctccatagggtcgtcagcagaacttgttgttttagcttgagcagtaatcttttccatatcacccaccttggcatcgggtaatagaggtgatgaaacttcatcatgtccagattttgaaatctccttacaaaaatcatctgagtcagatgtgaagtcagattcatcagaacttgacttcttttcgacatctttatctgaatcaggacctgctggatcatagtcatcatcctctgaatcttcagaaggtaatctgaggtcatcaaccttcttgtctatcaaaggttccgaatcatcagaacatgtcaaaaagtctgagtcatcagagtctgatcctccatcctcatcctcttcagacgattcttcatccttaccaaccacatgctcttcaggcatattggggtcaaagtcattgtcgtctgagtcatctgatggaagatcaaatgcgtcatcttgtttagagtcatttgccatagcagctgcatctggaaaaactttctcccaagagtcctcaatggagatgttactcccatggagttcatttattagatctatacaatctatcttgcaatcacatgctgggcagagccatccttcatctcccatggggatatcttcagtacgcaggggaggatttaaacagttctggtggaaccctctgtcacaagctccatcgcagagaatgatatcattacccaatgtagcgtcattcgaaccacaagtggaacaaaagatatcttcgcaagatatttctccttcagaatcaaataaagtttcgtcaattttccccttggagagaagagaatcaatattccggaagacttctcgtattctcaatttgcatcgtaagatttctgatttggctcgttcaagctccttctcaggtcttatcttatccaaactttgatttttccagccttcgctagcataagcttcaattaggctttgctcataattcattcggttcaaaatatatctaactcgtttacgaatttgtgaaaactcatcagtcgaacttttgtttgaggctctgctcatttttcttctcttggcagccggttgtactggagcctgaacatgctcagtagatgttgtctttgaacttgatgtggagcgaagcaccctgacatcactattagatgacatcaaagtatatgcttggcctgttagtccttgggaaccttttttacctctgtttgctgcccttttatagtttttccttatccccaagttatttggcatcgtttgagatgtagacagcaaaactgaatgctcaagagactcaggattctgactagagctcgcaccattttcaatctcaccattgccctcaacaggacagtgagctatatttttttccatagtatatgttcaccaaaatttcatcaatttacagtagacagaaagcactctcagaaaaccatcttctgaggagcacagggcgtgttcggctggctgcaagccgacactgttgcagctgtttggattgctgcagctgcaattcatagagagaaaaatactgtagaagccgcagccgcagccggattgcagccgcagcaagccgcagcgaacaagctgattttctttagagtcaaggagaccttcaataaccccatgcctcccatactaataaaacgcaggatcttattagcgatagagatggctatcgttaaaaaaaggagctactctttctggcaatctctgtactctagtggcaatctctaaatcgacccatcatcagcggacacggtcgtgctagtgccactctttctggcgaagaatcccggcttggatggagcctggagggtgaccgtgtcggttccaagcatcgtcacgacggacgacatcaccgggcgggcagcggggtccccctggacgcagagcagaccgatgtggatgcacctcagcacgtcgccctccgggaagcttccgcccagggacgggtccaccagctccgccaccgtcccggcctcccagtgctcccatacggtggtcaagaggtctccggacttgtgggagctgccgttgttcttcctcccggtgacgatctccagcaccatgacgccgaagctgaaggcgtccgatttcacggagtagttcccgcgcatcaggtattctggtgctaggtacccataggttccgacaacgcggctggtgacggcctgcgtctggtcccggccgaagatcctcgcgaggccgaaatctgagatcttggggttcatctccacgtctagcaggatgttgctggccttgagatcacggtggactaccttgagctgggagtcctcgtggaggtactgcaggcctcgagcgatgccgtttatgatcctgtacctctgctcccagctgagcggctcacgcgtgtcggtgccgaagagtaccaggtcgaggctccggttggggacaaactcgtagacgagcagccgttcttgctgctccaggcacacgccgacgagcctgacgaggttcctgtgcctcagcctggcgaccagcgcgagctcgttcttcagctcctccactccctgcgtcgagctcttcgacagacgcttcaccgctatctcgtcgccgtccgggaggacgcccttgtacaccgcgccaaacccgccttcgccgagcttgttgctctcgtcgaaattccctgttgcggctcgcagggcggagacgtcgatcatcatggagtccaccgtttccacgtcctctgcttcggtggaatacatgggctgtgactgctttgcctgtggtgctggccgccgccagaaacagaagcaaaacacaagattcagggcagctagagtgggcagcacaactgcaagaaccacgatgaacacgctgtacttcctctcccctcctcctgccgctgccggtgccggagggctcgacgatgccaggcgcaccatggccggtccattgaagaagggcgaggtctcgtaccgccaggtgcagttgacccagagcaccctgcctccgatgttgttctggaacccgtccagcgactgcgatatgaggccggcgaggcacttgcggcactgcgccggcgtctggtccggcgtgcactgcgccagcgcgtacaccttggggaactgccggtcgaagtcggcgtcggcctcccccgtggcgaatcgccgggtggagttggacgcggcgtgctcggcggtggcgttgacgagggcggcgaggaggcgctcgaaccgggccgggtccgaggtgacgttggcgttgttgttgatgttgtacgacatggtcgtcgggccggtgtcgtcgtcggcgagggtgtggacgtcggagtagtggagggtgcaggggtcgtagtagatggcggcgtccttgttgtaggagcagtcgttgggcaggtcctggaacgcctgggtgaggcaggcgaggcagctgctggcgttggcgtcgccgcggcagagtcccatgccccagacctgctccgggacggcgccgacgacggcggtggcgtagaggaccggggatgcggacacgttgttgggcagcatggcggcgaggaggttgaggttggcctggtatgtgctgttgggctcgaagtcgttgctcgtcccacaaactggccacgggtaggcagcggcgccgggcgccagcaacgagacggtggcgatgatggccgccacggccacggccacggccaggaggtggggagccattggtacagtaacgcatcccggccggcctcgagggtcccaatg

SEQ ID NO: 60720 - DNA, 275 bp, Zea mays
  Clone ID: MRT4577_155375C.1
aggatgctgcgcctctccgaacgcaacatgaaggtgctccttgccgccgccctcatcgcggggtccgtcttcttcctgctgctgccgggaccttctgcggccgatgagaagaagaaggggcccaaagtcaccgtcaaggtgtattttgacctacgaattggagatgaagatgtaggccgggtgatctttggtctcttcggaaagactgttccaaaaacagtggataattttgtggccttagctacaggagagaaaggatttggctacaaaaacag

SEQ ID NO: 60721 - DNA, 2251 bp, Zea mays
  Clone ID: MRT4577_155376C.1
taccctcgggctcgttcggatacgagcccgatgaaaatccagcatagctcagcagcaattagctcaaccgaagcctcctgtgaaaattagcgtgcctccagattctgaattaaatgcttatgctggtggatatgagaacctttcggctggaattttaccagatgagcaaatagaatttgaatctctatgctctagttttgatggacatcagaatgtgggcaggcgtatcttgaatgatttctcaagggcgtctgctgatcttgctgctactgctgctgatttgaaagttagacttcagatttacaaggtccgtcttctactgctcactaggaaccttaaggttgcgaagcgagaactcaaagtactaatgaacatggcacgtggtagggattcatctacagagcttctcttgaaatctcagctggagtatgcccgggggaattataggaaagctgtgaagctattgagcacaccacataatcgggctgaaccagcaatgctagccattttctacaacaacctgggctgtatactccaccgacagagatcgtatcacacctctatatggtgctttagcaaagcgctgaaatacactttatcacttcgttcagagaaaccaatgaagctgtctacattatcacaagacaagtcttgccttatttcatacaactgtggtgtccaacatttgatgtgtgggaagcctttgttagcagcttcttgttttcgtgaagctatgccgctcttctacaagcgacctcttttctggcttcgtttttctgagtgtagtctgctagctctagaaaagggtctcctgtgtgcaaatggtgcttcttcatgcaacgatgagattgaagtcattgttgtggggtcaggacaatggaggcagttgattgtcaaccatgtgagcttgagaagtaatttagattctgcaggtgtgacttcaggtgaacataaaaatttggtttcacttggatttgctagacagtgtctacaaaatgcgctgctattattggatgctactgagaaggaaaattgggtaatcgcatctgatacagaggattgggaccaaggaaccgtacatggatataaaagctcaggccagaagaatactacaagtacagattctaaaacaccttcaggcccaactctagctaatgtaaatggagaacaaaagggcacaagcttgaatgctaccttgcagagttctcttgctttctatgacgagatccgtagaaaagagtacatcaaaatcagacaggctgtcctggcgaacttggcatttgttgaattgtgccttgataatcccttgaaaactttgacgtatgcaaagtcagtactgcaggtgacagactgttccaggatgtatgcgttcctcagccatgtatacgcagccgaagctctatgtactttgaacagaacagaggatgccgccgagaatctatcagtttatataagagatggtaatcatgtcgagttgccttatagtgtggagaattctgaaaaggccttggttgagaaagacagtgatggtgaagacttggttgctcctgcagtgacaaaactcgccacagaagaacctgagcagctcaggccggaggaggcccgtggtgtcctgtatatcaaccttggcatgattgctgcaaggcagggagaagttgaaaaagccaactacatggtgagccgtggcctggcgatgttgcccaacaacccccgggcagtgctagcatcggtttacgtagaccttttgcaagggaagtcccaggaagctgtcgtgaagttgagacggtgtaggaatgtgagatttagacccgctagcatagcagccagcagtcagcagtcgagcttagaaaagcctcccctttcatgatttctgtagtttacaattaccgttataatcttttttggaccctgaccccaatgtggatgatcaaagatggtaatgcttctcctgtgtaacatatataagaaatgaactctaactccccttctagctccctcccagattcaggggtggaatgtgttggaactgtaccgttttaatttgccctctttggactgaagagagccaagtgatcaaaatagtttcctatgaatattcgtaatgttccccctgtgtcccccccataaaaaatgaactgtagccctgcccttttagcttcaggggtcaaatttcaaatgtgttgtacctggcccggtttaatttgcctctctttggcctgaaaaaaggtcaagtgatcaaaaacgtttcctt

SEQ ID NO: 60722 - DNA, 303 bp, Zea mays
  Clone ID: MRT4577_155377C.1
cgcactcgttcgcccacgcgtccgattataaaactccttccgtgtgtaaccagagctgctagcatcggtggaacctcggtctcgtttagttcgtaaagctgagtccaattctttgagtaacctgagtcctgagctaggttttcagtcgtttctaactaacagttctttggcgacgtacgtacgtacagctcggagaccgacagaagcgagcgatggcgtgcaagactaagagcctgctgttgacgctctgcgtggcggcgctgctcgcggcgcatctcaagtcccaccgcctaggctacttca

SEQ ID NO: 60723 - DNA, 430 bp, Zea mays
  Clone ID: MRT4577_155378C.1
aaaccccctcccaaaacccaaaggggccggggttattcatccattcgataaaggcccaaagggggggcggaaaacaaaaggaccccccgggaggaccaaccggaaacaaccctaatttctaaccaggaaaaaaatggaggggaacttaaggaaaccttaaccccggaaacccaccagggggggggggaacaattggaacccgacccccaaaaaagaaagaagcaacggggaggttttaaggggggggggtggggaccacgggccccagaatccaccaggaccttttccttttggggaagccaaagggggggaacaaccataatttccacaagccccgggaacccaacctggggcttccactggagcaccttcctcgcctggggggcgcccccctggggggggggaactttggggggccggaagaactttt

SEQ ID NO: 60724 - DNA, 338 bp, Zea mays
  Clone ID: MRT4577_155379C.1
agaaatcgaagatttgtttgttattgaaataaacaaattaacaggttttttgcaagctaccaggggcgtgttagtttgaaaacattttcgtaagatgattcaacatgttctctctgataatcacttttactatatattaaatgagtacgattggcgcctactcgcttattttggatctttaacaattgcttgacagcaattataggttcgattgataagtagcaagaacatatggcttactcgccgttctattcaatataacgatatacatgatagattgtatgaacaactggctgaacttcaagaagctggatttttgatatatagtgattatcttg

SEQ ID NO: 60725 - DNA, 1241 bp, Zea mays
  Clone ID: MRT4577_15537C.1
cggacgcgtggggtagctctgatgacaatccgatggacctgacacgaacgctggacgcctgggtcttttctacgcagcggcgttggtggtgcttgcttttgaccggagagcagcgcccagggatgcgccggggcctgcctgccgtgccttagcccacagtgccaccgccatgccatgcgttggtgagctctgagctcgcattgcattgcattgcacgcagggctacgtacgctatgctctggattgtcagtagatagagttattgccatgcaaggtggagtaagggtgcggcctggcgacggcgcacgacatcgccgccgctgtgcaccacgtgctctgcatcatcgacgccgaggccaccgagcagcagctgctcgcggcagcggggccgcaatgtacatagggcccgcccgcgcccgcgagccgacctaccggcgatcgagaggaggccagcgtagaagcgacgtacgtgactccaagtcatgtgtacaagcataggcgttttagcagggtccggtgaaacgccttgtgtagtttgatctttgtatttttggctgcttttttccgcatatcttttcagtagatgtgtaagcgtgcagttgttcagcatgttgtcacgatgtttgattcagcgttcgatctgtgacgattagctcaccagcagtcctcaggtacccgcagattcccacccctccttgttcctgatgcatgcagcagccatccgggctccggccatggcccatgggccatcgcgcatgtgcaccgttcactcgcctagtccgtgcagctgcagcctgcaggcgctttaaccacggcgtgcttgctgttgctgtgctgctgcaggtggaggaagggtgcggcctggcgacggcggacgacatcgccgccgctgtgcaccacgtgctctgcatcatcgacgccgaggccaccgagcagcagctgctcgcggcagcggggccgcaatagggcccgcccgcgcccgcgagccgacctaccggcgatggagaggaggccagcgtagaagcgacgtacgtgactccaagtcatgtgtacaagcataggcgtttttgcagggtccggtgaaacgccttgtgtagtttgatctttgtatttttggctgcttttttcatatcttttcagtagatgtgtaagcgtatgttcggcatgttgccacgatgtttgattcagcgttcgatctgtgacgattagctcaccagcagtccatttccacattgttcttc

SEQ ID NO: 60726 - DNA, 401 bp, Zea mays
  Clone ID: MRT4577_155380C.1
ccggccgggatgcggcccgccccctggtcccacttgtctgacactaccctctacctccccgtcccaacctcgtctaatcgctgcggcgccggtgcccaaatctaacccccttaaccctagcgcccgcaccgccaccgccacagccatgctgcgccgcatcgcccccgtcgccccgcgggcattcttctaatcgtccccccgcaacgccccgtcctttccggcgtcgggcttcatcccgcggccgcgagtaccggcctggtacccatgggggatcgagcccaccttcccgcggggaggcgcgcctacgaacattcttctcggcgcttttcaagggaggcgcatcgtcctgcatccattggacccatcacccggacgacacgggcctccttcgtcgttggccc

SEQ ID NO: 60727 - DNA, 1362 bp, Zea mays
  Clone ID: MRT4577_155381C.1
gccgggtcccccctcctggattttctactgcacttccatcccaggagtttccttctggaatttcgtctcatgatgggtctatagcccttcctagattcccttgggcattttcttctcaaatttcagcccaggaactgtctaagccccctagtagactgccttctccattttcttcttctggtttttcatctctggatgggcctaattcctcgtctaggtttccttctgcatttccttctggattttcatcacagaatggccctaacccttcatctggattccctttttcttctgggttttcatcacaggatgggtctaatcagtcgtatggctcaacaaacccagaaaatcttctccggaatactgttctgggtggcagtagtaatcattatcaatctcagtttggaaggcactcaagtgacatggagttcgatgatcctgctatattagctgtgggcaaagggctgatgcctggaattggcgattcagggctggagatgaaaaatactcctgcttttcaagcacagttgcaaccagcaagcagtgatccaagatttcacttacatatacagccaaatgtgcagtctcaccaaaacatgggattcgcagaccatatgcaggatggtttgaaccatatgaatgataatagatttttaggtcagaaccatggtcctctatccccttatgtgcagattccgcaacaacccagaaactcgcaggttacaaatggtcactgggatgggtggagtgattcgagacaagggaatagcactcctatgtcagacatgtcgaggatattatatccaagtgaagtgaacaagttgcacatgctgggttcaaatgatatctataacagagcctttggaatgtgattatctcctgggataatgtgtgagtttgagctgacatgttctgacttgggggcgttctgtggaagtaactggttgcacaacacatagtatacctgaggtggataatggtggttgtgcttatgagctggtacacgagtattttttgctattggaatttacaaaaacgaacctgagttttggttcagccatttgaaattaccaggttcgttctcttgtatggtctgtgaagcttgagtgaaaagaaagattatgtgccgagaacaaagcagctgaagttgaaatatattgagatatgtctataatgtagtgtggtgtggctcttgaacgtgagcgactaaagatttggtgggcttgacttgatgatggcagtgttttcttgtgtttgtacatgatgatggtgttggtcggtggctgcctggccagtacatgcgttttgccataataatacccatggtataataataataataataataataataataataat

SEQ ID NO: 60728 - DNA, 467 bp, Zea mays
  Clone ID: MRT4577_155382C.1
acggccacaaagaaacagtttgggaatattggctggtctatagtcaaaaattgtgtcgggggaaaaagagaaactcagaccggggcctttaaacttttaaaaaccctaaatctcgaagcggttctcctttgctcagggaaaaactggggattactaatagggaccccccaattggtaatgcccatacaggaattatccacatcctaaaaaacctggccaggctccttgatctatgtagagggtggacaaaagctgcaggccttttgacaggcttaaaccttccctcgtccatgggttcgagggttcctctacttaaacctcttgacttttgggcaacactcacaattttgttagaagcagaaacttgatcaggtttcttaaatgggctgctaaagggggctaaccgggggcaatttttgggcttatggggcaggtatagggctttggtcaaagctcttccccattca

SEQ ID NO: 60729 - DNA, 585 bp, Zea mays
  Clone ID: MRT4577_155383C.1
cggacgcgtggggtaacgctaagttagtttccacaaagcaagaaattagcaaggacacacgcaagaatattggcacttcacctagtccaaatggttctgctgtagtcaagaagcaaatgccaaaggagagcaaaaaggaagttgctactgagagaagatcaccaccaaagcttcataggagttcgccaacaccagcgaggacttcaccaacaaagctcagtccagcagcaaagcagaatggaaactctggtccagtttcttctgtatctactgttaaaaaaagagttagtgaaactatctcttgggactccctcccaacaagcctaatcaattcaggaaaggctgttgtccggaggaagaacattgctcttattgtagcggctgaggctcaaagggaggctgctgcagctgcgtatcttgtaaaaggccttgggtaagtaggcccatacccagatatttcatatgatatagtaattttagttgtataagttgtgaaagacgttccaaattgatgaatttgatgtattgaggtgctactatgttttgttgtttagcaaatgataccaattggcagtcatttttttt

SEQ ID NO: 60730 - DNA, 125 bp, Zea mays
  Clone ID: MRT4577_155384C.1
ggaaacaagccacaaacaattttttaaaccagggaattgcatgcccagttcggacagggaaaaagcccttgcaaacaatactcagggaaacgggtggagacaacaaataatcagccaaaacttgt

SEQ ID NO: 60731 - DNA, 538 bp, Zea mays
  Clone ID: MRT4577_155385C.1
gctgttgttgtttttttattttttattttaccctggtactatttttttggagtgcttgaggtgtaggggatgctgaccccgcacttgaaggggatgctggagaggattgccggcgatggggacaatgaaaaaagtggcggagaaattgaggctggggcggggggtgcaaaaataggaggaaaagcggccttttttttccaagctgatgaattaattgggggagacatagattggcccacacccctgggcgaacgcgcaggaggagtaagacgcgatttgcgaggccacctgccaggggtaaatagtcgtgtctgggttgaagagggcgcacgtaagatcatgtaattccttaaagccggggcttttttatatttacgaagggaccaaccatttcatggaaagggttgaaacccgagagcggctaggatatagaggatggatgaggtgcagccacctgaaaaaggctaaaataatgcccccagttgttggtgcccaaatccaaaaaaaaccttttttgatgtgccctgataaccttaaa

SEQ ID NO: 60732 - DNA, 233 bp, Zea mays
  Clone ID: MRT4577_155386C.1
ctccaccttgagctcctcttgctaggttttttttatatcttagagaaaacctgggctggttagaccttaacccgggaagtcgaaagctcccacaccatcgacaacgtgaaggctaaaagcaacaacaaagagggcattcccccaaaccagcaacgtctgatctatcttcggccaagcagttggaggatggccgcaccctagcatactacaacattcagaatgagagcacttct

SEQ ID NO: 60733 - DNA, 192 bp, Zea mays
  unsure (1)..(192): unsure at all n locations
  Clone ID: MRT4577_155387C.1
ttccctcccccgcccctctcgcgcgggacctttctccctggggacacctaccctcacncattcttgtcgcaatggcgctagcctcccaaggcattaccctgcgtccctgcagcgggtccgattccacagcggaggcggcctcttactgcctcgcgcgcggtccgcgcggatgagcatccccaccgggctagc

SEQ ID NO: 60734 - DNA, 772 bp, Zea mays
  Clone ID: MRT4577_155388C.1
aattcggcacgaggcactcgtcgggttaaaacttaaaaccccgagtcgtctagtctctggagggcatacgaggcgagcaggagccggcagcacgaggaagacagaagaagcaaagcgaagcaaggcgacctcctcctcccctgctgcacagagtgggccggggccacggttgcaggaagcagtgtccgtcagtagcagcggcggaggtgctccgcggtcctggttcagtagttctccccctccggccgtggcagcggtcggatctgcgtcgcggcggcggaaagcaccccctccccgcctggagcccggagccgccgtccttctgaagctcggcggcgtcgagatctgagttcggtcgcgcggagaggaggtttcgctgtgccggcgtgcttctcccggagccgcgcgcggaggcggcgcctttgctgcgcattgccgttccgtccgtcccgtcccgtcaagctctaaggcttccgaagaattgaaaccggggttcttgggctttgcgcctcgcgcctcgcgccgtgatgtaaacttgatccctcggatcgaaaaggccgtccctttgcgccggccggccggccggaggtttggcgctgttcggcggaggagcaagtggcggtgctcaatccggaccacgccgcgcacgtgcttggaaaaggagcgtggtttggtgtacaaggaagggcagcaagggcccttgcctccccccttccctctcctctccattccgtgcgcgcctggaacgcgtcttgtgggtcggacggcgagc

SEQ ID NO: 60735 - DNA, 690 bp, Zea mays
  Clone ID: MRT4577_155389C.1
tcttccatccaccccatccaaatccccgattcctccaaccctcccagaccgcaatggccgccgccgccgccgccgccgccgccgagccctcctccgccgacagccgccgctacgtcgtgggctacgcgctcgcgcccaagaagcagaacagcttcatcaagccctcgctcatctcccgcgcggcggcgcgcggcgtggacctcgtccccgtcgacgacgcgcggcccctcgccgaccagggccccttcgacctcgtcatccacaagctctacggccacgactggcgcgcccagctccaggccttctccgcccgctacccctccgtcccgtcgtcgacccgccccacgccatcgaccgcctccacaaccgcatctccatgctccaggtcgtctccgagctcgacgtcccgctctccgacgccgcctccgcctccgctgacggcgaaggccaccgccacaccttcggcatccccagccaggtcgtcgtctacgacgccgccgcgctcgccgactcgggcctcctcgccgcgctccgcttcccgctcatcgccaagcccctcgtcgccgacggcagcgccaagttgcacaagatgtccctcgtctaccaccgagaggggctccgcaagctccgcccgccgctcgtcctgcaggagttcgtcaaccacgggggcgtcatcttcaaggtttacgt

SEQ ID NO: 60736 - DNA, 407 bp, Zea mays
  unsure (1)..(407): unsure at all n locations
  Clone ID: MRT4577_15538C.1
cgggcccggnctttttttaaatgacaataaacgtttgaatgctattaaatattttattttcgctcactttcttcntaatattctatggggcatactacaaagttggtgtgtcatgaatatatatacatatctaccaaaaaaagggttacaccttcatagttgctgcagctaattttacaatttacataaacttaatttatttaaggaccaatcacctctccaaggtctctatggctgctatctggagttgtccttttaagcatctggtgtggaggttctatcaaaattccttgcctcttactattcgtttgagtacatcaacaatattttgacccatacaagcttcacacagtccacccatagaaatcttttctcaacaggaaccacaccatattttaattaattgt

SEQ ID NO: 60737 - DNA, 1128 bp, Zea mays
  Clone ID: MRT4577_155390C.1
atggctgagctccaagacgaccaccgccccgagctcattggcctgggaaagatggctgcagaagatagtttatcatctctggtctccagtgaggacgagccagatttggatccagtgcattccaaagagactcagcttaatccaggatcggtttctgcttctacggtgtcatatcgcagacaaacatcaaaagagagagctattgggttggctcctgaatttgctttctttaaagcagataaagatgagcatagtgaagatgatgatgaagagccttgtcctgactctcaggactggccaggctcattcgtaactgttgtaaggatgtatgaagcaagagaagctaagttgagagctcgagagttgaattctttaaagttgaacaaatctgcaaaacgacatctcagtgagtgttcatggctgagtgaggatgactttgagaaacttttgggaaatgcagcattgaaagcttgcagggaacttacctcagcttccatcaagactgttggggaatattgtcaagaattaacttcattggatctccgcaacttgaataggctgcgtgactcagcactgtggcatcttcgtggttgtaggctactaaggaaactaaggcttccaagaaacgcattcagcgtggatgatggtagcatagagtccaatctcctagaggtaggggaacacagcagcgcagccccgcgggagtacagtggtgtctgggaagcgccagaagccgaggtagagggtgcggagggaggcaaggtggaggacatcgacgaggaggctcacggaggttcaaaaattagttacctggtaatttcttgtcctattttgagccctgaagatttctttaacattttgagttctggagtttggagcttccaggtgacggatttcatctcactcaatagtctcctcgctcaaggagttcatccaagctcggtgggtgcaagcctgcaaggtgagaaaagcacaacgctttaccgtgaatggggctgcctcggcgagggcaccattgaagcttcacactttgttttctgtacggatgagaacaacatacgaggcaaggtgaacggttgttctctgtgtgtggccaaagggaagaagaaatcacattttgacgattaa

SEQ ID NO: 60738 - DNA, 214 bp, Zea mays
  Clone ID: MRT4577_155391C.1
taggtttccggacgacttgcgagcgagcgttcctctccgagcgcttacgccgtttgagagaagctcagttgttggctgccggcaggatcataacgcctatgagcacaatggctacgcacaaccgcctgctcgacgacgtccggtcttggcacgtgagcagggagatcgagctcgatcagctcccatgtatttaccgggcaagcacggaaagtga

SEQ ID NO: 60739 - DNA, 2166 bp, Zea mays
  Clone ID: MRT4577_155392C.1
ctttccgggattaaacacaaaatctcacactagtccgcggcactgctcaagtaaagaaaactaggtagacaggaaaaaaaatagggaacacaagtgcgtcgtggtggtgctggcggttttgagttttgacccaccattcccgcattccttctcttctgcagtggcggcagcggcagccaggaaacgcaaacgaggaagaggagcggtcgattcccaatctttatacgattgattctttaccaattgtatcgccattccttcctgttcattgggcgtggggtttcaacctaataaatcggtccttttccgcgcaactagtggggagtggagccgctgagaaatagcaccccttttcctgccccaagatgcctgtttccgcttcttttccacgccacaccttttgaaaatccttcgccgtcagctccccttttgcagcactagttgtttctcagcctgcttggagtttggagggggcagagaacaccatcctgtcgattcaagaaaaaggctgagccgatgggcagtaagagcggcgtgcgactgcaatgcgccgaggccaaatcggcgacggattggagctgctgcttcctggccctgccaccggcagcaccatccggtgttgatggcgatggcgggtttaacctctcgtggaacctccgcaagtccttccacccgccggcgggactcttcgccagcatgggccagcaggttggggttgggttcccggggacttcttctaggtccccgtcgccggagacacctcgggatccgtacatgaagtacgtctcgccggaggttgtcgagacacctccgtcgggggaaggggtggcgttgagggacaaggggaagaagaaagccgtgaagctcaggattaaggttgtgaatcatcacctcaagaggctgatcagtggagcactcgcaggcacagtgtcaagaactgctgttgcacctttggagacgatcagaacgcatttgatggttgggagtaatgggaattcgtcgacggaggtgttccagtctatcatgaagcatgagggatggactgggttgttccgtggtaactttgttaatgtcatccgggtagccccaagcaaggcaatcgagctttttgctttcgatacagctaacaagttcttgacccccaaatctggggaggaacggaagatcccagtccctccttcactagtggctggggcatttgcaggtgttagctcaacactgtgtacataccctctggaattgattaagacacggttaactatacagagaggggtgtatgacaatttccttgacgcgtttgtcaagatcgtccgcgacgaagggcctactgaactctaccgaggcttaaccccaagtctgattggagtggtgccatatgctgcaaccaactacttcgcctatgacaccctgaagaaggtgtacaagaagatgttcaagacaaatgagattggcaatgtcccaacgctgctcatcgggtctgctgcaggagctatctcaagctcagcgacattccctcttgaggttgcacggaagcacatgcaagttggagctgttggtggcaggaaggtttacaagaacatgctccatgccctcctaagcattcttgaggatgaaggggttgggggcctctacaaagggttggggccaagctgcatgaagttgatgcctgctgctgggatttcctttatgtgctacgaggcttgcaagaagattctgatcgaagaagaggatgagtgaagtgtgtgcggatgcattgcgtcattagaactcagttttgcgacatcctgaattcctgatagcaggcagcttctttcggtatttctttgagtcgactggtgctggagttggttgaaactcaagactgaggttactgctgcagtcagcataagttctttttttttgatgagtcgaccaaggggggagaggcccccaccagatccactgcattatgtagctcttcgagttcaaagtacacgccaagcacatattcttaacccccactttgcacccagtttgatcttataaattcacctgtttttttccagatttaaacttttacttttgggtacaagttgtgttgtcgaaactcatgactgcgatgtgtgaaaacgttcagatgccataggcaatcataattcacaagtggcaaagctgcaaaaaaaaaaa

SEQ ID NO: 60740 - DNA, 545 bp, Zea mays
  Clone ID: MRT4577_155393C.1
aaaaaaaaagccccccgtttcccgggggaaaaaaaaagggggggccccggggggggcccccttacagggggtgggggttttgcccccccaaaggacccaaaaatgggggggcggaataaacgggggggggggccaaaatgggaacaaaaaaccccatttttcttcccggtgggttttttaaattgcccaatgggggggtggaaaaaatcggacccgggggcccccccggaaattccgggccgggccctgggggggacccagttttccctataggggggggaaaaaaaggggggggaaaaaaggggaaaaagtgtttccggggggaaaatggtatcccctcaaaattccccacaaaaaacgagccggaaaaaaaaaggggaaagccgggggggcccaagggggggcccaccccacattaatgggggggggcccacgggcccttttccagggggaaaacctggcgggcccgctgctttaaagaaacggccaacccccggggaggaggggtttgggtattgggcccccgggggggttttttttttccc

SEQ ID NO: 60741 - DNA, 233 bp, Zea mays
  Clone ID: MRT4577_155394C.1
gggggggggaaaaaagggcccgcccgaatttgggttaaaaagggcctgaacaccacaatcccccctttggttttaaaagttttccggaggggtacaacccccctcccaagatacaagggggggggggggaccctggggggtggcccctggaattactggggggggggggcccagaccccctggattttgacccctttggggcccctggccccaagggtggggttggcgcggtc

SEQ ID NO: 60742 - DNA, 713 bp, Zea mays
  Clone ID: MRT4577_155395C.1
gccggccgggttgggaaaacacagtgcgtcgtggtggtgctggcggttttgagttttgacccaccattcccgcattccttctcttctgcagtggcggcagcggcagccaggaaacgcaaacgaggaagaggagcggtcgattcccaatctttatacggtattaatcccttgcccaaatttctaatcacgccggagaaaaataaggctccgtctttgattcctttccctttcctctggttgcagattgattctttaccaattgtatcgccattccttcctgttcattgggcgtggggtttcaacctaataaatcggtccttttccgcgcaactagtggggagtggagccgctgagaaatagcaccccttttcctgccccaagatgcctgtttccgcttcttttccacgccacaccttttgaaaatccttcgccgtcagctccccttttgcagcactagttgtttctcagcctgcttggagtttggagggggcagagaacaccatcctgtcgattcaagaaaaaggctgagccgatgggcagtaagagcggcgtgcgactgcaatgcgccgaggccaaatcggcgacggattggagctgctgcttcctggccctgccaccggcagcaccatccggtgttgatggcgatggcgggtttaacctctcgtggaacctccgcaagtccttccacccgccggcgggactcttcgccagca

SEQ ID NO: 60743 - DNA, 443 bp, Zea mays
  Clone ID: MRT4577_155396C.1
tcggctcgagcaggtctgatgattcgtttgaggaaagcgaagtggtttcctcgcacactccaagatgctcaggccggcattggaatcatcgcgtttcggtatgccgatttgcagcgagcaactaggaacttctcagaaaggttagggggaggcagttttggttcggtattcaaggggtgctacctaggtgacccggtcaccctgctggatgaaaaggctcgacggtgcccaccaaggagagaagccatttcacagcagaagtgaattcagttgggatcatccagcacatcaatctagtcagactgatcggattctgttgcgaggatgataagaggctacttgtgtatgaatacatgccgaatcactctctcgacctacatttgttcaaggccaacggtacagttttggattggaatctcaggtaccagatagctattggagtt

SEQ ID NO: 60744 - DNA, 419 bp, Zea mays
  unsure (1)..(419): unsure at all n locations
  Clone ID: MRT4577_155397C.1
cccacgcgtncgcttcgcgtgggcgccgcctctacagcccgcacctcgtttcctcggccgggttcgatatgacgaagcgaaccgagaaagccggaattgttggcacatatggaaccaggtatggtgctaacttgcgtaaaccaaatcagaaaaatggaggtttctaacacctccaagtttttttgggaagtctgtgggaaagtttccttgaagaagaaaacggttgggatttggggatgcaaggactgttggaaagtcaaggcccgttgtgcttacaccatgaacacttgtaatgcggtcactgtcaagagcaccatccgtcgcttgaaggatcctactgtagcatgatcggtcgcttgtcaagcatactggggtccactatatttgctgtgtatcccatacattctccaacatttttg

SEQ ID NO: 60745 - DNA, 510 bp, Zea mays
  Clone ID: MRT4577_155398C.1
tctctggccggggaggcgcccaaaggatccaaaaacaggacactagcacgcaaaggaagcagtagagagcagacgacacggatcaaactatggaatccgaaccacattcatggccgacgtcctgctcctgtcgatcaccggcagggctcgcgctgctcttggcgactctctccaaccagactcgtcacgtccaatccccacttttagatccccgctgcgtcggcacctttgaatgacgcctacggtgcgaacaccttgtgcgtctaccggggaaaccagtactcgcacgtgaccaagcagcacctgaaggactaccaggagctcattaccgactagggaccgaagaaggaggacgctccggtaaagatcctagaacgatcaagaacagaggtttaccttacggcgaaagtggcgcaagacccacagcttgagctgggccttgagcttcgggggggacaaaggactaacgtgtcgaatcaacatctccagcgcgtcctccgggagaacggg

SEQ ID NO: 60746 - DNA, 548 bp, Zea mays
  unsure (1)..(548): unsure at all n locations
  Clone ID: MRT4577_155399C.1
gacactccgcatccntgctcgaacccccacccaccccacctcgccggaaccctaaccctagccccgacggcggacatcgctctgtcgccatgtggcataccctcaacataacagaatagtacagcgtggcgacgacagcaaggatcaacgctgtgacgcgttgttcaattagctatgaatagaacacacaccgatacaagggggcgaccgggactaataccgccggcgggacctacccactgcgtcaagcttacggtctcctgcatagagaagacgggccgcggtcttggacttcgagaacctgtatgctggactttcccccgtcctcgatctacggcgagagcttggagcaccgacgacgtcgtgttcgtggacgccatgcgcgacgacatctggaggaagcttgtgtagcactatgcggtggacgtccgcatctcctcgagcgacctcgcgctgtactgcaccgggaactgcatctgccttgtggtacgcgacgcgagctgctcgctcgccgacgtgaacggcctcggaaggtgcccactgctgat

SEQ ID NO: 60747 - DNA, 366 bp, Zea mays
  Clone ID: MRT4577_15539C.1
ttttggggttttttttttttttttttttttttttttcttttttttttttttttagagttatttcagctaaatctttacaaaatcattgccttaaaataaataaaaaacttttttttttggactacatgctaagatctatattgggaacgagggatatgatatgttttagtacaaaattttatcatgggctaattattgggatggaattaatctatacctataggttctttggcctaattatgatgaaatttttatggggggtggacttttaggtcgggtccatcggatttaaaagccggttgaaagcatggatcccccagaccattcacaacctagacgcgtacatttaaaacattatacattttt

SEQ ID NO: 60748 - DNA, 2736 bp, Zea mays
  Clone ID: MRT4577_1553C.1
atggctggacgcgttcaagacttcatcacgctccgcatcggttcgctttggctggatgtgccactgggacctctccatgctagcgatagtgctggctccctgcgtaccacagctgcatcaccagccatgattgggcttgagcaggaggtcaactccaaacctcatgatggtttcattccagttgtgtctaaagctgcaaagcgaagggcaaggaggatggctgcgaggtcaagagcatcagcctcccaagaacaccctaacaaggtgcacaaggttgcgtcctccagctcaggtcctcctggtttctccaagccgagggtcaataaatctgtcggccataagacagaagcaaggtttcgtcatactacccttggggagtggcctgtgtgcatcaagcaggcacctccaaccaagtttgtacagtcaagggcttcctctacatcaactccaaaagagacaactcctactttgacacctcccaatatgctgggggtgcggtcatcaaaacttgttccaagcatacttgggacaccaccaaccaaaacagtgacaacaacaaatccaattagtccaaatgaagaggtggtattggtagatcaacatcaacatccaccctgtaataagggaaaggccgccatggtggaaaaggaggttcttcaaccgtccatggacaaagggaaagaagtggtgatggagtataatacatcatcctttaaaaatgagtcacatactagacctcagctacgagttgaggctcctgagttcatcccatctccggtctataatcccggtttgattgaacatggacgtgtgcttaggtggcaaggaattggtcccaccaatgatgacatcaggaaaggtcatgtcgacccaactgcaaccctttctgatcccatatcatcagaaattatggtttcaaaaccttatgtccaagattccatgtcaccgaaaaggcgccgccgccaccgtcgaaataaccgtcgtacgcgagctaacctcattgtggtcgacagtgctgtgttgacagatgcacatcgttcattcattatggatatgattttaactcaacaccaagaaagttgtcgtagaattcaagatgcggcaagacgagccatgcaggcttccttagaaagaaccatatgtcaagatttgaataagttactcccgggggtatcaatgtctagagatgatattaatggtgagatcatgcggcgtgctgaagcatttgcacaatggccagagtatcaagagtgggtaaagagaaacccacaacgcaagaagtatgtcaaacaagctgttaatgtgcgcgctagtcgtgctgccaacaaacgaagagagttggcacttccagctgactctctggttagtagggtgggatgtactagtaacttgacatccaaccatgctcgccctattcatgaaaggttggttggacggtcgagaaggtcaacatcatcacgcgctcccttctcaactcaaaagagaacctcttctaatccatttgaagtcctttctgccatgccggtagggatcactgaaaagtatagcgatgctagtcagtcttcctctgcctcaactcatttcaaaagaaagaagcctcgcaagcaaattccttctggtcatcgcccgataactcggagtttgtcaggttgtcgttcagatgattcaaatgccataagcaacgacgacttgtgttccctgctaaataatgaggatgggccaagccgtgtggagcaagtccttacagcaaatgatggacactcagttgagcagcaaatggcccaacttatggctactcttcaacaaaaggaagatgaattggttgctcttcgtgaacaaatggctcgtgaacaagtggctaaccacaaccataataatgacagggatgcctctaccagccataaccaacaacgttctgaacctgcactcactcttgaggcgatacaaagaatgatttctgagggtgtgagagcacaatacatgcaaacacattattccatgcgtccaggatatgtgaaaccatatccaccagaagttgacatggtacccttcccaaacaactatcgccagccacagttcactgcctgccaagacacctcccataatggcgctctcctcctccggcaattcgtacaaacattgtcaggacctgctttcacatggtatagggtgcgcccaatcaccttcgaagagttagcatcaaaggcaacagatatagagaactatatgcaacatatctctaggcaggcaagaccatataataagcctgtgatggaaagaaatggaccacgggataaagttcccagtaaaccaaaacagatgcaggccatggaggctacagtagtccctcgaaaattgcaaactgggggcgtcattgaaagaaatcaacacagaggtgatgcatcagctcctagaaggccaactttgagtgagcgacaaaatcaaacatattccttccctgtggaagaagtagatgatcttttcataggcttaagagagttaggcctcatagaactccctaagcccaaaaggccagaagaggcctctaagttcaaggaaccgaatttttgccactatcatcgtatcttgggtcatacccttaaagattgctttgtggtgaaaaacatcatacagaaattgatagatgaaggcaccataaatgctgacctcctcagaagtatgaagaaaggaaagaaggtggctacatcaaatgtcgccacttttcaaaatgatttg

SEQ ID NO: 60749 - DNA, 471 bp, Zea mays
  Clone ID: MRT4577_155400C.1
ccggcgggggctgcgccggaatatattgccgggtcgacgagcttttttgtcggcggacgcgctcctggacgacaagcgcgtgcttcacaccatctgcatggaagacgagcgcttctggtgcagcataaaccacagcgacgacctccggttgctcgacctggggagcggtgcccggggactacggtggaactcccggcgcaagctgatgaaccgcaaggtgcccggcgaggagagctggtaccgcaagctggccacgcacggcggtcaactcttctcgtacatgaacgacaggatttccgcgtaccgtgggcccgagtacgtgctgacgtccactctacaccggagccacggcggtgccatccgcgactagttcatccgcggggaccgggtgttcgccctgcacaacgaggagaacgtgtacgacgcatgggagacgccggcgccggggagcatatgaccgtgccacgggac

SEQ ID NO: 60750 - DNA, 273 bp, Zea mays
  Clone ID: MRT4577_155401C.1
aggaccggcccgaggcgcactacacacgtgactatgatggactcttgcaatgacgctaggttcatttggagtagcatgcttcagcatctacctagcatgtgacctagacaaccaggtgggaccgatcactgcagcttgcgcatcccgtgacctggcatcctcagcatgattaggagtagcatcgctcttagtatctttttgagcagacggctgatggtaccaatagagtgctctatatggcaagcagagcctgtactattgagccactgtatt

SEQ ID NO: 60751 - DNA, 430 bp, Zea mays
  Clone ID: MRT4577_155402C.1
cacccctaaaggggttgccccaacaaattttttttttaaacaaatttccaaaacaatttttaagggggccgggaaattcttgggggggggtcccctccttttcccccctcaaaagatgcaccccctccaaggaaaaaaattttcccaaacaatgaaaactcaaaagttccccctaaaacaacttaaaacacccagggcaaaactcctgttaaagttaaaaactaaaaaccctttttactaaaaaaaataataatcgtaataaaaaaaaggttgtgcatttttttaaaaaagctaaatttaatgctgttgttgaatagccatgtggatggaaacttccgggggcttaaaaccaacagcttaaaaaaagggaaggttcggatcacttttaaaaaaaaaaacattgtaaaaaacaaacataaaggggaaattg

SEQ ID NO: 60752 - DNA, 200 bp, Zea mays
  Clone ID: MRT4577_155403C.1
ggttgttattttccaaaaaagcataacacgtacgttgcatacaaaaacggggtggcacacaattaatctggaggacaactaattgggacggtaaagaatttcctgggggtggggccataacgatcatgcggtggagacaaaagctgtttgggtgggatggagacctcatgctgactcatttgcctagacctctgcccaat

SEQ ID NO: 60753 - DNA, 1184 bp, Zea mays
  Clone ID: MRT4577_155404C.1
ccacgaggaggtggtcatgccgcctttggagccaccggccgcatagccatctcaataatccagtgagttgagctgtatgacagtttcaacgtgtatctgctattggaaggccaaaatttatctatattattttctaatgcgctgcggagcgcttggttcttgataatgaactcccatgtacttttcacaatcttgactaccatcatagtcatgccgaccacttggcttcattaccttagctgcctgagctacctttcagctggaggtgtttttgcatcaatccttggagtcatctgcctattctgtgtaggagttgttgataatgttggctttgagaacaaaggaactgctctgaacctccctggaatccctattgcaattggattgtatggttattgctactcagggcatggggtgtttccaaacatctactcttctctgaagaagcgcaatcagttcccttcaatcctttttacttgcattgggctgtctaccattttatttgctggtgcagcggtgatgggatacaaaatgtttggtgaagccacacagtctcagtttacactgaacttaccagagaatttagtggtttcaaagattgcagtttggaccacggtggcaaatccaataaccaaatatgcattaaccataaccccactgactatgagtttggaagagttgcttccaccaaatcaacagaagtactcaaacatagtcatgcttagatcagccctggtggtgtcaaccctcctcattgctctatctgtacccttttttggacttgtgatggccttagttggttctttacttacgatgcttgtgacctatattctaccttgcgcgtgctttttagcaattcttaggagaaaagtgagctggcaccaggtagcagtatgctcgttcatcatcgtggttggggtttgctgcgcttgtgtgggaacatactcgtctctgtcaaagataatccagaactacacatgatacagttgttcctgcaatccaaatttatgtccaaactcaatgagccaaactgcccagcaaattagtcaagtcgatgtatcataaatttgtgagatgtccatgtttgcatgttaatggatcaacacaaataatacgtttgtggcaaggatttgagacaatatttctgaacaaaagatgaggttgattttgtgttgtggaaaaaa

SEQ ID NO: 60754 - DNA, 464 bp, Zea mays
  unsure (1)..(464): unsure at all n locations
  Clone ID: MRT4577_155405C.1
ggccgcttttttttttttttttttatgaaataatagcatattgttcatagtacacgaggcacgtacagatacgacaacgggaagcagagagcgacatgcactgttttattcacccacaccacgaggcacgagctagcggcctagccgctcggcacggcgatgccgaaggaggtgagcgtgccgcggccgatggggctggcgatgaaactgctgcacgcccggttgcgcccgtgctggaaggagcacggatcctgcgggcgcaggacganaccggacggctccgacggtgcgagaccaccgttgagggccatctgacactgcaattggctggactccatgacgattttgcagctgctccagtcttctgcatgcatactgacgccaagatagtatatatgggctcggacgctgcttccactcactgacctgcagcatggagggtcttcacccgactcgtcccagat

SEQ ID NO: 60755 - DNA, 445 bp, Zea mays
  Clone ID: MRT4577_155406C.1
ccgggccgacccacgcgtccacccacgcgtccgcccacgcgtccggtcttgccctgaggtggaagcgaagggattctggcaagctgatggctgcagatcgatctcggtatccattggtgccgagagcatctcgccaagagccagagcagggctgggttcagcaacaccagcggcgtacaacatgccttgagcagcagacgtatgggctgttgccctctgcaagaagctctccagcgacaccagggccagctccatcttctcaaacggctcggcgctcagaaggcggatcggagacatgactggcgtctccgcgcccaccgtctgcaggaacggcacctgctgttcttcgaccttgggttcgtcgacgaagaagtccatcttcggaaccctcctcttcttgctgaagtggtccgcccccgtcgccgacccccccgaaacgaccccg

SEQ ID NO: 60756 - DNA, 583 bp, Zea mays
  unsure (1)..(583): unsure at all n locations
  Clone ID: MRT4577_155407C.1
gccggccggtttcagacacagtccagagacccggccagcttctttagtttgattccaaccaacaaccagcagcacacagcagcttattaatttgattcggacatcgatcggttcatgctagctctgcggacggccgcgcgcacgtacgtacgttcaacggatagctagctagctagctgagagaccatggacagcaagctgggcgtgcagcacgggcaccaccaccacagccacaacggcgtctccaagccgccggtcgcaaggaggaggcagagcggcggcggcggtggtggcggcaagggggtcaaggtggtgtacatctccagccccatgaagctcaccgccagcgccgaagagttccgggccatcgtgcaggagctcaccggccgcgactccaacgtcgccgaccacgacctcgacggcggcggcgcctaccacgtgggcgcgccgtcgtcgtcctcgtcctcgtcgtcttcctactcctccctcggacgcgtctccccggccgtggcggaggcggnggncgccgcngngggagcccgcgctcggncgncgccggcgaccccccccggggcgcccccgc

SEQ ID NO: 60757 - DNA, 298 bp, Zea mays
  Clone ID: MRT4577_155408C.1
ggggcaggacagtttattcttgaccacatacttcatttgttttttatctatattatttattcactgtgggggtgcaaaacgatagcatattaaaagctagaaggcacaaccgaagaaccggtgaatgaaaaagggaagaactaaaataccactctttgtaactaaaaaagaatgaacagaaaaggtggacagttagaattctaaagaccaagggggacaaaaataaacatcccatgggggccaataataatcagggcagggggagtcaaaaggtactactgggggtgcgaatggacga

SEQ ID NO: 60758 - DNA, 306 bp, Zea mays
  Clone ID: MRT4577_155409C.1
gttaataaattttcataattcaatttgtttttaattatattaataattttttgtttctccttcattatttttcatcatatatgtactttccacacttaaaccttatttcaattaattgtttattattattttttttctgttgtttttactatcatttagattatcaatagcatttttcttctcactttttcgtttactcgtggttaaagtgttatttataattactgtgaaaaaaatctccagctcatcattttatatcaatgaaagtaaacttgttttattcgttctttttttattttaatttct

SEQ ID NO: 60759 - DNA, 255 bp, Zea mays
  Clone ID: MRT4577_15540C.1
cccacgcgtccgcccacgcgtccgcggacgcgtgggtgagccggtacggcgacggggatggtccggcacctaatccgccgggctggtgcggtaccgcgctgccattgcctgtgctgtgcggctacctccgtgctcgtagaagattactgagctagacatacgggccaccatacggatacgggctctcatcagttattgtgctgagcaagcaagagcaactccgccggagttttcttctctgactgctctgcgtgt

SEQ ID NO: 60760 - DNA, 272 bp, Zea mays
  Clone ID: MRT4577_155410C.1
gagctctggtccttatttcagcaaattgtgcttaaagattctggagttgattgacagagttggtgattcggacactaaagtgaaagtagctgctatttcttcgcttgaaacactagcaaaagaatctctgatatccgggtatagcactgcttgcacaatcatgacaaagctttgtgagcactggtttttgattaattatactggggctttggaaagtgacgataaaacataccacactcataatatgaaacaatgctatgcacataaattca

SEQ ID NO: 60761 - DNA, 501 bp, Zea mays
  Clone ID: MRT4577_155411C.1
tgtcaagaccagccaccgtctcggggtgcgccccgtcattgaaatgggcgcgaatctttacaccaaaaacgcccttcattttagctccacaatcggtgtaaatagcaaatttccccttttttttttttttttttttcccccccccccccacgcagaaatatataaaatatatttttatacttttctatataatttatatagtacaaattttatatttattttttttttttattttttcttcccctcttttttttcccgattataatgaaaaaaaaagaccccactttattattctgccccccccttttttttttttttccctcgtttttttttttaaataattttaataaataagaaaaatattaataatatttatagtatattatttacgattcatatttaaaattcatatattatattttatataaaataattattaataaaatttaattaaatataaaataatataattaattattcccccccccacccccccttttt

SEQ ID NO: 60762 - DNA, 617 bp, Zea mays
  unsure (1)..(617): unsure at all n locations
  Clone ID: MRT4577_155412C.1
gccggccgggtcgggatcgatcctgacctgtcctgtcctgacatgcactcccagggaaacctgttctgtcctgagcctgaactacctacacagatctccagctcgcagctatttacttctcttccctcctgccgcacgccgccnaaactccagatctcgagtcaatctcgatgacgtgatactgaaagcaccgtctttccggtcgcctacatactcctcttcatcacggcagtcctgtgcgagccgagctgtaattgccgtttgactttgatttttaatctagccgatgctcctggatagtaatcctccaccagacctgtcgtgcctgatctcgacgcctgtcgattcatgatgcttcaacgcttatgctcccttagcatatcgatgatacgtcgccacactgttgcgtttgacttcgtctggcgcaaatgcctgtatacatgtaggattctttgtggaagctagatcccatgcatggatggaacatgcatgcccaatgattctatgcgccgatgcgatctcaatttatccggatccactttctctgagatatcatatgcatgtttatctccatcggcgaccccgagatcttgtccatttgccaatactcactatat

SEQ ID NO: 60763 - DNA, 373 bp, Zea mays
  Clone ID: MRT4577_155413C.1
gctggaagtattttaaggtggtcactgttgcggctagaaaggaacttgggggtgtggagacaaaagccaagtgcaagttctgtcatagatcttatttgtaccatcaagggggcatcactacaacactaaaccgacacctagacaagtgcacacagtatttgaacaagctggcacaagctaagaaaaatcttgctcaaggtagtctctcctttacttgagatggtggacctgttgttgttaatcccactgaatatgatcatgagcacactagagtcttaattgccaagatgataattgtccatgaatatgcatttagaatggcagagcataaatggttcaatatcttgatgaaatggatgaataacaattatga

SEQ ID NO: 60764 - DNA, 460 bp, Zea mays
  Clone ID: MRT4577_155414C.1
aaaaaaaaaaaaaaaaaaaaaaaaaaaaaaaaaaaaaaaaaaaaaaaaaaaaaaaaaaaaaaaataaaaaattatgaagatatcactctaaagggcttgttcttgggggtgtccctccccttggggcccttttggcccttctcttttccgttcccggccccccttccctcctttttgtggcccctttttgccctttttttggcctttttccactctgtgggccccctgtttacaccctttttccccgcttttccttggttcccctttcttaacccctttgcgtgccatacagtttcgccccgttggccttttcccgatgtgccccgccctgattgccttttggacccctcctgtaccctttttttaaattgggccccctttgtggggccgcttttagccccccgtaccttgggcttccccctagcgcccccccctccctttccattcccttactttccct

SEQ ID NO: 60765 - DNA, 766 bp, Zea mays
  Clone ID: MRT4577_155415C.1
ggaataaataatgggatccagtagtctcataaatttcgcagcttcaacacgcgtacacatacgtacgtacatacgatgcgcatgcgtagcgcttagctagcttacagcctgagcgacaggtcgatgtcgtcggcgtcgctggccgccgcggcttgttgtacgcggtatgcgtaccggcgcccgccgtctgcgatccagctcacgacggccgccgcggctgcctggtcccctgggcctcccgcttgcgcggtcgggtaccagctacagagctctgaagccgccgcccgcggcgctgctgccgccgcggcagaggaggaggagatggccgcactgacgaccgccacagcgctggagagctcgcggctgcgcttggcgaggctgcgctccagcttgtgcgcgttctggtggccgcccagcgcctgcgagctgaagaacttgcggcggcagtaggtgcacgagaagctgcggtcagggtcgtcggcggccaccggcggtaggtggtggtgctgcagcctgcccataccgccggacgccgactggtggtggacgaggcgcaggtccaggtcgacgtcgtcgccgccggccggctgcctcgccatgagctctctatctctataggatcggaggtggtgatatgatcgagtgggtgaacctcttgaggaggaggatccactgcactaatacgtggtgtataaatataagcgatgatccgtgaatgtgatgtcagctgcctgcatgtctcacgtcctttggtttggcttttttt

SEQ ID NO: 60766 - DNA, 372 bp, Zea mays
  Clone ID: MRT4577_155416C.1
tttagggggtgttttttattttttttgtgttgtttttaccatttaacgctgcaaaccctatccatttatgtcgtctacgggggactttttaacaaaacgggaaggatccatccataccccccgggttcttttttctcttgctcgctcttttggttatgaatatttataaactgtgcagcgctttgggtatggagtaggagtgttcccctgctttgggcttgttgcggtctttagctagcttgcttggttaggggacgaccacgctttccgactgccgtgccgcccccgtctcgctcgggaaccctgttcgagtagcctagctggtttaccgattggcgtctaacaatgtttgctcgttgtattaggcgcacc

SEQ ID NO: 60767 - DNA, 291 bp, Zea mays
  Clone ID: MRT4577_155417C.1
gaaaacaagccgacggttttactatcggcaggtgcggccaaatgtgctcgctgcagcacctacaacataaatgggggttcatatgagctgaatgtctcgggttctcggggacctaggcggatgaaatgagttatgcactccatacctacctcacgccttgaggctgtgggcactgttaccagccagctggacagaatccttgctagatctactgaagagacattttgcagcatttgcttctccaaagcatctgttgtggaccgcgctatgtgtttgaccagctcaagattc

SEQ ID NO: 60768 - DNA, 772 bp, Zea mays
  Clone ID: MRT4577_155418C.1
gtggtattggaactgtaccggttggtcgtgtggagactggtgtcatcaagcctggtatggtagtcacctttggtccaactggcctgactaccgaggtgaagtctgttgagatgcaccacgaggcacttcaggaggcgcttccgggtgacaatgttggcttcaacgtgaagaatgttgctgtcaaggacctcaagcgtgggtttgtggcctccaactccaaggatgaccctgccaaggaggctgccagcttcacctcccaggtcatcatcatgaaccaccctgggcagattggcaacggctatgcccctgtgctggactgccacacctcccacatcgctgtcaagtttgctgagctcattaccaagatcgacaggcgctctggcaaggagcttgagaaggagccaaagttcctgaagaacggtgatgctggtatggtgaagatgatacccaccaagcccatggtggtggagacattctcagcgtatcctccccttggtaggtttgctgtccgtgacatgaggcagacggttgctgttggagttatcaagagtgtggagaagaaggacccaaccggcgccaaggtgaccaaggctgctgccaagaagaaatgatgcgatcctgcgcctgctttagcaatacctagttttcatcattacaagttttgtttgtggtcgttgctgttattgtgtgaactgttgagctctgttagcctgtgcacttttatctatttatttggtaccttcttgctaaaaaaaaaaaaaaaaaagcggcc

SEQ ID NO: 60769 - DNA, 1176 bp, Zea mays
  Clone ID: MRT4577_155419C.1
cggttggtcgtgtggagactggtgtcatcaagcctggtatggtagtcacctttggtccaactggcctgactaccgaggtgaagtctgttgagatgcaccacgaggcacttcaggaggctcttccgggtgacaatgttggcttcaacgtgaagaatgttgctgtcaaggatctcaagcgtgggtttgtggcctccaactccaaggatgaccctgccaaggaggctgctagcttcacctcccaagtcatcatcatgaaccaccctgggcagattggcatggctatgccccagtgctggactgccacacctcccacattgctgtcaagtttgctgagctcataaccaagatcgataggcggtctggcaaggagcttgaaaaggagcctaagttcctgaagaatggtgatgccggtatggtgaagatgattcccactaagcccatggtggttgagaccttctctcagtatcctcctctgggtcgttttgctgtccgtgacatgaggcagacggttgctgttggagtcatcaagagcgtggagaagaaggacccaactggtgccaaggtgaccaaggctgcaataaagaagaaatgatgcgtcctcccatgtgccctcgtttattttgtacttgtgcccgtatacttcgatctgttaaaatctattggttgtgtgccctgtgtctgttgtttgggtatctatactgttattttgagacatggttgacttgaaaaaaaaaaaaaaaaaaaaaaaaaaaaaaaaaaaaaaaagaaaaaaaaaaaaaaaaaaaaaaaaaaaaaaaaaaaaaaaaaaaaaaaaaaaaaaaaaaaaaaaaaaaaaaaaaaaaaaaaaaaaaaaaaaaaaaaaaaaaaaaaaaaaaaaaaaaggtcccttggcccgaacccccttagggggaaattccaaaaactggggggggtttttttggggtcccagcccggaaccaaaattggggaaaaaaggggcaaaaaatgtttccccgggaaaaatttttttgcgttaaaattccccaaaaaaattaaagcggaaaaaaaaaaggtaaaacccggggggcccaatggggcaacccacccaaaataaatggggggggcccaaggcccccttttcctgggaaaaaaactgcttcccccctttttttaattaatcccccccccccgggaaaa

SEQ ID NO: 60770 - DNA, 1560 bp, Zea mays
  Clone ID: MRT4577_15541C.1
cggccggagacgcctccgtgctctcgctcgccgaggcctctccgcgggccgcagcgcggttccgcctcggtggccgccggagctgctgcctggccacaagaagccgtcgctctcccagctttgaaccggttccgatccgcaccacggagaagcccccgcctcgggagtctcgcgtcgccccgatgaaggtggacctcgccgcgcagacctcccagacgagcacgcccctgccgccgtcccctgaagccgcttctgcgtcgcccccggcggaagatgcgccgctcctccccgacgccggcgtgcggcgccgggcggcgtgcgggcggttcgcgcagcgcagcggctccttccgccgcgaagtcggccgggccgccgccgagaccttcctcctcacgaggctcaccctgatcctcctccgctacctcgggataggctacagatggattcggcagttcctagccctctgctgttataccctcttgctgatgccaggttttattcaagttgtatattattatttcttctctagccaagttcatagaagtgttgtatatggagatcagccaagaaacagattggacctttatatgcccactagtacaacagggttaaagccggttgttgcgtttgtgactggtggagcgtggatcataggttacaaagggtggggagcccttttaggcagacgcttagcagaaaggggcatcatagttgcatgcattgattacagaaactttcctcaagggactattggtgacatggtagaagatgcttctcaaggaatagcttttgtctgcaagaatataacaagttatggaggtgatcctagcaggatatatcttgttggacaatcagctggtgcacatattgctgcttgtgctctcttaaatcaggccattagagaatccggtgaaggagatacttcctcttggagtgtatcacagctaaaagcttactttggtatttctggcgggtacaacctccttaacttggttgatcattttcatagacgtggcctttaccggtctatctttctcagtatcatggaaggtgaagtatcactccagaaattctctccacaaatgatgattatggagtcatctgctaggtctgcagtttctttattgcctcgcatcatccttttccacggaacaagtgattattcaatacctccagctgaaagccaagcatttgctgatgctttacaacagcaaggcgcaagggcagatctatttctgtacgaagggaagacgcatactgatttgttccttcaggatcctcttcggggcggcagagataaaatgctggaagagatcgctcgtgtgatacacagtgaggatccagacgctgctgcccagcacctcgtcgttgtgcctgttgcaaggcgccttgtacccgagttcatgctgaagcttgctgggagagtaagccctttctagaggtgcttctagtttgattgcgaccacgactgactagtatttgtgaattttctttttatctaagacaaacatggttgtacatgtacttgtgatcggagaaagtactcataattttctagac

SEQ ID NO: 60771 - DNA, 1481 bp, Zea mays
  Clone ID: MRT4577_155420C.1
ggccctaggggcctttttttttttttttttttcagctttcaatttttgccgctactgatagcagaaaaaggcacacccgcaagtggcgctcgacattgacgctacccaaacaacagggcacgccgcagcagagcttaacagtacacaataacagtaacaaccgcatacaaaacttcgggatggagtgacaagtcaggtattgcaaaagcagatacaggattaacgacaggttgcatcatttctttttggcagctgccttggtaaccttggcgccggtcgggtccttcttctccacactcttgatgactccaacagcaactgtctgcctcatgtcgcggacagcaaacctaccaaggggaggatactgcgagaatgtctccaccaccatgggcttggtgggaatcatcttcaccataccagcatcaccgttcttcaggaacttgggctccttctcaagctccttgccagaccgcctgtcgatcttggtaatgagttcagcgaacttgacagcaatgtgggaggtgtggcagtccagcactggggcatagccattgcctatctgcccagggtggttcatgatgatgacctgggacgtgaagctggcagcctccttggcagggtcatccttggagtttgctgaactcattaccaagatcgacaggcggtctggcaaggagcttgagaaggagcccaagttcctgaagaacggtgatgctggtatggtgaagatgattcccaccaagcccatggtggtggagacattctcgcagtatcctccccttggtaggtttgctgtccgcgacatgaggcagacagttgctgttggagtcatcaagagtgtggagaagaaggacccgaccggcgccaaggttaccaaggcagctgccaaaaagaaatgatgcaacctgtcgttaatcctgtatctgcttttgcaatacctgacttgtcactccatcccgaagttttgtatgcggttgttactgttattgtgtactgttaagctctgctgcggcgtgccctgttgtttgggtagcgtcaacgtcgagcgccacttgcgggtgtgcctttgtctgctatcagtagcggcaaaaattgaaagctctcgagacttatgtcccttttgggcgccgttgaactgattattttaaagtctgcccacatttttctacgacaggttcagtcgtgaggatagagcgacagaagtatgaaaatagaataaggtagcagcgagacgagcatcccttatgcaactcctgaaacgcaatgtgtagtttgcacgctgtgtattttgaaatatgaagttagatgagtgggatagagtcgtctgcagataatcgtagtccatttctagcatataatagcagaccgtgcaaaatactgttttgcattttagattgcactgtttgcatagtattgaaataaagagtcagatatgaagtggattcccaaaaaacaccctcccccaaacacaccccaaaccc

SEQ ID NO: 60772 - DNA, 920 bp, Zea mays
  Clone ID: MRT4577_155421C.1
ggccgcttttttttttttttttttcttttttttttttttttttttttaacatatagctcttacagcattcttgtattgcagaaggtgaaatagcaagaaggtaccaaataaatagataaaagtgcacaggctaacagagctcaacagttcacacaataacagcaacgaccacaaacaaaacttgtaatgatgaaaactaggtattgctaaagcaggcgcaggatcgcatcatttcttcttggcagcagccttggtcaccttggcgccggttgggtccttcttctccacactcttgataactccaacagcaaccgtctgcctcatgtcacggacagcaaacctaccaaggggaggatacgctgagaatgtctccaccaccatgggcttggtgggtatcatcttcaccataccagcatcaccgttcttcaggaactttggctccttctcaagctccttgccagagcgcctgtcgatcttggtaatgagctcagcaaacttgacagcgatgtgggaggtgtggcagtccagcacaggggcatagccgttgccaatctgcccagggtggttcatgatgatgacctgggaggtgaagctggcagcctccttggcagggtcatccttggagttggaggccacaaacccacgcttgagatccttgacagcaacattcttcacgttgaagccaacattgtcacccggaagagcctcctgaagtgcctcgtggtgcatctcaacagacttcacctcggtagtcaggccagttggaccaaaggtgactaaggctgctgccaagaagaaatgatgcgatcctgcgcctgctttagcaatacctagttttcatcattacaagttttgtttgtggtcgttgctgttattgtgtgaactgttgagctctgttagcctgtgcacttttatctatt

SEQ ID NO: 60773 - DNA, 125 bp, Zea mays
  Clone ID: MRT4577_155422C.1
ctgcctccttccctcgatctattctccatcttgtcctccctttgctaaaaataacgggcagagcatcttcgattgacgtgccttctttctcgtcgttcgcgaggatgtgtgtaaaccggtatgga

SEQ ID NO: 60774 - DNA, 348 bp, Zea mays
  Clone ID: MRT4577_155423C.1
ttttttttttttttttttggaccatatgaattttcttgcgagatttcaaacaatcaaatttgttccaccataacaatatggtaacttaaaaaagcttacatattgacacagcacagatctgctgctcaataaagaaaataaatcccgttgagcttcgaagttcgaaccctactttgctcgtcactcgtcagtaatatctcaaatccatgctagatcaaatcaagccctttttcgtcaatgcagaggcggcaggcgccctcgacggcggccacggccgcggcaaggacgcggtagtgggtctgtgggtggcgccactacgcctggaaaaggagcagtccccctcgtgcc

SEQ ID NO: 60775 - DNA, 1033 bp, Zea mays
  Clone ID: MRT4577_155424C.1
cggacgcgtgggtgagattgtgaaagaagtctcattctacctcaagaaagttgggtacaacgctgataagattggcttcggtcccatttctggttttgagggcgacaacatgattgagagggccaccaaccttgactggtacaaaggcccaaccctgcttgaggctcttgaccagatcaccgagcccaagaggccttcggacaagcccctgcgtctgcccctccaggatgtgtacaagattggtggtattggaactgtaccggttggtcgtgtggagactggtgtcatcaagcctggtatggttgtcacctttggtccaactggcctgactaccgaggtgaagtctgttgagatgcaccacgaggcgcttcaggaggctcttccgggtgacaatgttggcttcaacgtgaagaacgttgccgtcaaggatctcaagcgtgggtttgtggcctccaactccaaggatgaccctgccaaggaggctgccagcttcacctcccaggtcatcatcatgaaccaccctgggcagattggcaacggctatgccccagtgctggactgccacacctcccacattgctgtcaagtttgctgagctcattaccaagatcgacaggcggtctggcaaggagcttgagaaggagccaaagttcctgaagaacggtgatgctggtatggtgaagatgataccgaccaagcccatggtggtggagacgttctcagcgtatcctccccttggtaggtttgctgtccgtgacatgaggcagacggttgctgttggagttatcaagagtgtggagaagaaggacccgaccggcgccaaggtgaccaaggcggctgccaagaagaaatgatgcgatcctgcgcctgctttagcaatacctagttttcatcatcacaagttttgtttgtgatcgttgctgttatcgtgtgaactgttgagatctgttagcatgtgcacttttatctatttatttggtaccatcttgctatttcaccttttccaatacaaaaaaaaaaaaaaaaaagcggcc

SEQ ID NO: 60776 - DNA, 338 bp, Zea mays
  Clone ID: MRT4577_155425C.1
gtttaaaaagcttgtatctaccttatttccgttggctctcgcggtacagataggagggcgaggtccaagcatctcgccccaacaagccaatgcaggcatgatacgaaggctgtaccacagctcccacttttgccacatgttacgccactttgcgtgactaaacatgcaaaaaagccactaggatggcactggctttaccactctaccgtaacttggatctgcaagcaagaactacgacaacataggtgccggagctgtcttttcagtacactcactcagtgcataggtccatactaacgccctccttgtactatgataaacacaaggtgaccattgta

SEQ ID NO: 60777 - DNA, 972 bp, Zea mays
  Clone ID: MRT4577_155426C.1
tgagacgagacgagacgatccggcctgccctgaaccgttacttgttttaccccatctcatcccactgacttcacccacccacccgaccgctgactgcgtcggaactcgaaggacttggatccggctgaccacgaccaccccgtgcgcggtgctgagcagtattagcatatcagggtagatgggcgcgctcgacaccttccacttgaactgccaagaacctgatggagaaagctggccaaagatttcacgcatccgtcggaaggacataggcttccaatattttatttaggaaacatttcatgttgtaaacaggcacctcgagctcaaggtcaccccgtcaccggtcgccgccctcatcttctacagagtcggcaccgaactaggtacttagcacccaggccagctacctgcgtccataataggctctgcatttatgggggccctacattgtttatgccgcccacttctgctgcagaaacagtctgaatatgggcttttccaaccagccaatccagagaacagggctagcccaagacagctgtatgggctgagcagaattctgccgagtttatcaccaagaatgatcaatcccttgtcgctgaatgaatcaagttcatttttccgagaattaattttggtatccaaatctaagttcatggaattcataccagtgatatattgtaaaggtagcaccctcactgtcgacggtggccttgtactgcattgaatttgggtgtttatgccacattttcatagttgtgacaatagtgtagaacaggttggtagcaggccttaaaaactgattagcataatcaaatgaatatggttatagatggggtttgacctgagctcaaaaatatattgttgaccctaattagggtttctactgcgtcattagttttactcctcttgcaagactacgttctgtaaacattcccatatatagtgaaggtttcgcttggggtgtgccgg

SEQ ID NO: 60778 - DNA, 165 bp, Zea mays
  unsure (1)..(165): unsure at all n locations
  Clone ID: MRT4577_155427C.1
gggggggttggtttttttcaaaaaaaanancaattggggtgtatgcagtgatgcgaacaaagtttaaccctaagacgtagtacaaactactgaaaggtttcaccncttataataaactacaacaatagattatgtttctgacttcttattttgtggagggggggg

SEQ ID NO: 60779 - DNA, 281 bp, Zea mays
  unsure (1)..(281): unsure at all n locations
  Clone ID: MRT4577_155428C.1
aggacagaggcgttacgacgcaggatgatgacggaccaggactcaacaagatactgcctttatcacaaatattttgcttaaccgcctgggaaaacccatctcagacggacgttaacctgagaaactcaaggaaatacaacaggatatcaaggtgactgctagcatggacatcgcgcatgcgtgccgcaataagctacaagatcacactcacttcnggagctatagaaaacgaacgtcaagcgttaaggaagacagcagctaacataatatgacgctatgga

SEQ ID NO: 60780 - DNA, 299 bp, Zea mays
  Clone ID: MRT4577_155429C.1
tttatttttttttttttaccctctatttttttctggggtatttttttttttttttggtggacagactaactaacaaatttatccgggccagattccaaaagggatagttttttcattaaaaattttacctggatttagatgaaccctgggcatagtccgcccaaatcgaccagttgggaacaatatggacacgctggtccatcggggcataaaccggttttattggctggggggcaaactggaaaacaggtgggcggaatttttatttccccccttcaaaactgggacccttttaggcc

SEQ ID NO: 60781 - DNA, 429 bp, Zea mays
  unsure (1)..(429): unsure at all n locations
  Clone ID: MRT4577_15542C.1
anctattttcctatttccccnnnnnttttttttttttggtttttttttttttttttttttttttccacacatgaaacaaacatgggctcaccaagggatacgtttataacccatcacacaggaatacttagggtattgggcttttagcttccgccgggcccaatcacagaacttgaatggaaaaggggggaaagaaaaaaaaaggggcgacccctaagggggcccgccattgccgaattgggacttgccggtttgggcccccctcagctgaccaccaaggggggcaggaaaggccccaccaaaacgaaggctttttgggaagctttggttccactatccatgggggggcagctttaacttttaagaaccatgcagatgctcaagccatgcattttccatgggctacgggggctggggacaagggggggg

SEQ ID NO: 60782 - DNA, 137 bp, Zea mays
  Clone ID: MRT4577_155430C.1
gacatgaacaccattatttcttggtggttggaccattgtttaccttattggtccaaacggaaaccaaggtgggcttacattgcttccggcaccttaagggtaacgggggggccttccttaattggccgggaccaaat

SEQ ID NO: 60783 - DNA, 1134 bp, Zea mays
  Clone ID: MRT4577_155431C.1
ttttttttttttctggccgggggccaagctcccctagcacacgggcaccgcttcctgttgccatcagcatgcagccattttattgttctgttcttttctaactgggcgacgctcagaccatgtagtcgaccgctggctcttatgccttgcaagcatgaaagacagctctgcaataagatagtgcatcaaatcatttttacatcaggatgcttccatgtacagtaggcagactgatataactagctgaagcgaagagcatgtcgtcatccttttgttatgatgcttgatatccgctcaaagaacatgcggcacattttcatgctgaatcttatgtcttgcctcatccaatcaacggctatcctttccagtgtgcccaacgaggagagcttatatgaccattcatcagatgtttctagccaggtgaggatgaaactgtaaccactagcttcatgagatactgaaaccgaaaatatttctgttccatcattttaccgagatcttcatgcgaactaaagattgaagcagcaaagaaagcatatgagcactccgaatctctgttgtcctattccctgagatgcgtgtatgtcttctggagcattctagctgcttgccgtgggaaaatggtgtctttcttttaggtgacaatggagttgaattttctaggacagcttcaggcgctaggcaaggaaacccagtagctgtagaattgtttttttcagccttctcatctaagagctgcttcagcttcagaatttcagcgtcccttgtacgaatatcttcaaggaattcctgacgggccttctcgagctcatcctgcttctccaccagcttctcgttgagttccgcattgtctttcctgagttcgctgacccaatctttcatggcatcgtaaagctcattgagttccgcctcccgcttccgctccagcccctcgtccagtagcttccgcttcttcagagcagtgtacttctcgtggaacttgtagtcgagctgctccatcggcgtcagggacggatccagaagcttctagacgcgtgtccgagcgggagcggcgactttggctggagagcgggaaggaaccaagggaggacagtttttgggggtaagttttttgaattcacacggtgcggtcgt

SEQ ID NO: 60784 - DNA, 277 bp, Zea mays
  Clone ID: MRT4577_155432C.1
tcgcccactcgtccgcccactcgtccgatattttcttgttttagtcaagatgctcaaaaggttggaaaaatccaagtgactgcctttcagtcagaggatgaactacaggatgaatctcatgtacatgactgtatggctgactacagattaagtgaggccttattgtctaaggttacctgtgatgtagtaaccgaggagctgaatgtgaacagatgctctgaatatctgtacttcacatgtagtattgttttaagatcgttatatgagagtttgagcg

SEQ ID NO: 60785 - DNA, 238 bp, Zea mays
  Clone ID: MRT4577_155433C.1
ttctaatttttcgactagagcgcaagcatcggggccctttttcagggaagggggggggcgcaaaaacattacgaacgacgaggaggtcagaatgcctgtcctctgcctgcgggacgactactacgaggtgtcccgtaagctcaagaccatgaacaagcacaagctctaaaacggcgtcacgtaagagagcacccgttccgccatcaagtaccacagcttgaaggccatgccgttcatc

SEQ ID NO: 60786 - DNA, 766 bp, Zea mays
  Clone ID: MRT4577_155434C.1
cgccacctgccaccgccactggtttttggctgttcccgggcaaactcgccaccaattgccacgctgggtgatgctagcttagcagcttttttgtatcttcccagttgtttgaactatatggccgctcctctcctccatgttccatgccgcctcggctgcaaggatcataaacaaacttattcactttttatccgataataatatgaccgacgactgcatgcgtgaagagatcaggccaccgctagtcgtcgcggtactcaagtgagatcgagccgggggattcgggatcaggccggtacgggcgaccgaggatcgccgatggccgcggctccagacatggacgaacaagatgcggcaatcgagggagggcagctcgtcgtgcctcttctcggaagccgaagcgcaagcaccgccacgggctcgccgtcgcaggacgcgtccccgctccgccgcctctacgccggccacgccctcgccagatggggcgccaggatgtgggagttctcagttgggctgtacatgatccgcatctggccacgctcgctgctcttcactgcgatttatggcgtcgtcgagtcgccctccgtcgccggtgtttggtcccacagttgggacactggtcgataacctcacgtaccttcaggttcttggcatatggcttctagtccaaagcctgtccttcatcgtcgccggagcctcggtaaccgccctgcttgtttacgacgacctgaaagccacagcttccctgtattcatggcgctggtca

SEQ ID NO: 60787 - DNA, 336 bp, Zea mays
  Clone ID: MRT4577_155435C.1
acattcacttttttttttggatcggttaaattaaatttggggttggttataaacataaattaggaactgtcaatgccccacaagcaaaaaaagggtggaagagatcaatcttaaataaacaaactctgacactccagttatagaaagaccccccctttcccttaatataacctgtgatgaaagcgagcgacacagcttcctagcattgttcaacacaaaaatgcgaaacaccgcccaaatcaagcaattaatctggccgcggtgcgcgggacgcgtaaggatctttcatgctccttcaagtcaagctatggcccgggcccttaccttcttctggcc

SEQ ID NO: 60788 - DNA, 349 bp, Zea mays
  Clone ID: MRT4577_155436C.1
aataatcttctattgagaatattttattgggggtttttttgttatagggctccaattcctgcacgggggcacccaagttagtacatgaaaatatgtaaaccaaaagaatagctcctaaaacgactgaaggcgggcccgcacgattcatggaagagagctggacatgtggaagcaactgaaggcacggtcggaggaaggcagcaaccaatgggttaggcacaggcaatggatgaaggccctgttgacgcggtcagaacgtgcacagcagaggccggcacacgcaggtggatgagctgaaccaacttttgttgggagaaagcatagcttgccgcagctagcaaaaacaaag

SEQ ID NO: 60789 - DNA, 185 bp, Zea mays
  Clone ID: MRT4577_155437C.1
atcactgtactacagaagacttcaaacttgctcaaatttatatcgatgactctgccgacgaactgatgtatactaaagcaatcctcaaggatatcaaaacgctctatacaatataagtaacaagctttgttaccacttcacaccatgtacatattgcactactcaccgtctaactgatccttaaa

SEQ ID NO: 60790 - DNA, 437 bp, Zea mays
  Clone ID: MRT4577_155438C.1
actcctaagggcgattgggatcctcgaggccggccgggtcgccaacgtggcgtagattattgtactcttttcccgcgcatctgcatgctggtacggacgttgttggtggactggcaacgtcccacgaacggccgaacaataatgtggcgctcaggctcaggtgtcggtaacaatgattagaaacaagggacggcacaatctcgacatctccggtgtggcaatgtgtgagcgacgacatgcgattcacccgatccatcggtaataacaatcgtcgtcggtaggcatgcattcgcatcctctctttttttcttcttcttttgctagttgcaggctcggttgatgcgtgagatcgacctcctcccccatgccatgccatggctcgcgccgtgtatgatgataagatccgcgcaaagaaaaaaaaaaaaaaaaaagcggcc

SEQ ID NO: 60791 - DNA, 313 bp, Zea mays
  Clone ID: MRT4577_155439C.1
atagctcatggactccagattggagaactcgacaccatgaacgtgctgatcgatgcccttgctctcctggcgctcgctgagagcgccggcttcagaacaagcgagagctgtggctgccacacaccacacgattcatgtaccgcctacgctctatgccgactccgatctatctgccgccgcagcatcaaaccgagtcatggcaataccccactcaaccaccgcagataagcccgtgccaccagttaggatcctgcggggtgggcagcgtcagcagcccgttcctgggccaaagcgtcagtttctgacgcaccag

SEQ ID NO: 60792 - DNA, 238 bp, Zea mays
  Clone ID: MRT4577_15543C.1
cgagtaaataatacaatcaatttatttatttttatttaaccaaactccattttttatacaggggacgggtggttccacaatgttaccggatttattggcaaacaaaaaaactgggagttatagcagagcacccacccatagatttgtcataaaacaaaggttttcccaaaggaaaattaagggtaggggatgtttaaaagcactttctggggaaaatagttggaccaaacttcttaaa

SEQ ID NO: 60793 - DNA, 1060 bp, Zea mays
  unsure (1)..(1060): unsure at all n locations
  Clone ID: MRT4577_155440C.1
cctccgccgcggcgnnnnnnnnnnnnnnnnnnnnnnnnnnnnaggaagggcgaggagccgtggctcgccgcgagcctccgcccggcgaacttcctcccgggcctcgccatcgggttcctcctaggcctcctcctcgacttgtcctcgtcgtggaggcccaagtccnnnnnnnnnnnnnnnnnnnnnnnnnnnnnnnnnnnnnnnnccagctccaagcgggcgtcggggacctcgtttgcctcgggcggcgaggagcttaagatggttttagtggtgcgtcaggacctcaagatgggctctggtaattcggcaccagaatgtgcccatgcagcgactggcttgtacgcagaattgttgtcaagcaatcggggtttacttagacaatgggagcaacttggacaagctaagattgttttgacatgcaagaatcaacaggaaatgaacaggctaaaggaaactgcagaacatagaggtattcctacatttattgtagctgatgcaggccgcacacaggtgctggctggatccaaaacagttcttgcaataggaccagggaggaaagctgacatcgattcagttactgggaaactgcgtttgctgtgatcttcagctgcctctcggagatgagtactgtcttcccagttgaagagccctgcgccccgtttagcatcagaaacagttgcctgtcgttgtagccgtttgaaggttaacctgatgtttattcgtgaagttgtaagttctaggtggcccatttgagatgccatggcatacaagagatttcttgttgagacaatcctcattatgccataaaaaattatatcatcccttgtgtgtcactagctctatatatcatacaaccaaaaatatcttgcgttccaactatttatagtaaatttctatatgaaaatccatgagctactataatcttattttattgaaaaccaaacattcaaaaaaaatagaatgaagctactctattctttctcacttcaatcaaacacccccttagttatctatccaagagctactataatcttattttattgaaaccccaacattc

SEQ ID NO: 60794 - DNA, 923 bp, Zea mays
  Clone ID: MRT4577_155441C.1
atctgttcccgcagcaacacgttatcgacgagcacgtctccttccttccccacccactgctccacctccatcctccatggctcctccgccgcggcgaaacccgccgcaccagaaccccacccggaggaagggcgaggagccgtggctcgccgcgagcctccgcccggcgaacttcctcccgggcctcgccatcgggttcctcctaggcctcctcctcgacttgtcctcgtcgtggaggcccaagtccagccccgcgccggctccggccgccgcacccgcgcgggcctccagctccaagcgggcgtcggggacctcgtttgcctcgggcggcgaggagcttaagatggttttagtggtgcgtcaggacctcaagatgggggctggtaaaatagcttcccaatgtgcccatgcagcgactggcttgtacgcagaattgttgtcaagcaatcggggtttacttagacaatgggagcaacttggacaagctaagattgttttgacatgcaagaatcaacaggaaatgaacaggctaaaggaaactgcagaacatagaggtattcctacatttattgtagctgatgcaggccgcacacaggtgctggctggatccaaaacagttcttgcaataggaccagggaggaaagctgacatcgattcagttactgggaaactgcgtttgctgtgatcttcagctgcctctcggagatggtcaacctctgttctactgatttcattcatatgagtactgtcttcccagttgaagagccctgcgccccgtttagcatcagaaacagttgcctgtcgttgtagccgtttgaaggttaacctgatgtttattcgtgaagttgtaagttctaggtggcccatttgagatgccatggcatacaagagatttcttgttgagacaatcctcattatgccat

SEQ ID NO: 60795 - DNA, 330 bp, Zea mays
  unsure (1)..(330): unsure at all n locations
  Clone ID: MRT4577_155442C.1
gcttgtggatttgcgggtcagcctcagactgttgagtggtttttccccccccccccccccatagtgaatgggttctgtaggttctgcgtccctagtctacgcaccatagcacctttcacggtttgcgctaagtatgtatgtatcacacaaaacatatccacacatacatacgatgcgcatcatgataatgatgaagaagaacgaatagtcagtagatgcattggtggttgacctataagcgcatagaaaatgactgatcttatcttaatcacatacacttcatcacggtcnccgtcataatttgacggactaaaaagtacgtacgtacgc

SEQ ID NO: 60796 - DNA, 192 bp, Zea mays
  Clone ID: MRT4577_155443C.1
ccaaacatgctatccccctattattaccccttgccatttcactggttcatccaggacaatgatcacactgccacccatgaccatgggtgacactgcgagcctcaacccggataaacctgtgaactagctatgggtatctattcggaaaatggatttctttattactacagaacctgcccgggcggccgctcg

SEQ ID NO: 60797 - DNA, 337 bp, Zea mays
  Clone ID: MRT4577_155444C.1
ggagagaaacaaaatcatttattttttgaaatttgggcctaaaatttaaaaacgcgccctggaataaaaaaacctttttttttattaatactcaacaactgaaatggtgggggggggctttattaacaccagggggggcagtttttgggacacattttttggggcaaatggaaaccccgagcttgaaaaacccggcggttttgcccttttttttgcacacggggatgcagttcccgctctgggggggcccccctttgaagggcctggtacccgggacacaaagggggggctcaccccccaagggcagggggaacaaaaacatggtttctggtggaaa

SEQ ID NO: 60798 - DNA, 587 bp, Zea mays
  unsure (1)..(587): unsure at all n locations
  Clone ID: MRT4577_155445C.1
ccggccnggaaaaaaattacaaaaaaaaaaaaaaaaaaaaaaaaaaaataaaaaaaaaaaaaaaaaaaaaaaaaaaaaaaaaaaaaaaaaaaaaaaaaaaaaaaaaaaaaaagaaccggttccaggagttggaaaactggatggaggagcgaaagggggatttcagggacaacaacaaggggacaaaaacggggaatttggggttcggaaccccccccctcttcatgttcgggttgtttcagttccccatcaacaggaacctcgggttcggaaaccccaccctcgtgctgccctgggggccccatggtcggttggggcccccgcccgtgacgggggggccctaccccagggggaacgggtcggggttcttcgggggaactaggatggggccccggttcatggagggggccaaatccaaccctttgataaacccgccaccaaacccggaaatggtgaccccgggggaatcccgtttgtgaccctaaaccgacggaaactgtgagctcccgctgggggaacctgccattacggggtacgggtatcgtcgccatcatcttccaaatccagaagtcaaatggccaaccttg

SEQ ID NO: 60799 - DNA, 1033 bp, Zea mays
  unsure (1)..(1033): unsure at all n locations
  Clone ID: MRT4577_155446C.1
ccttattcatcggctggcaggtanagagataatcagttcttcctttgccattatactattactcgtgctgatggttcatcatgaaatttctatttgctttcagattaggatgcaaactagattagctatcaatctttctgtggctgattatgggaaattagattagctgcaaacaaaaataagtaataaggaatttaagaataaaatcgaaccttaggtatttttacagcacattcttataaaaaatattgtttcgatcttactaggaaccttgtttatgaaatgtgatattttatagttctcccagaaaagttttgtgtaatcttgagaaataaacagattttctgcacaatttctcctgggtaagctgaaaactgcgcatcgtaaatttgtagcctgcagaaaagttttcagtttagttgttttagatttaactgtacttgtcttgaactcttgggtattctggacgggaactgctgattctttcaaatccgggatcttcaattgtctgcaccagctgattcctttaaatctggaatcctctatctgttggcccacttgtacagtaactcgtgatttatacttccttaactgtgtctaatcattgcaggaagaggcggtcgagatcgagaactccggtcaaaaggagatagaaggcatggacagtttatccgacgagatctttgcctaaacattcctctgaaacaaccaaagacatttttgcggttctgctgttgtctatctagtgcgtcttttgctccgacaacataatggtagaacagcattcctacagtgacaaacatgaaggcgaggactggatgtaccttgatataagatgcacattgaactgtatcttgtttgatagatgagctatataactagctcacgcagctggctgtatgatctgtagttcccccgttatctgaattgttcatgtattaggccatgtactgctcagcagaactatgtagttagttgcaaaaaaaaaaaaaaaaaaaaaaaaaagccactcgtttgtttgtctatgcaaaaa

SEQ ID NO: 60800 - DNA, 307 bp, Zea mays
  Clone ID: MRT4577_155447C.1
ggtcttcgaatctcgggtcgaccacccgtccgctcacggagagaaacacgaaagctccaaaggcgcagactcaccagctcccactggataacggtgatgagatcctcgggtccttcactgccgtcgccgagactgacgcgcgtcaacggcggcgtcgcggacttatagcaggtccccatcaggcatgccggaaagtcctacgtcacgctcgcccacgatcaactgcgttcctaacggcggcttcgtgaaactataggaggcgcggttgccacactagcgcgaagtcctacgcagctgttgcggccaa

SEQ ID NO: 60801 - DNA, 355 bp, Zea mays
  Clone ID: MRT4577_155448C.1
gacccggggatttcttttttttttttttttttttttttttttttttttccaggccaaattaaagcccaggggggggcatataatggtttttggccaaatggacaagatccccggctcaccgggggaaaaaaaaaacatttcctttttcagagaaaataaatccggccaaattgaactttaatgggggcaaacaatcacggggcgtgcttgttccatccatccatccaggggcctggggccaacactgaattttattttttcggggtttccccgccagaaaaccccccccaacaggtggggaaaaaccccttttctttaggaccaagggaacttccctggcccccgggcccaaatt

SEQ ID NO: 60802 - DNA, 534 bp, Zea mays
  unsure (1)..(534): unsure at all n locations
  Clone ID: MRT4577_155449C.1
ccgggtcgacccagcgtccgcgtcaagaaagcattgattgccccccatggccattacgccgacccagtttgctaagaagacggcgcagtcggccaattggtctgatgccaagcgacgagtgctatcctcctaccgagaatggattcgagctgcccccgaagttcaaaccatgtacaacatgcccatgcccgtctccgccatccgaacccgtatgcggcaagaattcgaacgacaacgatttgtgaataagctctctgtcgtggacgttcttctcttcaagtcccacgccgagtaccaggagacaatgaacttttggaagcagaccaatcatatcatggcctacttcaaggaggagaacttccgaggtgacaagcgactaccatccagctttatgactggcttcctcgagggtcgcaactagcaacaagggcttgtgtatatatctcattgaaagggattcctccnaaaaaaaaaaaaaaaaaaaaaaaaaaaaaaaaaaaaaaaaaaaaaaaaaaaaaaaaaaaaaanaagggc

SEQ ID NO: 60803 - DNA, 302 bp, Zea mays
  Clone ID: MRT4577_15544C.1
tttttaaaaggaaccaaaaacttttttttttcggggaagttaataccctgggcgctgtttttgggaccagggggtaagaaccccttttttaaaaaaaacctttaagggtaaggcttttgtgcaccctaccaaaacaaactttgaaatctaatttaattcacctcttttgttttggaaccagaaccgtttccaccagaggggggttttttattcattccagaaggaggtcccattcccccgccctctcccttggttatttttgggaagggggggggggagaatccctcaagcttttttatttt

SEQ ID NO: 60804 - DNA, 192 bp, Zea mays
  Clone ID: MRT4577_155450C.1
ggagtcgacggacgacccacgccatccggctttctttaaagtatggtgatgctatagcttgtgtttgagccagtggaacaatggattttgttgtggaagttgctggtgcaccacaacttacaacctggcgacaccggaaaatctaagacgtacgcgactctgatttactccatgcgcattatcgattacatc

SEQ ID NO: 60805 - DNA, 479 bp, Zea mays
  Clone ID: MRT4577_155452C.1
gccaccggtgcgtttacttttccggacgcagaccatggtcttacgcgtcctgctgggcctccccgtcgaccagaagatgggctagcaccatgtcgtgcacgcgcggatgatcgactactctgaccctaccggcgaaggaaatggagactggtgcctcgagatcaagacgagaagcgagttacacaacatcacctgcgggaagctcgaatgcctgctaccgaatgtggacacatagatgccgcacggctcgacttggaactatgccaatgtagtcgccacagaagacaaaggacatgggaggactacaccctggagtagagctgactcacggtatcaccgtaaaggacaacgacgctatcggtgactacgggaaacactatgtggtggccatgtggctgatgctgtctaaaacaatcgtgacagtgcgagcggtctgcaagggcctccctgtgtacacaaatagtgaatggtgtgagaac

SEQ ID NO: 60806 - DNA, 1737 bp, Zea mays
  Clone ID: MRT4577_155453C.1
atgagctaccctatacactgtagcgtaagagtgaacgctatatctggcgtaactctatctcgctctcctctcctcggcgcaaactaccgcacgtgcacgcgcctttcgtccgagcgccggcgttctgctccctcgcccgcggctggtcggcggcacgcgaggcagggacgtgctccgagcgcacgaggcagggacgtgctccgtcgtccgggaagcacgccggacgaggcggaggcgggcgcggcgagcctggatccggaggcggaggcgggcgcagcgagtggatccggaggcggaggcgggcgcggcgagcctggatccggaggcggaggcggtaccggaccccgacgcggcaacctggagcaagcaaagccgtaccccagatccggaggcttggaggttgggggaggagaggaagaagtcggatctgctcagggaagcgcaaaggggaaccgcaagcgacgacgttcgaaggaggtagaggcatcatcggaggagagttccaccgcgcggtctgctcgtccatttcgtcgatttaggatggatggcacacacaacagcaagggtgatagctcacagtcgcaaggtcaagctggttggaacccataccagccccctcctccacctgcctggaacccatacatgtttccaatgcaacctcagcctggtggctggtatccacagccaatccatcaccccccacataatgttagcatctttcctcctccttctggacctaacatagtatcagttgaccacactgaagcgaatgtggttctgggggctgatgaggtagatgtacttcatccagaggattcagtaccttcaatcctgaaacgaggaaggactaagttagggaacttcagcccacaagaagatgtaaacctggtgaaagcatggttggaagttagctgtgatcctgtcataggtaacggccaaaaaggagacaggttctggaagagggtggtggaacgatataattttcggaggggggcaaactcagaaagaagcctcaggtctctgcagagccgctggaccaataatatcaagcctgaggttggaaaatttgcaggctactatgcagaagccctgcgacaaaatcccagtggaatgtcagatgctgacaaaacatcacttgcagctaccaactttgcggaggttgaagggcatgcgtttggattcatgcactgttgggaccgtatgaaggacgagcccaaatggggtaacccaacacaacttgggactgaagctcatctagaaggcgacggcttggaagaggactccaacagggtgcacggtgatgcagacaagtcagctggaaaaaggccggttggtagggacagagctaaagcagcgaacaagaaatctaaatcggtgtcaggtgatacatcttcttcagagtacgctagtaggatgcaggacctgtccattcaaaaaataaatatcatgcaagaagaaagcgtgcgcaaaggcgagcgattccagcagcttgctacaattgatgagaaaaggtaccaggaaatgcgtagtcacaaccaatcggtattagatattgagcaagagaaagttagaatcatgcgtgagaagcatgacagggaggagaagaaggaggatgagaggattctgagtattaatttggactcctgcacaccttccctgagaatgtattatgaagctttgcaggaggacataatggcgaagcttgctgctagacgccaagggaggcatgccccataa

SEQ ID NO: 60807 - DNA, 489 bp, Zea mays
  Clone ID: MRT4577_155454C.1
tcattcaaccgccgtctcctcgccggcacgcttcgccgccgccgcctctctcctcctcgtctcaaccgccgcctgcacacgcagaaaaggagggagaataagaggatcagcaaaccccaagccctccactcgtcgccccctgctgcaatcgccccacccgcctccgcccgccgccgcttctcctcaccttcctctcccgcgacatctcagttcttcatcaccaaaagatggtcggcggcggcaacgagttccgtttcttcttgtcctgcgacatcagccacccgcttgccttccgtgttctccacgcagaacatatcttgttgaccgaccaaaaagtcccagagctctttgttgagtgcaagctatacatcgatgggatccaatttgggttgcctgtaaaaacaaggttggaaccttctggaccgaaatactgttggaatgagctcataacattaagtaccaaatacagggacctaacatccctctcgc

SEQ ID NO: 60808 - DNA, 342 bp, Zea mays
  Clone ID: MRT4577_155455C.1
ttttttttttttttttttttttaagaacagatgaggttacatgggcaccataaaacagcatacacaaatgtggaccaagcattcttaacccaatcaccacccccaaacttggttggccgtacaaggattttccaacccaaccacccgaaaaaagaaaggacccatacttaattttagaatggcgcgtcaaaaaccccaacccaaccaggggattattaaaacagggcccagaaacaccacttttttttttggtttaaccaccctatatacattttattacccaccgacggaccaggtaaaacaaccaagttgtgcctgttctgtattaaaaatgtggcaatg

SEQ ID NO: 60809 - DNA, 237 bp, Zea mays
  Clone ID: MRT4577_155456C.1
aggcgcaaccacacccgcgggtttgtgagatttatctgcccacccccataccattaattaccacataatacaagctctgtatgacatgcgatggtggaactaagaaaactacatttacgaaaaggaataacactggaaagttcgagaagacatatgaaccaaccatgggtgtgaaaaatcatacttcgaatttcaccactaactgcagtaagaccaagatctactgttggtatacct

SEQ ID NO: 60810 - DNA, 318 bp, Zea mays
  unsure (1)..(318): unsure at all n locations
  Clone ID: MRT4577_155457C.1
ataaaatcaacttcagtagcaaatttgtgaataccggnatacgtgatggtttaagttctttagtagtttgtaatgataagacttggtagtttcacattaatgctccagcagctgctaatccccttgtggagcccacatgctcctgagactgctggcacctggcaggctagtcttaggagcatgtgggctccacaaggagattagcagctgctggagcattaatgtgaaactcccaagtcttatatgataccacgactgccgtgcgcaagccctggcgtgtcccggctttcacaggactgcatctggtgtcggttctct

SEQ ID NO: 60811 - DNA, 264 bp, Zea mays
  Clone ID: MRT4577_155458C.1
gtgcttgggaacaacactttttttttttcatttaaattggtcattcaggggattggtgacactgacactgccacccatggggatgcgtgacacattattactcaatcatcgccgcttaaagacccaactagctagctagccagcggcttttctacaacaatgttgcccacttctcaggcagggggagccctacttcccgcaccaagcaattcttagcttggtaccccaacacattctgcaatagctaccagaaatgggccacct

SEQ ID NO: 60812 - DNA, 193 bp, Zea mays
  Clone ID: MRT4577_155459C.1
acactcacacgggcgggggagcgacccgctccatacataatacttgccttcttagagaggacagaccggcgggggacctaacttgtgaatccgccctcagccactagtaacacttgttgctatccctccggaactgcggacttgatcaaacactcattgtatgctctactagcgaattgagtgccgaattgat

SEQ ID NO: 60813 - DNA, 460 bp, Zea mays
  Clone ID: MRT4577_15545C.1
gggtacctcgaggccggccgggagtatctgatgctgataagtatcttgacatacataaaaccggcgccggtagaactgggtcgatggccatgatcaacgtggccaagctcctcaacaggccatgtggtgaaggcactgaacgagaagggtaccattcttcggccaaggacggctgacgatcctatagacgcctccgacgataaaaggcttcagagtcctccgatagaactcggaacgaacactaccccgggcactgcatgggacaccatctctaacgaggatctgagttaactgacttgtgagtcctctggtggaatcctgatatagctactactacatgggtgacgaaagcaattacactcaccaataatctgcaacatcaggttctatactctagttatgctatgggacgtgtcaatctatacaagctgctgaggctggtcgagcgagaccacaatca

SEQ ID NO: 60814 - DNA, 1811 bp, Zea mays
  Clone ID: MRT4577_155460C.1
cactcctaagggcgattgggtacctcgaggccggccgggaaagaaacccgtctcgcaccacaagcgagcgagggacccgggggcggaagaagagagagaagacgtctctctcctctcggcgtccccgttccccaacctctcgtctgctgcctgcctgcctgcctgcctgcaaaaaggagtttgtcatggcgtctaagcgcatcctcaaggagctgaaggacctgcagaaggacccccccacatcatgcagtgcaggtcctgctggtgaggacatgtttcattggcaagcaacaattatgggaccacctgacagtccctatgctggtggtgttttttttagtgaacattcatttcccgccagattaccccttcaaacctccaaaggtttctttcaagacaaaggtcttccatcctaatatcaacagcaatggaagtatatgccttgacattctcaaagagcagtggagccctgctttgacaatttctaaggtcctgctctccatctgctccctgctgaccgaccccaacccggacgaccctcttgtcccggagattgcccacatgtacaagacggaccggccgaagtacgagtcgacggcccgcagctggacgcagaagtacgcgatgggctgacgaacgctttcctgctcgtccacccgactggcgtctcaagaaagtcgttcctgggcgccattgttcccttggatttgttgttggtcgtcgtgtgtatccctgatccatctaggatcatcgtattgtattgtagtgtatgtatatcgtcggcctaccatcgttgccattcaccatagtgaggtggttggacatgcttcgcctatatgcacctgtgcttgccgtccttcgggtcggtgctctttggttaatgttcaaccacctcactatggtgaatggcaacgatggtaggccgacgatatacatacactacaatacaatacgatgatcctagatggatcagggatacacacgacgaccaacaacaaatccaagggaacaatggcgcccaggaacgactttcttgagacgccagtcgggtggacgagcaggaaagcgttcgtcagcccatcgcgtacttctgcgtccagctgcgggccgtcgactcgtacttcggccggtccgtcttgtacatgtgggcaatctccgggacaaagagggtcgtccgggttggagtcggtcagcagggagcagatggagagcaggaccttagaaatggtcagagcagggctccactgctctttgagaatgtcaaggcatatacttccattgctgttgatattaggatggaagacctttgtcttgaaagaaacctttggaggtttgaaggggtaatctggcgggaaatgaatgttcactaagaaaacaccgccagcatagggactgtcaggtggtcccataattgttgcttgccaatgaaacatgtcctcaccagcaggacctgcactgcatgatgtgggggggtctttctgcaggtccttcagctccttgaggatgcgcttagacgccatgacaaactccaaatccgaccccaacagccgacaagctccaccgtgaaatcgcaagctacaagccgcgacaccgccgccgcgcgccttcaaggcgaactaaaccaccagatctacccgagacagccgcacgcaccaaccgaagcgaagaaggggagacacacacgctaaaatactcgacggaaaacacacgaggcgatggggacggatccggatcggtaggggccggggttcacccgcgccgatctggccggagcggaggccgggaaaaattcacccagaaaatcacgcttt

SEQ ID NO: 60815 - DNA, 258 bp, Zea mays
  Clone ID: MRT4577_155461C.1
agggaaaaggctttagtccttagaggcatctagaagaacaattcaggtcccaaaacgggattgataacgggaagtttccccgattttccggttttttatttaccggtcaaacttttgagccatttgtccaaatcctggaaaccccgcagggagcccagaaggcaacccacccagaaactccgaggggttgacccccacactgcttctatttcaatttttcaaactaacaggggtccccgccggaaacacaatttcacc

SEQ ID NO: 60816 - DNA, 835 bp, Zea mays
  unsure (1)..(835): unsure at all n locations
  Clone ID: MRT4577_155462C.1
ccctccgaggtctcggccgggngctcgccgcaacgaattcccagtctccagccaaccaccgcagacaagatcctctcttccgcgtccccaaaccctcgtgctgtacaggcggattgctgaagtaaaagagaaggaacggagaaggactttggaggagatactctatgctctggttgttcagaagttcgttgaagctggtgtctctctggttccagcactctcacgctccaccgatccttctggaagagttgatcagtgggcagaaactgtggaagaaaatcttcaacgtctgcactcgcacgaggcctatgaaatgatcgagaatcacctcaccctcattctggggcagcgtcaaggtgacgccactatcgcagccataagtaagctccgtgttggccaggtctatgctgcatctgtgatgtacggttatttcctgaagagagttgaccagaggttccagctcgagaggacaatgaagggcctcccttggggatcagaagaggaagacagcgctttgaatcaagttatgatgaccgacttgatgccttcagctcagacttctagctctcatccagagatgggctcgtggaccgcgcctgccttcagcacaggagggcccagccaatctatcaagccttgccgccttaggtcgtatgtcatgtcgtttgattccgatacgctccagaggtatgcgacagtcaggtcaaaggaggccctcggcatcattgagagcacacgggagcgctatttgggagccagagatgtgatccacctgaagcacccttgatctttcaggatgagcatataggatagctttgctggctgaaaagctgat

SEQ ID NO: 60817 - DNA, 230 bp, Zea mays
  Clone ID: MRT4577_155463C.1
ccacccgtccacacaacggaaaagatcctcaaaccctagctttcgactttaggcgaaccctcgcgtattgttctacagtgaccgttgctgcgccccggcagacccaatcgcgatggagctgtacgccaacgtggttcccaagaccgttgagaacttccacgcgctgtgcacgctctagaatggcgttggcaagttctggaagccgctccactacaagggctccacctttc

SEQ ID NO: 60818 - DNA, 1609 bp, Zea mays
  Clone ID: MRT4577_155464C.1
ggccgcaaattttttttttttttttttcccacatctttactacacatcgggagttctgtacaaaataaataaataattacattataaggagacaacggtccagcaacccaaagttgactgggagacgacgacctagatctctcacgaactcatcgcagcatcctccatgcgcctcatcctgcggtacctgttcttgacctgggacttgagattccaggtaccaggatgatcttcaggtgactcgtgacctcacgctctaggtctactaggaggcgaagcagtgtggtcagggcatcctggtccccctcggagtctctgccaccgtcctcgtcgatcgcgcctctcaggatggaatcgccggcggggcagctactctcgcaaatcctgcacacgcacccgcacttgctgtctgccgctgccgagcagcagctcgagcagctccagaccgaccgcgaggccgacaaggagaaggataaggagagcgatgctggcgacaagctggctccgacaggtggcgacctcgtgctgtacaggcggattgctgaagtaaaagagaaggaacggagaaggactttggaggagatactctatgctctggttgttcagaagttcgttgaagctggtgtctctctggttccagcactctcacgctccaccgatccttctggaagagttgatcagtgggcagaaactgtggaagaaaagcttcaacgtctgcactcgcatgaggcctatgaaatgatcgagaatcacctcaccctcattctggggcagcgtcaaggtgacgccactatcgcagccataagtaagctccgtgttggccaggtctatgctgcatctgtgatgtacggttatttcctgaagagagttgaccagaggttccagctcgagaagacaatgaagggcctcccttgggggtcagaagaggaagacagcgctttgaatcaagttatgatgaccgacttgatgccttcagctcagacttctagctctcatccagagatgggctcgtggaccgcgcctgccttcagcacaggagggcccagccaatctatcaagccttgccgccttaggtcgtatgtcatgtcgtttgattccgatacgctccagaggtatgcgacagtcaggtcaaaggaggccttcggcatcattgagaagcacacggaagcgctatttgggaagccagagattgtgatcacacctgaaggcacccttgattcttccaaggatgagcatattaggataagctttgctgggctgagaaggctgatcctggaggctgttaccttcggatcgttcctctgggacgttgagagctttgtggattcccggtaccatttcgtgaccagctaagatggtcatcctaagtgaagaacgattcatggtttacggatcttgtctcacaatgtctatgggcttcggaaaggctgttgtacaatgatgttagactgttaccactccccttaggccatgtttttcaccgttaatatatgtgaattggatggtattgagttgatttaaattcatagcaagtcaaaatacatctcaatccattccaatatttgtttaatccacataaaattgaaataaccgaacaagaacttagtgt

SEQ ID NO: 60819 - DNA, 2685 bp, Zea mays
  Clone ID: MRT4577_155465C.1
aaacctgaccaaccttaatttgctggctctaccaaataatagatttggtggaccaataccccttcttgacaggctccaaaacctaaattacctatccctggacaacaactccttaaatggtgtgattcctgaatcacttgcaaactgcttcaacttaaacaaactaggtctctctaataataacctcaccggtgttatccctcctaacataggttctcttaccaagctacaagttcttctccttcatagaaataagctttccggggtcatcccatcaagcctcagcaacatcacaaatttaattgcaatatctctttcagaaaatcaattgaacggatccattcccattgaattatggcaaatgccacagctaacgtctttgtaccttcatgataattatctattcggtgaaatcccacaaactctctctaatgtatcttctcttcatatgctatccttggcgtacaatatgttgagcaacactttgccatctaacttcggccatgccctccataatctaaaatggttgtacttggaaggcaacttgtttgaaggacatattccagattccctaggcaatgtttcaggtctattacatttggatatatcttctaatcatttcactggcaaaatccctagcatatttggaaaactttcagggctgtcttttctaaacctcgaggaaaatatgtttgaagcgagtgatagtacaggctgggaattctttgctgacctagcaacatgtagttacctgtcggagttttcattggctagcaataatctgcagggtgctataccaaattccatcgctaacatgtccaccaacctcaaaaggcttctgatgagtgataaccacctatccggaatagtcccctcaagcattggaaaatttaatcgccgcaacgaattcccagtctccagccaaccaccgcagacaagatcctctattccgcgtccccaaaccctcgagttcgcacgggctccggccagattcgcgcagtctaagcttcgaatcggcgcatggaggcggcagcagtagccgcggcgctcaggtcgcctaccgccaccaccgccgccgccgccgctggccccacgtggcggcccgctgccccgggcgccgcctcgctcgcctttgaccggagacgcagcttcgccttcggctccgtcaagggtctcgggcggcagcagcagctcacctctaggtctactaggaggcgaagcagtgtggtcagggcatcctggtccccctcggagtctctgccaccgtcctcgtcgatcgcgcctctcaggatggaatcgccggcggggcagctactctcgcaaatcctgcacacgcacccgcacttgctgtctgccgctgccgagcagcagctcgagcagctccagaccgaccgcgaggccgacaaggagaaggataaggagagcgatgctggcgacaagctggctccgacaggtggcgacctcgtgctgtacaggcggattgctgaagtaaaagagaaggaacggagaaggactttggaggagatactctatgctctggttgttcagaagttcgttgaagctggtgtctctctggttccagcactctcacgctccaccgatccttctggaagagttgatcagtgggcagaaactgtggaagaaaagcttcaacgtctgcactcgcatgaggcctatgaaatgatcgagaatcacctcaccctcatcctggggcagcgtcaaggtgacgccactatcgcagccataagtaagctccgtgttggccaggtctatgctgcatctgtgatgtacggttatttcctgaagagagttgaccagaggttccagctcgagaagacaatgaagggcctcccttggggatcagaagaggaagacagcgctttgaatcaagttatgatgaccgacttgatgccttcagctcagacttctagctctcatccagagatgggctcgtggaccgcgcctgccttcagcacaggagggcccagccaatctatcaagccttgccgccttaggtcgtatgtcatgtcgtttgattccgatacgctccagaggtatgcgacagtcaggtcaaaggaggccttcggcatcattgagaagcacacggaagcgctatttgggaagccagagattgtgatcacaccagaaggcacccttgattcttccaaggatgagcatattaggataagctttgctgggctgagaaggctgatcctggaggctgttaccttcggatcgttcctctgggacgttgagagatttgtggattcccggtaccatttcgtgaccagctaagatggtcatcctaagtgaagaacgattcatggtttacggatcttgtctcacaatgtctatgggcttcggaaaggctgttgtacaatgatgttagactgttaccactccccttaggccttgttcgtttcaccgttaatctaagtgaattggatggtattgagttggtttaaatttatagcaagtcaaaatacataccaatccattccaatacatttttaatcctcatagaattggatggtattgagttactgtatacggtggtatcaatggtttgcccagttttattgcatcacagtattgtaaagacaaaatgtcattagcctgatactcagacgataggttttagtaaaaaaaaaaaaaaaaaaaaaaaaaaaaagggggccgctcgcg

SEQ ID NO: 60820 - DNA, 151 bp, Zea mays
  Clone ID: MRT4577_155466C.1
cttagttttatgttgcctcactcgctacaatcatatcaaaggcctttctgacaagccattggcccattactcttgcgattcaactttcttgaattatctcgccgataaacatctgatgggaaggctatttgaatccaccacacctttcaca

SEQ ID NO: 60821 - DNA, 435 bp, Zea mays
  Clone ID: MRT4577_155467C.1
cattcgttcgttttcatcggagttgcacattcatgtgagttgtctatatgtgtttggaaacacaatagccctgggggctggaccggggaccctttctttggtttaacttggaaatcaaaaaccccagtcgaagttacaaatttgtggggaacccttcggttaaatggtggcttccttaaaaaaaaaataggggcttttttaagaagggctttaaaaaaagggcacccaaaatttgctgaactaaacagccttcctttactttaatgaggggtttttttcatttcctaaattattactttttacataaagcctttcccttcacctgggggcaaaaggggccacctcttaggttttaaatccaagggccacttcctttacacggagttgtttccctttgatgcacctttggcaaacacaccgtgtgccaccaccggt

SEQ ID NO: 60822 - DNA, 222 bp, Zea mays
  Clone ID: MRT4577_155468C.1
gacatcaagcggccgatggattcattaaaaccaaaactttattatgaccatgcatatattattgggcatgcggcgcgggaaaatgggggtcgtcttactgcattattacatatatagatggagagagatggattgaggggatttcccaaatttcatgaatcactactagggcggaatggccgcggacaccccacaggggttggggcggtggctgggcagctg

SEQ ID NO: 60823 - DNA, 282 bp, Zea mays
  Clone ID: MRT4577_155469C.1
cccactcgttcgaaaaaaaacataatatttatacaaaaaatactaaaataccaaatactagatgcgatccaatctaatgcggagcttgatgatcgcataactaaaactactatataccttccactacctctatgctaaaccagtaattccatcatataaagggctcctcatcacatctgggctccattttccatacgatcctcataatagcctgtccaccctattaccatgcccacttctcttatcttttcccctgtcttcaaaccatttgaacctcaaaat

SEQ ID NO: 60824 - DNA, 204 bp, Zea mays
  Clone ID: MRT4577_15546C.1
tcttcctcttactcttttatgcattctttaatgcttgatatcaggctagtacttttcctgaaaagtccttaaccgcgcgaacatgggttaatgtctaacctggatagattacctcattactacaatatccatcaagatgaaatccacaccaaacttttccaattattttaaaaaaggttccttccaattcttaaaaatttaccc

SEQ ID NO: 60825 - DNA, 695 bp, Zea mays
  Clone ID: MRT4577_155470C.1
gatgcagctgaaacccctcccccctcagtccctcatccgccgtcggctgccctccccaccccacgagacggcggcggcggcggcggcgaccgagcagcaccagatcctctcccccctcctcgttcattgtaggagcaaagcagtaaaaatgaatgcgcacctcagctttgaggatggctggaaggtcctggagcagggcattgtgacatgttcaaagattttggagggatccactggtacaaggcctactgttgctgagtacatgaattgctatgactgtgcttatagaatggctgtgcagacaaccagctattgtgaagagatgtacaatggttacaaggctacacttgcagaatctgttcgtgcactggtttgcccccatctgatgcaccagagagacggctaccttttgagacagcttgcgaaaatgtggtccaactattgtatcatggttaaatgtgtatctggcttcttcaactatttggaccgttgctttgttgagcaaagaaagctaccttgtcttgaagacactgctgccacttcttttttctctacagtcttttccttcttcagtcatgaagtatcagacgctctgctgacttcgattcgccaagagcgtgatggaatcaatgttgatatggacatcttgatgggcattatgcgtggcatatgtcgctctgaagtcaaatccttca

SEQ ID NO: 60826 - DNA, 863 bp, Zea mays
  Clone ID: MRT4577_155471C.1
ctcagcgttgtttgataggcaacaggagtatgtcaagcgacaaacgcgttttgtctcaagaaaaccagctaagactatagtagctacaattgaagttgttgccgagtcaatgagtctcaaggtccactcccagaattacaagctgcggcttgaaggtgcatcatggaacagaacgagccaatttgctgttgttctagaggtttttcaagttgccccttctctgttcatggttgatgttcgaaaggtcgccggtgacaccctggaataccacaggttttacaagaacctatgcagcagacttgacagcataatctggaggccaatcgaagtttctgcgaaatctaagctgctgaggacgaccacttgctagcccagcactgagctactgtaaatggcaaccaacaacaagagacgtggttcgtagccgttagaagagggggaaacttctgttaaatccagcgtatagctcgtggagctgggattcacgaggatttctgcatctcgctttctcaggtgatgcatgtaccatagctgtcttcgttagatcagacgaggcagctcaaagcaccaggtgtttgtatatatatattttttgtaacgctattgtagatagcctgtgtagctccagccgtgcagctgtatgtagcagaaacctgaatgtccgaaaacgcccctgaatgtcaggtagaatcgttgcttgcatccagttaacaagctggcctatgtggtcatgccaccatacagtagtacacatgcaccacaggatcagcaagaggatagagccgtagtagaatcatggaagcagatatgttgaacttttacaggttgcatctgaatttgatgaggttttaagttattatatt

SEQ ID NO: 60827 - DNA, 315 bp, Zea mays
  Clone ID: MRT4577_155472C.1
ggaaaacccactgttttattaaaaaaaaaaatcctaaaaaactttgtttaaaagttgggaagcagggttttaaaaacttttggacaggggaaaagagacttaatttatttttagctggaaaaaaataatgccaaaaaactgaagggaaaacataggatgttaattgagcaggggttattctaaaagggggccagtaataaaactgaccgtttttccctgaattcgaacttttctgcctggggtttttaactccaggtttagttttccactcgggggggatgtttgaaaccctataagtttgggtttccccagctt

SEQ ID NO: 60828 - DNA, 341 bp, Zea mays
  unsure (1)..(341): unsure at all n locations
  Clone ID: MRT4577_155473C.1
gcgcgcaaacgaacacangaaggacgactggtatgctctttgaaccattatgataggacacgggagaccgggcatagcctattaagctttgcgaacgacatgactacttgaaacaggcctacgggcaaaaagtccttcactgaccctaagtgaagcacgccgactggcatagtactactactacgtgctactgaggatttcacacaatgctggcaactcaagctgttggcgacatccatcagctgtaaaagatctttcagcgctagatgatgactcgaattacgtactataggaacacgaaacagagcctacattcctcacggacatcttcaagtgccatc

SEQ ID NO: 60829 - DNA, 268 bp, Zea mays
  Clone ID: MRT4577_155474C.1
acacaacaccatatagtgagtcgtagaaactctttttttttttttttttgaaaattagaatttttttaatttcaatatatcttatcataatatgttcaagccgtatcaacccacgggtatttacctagtaaatagataccttagaattggacaactcgcatgacaacatgaacatgtaaaagccaagttctgtctccagttatctgaaacagtgattcatcaccaactagtggtacatcaaagtgatagtagggcagcagcacgtgat

SEQ ID NO: 60830 - DNA, 434 bp, Zea mays
  Clone ID: MRT4577_155475C.1
gtcaggatcaacatcagtagcacatgagaatttagctacaaagacacgtgtgcgcgcatttcgtgcacacaccggaaactctgcatacatgctgctgctctagaaggatgtgcactactacgagctctggcaccacacactacaggtcctgcttttagtggctacaccaagaccatacgctgccattccaccctgttacggctttgctgtgccatctaccaccgcggacatcacagcacagacttctatgctagctctcacgcgatgtgcatcttgcttctgtttactaacctgagtttgcagctgatgtcttgacaagggtcttgaccaactatgcctgtgactactgtgatgatcttctgacgtctcgccgtgtgctcagctaccgcggcttaaatcacggatatgagaacgcctgtgatgccactgatgac

SEQ ID NO: 60831 - DNA, 366 bp, Zea mays
  Clone ID: MRT4577_155476C.1
aaagggaacagagcagttttgcaataattttcaccaactgggggaatcagcgagataaaagcgggaaaaagggaaaaaagaaggatgaaaaagatttttgccgagcagggcatggcatagggggctcgccgatggtaaaacaaccacgggctcactcacaggcacagcctgcctgcctgccgacgctttcactacaaaaatttaaccaccatccgacacgctggagggggcaaccgaccacactcctccagattttgagcccccctccttttccaccttcggctcgatggccttgaaaaggcccacaatctgcttcatggggggccttttggacgggagttccgcggggcacaggtaggcaatcct

SEQ ID NO: 60832 - DNA, 199 bp, Zea mays
  Clone ID: MRT4577_155477C.1
gcatcgtcaagccacgccttggagtcactcttcataaggttgtagtagcaggagccctctatcttttgttctctggcatggaaggggtcctcagagttactggggcccagattgatcttgcttccatggtctttatccccgtggctttcctagacactgccttgtgctggtggatatttattagcctgactcaaacaat

SEQ ID NO: 60833 - DNA, 286 bp, Zea mays
  Clone ID: MRT4577_155478C.1
cccacgcgtccgcccacgcgttcgcccacgcgtccgctgacgataaacatggagcggtaagtcgtcaaaaaaaaaaaaaagagaaaaaaaaaaaaaaaaaaaaaaaaaaaaaaaaaaaataaaaataaaaaaaaaaaaaaaaaataaataaaaatagaaaataaactaaacaccataaaaacaaaaaacttaatatgataaacaatggaacattcacattgaaccaaacagagaactgtgaattaaagtgctcgatataaaataattaatttggctaacaggtaca

SEQ ID NO: 60834 - DNA, 1953 bp, Zea mays
  Clone ID: MRT4577_155479C.1
gaaaagacccaaacaatgttcaagattatgttcagcgccatctattatcattgtcagtatgggaggagcttcgcttctgggatggctacttcgaatatttgatggaaaattgttcaaataagtcagcaaattatgtaacgttagttactgcacagctcattctcatggcaactcacatggctggattgggattacctgacattgactcttggaatatgattgagaaaatagccgagagaaacaacttgggttataaacagcttatcaaacttagagcattgctcacacatctgcaacaactccggattgggtattggggggttgctacagggaaaagccaaccattgcagtcatatggcatggcttcacctcatgcgatcgatgtgattgatgaaagccaacaacctgctgaagcatctgggttgggccgaagttgggtgcaaagtatgtttagcagagacagaagtttaagagccagctctttcaaccgagctagtgatggaaatgctgttgctgccacgggcaaaaccgaaatctcagctgcacaaaagaaaactcaaactaacatgaggacccttagagggcatacaggtgctattactgctcttcattgcgtaacaagaaaggaggtctgggatcttgttggtgatcgtgaagatgctggttttttcatcagcggaagcacagattgcacggtaaaaatttgggatccaagtttgcgtggttctgaacttcgagcaacacttaaagggcatactagggcaattcgaacaatcagttcagatcgtggcaaaatagtttctggagctgatgatcagtctgtcatagtatgggataagcagacttttaagcttttggaagaactgaagggccacgaggcaccagttagttctgtccggatgctctcaggagaacgtgtccttattgcatcccatgatggtactgtgaagatgtgggatgtccggactgatacttgtgttgttaccgtgggtcgttgccaaagtgctgttctctgtatggaatatgatgattccactgggattctggcggctgctggaagagatatcacggcacatgtctgggatattcgctccagcaagcagatgttcaagcttcaagggcatacaaagtggataagatcaatgaggatgaccggagagaccataataacaggtagtgatgattggactgctagagtgtggtcccttaaccggggaacatgtgatgcagtgttagcatgccatgctggtcccgtactatgtgtggaatactcaccttcagataaaggaattatcactggttcagctgatgggctcatacgattttgggaaaatgaaggaggaataaaatgcgtcaagaatcttacacttcacacagcatccgttctgtccattagtgccagtgatcactggctagcgattggtgctgctgataattctatgtctctttttcatcggccacaagaaagattcggtggcttctcaaatgcaggatcaaaagttgcaggatggcagctttacagaactccccaaaaaactgctgcagtggtgagatgtatagcatctgacctggataggaaaagaatatgtagtggtggtcgcaacggactcctgcggctttgggatgcaactacaagcatctaggactgatagatgttcatgtgaaaaggcaattgaccatgatgttgcatgccattttccttttagctaggaatttatgtgctatttagaggatgcgaaaggagccggactttgttctactgtttctttctcatctaaaaaaccctgcccagttgagtatatgtttgacgtcgtgtaaaattttgtttatattttcgggttcagatagccttacgtggctacgattttgtaagaactatgagaaacttgggaagttctgtactactaccagtgcaaatgtttgttttagtacaacattattttttatgtgcat

SEQ ID NO: 60835 - DNA, 323 bp, Zea mays
  Clone ID: MRT4577_15547C.1
ggaaggtacaaggcaccttcatttacaacactttgtccctaggcgggcatttgggaaagggtaaagttctttcattttaagctaaggaaatttgggaaatcgcagattgcccttgcacaaactccggaacataccatttggtacaggctctcaggcctttttttaaagtcccacagccaaggtttcgctggaatgttctgccagagaggatgttgtccattaccatatcaaatcctgggaggtcaataaatttgttggcgcataggaagaaacactttatgtggcctccggccaggcgaatcaattatttattattggaaaag

SEQ ID NO: 60836 - DNA, 272 bp, Zea mays
  Clone ID: MRT4577_155480C.1
gtacaaagactttgctactcgatgatgatctagaagtaccagggcacatgtgccgacatgggacgctccgtacgcctggacaaggtacctccaagtaggacacagtgctctagccccactatagaagaagctgtctaagcagaccatgtccgaagtgcgtaaaagttagggctacacccaggacacgccgctgggcaaattaaagctggggatcggggccccccggattgctgtcgcccttctcgctcagatttaccccaagaaggtcccgc

SEQ ID NO: 60837 - DNA, 255 bp, Zea mays
  Clone ID: MRT4577_155481C.1
gttctagatcgcgagcggctgccctttttttttttttttgacacaacccgggtccttaaattttagggggatatcattgccgattccccccgaaaatttgccggcaaaaaattttgggaaccagtccttgtagttgttaaaaaaaaaagccaaactttgcagcgttttgccgaaaacggcggcttcagtcgtcgaaggggctgagccccttttcctggccggacccctcttcgggccccgaggcttttttttttt

SEQ ID NO: 60838 - DNA, 910 bp, Zea mays
  Clone ID: MRT4577_155482C.1
atttctgaaaagcaaagaggaattcccctctctactttatcctcgtcaatcaaaaacaaaaggaccaataataatcccctcaccaaccctcgtctactcttcttcttttccagccccgcaatccatccgtcgcgcggcccaccgtcgccggcggcgcggaacaccgtcttctccccggcatcctccagggcggagcgctggagatccgactccgctcggttgcttctctcgtcggacataatggcggatatccagttaggatgttacactataaagtcccatggagccaaagtggcaagactccacatgtatgactggataatacttctcctccttgctgtcatagatggactgttgaatataatcgagccttttcaccgcttcattgggaaggacatgatgactgacttgagatatccattaaagggcaatactgtgcccttttgggctgttccgctcattggaattgtcttgccatgtgtcatctttggtggaatttacttcaagaagaagaatatctatgatttgcaccatggcatactgggtattctttattcggtgctcataactgcggtgattactgatgccattaaggatggagttggccgaccacgtcctgatttcttctggcgctgtttcccagatggaaaggatctctatgataatgtcactactggcgttctgtgccatggagagaagagtgtcatcaaagaaggtcacaagagcttcccaagtggacactcatcatggtctttcgccggcctaggcttccttacatggtacttgactgggaaaatcgcagtttttgaccgtaaaggtcatatttccaagctgtgcattattgttctgcctctacttactgctgcacttgttgctgtttctcgagtggatgactactggcatcactggc

SEQ ID NO: 60839 - DNA, 108 bp, Zea mays
  Clone ID: MRT4577_155483C.1
cccacacgtaccatcacaagttgagttttaacaaagatttgccagaattccggtcgggaattacaatcacttaccttgctactaattacataaatgaattattctaca

SEQ ID NO: 60840 - DNA, 854 bp, Zea mays
  unsure (1)..(854): unsure at all n locations
  Clone ID: MRT4577_155484C.1
gacttcctcagtgataaaaacattcgtttccaagtcggccacgcaaccgtctctccttctccacccgtccctttgagagtcgctccaggcaccccggcccgatctcgagcttcgtccgtcggcgatgccgatcgacgatggcttgggagaggcacccgggagatgcttgtatatactggtttagttcaggtcgtcttgtggtttggcgctatgccgttggggtttctaccgccggtgcttgcgagcagctgccggtggttgccgttcttgtcttcttcttcgtctccatggtggaggaagggaggaggcgctggatctggcgaaatccctctcaataagctcgcgggtctctcagatctggagctcaagctccttcttccttacttctcctcgagctgccatggaggtggattggaagaagaggaagaaaggggatttggctgctctatcctctctgcgtgtccttggagcccaagttctgcagcaaatggttggggatcttggtgcagagagcaccaggagtttcttgccactgcaccgctgtatctgctggtcgaaaggcgaccactcggagttctggcgacgacgtccggctcctgtatttcctcctggccgccgagccatatgggaggcagtttatctggttctttgtcctggtatttccatggtctacctccggttgtttgccggcggtgttgtagccattccttcaccccaagtggtttcgtccccggtggtggtgggatcgggccaggatcgaagacggcgaagaggactcgattgcttttcatttttgntgtctggggtcctatctgcaaaatgtccggcctgnggtgtaattttctctttctatt

SEQ ID NO: 60841 - DNA, 971 bp, Zea mays
  unsure (1)..(971): unsure at all n locations
  Clone ID: MRT4577_155485C.1
ccgggtcgacttagcgtccgatttctttttcatttttctttagttctcttctcatttgacactatataaatgatacgaaaaaattgtatttattaattttgaaagtaataaattcgaaatatcaataataattacattgcttgttttgttgttgtgtaattgttgtcggtaacgcgccacatagtataatatcgttgccaaaatatgttttgaaatggacaagcttgcaccgtaagccagtactcttcttcgagaagccatagcctagcttcccttgcacgacaagcgcatggcttctatctgaagcgtacttcctctataaataccaagtgagccttccatacttcactcaaccttgcctttacaaactccacaacaatgaatccctacttagaaaacaattttcttctgcgcttgatggaagaaatggaagaggaagaagaagagttgaagatggcgacgcacttgcatcttaggaggtgtcatgcacgcaatgagcgtcgtcacgatggttccattcctgggcgtgttcggattcatcatgatcacatgagcggcgatacaagaatccgagcggactactttggagcccaacccgtgtacacggatgctcaattccgtaggaggttccgcatgcgtcgccatgtgaaaggaaaatgtgcctttgggccatttctataaatattttggtgattagataaccaacacaaattactttggttcataagtgctaagtggttgaagatgcaaatcaaagaatcaaggtatgcccgtggccttagtaaactgtttttggatactaacatatttctctaagtgctagaaatcttgccaaatcaaaataaattggattgggagaagtttggcatgagttcagccaaacatgcaccagcctggggtgcaccggactgtncggtgcccaggctggccccggcgacgaactcttcgctctcggaaattcatcgagggcg

SEQ ID NO: 60842 - DNA, 443 bp, Zea mays
  Clone ID: MRT4577_155486C.1
ttttttttttttttttttttttttttttttttttttttttttttttttttttttttttttttttttttttttttttttttttggtggttttatttatttatgtttttgttctttctatcttgtttaagataacagaggagcaaataaaaagcccaaaaaaaggggggccaaattggccacaccccgtaagcggggggccggggaaggccccccggggggggaaaaaaaaaacccaaggtcaccccccggggggggcccctcctaaaaagcattaaacagaaactgatgaaacacacacccccaggaaaacaaaagcttgtaggttacaaaaggggccgaggggggtcctattaaaaaccacagggaccccccgaagcggaagccgagggggggaaaacaggaggggctttaacaccttccaggccaaaaatttgttgttacgg

SEQ ID NO: 60843 - DNA, 518 bp, Zea mays
  unsure (1)..(518): unsure at all n locations
  Clone ID: MRT4577_155487C.1
caccgatagggaaggctctcatgaagcagcttgacaccaaggtctgtccgtaagtgtgcccccaccactggtggagagaagaaacgctcaccgataccgccctggtaactgttgcactccgagtagatccgcacgtaccagaagagcactgaactgctgatcatgaagctgcccttccagaggctcattagggaaattgcacaggcacttcaagactgatctcgcgtttccagcagccatgcggtgcttgctctgcaggaggctgctgaagcataccttgctggcctgtttgaggacaccaacctgtgcgccatacatgctaagcgtgtgaccatcatgcccaatgacattcagctggcaaggaggatccgcggcgagagggcctaattaccacctcaaacanagcgacaaaaaaatgatacgctggggatattgataatctggtgccattgtaaggacatatgagtagggcttgttctgtggatcgcaagttattctattgctactgatgctgctac

SEQ ID NO: 60844 - DNA, 1494 bp, Zea mays
  Clone ID: MRT4577_155488C.1
gaagatatgcaataagcagaacagaacaggggcacactagctaagctaaacctcgccacggcacagcaatggcgccgctccccgcttccctcacgccctgcctctggctcttcctctgcctcctcgctgcgccgtgccccgcggcgcgggcggcgcggttcgcgtgcaacgccacggcgccgcgagcgtccacgtgccaggcgctcgtctcctacgcgccgcccaacgggacggccacgcccacgctggccgccgtgcgggcgctcttccagctccgctcccaccgcgcgctgctggccgccaacggcctcccgctctccacgccgcccacggcgcccgcgcccgtgccgctgcgggtccgcctgccctgcctctgctcggggggcgccggggccacgttccagcggcccacgtaccgggtccgcgccggggacacgctcgacgccgtcgcgcggggcgtcttcgcggggctcgtcacataccaggacatcgccgccgccaacaacgtctccgaccccaacagggtcgccgtcggccagcagctctggatccccgtgccctgcagctgcgaccccgtgggcggccagcccgttgtgcacttcacctacgtcgtgccggccgggggctccgtgtccggcatcgcggaggagttcggcaccacggaggagacgattctcacgctgaacaagatgcccgacgccaagtcccttctcgccggccaggttcttgacgtgccactccgagcttgtggttctgccattagcagcacagccattgaccgcaaccttctcgtgccaaatggaagctacatcctcaccgccaacaactgcgtcaagtgtggctgcagctctagcacctggcagttggactgccagccgacacagggactgagctcgtcgttctgccctgccgccaagtgcggagacatgttcctcggcaacacatcctcctccacctcatcctgcgagagcacagcatgctcctacgccgggtacaccaacagcacatcgttcgccatcctcgccaatgtgaccaccagcaacgtgtgtaacgctgggatgactccgacggcgcagccggctcactcttcggcgcttcggttggagccggtgtggctgagatggacggagctatttgccttgtctctcttgacgctgtcttgcttcgtctaggctatctgcggcaaagactgagcgctgttgccatgcgtctgtcgttagaatctggccctctgattcctagttggctagtttgatgttgtgagtaatatctgcagtgtttgcgcgacttcgatctgtagctggttggatttgtaagggcaaactctagggtaacactgatctgtgttagacggtagatcaggaaacatttgtacttcgtcaaacttttgcaaagatattttcttctgttatcaccataaaaaaaacctcgagagtaaaaaaaaaaaaaaaaaaaaaaaaaaaaaaaaaagggcggccgctcgcgatctagaac

SEQ ID NO: 60845 - DNA, 183 bp, Zea mays
  Clone ID: MRT4577_155489C.1
ggggtgcactcaaagctgagccatgagtagaacgttggaacccctgatcgcccgcaaggcgatcgagagagattgtcgacaacttcaacccctgggcgaacatgacgattacctacggctccaacatacatgtgttcttgcgtactatgaattctttcccgctgcgagctctgtgttaaccga

SEQ ID NO: 60846 - DNA, 424 bp, Zea mays
  Clone ID: MRT4577_15548C.1
cttcaagtcggatgattgctggtcgttctagctaaccgactagggtgattcttcaagtcggatgattgctggtcgttctagctaaccgactagggtgatttggtccaaactgacttggacgacttgaaaacattgtatcaaactcagaagaggctaaaagacattttctggttatttttatacactaaaaaaagagggcctattttatcgtaaggtttgaatttcagaaagaaaacttggttagtggaatatctttaaatcgctggctagctgttctctaatggcgatataagctggctgtttcttttgcttcttacattttgtttttgttagtggaattgaagttgcgtaccaagaagctgttgcattgaaaaggcaagaggagcttattcgtgaggaggaggaggaggctgggcttcttgaa

SEQ ID NO: 60847 - DNA, 235 bp, Zea mays
  Clone ID: MRT4577_155490C.1
ttttgagatcaccatattattttaaggggggtgggggtttattttatatcgtgtactccaaaaacaaaaatgaaggggcgcaaaacactaagattaagcatggagaacggaaacgaactcatgatggttaacacatagcatcaaatgggcaaactgaaaaggggagaaatgatgcctggctgacaccggagaaaagaagactttcaggtgacgagcataggccataaagggatac

SEQ ID NO: 60848 - DNA, 401 bp, Zea mays
  Clone ID: MRT4577_155491C.1
cgttaaaactacactttgcgatgaggcatcccaccagacattctgagagagggagggtgccagccatcggtgttggaatacctccaccaatacccaccactctctgccagaatgatcaggatgacctagcttgctataccgcttaagcatagaaaggctgaatcctctactacacttgctatttacttgttcgggacacaactactatgggcagatgttacaatctgatcactatcactgatgaaactacctggcataaaaaccctttctagaagagagagacaacagctgtcacgcacatcagctagatatcttcatgctgataccattcgctgtgttcatcgttcttgcttttatggagttcttactgacagtgctcctcaatttatttccaaacatgc

SEQ ID NO: 60849 - DNA, 558 bp, Zea mays
  Clone ID: MRT4577_155492C.1
atggggctcttcactgtgacgaagaaggccaccacgcccttcgacggccagaagcccggcacctccggcctccgcaagaaggttactgtattccagcagccccattatctgcagaactttgtccaatcaacattcaatgcccttcctgtggatcaagtaagaggtgcaacaattgttgtctctggtgatggccgctatttctcaaaagatgctgttcagatcataacaaaaatggctgctgccaatggagtaagacgtgtttgggttggacaaaacagtctcatgtctactcctgctgtatctgctgtcatccgtgaaagagttggtgcagatgacttcgggatcaaatacaacatgggaaatggtgggcctgctcctgaatctgttaccgacaagattttctctaatacaacgacaatctctgaatacctcatctctgaagacctaccagatgttgatatttctgttgtcggtgtcaccagcttcagtggacccgaaggcccctttgatgtggatgtttttgactctagtgtagattacataaagttaatgaagtaa

SEQ ID NO: 60850 - DNA, 833 bp, Zea mays
  Clone ID: MRT4577_155493C.1
ggtgaatgtgatggatgctggaatgcgctcaatctgtggcgaagaaacgctatggcactgggtctgaccacattcgagcgaaggatggcatctgggctgtgcttgcttggctttctattattgctttcaagaataaggacaaccttggaggagataagcttgtcagtgttgaagatattgtccgtcagcactgggctacatatggtcgccattattacacacgctatgactatgagaatgttgacgctggggctgctaaggagcttatggcaaacctagtaagcatgcagtcatcactttctgatgtcaacaagctgatcaaggagatccggtctgatgtttctgaagtagttgcagctgacgagtttgagtacaaggatcctgttgatggctctgtgtccaagcaccagggcatccggtacctcttcggagatggttcgcgactggtgttccgcctctctggaactggttctgttggtgccaccatccgtgtctatatcgagcagtacgagaaggattcctccaagatcggcagggattcacaggatgctcttgctccgctggttgatgttgcgctcaagctctccaagatgcaagagtacactggccgctctgcccccaccgttatcacataaatttttgaagagagattctttagaatgagctgaggcgcgtacacaaacttccattccggcctcttgttctatagtttttcttccttgttgcatctcaccgatgaataaaatgtatgtaccagactcgtctcgtttttttgcccatactgcagagtaagccgctggctcagcatgcggtaataatcttgtcagtgttgt

SEQ ID NO: 60851 - DNA, 315 bp, Zea mays
  Clone ID: MRT4577_155494C.1
attcccgcgagccgttccccttccctgttgagccgctcgatccgtctaccgcgctactgccataccctacggccactccgaccttacgtggagggtgattccttgccccacgggaatctcatggctgattagaagactgccggcaaagatccatcgaggaggcggcgattccatcccgaatcacgacatgcggcctaaacgaaggagctgaataggagcgcatcaccctagtcgttctagccgtcaccggctccgagagtatcgctgctccccctcagaacccccaaagccgatgttgcttggtagactgctaat

SEQ ID NO: 60852 - DNA, 2450 bp, Zea mays
  Clone ID: MRT4577_155495C.1
ggccgcccctttttttttttttttttcggacagccatcagaacattagtgacactgcgacagtgtatacaggtgagtaaaatgtttatatactcttcagaaagaaaaatcgatacgcaaatgctcaaacaaaccagaaacacttctaacaagaaaaacgctcccaattacagcactgtcactgtgacaagattattaccgcatgctgtgccagcggctcagtccgctgcactgcagtacatgggcaaaaaaaaaaacggggcgagtctgatacatacattttattcatcggtgagatgtaacatgcaagaaaaactatagaacaagaggccggaatgaaagtttgtgtaagcgcctcaactcattctaaaacactcttcaaaaatttatgtgatgacggtgggggcagagcgtccagtgtactcttgcatcttggagagcttgagcgcaacatcaaccagcggagcaagggcgtcctgtgaatccctgccggtcttagaggagtccctctcgtactgctcgatgtagacacggatggtggcaccaacagaaccggttccagagaggcggaacaccagtcgtgaaccatctccaaagaggtatcggatgccctggtgcttggacacagagccatcaacaggatccttgtactcaaactcgtcagctgcaactacttcagaaacatcagaccggatctccttgaccaacttgttaacatcagaaagtgatgactgcatgcttactaggtttgccataagctccttagcagcccctgcatcaacattctcatagtcatagcgtgtgtaataatggcgaccatatgtggcccaatgctgacggacaatatcttcaacagtgacaagcttatctcctccaaggttgtccttattcttgaaagcaataattgaaagccatgcaagcccagcccagatgccatccttctcacgaatgtggtcagacccagtgccaaagctttcttcaccgcagattgagcacattccagcatccatcaaattaccaaaaaacttccatccagtaggcacctcaaagaacttaaggttcaaattctttgcaacaacatcaagggcagcagatgttggcatgctcctggcaactcccttcaggccagaagcaaagtaaggaattgattgaacagcattggctgcgataatggcaacagagtccgacggtgtcacaaagaatcttttaccaagaatcatgttgcggtcagcatctccatcagctgcagcaccaaattcaggaggttcaacatttgaggatgactttccaagacccatgcgttcaaccaactcttttgcataggtaaggttaggatccggatgaccacctccaaagtcctcttttgggacacaattcaacagtgagctttcatcagcaccaagctcttccacaaagatgtgtttggcataagctccagcaacaccatggagcgcatcataacagaatgtaaactttggggaggtcagtagcttttttattgcttcgaagtcaaaaattgtcttcattaactttatgtaatttacactagagtcaaagacatccacatcaaaggggccttcgggtccactgaagctgtcaaagaaacagagaaaatacttggcaggttggcactgaatcatacatctggaaggtcttcagagatgaggtattcagagattgtcgttgtattagagaaaatcttgtcggtaacagattcaggggcaggcccaccatttcccatgttgtatttgataccaaagtcctccttaggaccacctgggttatggctcgctgtcaagatgaaggcaccagtagcctttgatccatctgcaccaactctttcacggatgacagcagatacagcaggagtagacatgagactgttttgcccaacccaaacacgtcttactccattggcagcagccatttttgttatgatctgaacagcatcttttgagaaatagcggccatcaccagagacaacaatggttgcaccttttacttggtctgcaggaagggcattgaatgttgactggacaaagttctgcagataatgaggctgctggaatacagtaaccttcttgcggaggccggaggtgccgggcttctggccttcgaagggggtggtggccttcttcgtcacagtgaagagccccatggttgcgcttgcgccgcggacgatccgccgccggtcgccgcaagaggcgacgacgagaggggtgaagcggaagaggcggtagtggtgcagggatcgggagtgagagggcagtgagggagtggtggtgtggtgacgagggcgacgagggcgtggcggtattatagcggggggagggcagggatagcacgagaggatggatcattccggtgttctccgctcctcagtcctcactatttccgtcaccttttcaaaattctggagtgatttcccggacgcgtgggcggacgcgtggg

SEQ ID NO: 60853 - DNA, 341 bp, Zea mays
  unsure (1)..(341): unsure at all n locations
  Clone ID: MRT4577_155496C.1
cacgtagcattctaccatccatcctancagctagcgtggcaaagttttttgttcaggcccacccaaccccttttcttcattccgcgatacataacaacactgtcacttgtccacagacttccgactacttctccatacacaaccaagacaccaacttcccttgacttaccaatcttaaaaaccacgtaactactctcatatacgaccctacattcgaaacatcccaccctctgacatcgttattacgttacccccctacgacattacttaccactaccttgtttgaaatacaaatgcaaactcatcttagtctactcccataccttactggccatatttgg

SEQ ID NO: 60854 - DNA, 196 bp, Zea mays
  Clone ID: MRT4577_155497C.1
gggggtttgcttgcccgtctctgtatctcacctgtggttactgatgctgtctgtgcatggtacttcgtacgcgtgtttcgtgatcgatgtgccgtgtacgtgcctctgcatggacattttcctactctgcgttttttctctctctcctgatctagtatatatgtggtgtgtctacaatcaagacaaaaacaaaaac

SEQ ID NO: 60855 - DNA, 375 bp, Zea mays
  Clone ID: MRT4577_155498C.1
tgtgaatttgagagcaaccatttggtgggacgcttccagctgacaatggtcaggacatagcaattgctggtgatctgaaccttgcatgatggagatcgcattgaactgcttttaactttcgctgcactatataccatcgtttggcttcatggtgtatgactttcaggcactggagtttctaatggtaatgatcaaggagctcctgctatctcatggttgtcatttcgacctctacaagtctacatcaccaaatcaaagcatgtttgtcggatctgccgtgcactgaacaaaagtcattcactgcgaacattaaccaaagatggatgtgccgtgcactgggaaaaaagagtcattcactgcgaacattaaccaaag

SEQ ID NO: 60856 - DNA, 164 bp, Zea mays
  unsure (1)..(164): unsure at all n locations
  Clone ID: MRT4577_155499C.1
tnatanttttttttagacaaatatattatatggtgacagttaaaagctaaccggtacccaaataaagttagagcaacaacaattcatacaaatatcaacacaaaactgcattattagaagttgaaatgaacatgtaccaaaccattacattaacatccaataat

SEQ ID NO: 60857 - DNA, 315 bp, Zea mays
  Clone ID: MRT4577_15549C.1
cctggagctggaccggaaggttgctgaccagcagagcacactggagaaggcaggggtagctggtaaatatgtgaccactaatcctcaggagctgacgctgcagatgaacttactggaactcatcaggaagctgcaacagaggggctgccaaatgggaaagccggctctgtgaccaagtgggcggtcctcgctgtcctctgttgcctaggacgctggcaccacagcctagtctgtgtgggggctactgactgtccggctgccaacaggcctgatctctctgaggagctgactagaccctggctatgccgctgccac

SEQ ID NO: 60858 - DNA, 730 bp, Zea mays
  Clone ID: MRT4577_1554C.1
cattgggtacctcgaggccggccgggcttcatctctgtctcatacgatgatggataagaggcgcaacgtcgtcgtcgtcgtcacgacacgtggtgcgccggttagctcaccaaaacagaagaataacggaggaggacaaccctgtgaggggcagcatgaggtcactggttgcctgtgggtgtgatatggatggttgggtcttgcactcgagctctaataagctgctgcgtgtgctagctttagaggaatgcacgccaccatctatggacatcggacatcttggaaaactgcttcatttgaggtaccttgggttacatggtactcgcatcaagacactcccagaggaaataggatccctcaagtttctgcaagcactggatttagaggacactaaaatatcacggcttccgcaggctgtttgcctgctaacacagctgatgtacctacgcggtgcaaccggggtcacaacagtgcctgatggtttcttggggcaggtgacgtcactagaggagctccatatatgtcttcccaccaaagatgacgagtacagccagaagaagttcatgcaggatctgggcaagcagggagaaatcaggatgctcgttttgtatgggaacagaattgagttggatccgtggatgcagtccagtctagtgcaatcactaggcggtctgtacaagctccagacccttgtggtgaggcattatgcagatggggtagcagcagcaca

SEQ ID NO: 60859 - DNA, 119 bp, Zea mays
  unsure (1)..(119): unsure at all n locations
  Clone ID: MRT4577_155500C.1
ataanantnctggggcaagcaaaatataaccttagggattttgggcctttaaaattaccaggaccccgttggggttaaaccttaagggttccccaggtaccaggattcccaaggccttt

SEQ ID NO: 60860 - DNA, 338 bp, Zea mays
  Clone ID: MRT4577_155501C.1
gatgtacaacatctagagctagctgaccttgctggctactcttagcaacagcagtgtcttcgattcaaccaactacgctgcacttgaactcgtggttccttattggcaacaacaacaactaccatttagccaactacctggatggtaccctcagcattattttgcattgaaccaactggaataattgaactctcctgattatttacagcagcaagaactactagcattcagccagctagcttgggcgggctctgctacctgcctgatacagccacgagaggtgccgatctaccagctctctgctactaacgctggcaccttcttacaactgcaacaat

SEQ ID NO: 60861 - DNA, 2864 bp, Zea mays
  Clone ID: MRT4577_155502C.1
cccacgcgtccgcccacgcgttcggagcagagcaggcagccgacgacttccccacgcggaggcgttgcttcccggtcgtccaaagcagggcatcccttccttctcctcacccagcagcagccggtcggcctcggctagatctcgccggccgcctccaattggtcctccgctgggcgcgaggggtacttatctctaggcccgtagatctgcgcctgcgccctcgttgtcgtgaaaatctccgccctcactatccgtctcttggatcgagcgatcctcccattcgcggcttcgccccacacgagtcgttccaaggagccgaaatttccagcccgcccggcaggggcaggcggtacggggattcgggctctgccctgcttttatcagcaactccactggccgctgaggttctgtaggagggcggtgcaccggtggggccaggggagcatgatgagggggcacacgtggctggcgcttctggtcgtggtggtgctcgcgttggcggacgcggcggcggggaggttcgtggtggagaagaacagcatccaggtgacgtcccccgacgagctcaagggcaagtacgagtgcgccatcggcaacttcggggtgccgcagtacgggggcaccctgcacggattggtcgagtacccaaagtccaaccggaaggcgtgccagagcttcgacatctcgttcaagcccaagcaggccgggggacgacccaccttcgtcctcgtcgaccgcggagaatgcttcttcacaaccaaggcatggaatgcacaaaacgctggagctgctgccgttcttgttgtggatgacaagtcggaacctctaatcacaatggacaacccagaagaaggcaaagagcacctagaaaacatcactattccctcagtgcttataacaaagaaattgggggaaaaccttaagaaatccgcggaaaatggcgatatgctcagcgttcttctggactggagagaatcccttccccatcccgatgagcgtgtagagtatgagttctggacaaacagtaatgatgaatgtggtcctaaatgtgatatgcaaatggacttcgtgaggagctttagaggaactgcacaaattcttgagaaaaagggttacactcagtttactcctcattatatcacatggtattgtccagaagcttttgttgatagcaagcaatgcaaatcacagtgcatcaatcatgggagatattgtgcaccagacccagatcaggattttagccaagggtatgatggaagaaatgttgtggttcaaaacctacatcagatttgtgtattcaagattgctaatgagactggaaagccatggctgtggtgggattatgtgcatgatttcgcacttaggtgtccaatgaaggataagaaatacaataatgactgtgcccatgatgttatcaaatcacttggattggacatcgagaatataaacaagtgtgttggagaccctgaagccgatgaggaaaatgaaattctaaaggcagaacaagatgcccaaattggtcatggtaaaaggggagatgtcacaatactaccaacccttgtcatcaacaacaagcaatatagaggtaagctggacaaagttgctgtcctgaaagcgatctgttcaggatttgaggagacaactgaacctgctatttgtttgagcgaagagattcaaacaaatgagtgtttggagaacaatgggggttgctggctggacaaagctaataatgttactgcatgcaaggataccttccgcgggcgtgtttgtgagtgccctattgtgagaggtgtaaaatttgttggtgatggatatacccattgtgaagcttccggtgttggtaggtgtgagatcagtaatggagggtgctggcaggaaactaaagatgggaaaacaatctctgcctgctcaaacgaaatatctgaaggttgtaaatgtccagtgggtttcaagggtgatggagaaaaaagttgtgaagacattgatgaatgccaagagaaactttattgtcagtgcaagggttgcagctgcaagaatacgtggggaagctatgaatgcagctgtggtgatgacaatatgctatacatgagagagcatgacacttgcatcagcaaagagggaactgccactactgttggctggagcttcctctgggttattttctttggacttgtttttgccggggttggagcatacgctgtgtacaaatacaggctgcggagttacatggattcagagatccgtgccatcatggctcagtacatgcctctggataaccaagaaggagcaaaccagcatcaggtcgtgcacgccaatgatatctgaagctgcactccttttctgaagcagaaatagagggggcgtgcaacatttcacttgtgctgctgcatcattgggtcatgggttttacaggtataggtcaactaggctcaaagatacacaggttatgcgagatcaagatctactgtaccatgaattaagatttaagagagagacgttgtgcgcctcttgttacgacacttgatgaacagcatagggaatgataccatcatagttttagtagtccttcgttgccttcagtttgtcttcaaagagttcttgttgcctcttcacatacatgtaaacactgtaaataccgttacctgaataaagcttcagcctgctaggctacaagcaggataccaatgttctgactctgaagcactggttttacatgtctctacgtgtatatgtgtatgtgatacatgacagattactttcgctgcttctgtccgacgctatcaatcagaattatttgtgtataaccctttgtcatattgatgccagatcgctcaaatacccacatggacgctacaattatgcta

SEQ ID NO: 60862 - DNA, 526 bp, Zea mays
  Clone ID: MRT4577_155503C.1
agccagctccgctaggcgcagcagacaggacgtcttcgcactcgcctatctccgcgtactaatagcttcttccatttcctaccgccgacgctgcaggtgcaccccattccgcagacaccatgggggagtgcatctcgtaccacatcgggcaagccggaattccggtcggaaacgcgtgctgggagctctactgcctcgagcatggcattcaggctgatggatagatgcccggtgacaagaccattggcggtggcgatgatgctttcaacaccttcttgagtgagactggggctgggaagcacgtccctgagtgctgactctgctgaccgtgaagcactggcatcgatgaggtgaggactggcacctaccgacagctgttgcaccctgagcagattatcagtggcaaggacgatgcatgctacaacttagcgcgtggtgcactacaccattgacacaggaagtgatgacccgtgccttgagcgcatcaggaagctcgccgacaactgcactggtcttcagggcttcc

SEQ ID NO: 60863 - DNA, 652 bp, Zea mays
  Clone ID: MRT4577_155504C.1
tgcaagtggtcgcatgcagaacttgatttgctagttgctactgtaataatatgatgcatttgttactgaaatcttcgccatcattccaccagagctacatggattcggagatccgtgccatcatggctcagtacatgcctctggataaccaagaaggagcaaaccagcatcaggtcgtgcacgccaatgatatctgaagcggcacgccttctctggagcagcatggaggcatttcacttgtgctgcatgtgttaagagagatacgttgtgcacttcttgttacgcacggcacttggatagcatagggggatgaagatgataccaccattagtagaccttcgtttccttcagcttctcttagaacttacgggttcttgctgcctcttcgcatacatgtgaatactgtaaataccgttgcctgaataaaagcttcagcctgcaaggctacaagcaatataccaatgttctgactctgaagcactggttttacatagtctctacgtgtatatgtgtatgtgatacatgacagattactttcaaaaaaaaaaaaaaaaaaaaaaaaaaaaaaaaaaaaaaaaaaaaaaaaaaaaaaaaaaaaaggcaaacaagtataaagaatcaaaatttaaatgcacatccttgcaagggggtc

SEQ ID NO: 60864 - DNA, 3462 bp, Zea mays
  Clone ID: MRT4577_155505C.1
gggtacctcgaggccggccgggagagcaggcagccgacgacttccccacgcggaggcgttgcttcccggtcgtccaacgcctggcatcccttccttctcctcacccagcagcagccggtcggcctcggctagatctcgccggccgcctccaattggttgtccactgtggccgggccgaggggtacttatctataggcccgcagatctgcgcctgcgcccgtgggaatctccgcacctcgctatccgtctcttggatagatcgatcttccgtcgctggttccccttcgccccacacgagtacttccaaggaactggaacttccagccggcacggggattcgagcttctgctctatcagcaactccactgggcgctgagggtctgtagcagagcggtgcgatcggggcagaagggagccatgatgagggggcaggcgtggctggcgctgctggtcgtggtggcgctggccttggcggacgcggcggcggggaggttcgtggtggagaagaacagcctcgaggtgacctcccccgacgagctcaagggcaagtacgagtgcgccatcggcaacttcggggtgccgcagtacgggggcaccctgcacggatgggtcgagtaccccaagtccaaccggaaggcgtgccagagcttcgaccagttcgacatctcgttcaagcccaagcaggctgggggacgacccatcttcgtcctcgtcgaccgcggagaatgtttcttcacaaccaaggcatggaatgcacaaaatgctggagctgctgcagttcttgttgtggatgacaagtcggaacctctaatcacaatggacaacccagaagaaggcaaagagcacctagaaaacatcactattccctcagtgcttataacaaagaaattgggggaaaaccttaagaaatccgcggaaaatggcgatatgctcagcgttcttctggactggagagaatcccttccccatcccgatgagcgtgtagagtatgagttctggacaaacagtaatgatgaatgtggtccaaaatgtgatatgcaaatggacttcgtgaggagctttagaggaactgcacaaattcttgagaaaaagggttacactcagtttactcctcattatatcacatggtattgtccagaagcttttgttgatagcaagcaatgcaaatcacagtgcatcaatcatgggagatattgtgcaccagacccagatcaggattttagccaagggtatgatggaagaaatgttgtggttcaaaacctacatcagatttgtgtattcaagattgctaatgagactggaaagccatggctgtggtgggattatgtgcatgatttcgcacttaggtgtccaatgaaggataagaaatacaataatgactgtgcccatgatgttatcaaatcacttggattggacatcgagaatataaacaagtgtgttggagaccctgaagccgatgtggaaaatgaaattctaaaggcagaacaagatgcccaaattggtcatggtaaaaggggagatgtcacaatactaccaacccttgtcatcaacaacaagcaatatagaggtaagctggacaaagttgctgtcctgaaagcgatctgttcaggatttgaggagacaactgaacctgctatttgtttgagcgaagagattcaaacaaatgagtgtttggagaacaatgggggttgctggctggacaaagctaataatgttactgcatgcaaggataccttccgcgggcgtgtttgtgagtgccctattgtgagaggtgtaaaatttgttggtgatggatatacccattgtgaagcttccggtattggtagatgtgagatcaacaatggagggtgctggcaggaaactaaagatgggaaaacaatctctgcctgctcaaacgaaatatctgaaggttgtaaatgtccaatgggtttcaagggtgatggagaaaaaagttgtgaagacattgatgaatgccaagagaaactttattgtcagtgcaagggttgcagctgcaagaatacgtggggaagctatgaatgcagctgtggtgatgacaatatgctatacatgagagagcatgacacttgcatcagcaaagagggaactgccactactgttggctggagcttcctctgggttattttctttggacttgtttttgccggggttggagcatacgctgtgtacaaatacaggctgcggagttacatggattcagagatccgtgccatcatggctcagtacatgcctctggataaccaagaaggagcaaaccagcatcaggtcgtgcacgccaatgatatctgaagctgcactccttttctgaagcagaaatagagggggcgtgcaacatttcacttgtgctgctgcatcattgggtcatgggttttacaggtataggtcaactaggctcaaagatacacaggttatgcgagatcaagatctactgtaccatgaattaagatttaagagagagacgttgtgcgcctcttgttacgacacggcacttggatagcatagggggatgaagatgataccaccattagtagaccttcgtttccttcagcttctcttagaacttacgggttcttgctgcctcttcgcatacatgtgaatactgtaaataccgttgcctgaataaaagcttcagcctgctaggctacaagcagggttcactgtacgtgtccgtacatgtgatttaaaaaaaaaaaaaaaaaaaaaaaaaaaaaacaagagaaactttattgtcagtgcaagggttgcagctgcaagaatacgtggggaagctatgaatgcagctgtggtgatgacaatatgctatacatgagagagcatgacacttgcatcagcaaagagggaactgccactactgttggctggagcttcctctgggttattttctttggacttgtttttgccggggttggagcatacgctgtgtacaaatacaggctgcggagttacatggattcagagatccgtgccatcatggctcagtacatgcctctggataaccaagaaggagcaaaccagcatcaggtcgtgcacgccaatgatatctgaagctgcactccttttctgaagcagaaatagagggggcgtgcaacatttcacttgtgctgctgcatcattgggtcatgggttttacaggtataggtcaactaggctcaaagatacacaggttatgcgagatcaagatctactgtaccatgaattaagatttaagagagagacgttgtgcgcctcttgttacgacacttgatgaacagcatagggaatgataccatcatagttttagtagtccttcgttgccttcagtttgtcttcaaagagttcttgttgcctcttcacatgcatgtaaacactgtaaataccgttacctgaataaagcttcagcctgctaggctacaagcagggttcactgtacgtgtccgtacatgtgatttattacagatttctttc

SEQ ID NO: 60865 - DNA, 308 bp, Zea mays
  Clone ID: MRT4577_155506C.1
accgacagtctttaaggcacacggcgggggaaaaacagcggaggtacttatgaggaaagacacgaagacctcagctgcggaagctggtggcgcaactgaccaatgggcacagatagaaacagcagaataccacaagcagaacaaggaacacaacgagcagacagctgcaacagaccaaaccagcaccggtggaccaaatgcgaactgtccaacaacaaaaaagagacgcacccgacgaccccgaagagcacatatcagaagacccagcaggaaacattgcgccagcaaagcgcgccgacaaaaacaag

SEQ ID NO: 60866 - DNA, 435 bp, Zea mays
  unsure (1)..(435): unsure at all n locations
  Clone ID: MRT4577_155507C.1
cctctgaacctcccttcagttgagggtttataaacttgtgtatgttccttgtttttttccaaagaccaaaccaatagtgtgtcaccctccaaccgacaaaagctgggagggatccaacgggggtgtcactctcacatttgcacagaaccgacaaccgaggcggcggcctcacatgagcacaaacttggggatggggccctgggngngcaactacttaaacggcgttcagacgcggaggtagaactgctgccccaagaactgcctgtccgagaatgggaccgaacgttccacatgcccacgttggccacggacatgtaaatagacctccacgacctggggtccacctgaccagtgtaccgcgaaacgccttccataagcgctgagtcctgcgtggttgacaacgaccatttccctccttgcatccccacgacccag

SEQ ID NO: 60867 - DNA, 324 bp, Zea mays
  unsure (1)..(324): unsure at all n locations
  Clone ID: MRT4577_155508C.1
aaaaaaaaagaatttttttaaggggggtttgttttgtacaagatttttaaaaaataaaagggtttagggttgttttggttaatgagggtggggggtaacacttcccaaattgggtcaaatggcttcaattccaaaatttccctaaaaaatttttccctttgcttttgtcttnaccttncaaattccaaccaaagttttaaaaggcacatttttgtagaacgaaggagattaacgttattgggcaagtgggggggaagttttttccacgtttttttttgcccccggggggaagctcaggctccccccgggccccaaagaagggaa

SEQ ID NO: 60868 - DNA, 804 bp, Zea mays
  Clone ID: MRT4577_155509C.1
attcctctccgatcaattcaagtagtatcttttctcaagcgtagctccatcggtgcatgcttcactagtgtgtgtgtgcgtactagcctagagagcccgagcgtaccatcactttgctctttcaccagtcatctatcagtatactcgagtgctagcgagtagttctgggctaacaatgaaggggctcatgtagcgcgtcatggcggtgtagatggctcacaggtcgaccgtgggcggtgggtgttggtagagtttggtgtgcttgcggcggcgcgacgactgttggtgtgtttgcacgatggctgttagagcatgccccggcgtctccgagagcgtgaggaataggaagcgggtggttgcgccattatgtagggcagcctcctgctgtagcgcaaggaactaactcgccgaactccggcgggatcggggcagagagcagctccgtgtagatggccagcgtatcgaggttctcgagtcgcccggagggggccaaagatacaggtctccgtgaggccgagcatggtgagattggagcaattgccgatctcctactcgtgggttcggccactccggtggaggatgccatgcacccgacaagcacattgcgcacgtagcagaacgtggggcaggccaatggaggcgttgtcgcgtgatccagagcatgtacgagtgcagctagaacttcaaggtcgtcatgccgccgcggccgatcagcaaggaaatccacagcggcaccgcaagcgcgcgctccatgccatgggagcggctttttggcgcagccgccgctagcatgggtccggatag

SEQ ID NO: 60869 - DNA, 312 bp, Zea mays
  Clone ID: MRT4577_15550C.1
atacgaaaccgtttttttttcattagaacgaatgggttgaccgacaattttaccgatggatgcctacaggcacaccagatgcacccacactacagactacgataattcggggccacattccacacaggtagaggtcctgagcaaaagcgtggactgctcccacatctacagagccacgaacgggggaccaaaaaccacctaacgcgaccttgacctagaggggcctaggctactttaactcaggcgggggcagatacacgtacccaacggagaaaacgccgtgcccgcacaccgtcaagaacttgtccacgt

SEQ ID NO: 60870 - DNA, 188 bp, Zea mays
  Clone ID: MRT4577_155510C.1
tgaacccgcggcgacagaaacaaacgggcggtcgctcggtgtccgttcattgtcttcgccggggccgagggaccctgagagggcaggcgggcgagcatggcggtcggtggcgctgaggacgtgttcggtgaggaccgtgctaccgtggagcagctgattccgccgtgtgcctttttcgtcgggggggg

SEQ ID NO: 60871 - DNA, 150 bp, Zea mays
  Clone ID: MRT4577_155511C.1
aaacagtttcacaggactgtgcagacataaaagcactgatccgccgtttagtagggctccacagggcacggaattggcacctggtagacagcaatagcgccagctttcttcaatcctaagagctggtgatttggcaagacgctctgatct

SEQ ID NO: 60872 - DNA, 305 bp, Zea mays
  unsure (1)..(305): unsure at all n locations
  Clone ID: MRT4577_155512C.1
catgcacgcgcgcgtacgctagcttgctttctagcgatcgcccccccctnttttttatcatttttttattttacaccccggggggggaacaaaacaacgaacgcatcttccccaaccaaacgtccggagaaaactctacatatccctccggttttgaaaaaaaaacaaggtttaaatcgaccaaacaaacgttgcgagcttaagttcagaccatggccgtaacaagacgagatattttatgtttccactaacgaccccttaatcaaacaccgggaccgcgcgacacaacattttttttttgcgga

SEQ ID NO: 60873 - DNA, 1275 bp, Zea mays
  Clone ID: MRT4577_155513C.1
caattcgggacgtggtatttttcgacagcgcgcggacaccgggaagagagaggagccgcccgccgccgcctcaggctcagtccagacccctcgtctcactcgctccgccgctggcgattggtgaagagagctccgaggtcggctctactcgtcgcggttctcgcgaggtccgccgatccgcgccccgctctggatctctggctgatttgttgttctgcaagggtgtggtatggcacgaaacttgactgagaacaggaccagaaatacactaattgtgattgtggtttttggcctctgttccttcttctatctcttgggtgcttggcagaaaagtggttctggaggaggagacagaatacagaattgggtcaatgagcagaccaaatgtgcacaacttccaaatctgagttttgagacccatcatagtgcatccaaccttccaaatgatactggtagttccaaaatcgaacctttcaaaccatgtgatgagcagtacactgattacactccttgtgaggagcaaaagcgtgcgatgaccttccctagagataacatgatctatcgggagaggcattgtccaccggataaggagaagctttattgcctgatcccagcaccaaagggttatgttgctccttttcgatggccaaagggccgtgattttgttccttatgccaatgtaccacacaagagccttactgttgagaaggctatccagaactgggtgcactatgagggcaatgttttcaggtttcctggtggtggaacacagtttcctcagggtgcagataaatatatagagcagcttgcttctgtcatcccgatagctgaagggaaagtgagaactgcactggatactggttgtggggttgcgagtttgggtgcttacctgttgaataaaaatgttttgaccatgtcatttgcgccacgggataatcatgaggcacaagtacagtttgcattggagagaggtgtccctgcatatattggtgtcctcggatcaataaagctgccatttccatctcgtgtttttgacatggcccattgctcgagatgtttaattccatggagtggaaatgatggtatgtacatgatggaagttgacagagtactaaggcctggtggattttgggtgctatcaggcccacccattggctggaagattcactataaagggtggcaacgttcaaaggaagatcttcggaatgagcaaagaaaaaaaaaaaaaaaaaaaaaacaagtactctgcgttgttaccactgcttaagggcatga

SEQ ID NO: 60874 - DNA, 465 bp, Zea mays
  Clone ID: MRT4577_155514C.1
atggagggtaggggcatgagcataataaaggatggagctaaagcaaagattgtaaccgacaagggagagaatgcaaccaaggttaggataggtaaaacaccattctcaaatcgagatggaaaagatgatatttcaaaaggtaggcataagataacatcatggaaagatctagagattacaaaggtaagggaggtgaaaggcaaaaacacaccaaaagatagagttaggacaagacttgcaacgcgacagaggaaaaagggaataaacaagagcgggataggcaagacatcactcttgaaatggaatgggagaggaggctttaaaatgcaggtgcaatataagcatcatggtaaagatcaagggatgacaagggttaaggtgataacagacaaacacaaccaaggatgtattttagacaaaatttgtgaggcatcaaagaaggggaagcaatcaatggtgaagtag

SEQ ID NO: 60875 - DNA, 706 bp, Zea mays
  unsure (1)..(706): unsure at all n locations
  Clone ID: MRT4577_155515C.1
ccggccgggaccggtacgcactgccctcccattcgctctgtaagatagttgcgtccggatctgaccccaattacacgcatgtgttactgttacgcccacgcaggattcagatcgtgctatgacggctcctgtccatccaccatgattaatttcgtgcttctgatcagccgccagggcaaggtgaggctcaccaagtggtattctccgtatacccagaaggagaggaccaagtccttgagatcatccatcatttcgtcgagatactggaccgatattttggcagtgtatgtgagctggatttgatattcaatttccataaggcctactacatactggatgagattctcatcgccggtgaacttcaagaatctagcaagaagaatgttgcaagacttattgccacacaggattcattagtggaggctgctaaagaggaagccagctccataagtaacatcattgctcaagctacaaaataaagttcttcactagtctaatgcccgacatcttgtcgttgttgttcaagcaactgtaatgcactggactgctagtccatttgctctgcccatgttttctgtggaatacgggtttcaagacttggaaagagcgtgatgtgtaaattccttgatgttgtangtgtgtgcagccttatgttggagcacaagcatgggatggattcgttcgaaaaaaaaaaaaaaaagcggcc

SEQ ID NO: 60876 - DNA, 186 bp, Zea mays
  Clone ID: MRT4577_155516C.1
gccgctcagaacggcgacgcgtcgtcgtcgccgccgcccgctgctgcgcccgtgttcccgatgtcggtgtctccgtacgtgttctgtagaagtcggacacgtcgggcggtatcggctcgctcaggcaccacccgatcctgctcttcttcctgacgccgcatgtagggcccgcctactgcgcggcgc

SEQ ID NO: 60877 - DNA, 519 bp, Zea mays
  unsure (1)..(519): unsure at all n locations
  Clone ID: MRT4577_155517C.1
tccggattcccggggttatgtaatgctaatacttaacataactacctcacatgccgtggctatgtaatatgtccattatatatgtttggtttttctttgctttgtccacgttcagttttttttaaaaaaatctcctgaaatgagacaattagtgtggacataggattgtattttgttggttcttgttctgatctccagatatattctggggggatctttcccctcttgttaataatttctatttagaatcattaatctaggacacctatagcattatcaagttactccttgtgctgacgactttctgtattctgatttttgcatgcttaatgatattggtgttactctaatgactacagaaaatggcatcggatttcttgggtacttctagatttgggttgatgcgacttggtttggctgtacagntctgatctagcaagttgtttttgatgaaagagttggctgaccctagggtgtgaagcaaaatttaaagcctaaaggcctatttaacttgtcagc

SEQ ID NO: 60878 - DNA, 1188 bp, Zea mays
  Clone ID: MRT4577_155518C.1
aaccccgacccgtttgccttcctgtcgccgtctcgcctcgcgtgccttgattcccggcagcgacctcttcgtggggcctttcgccggcaacgagcacccacgcaccaggattcagatcgtgctacgacggctcctgagtcctgtccatccaccatgattaatttcgtgctcctgagtcctgacagccgccagggcaaggtaggctcaccaagtggtattctccgtacacccagaaggagaggaccaaggtatgccagcctgtatttctgcatgtgcattgatgctgatgacaatgagcttgaagtccttgagatcatccatcatttcgtcgagatactggaccgatattttggcagtgtatgtgagctggatttgatattcaatttccataaggcctactacatactggatgagattctcatcgccggtgaacttcaagaatctagcaagaagaatgttgcaagacttattgccacacaggattcattagtggaggctgctaaagaggaagccagctccataagtaacatcattgttcaagctacaaaataaaatttttcaccagtctaatgcccgacatcttgtcgtcgttgtacaagcaactgtgtgtgtggccttacgttggagcacaagcatgggattgattcgttctattctttttcatcccttgaacttttccttgcactgctagtctttacaccttacactatcgagagatcggttctggaagtttgcttacactgctaggctctacaccatcgtccatcgaaaagattggtacgtcttgccgggcttagcaatgagctgctcctgttaacaatggctgttatataggttgagggaggatggaggaggtcattgggagaacaaaccctgtagcacgccgcgcaggtaaagtcgccgtccagagcactagatgccagctgttcagcacggacacggaggagggacatggaggagagaaagttggtgcacgcgaattctggaagcaatggcggacaaggaatcctgttttccgctccaattgcaacgaatcttgttttctatccataggttagatacccataccctgcttcgctatttctctccaccccttagggcatgtacaaccttgagactctggttcgatttttaaaatacaagagactaagtcttgagactctggttcgatttccccaccccccaacc

SEQ ID NO: 60879 - DNA, 413 bp, Zea mays
  Clone ID: MRT4577_155519C.1
atcttttctttgactagcatgccttctcactactacaccctgttggactagcactgtttttgtttcttacgacctgcataagctgatctacaacctgtgctttgtgttcgcaacagagcaccaagcctttttttcttgcaacgcccgtctactagggcgacctcgggggctaccgtggcaggttgtactaccaggctgccatgaaaaggttcaaggccgtgggaggggggaaccccgccccaaataaaataaaaagaggttgccaaagatgtaacggacaacatgttaaaaatcgtgcaccaaaaaacaaaattttggtgccgccgccggggggcaaaaaaagggcgattttgataaaaggcagcgtcgtatcgcaaaaataaagttgccctttttttgctcgctggccccag

SEQ ID NO: 60880 - DNA, 119 bp, Zea mays
  unsure (1)..(119): unsure at all n locations
  Clone ID: MRT4577_15551C.1
aanagattggtggatgtttgcactatgtatttttattggacattcatgtttgctctgctttttcatatggtagatgggtgatacatttgacaaggcaaattagacagatccacacaaca

SEQ ID NO: 60881 - DNA, 1178 bp, Zea mays
  unsure (1)..(1178): unsure at all n locations
  Clone ID: MRT4577_155520C.1
ccggccgggccgggacgactcactttcctgaccccgaccccgacccgtttgccttcctgaatcctgtcgccgtctcgcgtgccttcattcccggcggcgacctcttcgtggggcctttcgccggcaacgagcacccacgcaccaggattcagatcgtgctacggcggctcctgtccatccaccatgattaatttcgtgcctgatcagccgccagggcaaggtgaggctcaccaagtggtattctccgtacacccagaaggagaggaccaaggtcattcgcgagctcagtggactcgttcttacacgagggcccaaactctgcaactttgtcgagtggaggggttacaaggttgtataccggaggtatgctagcctgtatttctgcatgcgcattgatgctgatgacaatgagcttgaagtccttgagatcatccatcatttcgtcgagatactggaccgatattttggcagtgtatgtgagctggatttgatattcaatttccataaggcctactacatactggatgagattctcattgccggtgaacttcaagaatctagcaagaagaatgttgcaagacttattgccacacaggattcgttagtggaggctgctaaagaggaagccagctccataagtaacatcattgctcaagccacaaaataaagttcttcaccagtctaatgcccgacatcttgtcgttgttgttcaagcaactgtaatgcactggactgctagtccatttgctctgctcatgttttctgtggaatacgggtttcaagacttagaaagagcgtgatgtgtaaattccttgatgttgtaggtgtgtgcagagccttatgttggagcacaagcatgggattgattcgttctattctttttcttcccttgaacttttccttgcactgctagtctttacaccttacactatcgagagatcggttctggaagtttgcttacactgctaggctctacaccatcgtccatcgaaaagattggtacgtcttgccgggcttagcaatgagctgcttctgttaacaatggctgttatataggnttgaggtcttgaggatggnaggaggtcattgnngagaacaaaccctgtagcacgccgcgcaggtaaagtcgccgtccagactccagagcactagatgccagctgntcagtcgcacggaca

SEQ ID NO: 60882 - DNA, 268 bp, Zea mays
  Clone ID: MRT4577_155521C.1
cctcgagattttttttttttttttttttttttttttttttttttttttttttttttttttttttttttttttttttttttttttaaccccaggattaaaaaacggggtcatgaccaaccgggcaactggttccaaaaaaaacggggggtaaaaaggaagggccatgaagaaaaacagctatgcaccgccccttaaaatgggtttttcttaacaaacaaaagagggccgcgggctttaacatttttttaccccggggccaaattcccgg

SEQ ID NO: 60883 - DNA, 306 bp, Zea mays
  unsure (1)..(306): unsure at all n locations
  Clone ID: MRT4577_155522C.1
aaaaaaaaaaaaaaaattaacataaaaaaaaacaatacataaaagcaaaaactgcaagaagtaaataactggccgggggaacttaatcttncttctcccccactttatgttcttaccacccatacactggacaaggagcaatgaatattggttctcaacaatcccataacttcccgcacttaaacaatacaacaacacaaagaccctcttctggtcaaagattcatctagagcaacgaattaaccttattatcaattgcttgcttagcacatagctcagctacgccaagatatttaataagtcatt

SEQ ID NO: 60884 - DNA, 335 bp, Zea mays
  Clone ID: MRT4577_155523C.1
ggggctctcatcatgcttttgtgtataagagtgaggcatctagtcctaggcaatccactcatgttaaattgcctaaggggaaatttcctattgcatcaagggatcataacatttcatttaagacttttgatgcttcgtatgttttaactaataaatcaggcaaagtagttgccaaatatgttgggggcaaacacaaggggtcaaagacttgtgtttgggtacccaaggtgcttgtttctaatgtcaaaggacccaagaccgtttgggtacctaagaacaaggcccatgggcgcggactgtccgactcgcggactgtcccttcttctcgttttctc

SEQ ID NO: 60885 - DNA, 389 bp, Zea mays
  Clone ID: MRT4577_155524C.1
ggacctttgggctgatttatgtgcttgtaagatcgaggtcatacgaggtctacgccggcctcctcgagctcgcggcggagacttagggtatatcggattaagtaaaagtcgtttacagttcttcgtaaggtcccaccagcgtaaatagttggtaataatagtagtttcacctcctccgtacgttatcccatttaaatcggggacagtcctcggctctacggctgcgctagaggaaaatagaactagtagggcccggtacgcggtcgcagactctagatcgtagaccactcgcaatgacgacgccgccgaaggaggtcgcccaatagcgtaagtaagacaatccacatccacgttccaggataagcaacaccgtcccttctcgacgaaaa

SEQ ID NO: 60886 - DNA, 393 bp, Zea mays
  Clone ID: MRT4577_155525C.1
ctccccgtcaccaggcctcatccatccaacgcctcgacgccaagctacagccagccggagaccttgcagctgcagcacggacaaccacaccctaacccagcgaccaagaagcccagggcagcgacgatccatcatcgatggccgcggttcgacacgcaatgaggaggctcggcggctccctgctctggccaacggccacctcaccgtcagcggcggcgccaaggcggctcacgcacagcgaaagcttggcctcggagcaagctcgtcacgaggaggtgctgcgcaaggtccagcagaagacggacgagctgtacgatgtgttgtgcgaggcggagcgggacttctgcacgaggagctggagcaacacgcgcatgctccagcacctctccatga

SEQ ID NO: 60887 - DNA, 448 bp, Zea mays
  Clone ID: MRT4577_155526C.1
gggggaaaagattttttttttaaggcgctaaaaaataaaggggggttttaaagggggacaagggtgtttaaaaaaacaaacacttttcccctttttgggggaatcaaaaagggtacgagaacatttggggggtactttaggggggtttttggtttaaaaacaaaacaagcccaaaaatttgggggggaaaagaggggggcctccaaaaatgccatttaaagggggggaaataaaaaggataagggttccaccagctaaagccctggaaaaccttggaaatgctttttaaatggccgaattttttggggaggggtccgggcaactccctttccatgggcaccaaaagggggtggtccttgagaaaaggtttgggggggattattaaggccttaattatccccgggtgaatgggaatgggtaaaggtgccccgttttgtttaaagggaaa

SEQ ID NO: 60888 - DNA, 345 bp, Zea mays
  Clone ID: MRT4577_155527C.1
gcctcgcgtgcggtctaaacagtcgtgacaccattactgacactgcaactgtgtatactggtgagatactcatcaatatgctctttagatacacaaatgcttacgcaaatgctcaaccctactagcaacacttatgccacgaactacactactgactccagctctttaccgagtgctttaccagatgctgagccagcggttgatttgccgcttggacgggccaagtctcgtgcctagactgaatcattcattgtattgatccatgcgatgtaacctgcgggacaagctatcgaactggaggcctgagtgaacgcctgagctcgcgcttcaactcattctaaaaca

SEQ ID NO: 60889 - DNA, 275 bp, Zea mays
  Clone ID: MRT4577_155528C.1
cacggatgaggggctccgacatcgaatacttgaccaagccgaatctgactgtggcaaacaaagatccgcggtctagaggcgatggcagctatttcaggcatccgaactcaaaagattgaaacgctcatgctgatgtgcttattccaggagacaaggcgcgatataggctaatcggtggtgacagtaaccaacatgctagcatggatccactagcaacagattacgactgcttggtgcaacggttgctgatgagtacctctcgggaagatactccc

SEQ ID NO: 60890 - DNA, 423 bp, Zea mays
  Clone ID: MRT4577_155529C.1
acccgtggtgccccgccgcaatatccgggtgcgacccacacgcgtgctcatgcggtcttagccagtgtaccatcgtggttgattttagcgagccgcttgacaacagtaatgatagcaaaatgatcatgcatgaagagcttaagggtaactggcaccatccagcacagtgcaccgtgttttacatactggatcactccagggttcacgagctactttctcaggttgaagacaaactgtacggcctggcggagacaaaccatagggcatacgatttaagaaatattggcactatagcgggggtaccgcctaagcacactggcgatgctcaggattcatccaaatatcaggaaagccgtgacgcattacaggcgctttagggtgggcggcaactggctcggatgctactgtagatgtcgcagcatc

SEQ ID NO: 60891 - DNA, 666 bp, Zea mays
  Clone ID: MRT4577_15552C.1
ggaaaaagaaaaactcactaatgtgttcgctccttttgctggcaacgcacacaccgaccggtctgcgatctccagacccccgatcccctcgtagatccaatgaggcaaatcttcgtgaagactctaactgtaaagactatcaccctccatgtggaggcccatggcaccactcgacaacgacaaggccaagatccatgacatggaaagcattcccccggaccagcagcggcctatcttcggtggcaagcacgtcgaggaccgccgcacactggccgactacaacatacataaggagagcaccctccaccttgttctccgcctcatgggaggcatgcagatcttcgagaagaccctcactggaaagactatcaccctcgagggggagccttctgacaccatcgacaacgtgaaggccatgatccaggacaaggagggcatccctccggaccagcagcggctcatttttgctggcaagcagctcgaggacgggcgcacgctggccgactacaacattcagaaggagagcaccctccacttggtgctgcgtctcatgggcggcatgcagatcttcgtgaagactctgactggcaagactatcacccttgaggtcgagtcttctgataccattgacaatggcaaggccaagatccaggacaaggagggcat

SEQ ID NO: 60892 - DNA, 625 bp, Zea mays
  Clone ID: MRT4577_155530C.1
cagcttcgcagcccgcgcccctaaaaccctagccccggcggatcggggggcgcctttggtgccagcgacgcggatcaaggacgggagcgctggcgcctcaggaatggtctcaaagagtggtggtaaggatgggagtaggcttaacggctgtagtagtcgagcctctttaacttccatgcctccaagtgtgaagactgaatgtgaaatcctgcaatccgccaatgttaagatcttcaccttcaataatctcaaggcagccatagggaattttgtttttgctagatttagggtgttacaaacatacccccttaacaagaatctcgtcctcgagattaagaaaggctagcacgaaagcaaaggagatacatggttatttgtaggttcttagttcacattgaactcctccaaacttaaggaacttccttacttctttgctccaaaatgtatactaatcaagcgaccttcatcatcatacttataaaatggttggtcttctgggttattgtttgggtcttgcttcaccgtcttcttctttagttggtctagacgcttcttggggcattcgcgaataatatgttcttcatttttgcagtagtagcaagcacctcttgctttgagttctttg

SEQ ID NO: 60893 - DNA, 575 bp, Zea mays
  unsure (1)..(575): unsure at all n locations
  Clone ID: MRT4577_155531C.1
gtacgcctgcaggatccggtccggaattcccgggtcgacccacgcgtccgggaggcagcaaccgaaagggccaaagccaccccaagaccgacacctgtcaattctgcaaccgcagctttgccatcaaaagtaaaagaaaagggaaagaccaagacagccaacaagacggtgaactctgtgtcgcaccctgggtccggaaagacggtggtccacctgctctctgggaagtcacccaagaagtcagcagagcccttggcaaacactgtcttggcctcagaaactgaggaggagggcaatgcccaagccctcggacccactgccaagtctggaacggtgtcagcgggccaaggcagcagttccagtgaagattcctccatctcaagcgatgagacagatgtcgaggtgaaatctccagcgaagccagccgaggccaaagcttcagcagcccctgccaaggatcctgcagcgagaacagncccagggcctaccaggttagggaatgtggcgcccacacctgctaaancaggcagggcgcggcgggcggctgctgctgctgctgnnactgncgctgctgc

SEQ ID NO: 60894 - DNA, 325 bp, Zea mays
  Clone ID: MRT4577_155532C.1
ccggtaactttctagcacaagcaaactatttgctcgattattctaaaactattgggcttcaatgttttcatatacacaattttatttaacgtaagttgattgaattatattcaagtgtacttctctcacctcatctaaagcaaaattattaatcctgtgttttttttttcacttaaatgcgaaactttaaaaatcaactataatttaaaatagttcttttatttatcattaatttctttgtgaaatagtaaaaaaattatgagagtgttcctagtgagctgtttgctcttatgagcatttgtgccaaatattatagccggcggta

SEQ ID NO: 60895 - DNA, 351 bp, Zea mays
  Clone ID: MRT4577_155533C.1
gttcttgctgctgatggggcatggaaactatgcgattttggtagtgtatcgacaaatcataagtgctttgataaacctgaggagatgggcattgaagaagataacatcaggaagcacactactccttcatatagagctcctgagatgtgggacttgtacagtagggaggttatcagtgagaaagtagatatctgggctcttgggtgtctcttgtatagaatttgctacttcaaatcagcatttgatggagaatcaaagctccaaatacttaacgggaactatcgcatcccagaattgccgaagtacagttcttctattacaacacttatcaaagacatgcttaattcttct

SEQ ID NO: 60896 - DNA, 878 bp, Zea mays
  unsure (1)..(878): unsure at all n locations
  Clone ID: MRT4577_155534C.1
agcctggtgcaccgccaccattcacacgacataaataaagtcataaaacataggttaggggagaagatgcttctgaaaatcagtccttccaccatataccaactgaactggcaggcccccgcactaccaaaatccaattggttcgggatgcctgcccgctgtgcaaccaccttagaaaagacataactaatgatctaagggttcggttcccgcaggatgttgccgccatccgtcccgcctttttgggcccgaaggaactaactagccctactaggagtacaatccaattgggatgggatgccttccctgctagcaacagcatcagaaaaggcataactaacaatccaaggtgccaattgctgctaggagtctccatggtccctcctggccttcttgggcggaaaggcacaggcgccggcgaccgtgtcacggagctggcgctgagcgtcctgcagcatcctggcgtggcgggcgtccgcctcctgccaccctcgctcgatctcccactgcacctccatgcgccgcctttccagccgcatgacaccctcgccgaaatccctcagcacagccgacagctgtgcgacgggccgcccagaggagccgcggcggcgggccatctccatggcctcctcttcgtcgtccttggccttgaccgccgcggcggcggctttggcctggaacgcctcgtaggccaccctcttgcgcgggggcgcgatggacggcgtgatggaaggcggcggcgggtggagctgcagctgcgggtggcgcggggcaaggccggtgccgaattcccggatgatgccgttgatgctccgggtgttgttgttgcgtggggcgagttcttcctcctcctcttttcctcctgcactnttnctttt

SEQ ID NO: 60897 - DNA, 605 bp, Zea mays
  Clone ID: MRT4577_155535C.1
gccggccgggtccagcgcatccattctctctatcgtcaatcttcgctctcgcctctctgacctccgcccatcgatgtgatccctgtcgtggagtgcaaactgccgcgaaccgtcgaggttgttgctgcaagttgcgtccgagagcttctggcggaggtctcgctggtatgcgcagccacggtcctcggttgttgtccccatctgtctccttgattgcgggggcgctctgcgccatctggcacgggtgggcccatcttccgctccagcagacccctgcgtctaccagaatggactgtggaacgatggtggttgctacccctgtccggccctggactacccgagtcctccggaagcgccgcagcttcttgcatgctctccttgaagaccgagaggggcccctaggggcgaagtctttctccatgtagaggatccctctcgctgcctaaatccgagatcgagcttatatcctgcctcgacctgctcggaaggtacttgtaccctgattacaccctctatctccatccaattactatggatctgtgcacctgcatgatcaacaacgagaacgttttgctcgtgtagacacgcttcttattctccgtgtc

SEQ ID NO: 60898 - DNA, 540 bp, Zea mays
  Clone ID: MRT4577_155536C.1
acaccaccgagccctcccccacagaccgaaaccaaaccctaggcggcggcggcggaggcggaggagatggcggcggcgagcctgaggaaggggaacgcgaggctgccgccggaggtgaacagggcgctgttcgtgcggaacctgccgttcaacatctcgagcgaggagatgtacgacatcttcggcaagtacggggcgatccggcagatccggctgggcaacgccaaggacacgcgggggacggcgtacgtggtgtacgaggacatctacgacgccaagaacgccgtcgaccacctctcgggcttcaacgtcgccaaccgctacctcatcgtgctctactcgcagctcaacaggatgtccaagaagacggacatcaagaagaaggaggacgagatcaccaggctccaggagaagtacggcgtcggatccaagaccccctccgccaacgacgcctgatcctgcgcgtgtttgtttatttagttagaaatcgtcgagggaaactgttgagtcggatatcggtcctgtaatctgtgcttgccg

SEQ ID NO: 60899 - DNA, 196 bp, Zea mays
  Clone ID: MRT4577_155537C.1
atggacacaactggacaattagtgtatttagcaactgaaggtgtgaaaaaatgtattcaataaaggaccaacacctaaaccaagtctttgtgagcctattttttacacaagaatgactctcccttatgaaaaaaacctaccaaatcccaagattctatggggaaaccggccaaaccattagtggggcccccttctt

SEQ ID NO: 60900 - DNA, 299 bp, Zea mays
  Clone ID: MRT4577_155538C.1
caacaagacctttcatggaagcatataaccaggggcggcaatttttattacaacaccacaacattgtataacagagatgctaaaactaaccaaaaacaagaatcattacatatggagggcgtgcgcaatcacttaaaccaagaaaattctagattgggcaccctgtcgtcccataacaccgtaaaacaaaaaacgaaaacatacaagcatgaaagctgaacatgactagaacttcacaagatgtatgttacatgatcagtcaccatagttcgcagacagcaagcttgatgcgctaacca

SEQ ID NO: 60901 - DNA, 398 bp, Zea mays
  unsure (1)..(398): unsure at all n locations
  Clone ID: MRT4577_155539C.1
agaangaacaaaaacgcaggctggtacccatccgcaattccccctattctcattctcttttttcgacncaccacctaaaaantctgctgtttaaaataaaactacgtttgtcctcanaattnnaattctaattcattttactctcatctatcaacctttatttattttctacaattaaaaaacactcacatttttttttattcttccttaaaccattttcatcatctacactctaaaattncctctttaccaaccatatttatacaaaatactcttaccatatatctataccatcctancctatatttttaaaccccatctctacctaattatcttacccttatcctcttctccttttatcccaattactttctactctttaccattaaaatctcttt

SEQ ID NO: 60902 - DNA, 223 bp, Zea mays
  unsure (1)..(223): unsure at all n locations
  Clone ID: MRT4577_15553C.1
caaaagggttttnncaaagccactatcaggagttcttttcaatgtcctagaccgcaaataacagaggaggttgaggctcatatctcacacctatcaacaaaattttacttttcccgttttatttatttctaattattgccacccctctattatggtatatcaaatagtagcagttagcaaaccttccattccaacataatatcttcagaaatattacaccaaa

SEQ ID NO: 60903 - DNA, 577 bp, Zea mays
  unsure (1)..(577): unsure at all n locations
  Clone ID: MRT4577_155540C.1
ggcgcgccgctgggggggggggttttttaaaaagtgctttcttatttctggggagccacaaacatcagacaaaaactttattattgagactataactcataagaaactaaaagagggaccaccaatgagggggtgtggggagaacactgctagggggggggggggggtggttttaatgggancaattgtggcggttgtaagagggggccancgttaggcgcagcgtgctgggaaaacggggacaactgtgggtgtgtgaagaagggggcaggggtcacaccagctagctgggtgaatgggantagtgtgggctgctgtgaataagcaggagaggtcaatgcggccagtggggtgaatgggaaaaattgtgggggggaggcgacaggtagctgggtgaatgggantgtgggtggttgcgaataaaaagcagaggtcaatgcggctagtggggtgaatgggaaaaactgctgttgctgagagtangcancaaggtttgctancacaagttgttgtaattgttgtgccctgaggtgttgtgccaataaatgcgccaaagggaactgctgtaatagggctg

SEQ ID NO: 60904 - DNA, 508 bp, Zea mays
  Clone ID: MRT4577_155541C.1
acaataggttttcatgcgcggaatatgaggctatggaaaccaaacatgttggttgaaagcaaaggaaaggtaccgactggtccttgttgacaggacaaaacccaggtttcatatacagctccctgagaaactatattaaaaagcgaacacccagaccgttttctgggctaatatgaccaccttaaaattacgaaacacaatggggtccacagattttttttcccaaagaaaggccattaaactgcatgttttgctggcctttgaaaagacccttatgaaatactttgggggatgggccccactgaggtgatactttattattgatcacaaaatgggggaccccggatatgtccgaggagtgcttatagagcctttcctgaacctcatggactcctttggtaggatctctaagcagatcctaagccccttgtatgcccaccttttttggagcatccaacaaaacctgattgtgaccaatggacttttcttgggaatggtaattgaggaa

SEQ ID NO: 60905 - DNA, 2301 bp, Zea mays
  Clone ID: MRT4577_155542C.1
aagaactctgttcaccacccgccgagttcagcagtactctcctccgccatcttccaggtctagcagagattggggacgcgtgggcatcggagattgcctcgatttgtccatatcagacgtttttcccgccgctgtttttgagtcacaccgcgcgcgctcgagaatttttaggaaagcgtttcatctgcgagagtttcattggcctcgccggccgggtgggggctctaaaatagcctcaccctcctcgtgccttatcttcatctcacctgctctttctcctccgtgctgatcggcagtctctaagctttgcaacaactgatagccgaattccgcgcgccggtccctaaaaaaatgcaagtactaggaagtagataagatgcatttccctgtaatttttcgttattatatatactcagcacgggaaggaggggagacactctgttcaaccaccagccgagttcgcagcggcactccagggtccaggcccagcagcctcttcggctcttcgttgggggtgcgtggacaccggaaattgcctcggggattgcgttcctgatctaagcccggcatgaagggctgctcagagcgtttgctgctcctgctgctgctggcatcgtcgttgttactgtccgtcgtggttgccgcgcagcagacttgccctgccgacctcgacagcaaatgcgacggtggcgcgcctgatgactgggagggggaattcttccccggcgtcccgaaaatcaagtatgagggtccaacaagcaagaaccctcttgcttataagtggtataacaaggaggaagtcattctcggaaagaagatgaaggactggatgcgcttcagtgttgcgttctggcacacgttccgtggtactggtgctgatccttttggtgcgcctacaaaggtttggccttgggaggacggcacaaattcgttggccatggctaagagaagaatgagagctcactttgagttcatggagaagctgggggttgacaaatggtgcttccatgatagggatattgcccctgatgggaaaactctcgaagaaacaaatgctaacttggatgagatagttgagctggcaaagcagctccagggtgagaccaatataaagccattgtggggtactgcacagctctttatgcatcctcgttacatgcacggagctgctactagcccagaggttaaagtatatgcatatgcggctgcacaagttaagaaagctttggaggtcactcactacctaggtggtgaaaactatgtgttctggggtggaagagagggttaccaaactcttctgaatactgatatgaagagagaacttgaccatctggctaactttcttcaagctgctgttgactacaagaagaagattggattcaacggaacactattgatagagcctaaaccacaggaaccaacaaaacaccagtatgactgggatgttgcgactacgtttgcttttctacagaagtacggtcttacaggagagttcaagattaatgttgagtgcaaccatgctactctatctggacacagctgccatcatgaattggagactgcacggattaatgggctgcttggaaatatcgatgcaaacactggtgatcctcaagttggttgggacacagatcagttcatgacagacattgcagaggctactttggttatgtcaagtgtagttaagaatggtggacttgcacctggtggtttcaactttgatgccaaattgcggagggaaagtactgatgttgaggacatgtttcttgcccatatctccggaatggacaccctggcacgtggcctccgtaacgttgccaagctgattggggatggttccctagatgatcttgtccgcaagcggtaccagagctttgatagtgagattggtgccttgatcgaggctgggaaaggagactttgagacgctagaaaagaaggttctagagtggggtgagcccactgttgcatccggcaaacaggaactggcggagattctgttccagtctgccctatagatgatggtgccatgtccataggtccaggaataagcaagggtgcgccctcctccgaacacgcactcgtcctcctcaccacggggatgttatggttccgtgcgatggactacctacaatacagcatggaactgagataattaggatgtaatctgtcagaaaatttccagaattgttacctccttttgtttagagtggattagtggaatcaaactggagttagttaaagcttatcctgcattttggtgtggcaaaaaaaaaaaaaaaaaaaaaaaaaaaaaaaaaaa

SEQ ID NO: 60906 - DNA, 389 bp, Zea mays
  Clone ID: MRT4577_155543C.1
ctatagttattttttacatacaaaccagtgccaacactataaggccagatattatttaaaagcttcttccaaacatagaagatccacgagagccttaagaaagcattcaacgtcatgtgctaaacagcatgggcatccatgaataccggaagctcacccaccctttttttttatgacatcatacaccccaagccacgcaagggacccacacacatacatatttagactgcaaatatatatacatatttcacgggtagacttggacagcaaaacgagctccaaaatccttcaggattatggttttattcaaccccactttggtgaaaagcttactccatttttttaaatctatgtgcccggcttttagaatggacataatgccaatgtcc

SEQ ID NO: 60907 - DNA, 1141 bp, Zea mays
  Clone ID: MRT4577_155544C.1
gcccatctggctaactttcttcaagctgctgttgactacaagaagaagattggattcaacggaacactattgatagagcctaaaccacaggaaccaacaaaacaccagtatgactgggatgttgcgactacgtttgcttttctacagaagtacggtcttacaggtaatataagttttcatatttttggaatgtgaatacattgtcagcaagtttctgtgagtgaagcttgtgtgagtttaactgtttgttctaaaagtacacctttttactgtctcacatgacataggagagttcaagattaatgtccggccgggccatgctactctatctggacatagctgccatcatgaactggagactgcacgcattaatgggctgcttgggaacattgatgcaaacactggtgatcctcaagttggctgggacacggatcagttcatgacagacattgcagaggctactttggttatgtcaactgtggttaagaatggtggacttgcacctggtggcttcaactttgacgccaaattgcggagggaaagcactgatgttgaggacttgtttcttgctcatatctccggaatggacaccctggcccgtggcctccgcaacgccgccaagctgatcgaggatggttccctagatgctctcgtccgcaagcggtaccagagctttgatagtgagattggtgccttgatcgaggctgggaaaggagactttgaggcgctagagaagaaggtccttgagtggggtgagcccactgttccgtccggcaaacaggaactggcggagattctgttccactctgctctatagatggcgccatgtccgtagcggtagctcctggaataagcaagcactgagcctgcgcccctcctaacgcgcgcggtcgtcctcaccagtcaccaccaagggaatgtttctggttgcgcgcgatgaaccatgtacaatacaccgtggaactgaaataaattgaaatagctagtcagaatttttagaagtgttgcgtcttttgtttggaacggaataaaactgaactttgtggttagtttgagcttatcctaaaaaaatcgcaaaaaaaaaaaaaaaaaaaaaaaaaaaaagtactctgcgttgttaccactgcttaagggcgaattt

SEQ ID NO: 60908 - DNA, 2204 bp, Zea mays
  Clone ID: MRT4577_155545C.1
gcgtccgtgcatttctgtttctgttatttccatgattgcaggtccaaacaaactgccccccgagccacctcatcggatatgcttcattgccttcatctcatctcatatatttatattagaaaagaaaactctgttcaaccacccgccgagttcagcagcactctcctccgccctcttccaggtccagcagagattggggacgcgtaggcatcggagattgcctcgggagcgcgtttcctggtcaactaaggccggcatgaagggctgctcagagcgcttgctgtttctgctgctgctgctgctggcatcgtcgtcgttactgtccgctgtgattgccgcgcagcagacttgccccgccgacctcgacagcaaatgcgatggtggcgcgtctgatgatgattgggagggggagttcttccccggcgtcccgaaaatcaagtatgagggtccaacaagcaagaaccctcttgcttataagtggtataacaaggaggaagtgattctcggtaagaagatgaaggattggatgcgcttcagtgttgcgttctggcacacgttccgtggtactggcgctgatccttttggtgctcctacaaagacttggccttgggaggacggcacaaattcgttggccatggctaagagaagaatgagagctcactttgagttcatggagaagttgggagttgacaaatggtgcttccatgacagggatattgccccggatgggaagactcttgaagaaacaaattctaacttggatgagatagtccagctggcaaagcagctgcagggtgagaccaatataaagccattgtggggtaccgcacagctctttatgcatccacgttacatgcatggcgctgctacgagcccagaggttaaagtatatgcttatgcggctgcacaagttaagaaagctttggaggtcactcactacctaggtggtgaaaactatgtgttttggggtggaagagagggttaccaaactcttctgaacactgatattaagagagaacttgaccatttggctaactttcttcaagctgctgttgactacaagaagaagattggattcaacggaacactattgatagagcctaaaccacaggaaccaacaaaacaccagtatgactgggatgttgcgactacgtttgcttttctacagaagtacggtcttacaggagagttcaagattaatgttgagtgcaaccatgctactctatctggacacagctgccatcatgaattggagactgcacggattaatgggctgcttggaaatatcgatgcaaacactggtgatcctcaagttggttgggacacagatcagttcatgacagacattgcagaggctactttggttatgtcaagtgtagttaagaatggtggacttgcacctggtggtttcaactttgatgccaaattgcggagggaaagtactgatgttgaggacatgtttcttgcccatatctccggaatggacaccctggcacgtggcctccgtaacgttgccaagctgattgaggatggttccctagatgatcttgtccgcaagcggtaccagagctttgatagtgagattggtgccttgatcgaggctgggaaaggagactttgagacgctagaaaagaaggttctagagtggggtgagcccactgttgcatccggcaaacaggaactggcggagattctgttccagtctgccctatagatgatggtgccatgtccataggtccaggaataagcaagggtgcgccctcctccgaacacgcactcgtcctcctcaccacggggatgttatggttccgtgcgatggactacctacaatacagcatggaactgagataattaggatgtaatctgtcagaaaatttccagaattgttacctccttttgtttagagtggattagtggaatcaaactggagttagttaaagcttatcctacattttggtgtggcgatcgtgtttggtacttccttgaatgctgtttcatagtgtggcaacgatgttgctgcttagtcctacaactggtggtagtaatgtatcatagttcgaatgtttcttcacaataaattatgatctttaataaattttattagttctttttagaactgttgcctctttgtttggaacggaatgaaaatgaacttggttagtttgattggtgagagtgtgattggagtggtggtggggaaaaaa

SEQ ID NO: 60909 - DNA, 1012 bp, Zea mays
  Clone ID: MRT4577_155546C.1
agaatcagtcattagcaattataggagaattgtagtacttttcttaagctcttccaacaaattttggatcaccctttttggtgatctataaattaagtacaactgtttgagttaggatctctgaatctgtcccaatttggacagcagagggttaagaatgtcctgataagagggttatttttgtatgattggcactttatgtacaactattggatgtcttctgaatttcgggtaagctctacactttagttctaataaagcaaccatacttcaatcctgtaacacatatttttattctatttttaggatcgctcagaaaaagctttatccaaacccaaataacaaagtatgtgtgcaccaaataacaaagtatgtttgcaggctgtgaaactaggacgtcctccacgaagagatgaaaactttatccaaacccatacaagaaaaaatggtgttcctacagaacaggcaaaaccaataattgaccaacttaatgatgttcttggagtatatccagagttaaaggaccgatcaattcaagagggtgatgcattctctattgtttgtggaccgaaagagccaaaaggatatgttcgtgttttgggtttaggtcctactcctcaagatattggcactccagagttgaagtcttatactgcaacaagactacaaatggagattcttgctcgtacaaaggttcaaagtgagaaggctgctttagaagagcgtgtacttgagctacagactcaaattgagcaaagggctcaaccagaccgggcaagtgaagagcccatgtcacatcgcggctctacttcatttcaacataaggtgatgaggaacaagtttgctgctgaggatgaggaagacaatgaagaatattgtgcttctgaagatgaggaattagatgatgaggatgatcaaatatttcatcagatgcaaggtgctaactcaccaagatctacaaggcactttgctgaagcttcacactctaaacatgatgatcttgttggaaaag

SEQ ID NO: 60910 - DNA, 819 bp, Zea mays
  Clone ID: MRT4577_155547C.1
cgctctgcagtctgcaccctcctgctgggtgtccgacccccaaaccctagatccccttcgccgtggcggtggcgccgcggtgacccggcgcggcggcggcggcgatggcggccgtgccggaggacctccgctgcaagcgctccgacggcaagcagtggcgctgcagcgcgccctccatgcccgacaagaccgtctgcgagaagcactacgtccaggccaagaagcgctccgcctcctccgcgctccgcgcctcgctccgccgctcctcagcctcctccctcgcgcccgtcttcccattctcctcctccccctcctccgccgctcgcctccgcgccgccgacgaggacccgcccatggcggtcgcgaggcccctctacggcagggtcgccggggaggcggtgtacgtggctgaaccggtgccggcgcccgcgcggagggaggtcgcctacgaagggctgcctcggggcaatgcggctggtggcaggactgcggcggggctggtcggcagaggcccactatggtttcctggtggcggctctgaagggataaggagttgccaccagtgccggaaggctgggggtgtcatctggtgtaccagctgtgacaggagaggctactgtgccagatgcatctccagatggtatgttgcgctagagtgtagcagctcacagtgaactaatgcatattagaaagtcggcagagaggattgttggtctgtaatctatatatggatattcctattttgcaacaatatgttctgtcagctatgtgttttcctttttatatttttgctttgaaagaatggttggtgcaggtcgc

SEQ ID NO: 60911 - DNA, 684 bp, Zea mays
  unsure (1)..(684): unsure at all n locations
  Clone ID: MRT4577_155548C.1
ccggccggggtttcgaccagaatccgccaccagcagatcctgctcctccgggctctgccccctccgcggctccgcctggaccggctcgcagctggccggcgccaggggctccctcgtggcctcgcccaggactccaggaggccccctggcctccggctgcgtctccgtgtcggtgcccggtggctccgtttgatcgccgactgccattatgtcagacgccagacagcggttggcgacaatgcagcagcaggaaatatttggaccgccgggacggtttgcaaattttaggagtatgtagtaactcagaggagtatttcattgtaacatggcagcagaattgaaatgctgctgagaatatgcagatccagccgttgcgatgtgactgagaatttgagatacagcagtctattagattttcataagcctgtctgactgtgtcaaataaggccaattctccccactcatgatgaacaccccacaaacttaacccaggagtgcgcaccacgcctccatgcgcccaggccccaggactgcctccgcggcgtcggcggcgtgcaccgtggctccaccctgtccctgatcagaattccgatgccgtggggtagttcgattattattctgtattctgatctttggnaattgattgttcctaaatctgatcaaaaaaaaaaaaaaaaagcggcc

SEQ ID NO: 60912 - DNA, 353 bp, Zea mays
  Clone ID: MRT4577_155549C.1
accctcgagggctttccggggaaagagaaaagtccccctatgcatgggggagttctaatcgtctatattctttaactagttcatttctttatgatattaactctttttaagctctataacctaataataatgtgtattgtggtagtacaaatattctatgctttttaaacttaaaaattgatgaatacatattaaataactaagttgtaatgtatacgggagctgtatatgaagaatggttggagacgtcctgtatataggagaattgtattttaaaaaattagtaaaatataataaataatacaagttgaaggagaaatataagtgaatgactggagatgaccttaagactc

SEQ ID NO: 60913 - DNA, 495 bp, Zea mays
  Clone ID: MRT4577_15554C.1
aaaggtcaaacatcaaactttataaggattcaagccatactggtgcaaaaaagttttgggtccaacacagaggacacaacgggtcctttaaaccaacgaagccacaaccccgatttatgacacacaacccacagatgtttattaaacgacgacctccatatagaggtcctctagggggccccagacgacgcaaatccccaggtacaggagcagtttaaatgaaccatggtttactgaccaccagggggggggagcaccagggggagagggctctccttttggatgttgaaacctgctaggggggggccatcctccagttgtttgccaaaaaaaataaaaccctgttggtctggggggatgccctttttggccgggatctttgccttcacgggggcgagggggggggagctctcaacctccagggttatggtcttgccagtcaaggtcttcacaaaaatctggataccacctcgcaagcggagcaccagggggagg

SEQ ID NO: 60914 - DNA, 530 bp, Zea mays
  unsure (1)..(530): unsure at all n locations
  Clone ID: MRT4577_155550C.1
ctcgtctggccgcctctgtcttcaactttcgtccaggttccaggccaccaccgccaggcgcagccgcccacaacggccacggcgcgctcgcccgtcgcccgccaccgccagccgccagccgcggagcgccggaggcccggagccacaggccgccgcagcgctcgcccggagccgcaggccgcagcgcgctcgcccgcagtgttgtcgtcgtgctcacctacgagctccgcgactacatcgttaagctgccattggtgtattgcatatggtggcaccaagcatgaggcaggaactgcattacttgcaagaaagtcacaagtacactgcattacttgcaagaaagtcacaagctcattccaatctggttctctaaactttggaggtctctnacacctaggcctgaaagcaccacncccaaaaggcgcccacaacatcggaacagagnntctcacattatcttagaatccattgcaagatcatacttgtggctttcttgcaagttgtgcagttgttgcctcaagcttgctgcc

SEQ ID NO: 60915 - DNA, 475 bp, Zea mays
  Clone ID: MRT4577_155551C.1
ttgtggttctcgactgacatctccttcagggatttgcccttgtactccggcactaggaacgtgtatgccaggcccatcatgttgctgccggcgaggaggatcatctagttgctcacgctgatgcccgtggggtactcgtggtccgtcttggccggatcccggttttgcgccaggtacatgaactggaaggagccgttgatggggctcagcttgcccgacaccgccgagatgccgtggcacgtagaccgtagcctgtccgggaagatctacgggtgcacgatgaacgtggtcgcgttgagcctgaagttggcgaagaagaaggtgatgccgttcatgacgatgaatccgatgtggtgccccggcgtcctccagtgcttgtacgggacggcctgccccatcatgaacaccgtcatcatgaggaacctcgttatctggatcgagagccgaccctacacgtagatcagtgccaacgtga

SEQ ID NO: 60916 - DNA, 296 bp, Zea mays
  Clone ID: MRT4577_155552C.1
cggaatacccggtccgaccacacccttccgaaacacttccggaagccccaagtccatcgtctccacacaaggtccaaaaggcttcttccagggttggggtcttcctggccagcgtaatccgcttgaacttccacaactgtttcttaaatggttgcaacggttcggtccttttgaaggccagtgaccgccagccggaaaaaaacgccaagcccaacctgaccctgcaaggtttcgacttaatcaaaaggatcaagcataggctgtaggccactttcccccttccggttttttctccg

SEQ ID NO: 60917 - DNA, 381 bp, Zea mays
  unsure (1)..(381): unsure at all n locations
  Clone ID: MRT4577_155553C.1
acaccgcgtgcactcgcacgcgagctctcaatactgttctagagccatttcgcatcacaaagacaagcccgcgcggcgcgctctacatatcttggggtccaaaactganacgccctactatcagtggcaagactataagaacgaatcctagtatgtatcaaccgggaccaatagctcctttgatgaaattactatgtactcaagccgctggcgcatctggccgtaacgattgtctggtttagccagcacgtaaggatctggacggatttattgccaaaacacaattctatcactctaatcatggcactcaggaatagactgagatgacactatcatactattagtacttgaacattcacataattgcactaagtgcaaact

SEQ ID NO: 60918 - DNA, 194 bp, Zea mays
  Clone ID: MRT4577_155554C.1
gccatattcaatgcacatactttggaggtggattcacagccgtgtgggggtctatccagctcaccacggagtcccgattccctgagcagccacttgtgtgctatcagtgtataaaccactgtatgagataacatatctgcgtactccacgaatagtacaaggagatatacattgacatgaacgccatctagagt

SEQ ID NO: 60919 - DNA, 398 bp, Zea mays
  Clone ID: MRT4577_155555C.1
gcgcgctgcacgagagaccctgatcgcgaccggcgatattgcaatgccagaatattgatatgcctactgacaaataatcagattcggtagctatatgtccacctaacagaaatgcggcgcacgaggacagggtgaggggcacacatgatgaatatccttcggcacagcaacataaccctgatgctgtgaactcacatagggacaggaatggccaggaagatgtgtgtgtaaacctatacctgctcaagctgatccaccagcaagaatcgtctgtcagtcattgaccaaccaagcccgcagtagctaaacagcaagggcccgcccacactgtgcttgagccatgccctgccgaacctaaaagaatatcatctggggcacggattatgggtccaattcct

SEQ ID NO: 60920 - DNA, 1716 bp, Zea mays
  unsure (1)..(1716): unsure at all n locations
  Clone ID: MRT4577_155556C.1
aattcggcacgagggtttccgcaagtcgcccagaccagatttgccagaacgcaacctcggctccgaaaccctagccgcacgcagctgtccacttctactcccctcgcctcgccacacccgccgcgcggcacgatcagacgccatggccgccgagaactactggaggtacgctgatgcgcggcagcagcagcaggcgatggtggccgccgcggcggccgcagcggggatggctcccgcggcgaccgtcgccgcggcccagacggtcgggagtgcggcggcggctatgaaccagcaggctgccgccgccgccatggcgcagcaggccgccgctgcgccgcctctcaagcgcgcgcgccccgacttcggtgatgtgtctggtgggcaagacatgacaggatattatccacgtgaaactgacaggtcaggataccattccctcagagagaacgacacacttggggcatcttatgaccgttacttgcgcaatgggatggcctccgtcggtgcaaatgacacttctagggctgccgggatgggtgctggattggctgcagggatgactgcagggatgggtgctggaatggctgcagggatggctggctatggtgttgatggtcagcgtatgatgggtgttgttggtatggacagcagagggatgggatatggtggcagacctgagccacctcttccgcctgatgcatcaagcactctatatattgagggcttacctgcaaactgcacacgacgggaggtttcacatatatttcgcccatttgttggttttcgtgaagttcgtcttgtcaacaaggagtccagacatcctggtggagatccacatgtgttgtgtttcgtcgattttgacaaccctgctcaggctacaattgctctggaagcattacaaggttataagtttgacgaacacgagcgtgattcagcccatttgcgtctgcaattctcacgctttcccggtccaaggtcagctggtgggcctcgcggtaggcgttaagacgtgcggacctcgtggttgccgaacctatcgtttatacgagcgatccaactacggtgggctaacgcttcgatatgcgctgaatttcggggcggtggctttttagggttcgtcagctcatttcgtgaatgcgtgaaagggacaatgcaataagtgatattctgccatatgttattagatgccgtataatgtgttaggcatggaaagttattcgacatactgtatctgctgccttagctattgtggtctactgtaacttcattaccttgcttcacatccgagacaatttgagtttgttatcatgtggattatctgttttgaaaatgaaaactagatgatgttagcctattttagcaaagcatattgccccattggtgtttcttgcccatataccaaaattgtgtactttaatctaggattagtaaaactgtggttgcctaggaactatgtgtaacccactgacacccttagttaagcaccaaaggatgtcaggggctactgtgcctatttctgactttagttgctgattgaaactttgatagtgaacttttgaaattttcgttggcataataaatctgagtacatttctcttaaagaagcaaattgattttccttaagtttgatgtgattgttgttggtccaaattactgtgaactgctntggagctttcgggtatctgtagtaatttgtgagaaataactcaataactg

SEQ ID NO: 60921 - DNA, 215 bp, Zea mays
  Clone ID: MRT4577_155557C.1
accggcggtagcgcactgcgtttgcctgattgtgtcattcttgcattcattgctcgctagtaactagagtctgatgaataggatgtgaacgctgcttaccaccaacatgaagggggccatgaccgaccgcatagggtaccaatgaggacagatcgacggtactggtgacttcacaccaggaacatattatgcgggggggctgtctacagggtcta

SEQ ID NO: 60922 - DNA, 227 bp, Zea mays
  Clone ID: MRT4577_155558C.1
aaggtgcagttggtgtcattaatagatgcatacccccaataaatccaactgacccagaatgttttcatatgtatgttcacaacaatattttctttagttttgctgtcgactccgactatgaagacatttcaaaggaccacaagccagattgccaaaatgggtctagcagaagcaccaaggtttcctccccagatgtgataactaagccagatgcaaaccatggcaaa

SEQ ID NO: 60923 - DNA, 202 bp, Zea mays
  Clone ID: MRT4577_155559C.1
gccggccgggaaagattgccgcgctcttctccctccccgcggcgtgatgcccgcagcccccctcccctggtgccctcgcccccgcgccccctctccgtgacgctgcgatggccgcgacccctctatctaacacaaagtctaaatatcactaccctaccccaaatacatgcttacctctactctcaaaatcacatagccccat

SEQ ID NO: 60924 - DNA, 300 bp, Zea mays
  Clone ID: MRT4577_15555C.1
tcacgatcacgagggcttcccctactattgtgccttccatcactcgtccaccataacaccacatctcacagactgctggttgtcatgtcatgtcactctattcattttacagatccaacgatatgctcggcacgttcatcccccagctgtaaccctacacgtactttactcctgaatacaccaccccgtcatcaatgtttgcccggggagtcctactctgccaggaccaaggtacttacttacttggatccataaccagtcctttttcagttcaaacataatccgaatccttcaggctca

SEQ ID NO: 60925 - DNA, 834 bp, Zea mays
  Clone ID: MRT4577_155560C.1
gccggccgggttggaaaatagtggaggtagtgccgacagaggcacgagcgcctccctcgtcttcggtccgtctctccccacagggaaccgccgcccgtcgcctccagatacgtgcctccggcggaaaatcggtatcgagctcgctttgttcgagtgagtaacgcgcagcgactcctctcccaaccagattttgatggatttcgggcacgcgtggcacagatcttctgtatagccagcaaggaggcctctccatctcctccgggaaggctgtgcagcaatggagaagtataacagcaagactcagttagcacccttgagagataccccatttgctctccgtggtgctcttggtagttcaagctcataccttgagcaagccaggggctacacgtcttcccctctagcagctctgcgaccaaagatgtcttctactactggaaatcgactcctgcactcgagttgccccctgtcatctcctgtagcaaaccgcccgctgtcgccccaccttcctctgaagaagccacagttcagcgcgactttctcaatctcgcatcgtatattcggtgtcgcgttgggagttgccatcgtatctgttcctctcgccaccaagttcagcctaatgtttggtgtctgagagcgatttgctgcgtctcatgagaaacatcattttccgtttctgtgtctgtttttcatcgtctcggttaccttgcgacacaactgtaggtgccgttggaataatatctttgccatgcttgcagacttgtgtaataagtaaataaacctataaaataccagtttaactgtttaaaaaaaaaaaaaaaaaagcggccgggc

SEQ ID NO: 60926 - DNA, 747 bp, Zea mays
  unsure (1)..(747): unsure at all n locations
  Clone ID: MRT4577_155561C.1
ctcgcgggccgggcgtctctccccacagggaaccgccgcccgtcgcctccagatacgtgcctccggcggaaaatcggcacggatatgttagcggatcgggcggccggatcaccgccggcttgctccctctcctcatgattggatcttctgtatagccagcaaggaggcctctccatctcctccgggaaggctgtgcagcaatggagaagtataacagcaagactcagttagcacccttgagagataccccatttgctctccgtggtgctcttggtagttcaagctcataccttgagcaagccaggggctacacgtcttcccctctagcagctctgcgaccaaagatgtcttctactactggaaatcgactcctgcactcgagttgccccctgtcatctcctgtagcaaaccgcccgctgtcgccccaccttcctctgaagaagccacagttcagcgcgactttctcaatctcgcatcgtatattcggtgtcgcgttgggagttgccatcgtatctgttcctctcgccaccaagttcagcctaatgtttggtgtctgagagcgatttgctgcgtctcatgagaaacatcattttccgtttctgtgtctgtttttcatcgtctcggttaccttgcgacacaactgtaggtgccgttggaataatatctttgccatgcttgcagacttgtgtaataagtaaataaacctataanataccagtttaactgtttaaaaaaaaaaaaaaaaaa

SEQ ID NO: 60927 - DNA, 971 bp, Zea mays
  Clone ID: MRT4577_155562C.1
ggaccctcgaggccggccgggccgagttcggttttggattttggactacaattgcatcaccacactcaccgcaccaccgaccactgcctccgtacgcgtccctctggcggaaaatcggtcctagtgccgagctcgttttgtttggatcttctgtatatctattaaggaggcttctccatctcctcggagcagcaaggctgtgcagcaatggagaagtataacagcaacactcaatttgcaccattgagagagactccgtttgccctccgtggtgctcttggtagttcaagctcatatcttgagcaagccaggggctacacatcttcccctgtagcagctctgcgcccaaagatgtcttctacacctggaaatcgactcctgcatacgagctgccccctgtcatctgctgtagcaaaccgcccgctgtcgccccatcttcctctgaagaagccacagttcagcgctactttctctatctcgcaccgtatcttcggtgtcgcgttgggagttgccatcatatccgtccccctcgccaccaagttcagcctgatgtttggtgtctgagagcgatttgctgcatcttatgaggaacatcatttcccgtttctgtgactgtttttgttcgtctgggttaccttgcaacacaactgtaggtgcagttggaataacatctttgtcatgctgacagacttgtgtaataagtaagtaaacctataaaataccagtttaactgttttgcaaggaggtttgccccattatggatgtacatggtcatgaggtctgcagcctgcaggtttggctgggaaatagttgattatcatcacaacatattaactgcatggtgcgtatcttcgctacgtgcccttaagctcgtctagaaaaaaaaaaaaaaaaaagcggcctagttgatttatcgtcaaatgataaattgttcaggtcatcccgctaataagttcatcttcactagtaaa

SEQ ID NO: 60928 - DNA, 818 bp, Zea mays
  Clone ID: MRT4577_155563C.1
gcacgaggattttaggcggatcgtggtgcacagacacggatatgttcgcggatcgatcgggcgcgcaccctgactcacgactgggcgcacacatattcctccaatttttttttctgcgcatggaaactagggttggccctctgccggctgcccagatcctctctttcttgacctcttcttccgcttcctgcagatcttctgtatatctattaaggaggcttctccatctcctcggagcagcaaggctgtgcagcaatggagaagtataacagcaacactcaatttgcaccattgagagagactccgtttgccctccgtggtgctcttggtagttcaagctcatatcttgagcaagccaggggctacacatcttcccctgtagcagctctgcgcccaaagatgtctacacctggaaatcgactcctgcatacgagctgccccctgtcatctgctgtagcgaaccgcccgctgtcgccccatcttcctctgaagaagccacagttcagcgctactttctctatctcgcaccgtatcttcggtgtcgcgctgggagttgccatcatatccgtccccctcgccaccaagttcagcctgatgtttggcgtttgagagcgatttgctgcatcttatgaggaactgcatttccccgttcctgtgactgtttcatcgttcgtctgggttaccttgcaacacaactttaggtgcagttggaataacatctttgtcatgctgacagacttctgtaatacagtaataagtagaactataaaatatcagtgcaaggaggtttgccccaaaaaaaaaaaaaaaaaaaaacc

SEQ ID NO: 60929 - DNA, 403 bp, Zea mays
  Clone ID: MRT4577_155564C.1
atcacaactaaacgagctgattaagcgaaccctttgcacatatgcccgaagggcaacagtgcatattaccggcataaatgttgacaataagcaagccgctaatgcatgtgcacttacacacgagcgaactgttcagaggtgtagctcatttcaagcaacagcacccattggcactatttagggggcgagagtatataaactgccaagtatgagctcgcaacttgcattacttactgatgtggtgaaaaagcaaacccattgaagctgcttattaccaggctcgcagtgcacgttgtatacagataaccgccaaaacttccaaggctcaaggacaaatagccctcataagcagtgcacgtgttggtaccacgccagttgggggcataatatatgaccatcaatg

SEQ ID NO: 60930 - DNA, 453 bp, Zea mays
  Clone ID: MRT4577_155565C.1
aattcggcacgaggcccaaccggagatcatcatcttcatctctatcaacaaccacagttagatcctgttagcacctatatgaatgagcggccgctgtatcccaagaatgtactacaacctacctaaccacccacatatcgatgaggccaacctacaatctatcaaactaatgcagagctataggtgacaattaacctgttagtgttaccttatcatgtgagtactactactggtgtcttaccaaatactgcatatgatacctacgcaattacctgaacctatggattcaacatcttatctacaccgcttaagaatgcatgctagtcatctggccagacattatgctttctccctgatcgttaccgtccaatgtgcccacgtcgtttagcacgtcacaggccaaggtttacactacagagtatgggtaccttggtactgctctggcttcttctg

SEQ ID NO: 60931 - DNA, 1563 bp, Zea mays
  Clone ID: MRT4577_155566C.1
tgggtacctcgaggccggccgggccgggcttgttccccgtctgtctccctctcgtcgcatcgcgcaccgcttccccagttcccccagctccctccaccttcaggtgacttctcgaagtcaactccagacaccggcctgcatcggaatgtccgtatcgctcgagtctgcacgtcggctggggctctgttccgccggcccctcgcctttacacacctgcccacgccccatatccctccactaggttccctcttttccaaccggaaactgcctctcgtcgcccccacattggttactccgggccgggctgggaatatagaggaggtagtgccgacagaggcacgagcgcctccctcgtcttcgttccgtctctccccacagggaaccgccgcccgtcgcctccagatacgtgcctccggcggaaaatcggtatcgagctcgctttttgcgagtgagtaacgcgcagcgactcctctcccaaccagattttgatggatttcgggcacgcgggccgggagcacggatatgttagcggatcgggcggccggatcaccgccggcttgctccctctcctcatgattgggcgcgctcatatccctcttttttttttctgcgcacggagactaggttggctctccgtaggcttccctccggctctccatcctgaccgctttcgctttgtgcagatcttctgtatagccagcaaggaggcctctccatctcctccgggaagctattgtgcaggctgtgcagcaatggagaagtataacagcaagactcagttagcacccttgagagataccccatttgctctccgtggtgctcttggtagttcaagctcataccttgagcaagccaggggctacacgtcttcccctctagcagctctgcgaccaaagatgtcttctactaccggaaatcgactcctgcactcgagttgccccctgtcatctcctgtagcaaaccgcccgctgtcgccccaccttcctctgaagaagccacagttcagcgcgactttctcaatctcgcatcgtatattcggtgtcgcgttgggagttgccatcgtatctgtccctctcgccaccaagttcagcctaatgtttggtgtctgagagcgatttgctgcgtctcatgagaaacatcattttccgtttctgtgtctgtttttcatcgtctcggttaccttgcgacacaactgtaggtgccgttggaataatatctttgccatgcttgcagacttgtgtaataagtaaataaacctataaaataccagtttaactgtttgaggagatttgcctcattatggatatgcatgctatgaagaaaaaaaaaaaaaaaaggggatctttcgaaatcgtaggcctgtgggggttcggatcacggacttcatccagctggcgacgctccaggtcttcgacgacgacgtcgatgttcttcagctcacgggtgaccagaactaaagcatgtaagcatagtggtgtcgtagtacagtacagtgatgggtatatgcaagaataatgcgtggtgttgctcttatttgctcaggcttacttgtttgtacataat

SEQ ID NO: 60932 - DNA, 361 bp, Zea mays
  unsure (1)..(361): unsure at all n locations
  Clone ID: MRT4577_155567C.1
tgcagaatcggcttaccgtgccgaatccgcgaacatgctaacctattggaggctactggctgcatgtatgggcgatatggctctgtactaagttgtatttaatatagtgatagttgttttctatgtgaaatagttataaaatcagggggggggggggggataaaacatnnnacataaaannttaattttaatatgtatatatagtgaaataattgagattaattaaatttaggtaattttgaatttaaaatttgggaaatttgtattgcgtgttaagttaatgaattgtttaagttaaggttagagtttttttgtgtattgggtantttttaaatttttattttattgatttattgggttg

SEQ ID NO: 60933 - DNA, 138 bp, Zea mays
  Clone ID: MRT4577_155568C.1
cttccctaaaggtggctggccgacacaaggcgtgaccggagattgacctggagaccattggggattccattgccttgcggggggccttgagggaagaaggccccaattttttccaaattattgccattgcaaatggtt

SEQ ID NO: 60934 - DNA, 1533 bp, Zea mays
  Clone ID: MRT4577_155569C.1
cttgacccacgcgtccggcgaaagatgtttgaataactttagaaagctgtctcctcagattgctggtagcatatatgcccccaaggtttattggaatctcagcacatctagaattctcaccatggagtttatggatgccaaggaggtaactgatgttagtggcattaaatcaattggagttcaccctgttgatgtttcaaacctagtcagtaaagcatttgctgagatgattttcaagcatggctttgttcattgtgatccccatgctgccaatatgatggtccgaccaatgccacaagacagcagaaaactttttggatggaaaaggccacagctggttcttcttgaccacggcctctacaaagagcttgattataatactaggataagctacgcttctctttggaaggcacttgtttttgctgatgcaaaagcaattaaggagaacagtgccaaactgggtgctggggaggatcttcatgcactctttgctggtgttctcactatgagaccatggaaaagggtgattgacccatctcctgatcatcttgtactaggaaaaaatactgattattcagaattacaggtacatatgtcctacaattgtatccccaatagtcatccgtggtaccaccgcaaatgtaatgatgcaaattgactatgttgttaaacattataacagtatctgtagggccatgggccgatgaagtagctagaatgctgttgtagaaagactgatattgtcgattgtggtttgattgttgttcatggaattcaacaggtctttaaatcttgacaagatcaacagagagaaaacagattacaaactttacttgaaatacatatagcagcccacactctaaaatgggatgaaaggaatacacatttcttagataatgttttacttgaaatctaacccttctttcgcccacgcgtatgctgatcatcttgtactaggaaaaaatactgattattcagaattacagaattacgcctccttatattttactgagatctccgagctactgaggagattaccaagggttatattgttgatgcttaaaacaaatgactgtttacgtgcagtcagtcatgccctggttgggggcagttccttggagtcgtttatgattattggacgggtatcttctgaagctgtgctggatgctaaaaggatgaacaggaggtcctttctcgatggattgaagatatggctggaggaagccctgctggaagctcgattctttactttgaagctgatgctatgtgttatgcaacttaggaagttgttgcctggctaaaagcagttaggcgtatcagcagcctttttgaccggtagaactgcggagttgacatctagttccatatattttcttgagggcgaaacttgacattttgcttagaagattgcctttcttttcgtatacataattcttctgtcgatcattttctcaccatgagtggccatttttcatggtcgatacttgataccttcattgggtgaatacaagtatacaaactgctgacgtggac

SEQ ID NO: 60935 - DNA, 222 bp, Zea mays
  Clone ID: MRT4577_15556C.1
cggtggaaaccagaagctctccacatacaagcccctggtgtccgctccagtgttctttctcagccaggaaccaaattccctgagtacagcattgcacctacactttaccctgaagattactacagacctgcacctacaatttcctctcaaggaaaaaaccctctgatggaaaccaccaggtttccgcagtataaatgtcttgaagtgaatcgcataaattga

SEQ ID NO: 60936 - DNA, 448 bp, Zea mays
  Clone ID: MRT4577_155570C.1
aaagcaacaacggaaacggccaaaatttttctaaaaaaccggggggaagggggggggaaaaaaaaaccctaacaaaagggggggggggaaaccacacaattcttgaaaacagacccccaaaacaggagggggggggcaactttggggaaaacaggggaaagggggagaaaacgggccggggggggggtaaaaaaaaaacttttttaggactgggaaccctgggggccatcctggccctaaagaaactaaaaaccgaccccctgggagtccttttggggggccgccggggcctaaggggcctaaaaaaaataacctttctcaaaaccctaaccgaagtaccagggaaaaaaggccccctgggggaaaaagagggaaaactggggggcgaggggggaaaacccccccaacacggggggggggggagaaatgcacacgggacgctgaacct

SEQ ID NO: 60937 - DNA, 362 bp, Zea mays
  Clone ID: MRT4577_155571C.1
agcgattctaagtctaggcagtgaccgaagttgaccatctactctgctagccagtccatacatgtgttcgtcaacgaccagtcctatgagttcttcaacaacaggcaccgtatatggtggctacgatagtcccaagctaacatacagtgggcatgtgaagatgtggcaaggcagcaataagaaattcagaaccaagcgacctccatgctcaagcatgaagcatcacttaagcgtgatgataaggttcaatatcaattgcatgtcgcggagatggaggcagttagcgttgcaatgcctcctgtttatgtaaatcacggtaatgatggtgggccagctgttaaggatatacatatggagaactt

SEQ ID NO: 60938 - DNA, 645 bp, Zea mays
  unsure (1)..(645): unsure at all n locations
  Clone ID: MRT4577_155572C.1
cgccgatcgacaaaacttccgctgaggcagccgaaagggtctcctgagggacctgcacaaggccatcaagcaaaccgagctggcgctgatctctgtcaaccccacaatccaattcatcaggaactacgagaagcatgaccatcaactcgaatgagcgattctaagtctaggcagtgaccgaagttgaccatctactctgctagccagtccatacatgtgttcgtcaacgaccagtcctatgagttcttcaacaacaggcaccgtatatggtggctacgatagtcccaagctaacatacagtgggcatgtgaagatgtggcaaggcagcaataagaaattcagaaccaagcgacctccatgacaaagcactaaatgatggtttggtgcaggctcaagcatgaagcatcacttaagcgtgatgataaggttcaatatcaattgcatgtcgcggagatggaggcagttagcgttgcaatgcctcctgtttatgtaaatcacggtaatgatggtgggccagctgttaaggatatacatatggagaactttagcgtcactattgatctaattcaagaagccactttaacgatcgtatttggaaggcactatggtgagtatnttgtgttgtttgatagatttcagtacgta

SEQ ID NO: 60939 - DNA, 845 bp, Zea mays
  unsure (1)..(845): unsure at all n locations
  Clone ID: MRT4577_155573C.1
ctgattcgtctcctgttggctgttgccttcgaccgcctccacctcgtctccgacgatgtcctccgtcgccggtgagggggaaggagagggaggaggacggcgccgacgggaggagccaaggagccaacaacatgaggacggggtcgaggtggccgacggaaaactggatttgggtgacctttacggcgcggcggcggggtgggtagaggcgcggaccagctgcccgcacctcggcaccatgccgcccgctggtgctgaattgctgatgaccttgctcgcgtgcctccgcccgactctccgtgctccagatgtcatgaccctgctgaaaactgattatgcttgatatgcaaagatgtgatgtgcagtcgttttatcaacaaacatatgttgtgccatcatgaagaagaaactggtcactgtcttgctttgagcttcagtgatctttcagtttggtgtttctcatgtgactcgtacctagatgttcaagccattttagaattgcgcccaagttgcacatttgttgaagtttggagaacaccttttcaatcacttgaagtactggatttcagcactggtgaaagtggaagttcatcaaggacttagttgtttgtattcaagtgatgagtttcttttcatgatgcttcaatcagatcaagacagacagttgtgtagtatcctggcactttttaagcttcagtgcgatataattcatttgagaaaaaaaaaaaaaaaaaaaaaaaaaaaaaaaaaaaaaaaaaaaaaaaaaaaaaaaaaaaaaaaaaaaaaaaanngnaaaaaaaaaaaanannattannnnnaaannccttttaaggggtaccactggt

SEQ ID NO: 60940 - DNA, 894 bp, Zea mays
  Clone ID: MRT4577_155574C.1
cccgggctcctgttggctgttgccttcgaccgcctccatctcgtctccgacgatgtcctccgtcgccggtgagggggaaggagagggaggaggacggcgccgacgggaggagccaaggagccaacaacatgaggacggggtcgaggtggccgacggaaaactggatttgggtgacctttacggcgcggcggcggggtgggtagaggcgcggaccagctgcccgcacctcggcaccatgccgcccgctggtgctgaattgctgatgaccttgctcgcgtgcctccgcccgactctccgtgctccagatgtcatgaccctgctgaaaactgattatgcttgatatgcaaagatgtgatgtgcagtcgttttatcaacaaacatatgttgtgccatcatgaagaagaaactggtcactgtcttgctttgagcttcaggtgggctgctgatcagaccagtgaccactggaccactaacctcaatgtgatctttcagtttggtgtttctcatgtgactcgtacctagatgttcaagccattttagaattgcgcccaagttgcacatttgttgaagtttggagaacaccttttcaatcacttgaagtactggatttcagcactggtgaaagtggaagttcatcaaggacttagttgtttgtattcaagtgatgagtttcttttcatgatgcttcaatcagatcaagacagacagttgtgtagtatcctggcactttttaagcttcagtgcgatataattcatttgagaagcccttgttcttttcctttttaccttcagttagtatatttcaataacccaaagcttccttagatagttatcacgacaggtgtaaatccctgtgcaccataggagatttgaaggcattattattgctttgat

SEQ ID NO: 60941 - DNA, 508 bp, Zea mays
  Clone ID: MRT4577_155575C.1
cccaggcgttcgtgcacgcgctcgtgaacatacactaaagaaatcatggtggccatgtcttacttcaacgataggcctatcataccttcactgacaaacgcatcctcgcattgtgaacgcactgctgaacacgcacatgcatggactcacggccgctcaatgtttgccagcggcatgacatttgcccctgcggcgtacgtaagaccgactacatgagcctgcgcagggcgcacaatgcgtacattaacactggactagaactactacttgagatctctgtagccgaccttgttactacgacttgcttctggacgtctctaaagcgctagctgatcaagccacactggacaacctccagctgggctacctcttgctacccttcaccagcagtctactgatctctgagcacatcgctgcattcgtggctgtagctgcctacgagctcggtgtggatacgcgtctgcctcaactactagaactgaggcagcatgctgatgactgcctgcac

SEQ ID NO: 60942 - DNA, 1214 bp, Zea mays
  Clone ID: MRT4577_155576C.1
ccgggtggtcgcctcggtccctgtgggaactcaccatagtgagtgttcaatgtagctgttctcaatgtgcagcttattcttaagcagatttctgaagaggctaatctctggtgtgtagctggtgttagtgggttagcttacttagaggccgctactagataatatggtggcttgtgtttagctgggtcattgttgtcgtcatttttgctcttcccttttcattccagttattttttgtggcgtctaggctcctttgggagttttagctcttcttccttgttaacgtaatgatacgtagctcacgtaatgatacatagctctcctacgtatttgagaaaaaatagtaaacaagtttatgatacatcacccaatcgaaaatggtttgattcaccaaaccaagcattccattagagtggcagttgatgccattgtcgtacaaggatttggcaatgctaaaatgttttaagttgctttttgtgtgtgtggcattgccaattcttagactgaagggaaggcctggtgcactctagagcctccacttgtatcctgaagtcgtgtgggtttgaaacagcgtaattgcaaaatgtatgtgagtgctaggttgtgtataaattcccttccctagacaacatatgtgtgaatgttcggcacttgcaaaaagggcatcttttcactatgactactcatacctgaattatgcataaattcatttttcaaatgcagggcaatagtgtcagtaaggttattatcaccattgttcttttattcagaatattctgtactataatatattcattattatgaatatgactgaagaaggataggttttctgtagtggtgagagctgtcttattgagtcagttggtttattgagttatcgtgggttcaaaaaagtctctgcatatgcggggaaaaacttaccttaggtcttactcggttgcaagggattaaaccccaccatagatttaatctgggtctggattgagtggattcataccttatacctaatcccatggtgggattaaattcatcatttaatccatgtatcactcaaagctagttattcttttgaatcatggattctaatataaatttgtacattattttcatagatttgtttcatatctaatgagctatggatataatccatgtgttacataatttaaaaaattaccaaacccttgggttataatccatgatgggtttaactgaat

SEQ ID NO: 60943 - DNA, 210 bp, Zea mays
  Clone ID: MRT4577_155577C.1
gcgcgccctttctgttcttccgcctttcccttctgtccaaatcactaatgactgaaggacaatgccgaaccatattacactacttttgcccctgctactgctggcctttcaaattttccatttatgtagaagaatggacaaccaatcccaaggccaaaaccattgcttgctcaatctctctgcactgcagggcgagggacacacacacac

SEQ ID NO: 60944 - DNA, 798 bp, Zea mays
  unsure (1)..(798): unsure at all n locations
  Clone ID: MRT4577_155578C.1
aggtatactcgtggtgtatcagnaacagnaaatataaatacccattttttatacgaattcagnaacttttatattcgcggcgngatacagaagtacctagataatacaacttcggattcaggtcgaatatagggtcgaatatagagcgagaactatctggtaaacactcgaatattcgggtcggatacaaatacaagggtttcaggtacccatttttctttttcatgtataatatttttttaataaaattataacttttacatatgaactcggacgaagataaagtttatatgaaaatcgtatagcttgaagagatctataattttgtagtacatcatttttttgtttggacatgtatctatatcaaaattattgaaataatgtttgaatttatatcaaagtaataaaatatacatcacttgtgtaactccaatactccgtatcttattaatagactatatatcacatatgttggattactttgtgttgtattagactatcttatgtcatttcaaaactatcttgtgttgtattaaactaccgtgtgattcaaatcttgctattacatttgaataattgtgttggactattgtatgatatcaacttattgctatattgtaatgttgatctatagtctatgcaatgctcacagagtaactgtcttacatgtgaactgaattttagtgaacaatatgtaatccatgcattatctaagtatccagcatccacatgtatctgaccaaataatatccgtattcgtcacttatctacctgaataaatattcggtccttgtatct

SEQ ID NO: 60945 - DNA, 3063 bp, Zea mays
  Clone ID: MRT4577_155579C.1
atggcgcccaagaggaagaccgcgaactcgtctgccgcagtgatccccgccatcgatcccaacagtcagttacccttcgcaggtaaccatatgtctgtgatttctgaggttgagcttctccgccttgtctccatcggggttctccctccacgggaactctgttcttggcgttcttgccatgggactactgtcccaaccgaagatacccacgagtcagtggtttacactcctttccttcttcgcggcctcggccttcccatatctccttttttccgtggcatccttgatttttatcacatcaacctgactcacttgaaccctaactccattctccaaatctctattttcgttcacctttgcgaagcttatcttggcttgctgccgcattttggcttatggaagtatctgtatcactgccgtcctgggatggccggggggcaacatcaattggtcggaggtgccagtttagagatgcgtcgggggcggaagaccgagtatctcgagataccccttaaagacagcattaaaggttggcgtctggagtggtttataatggataattatggaaattctctcccttcccgctcgggaagacaggcagacgttcgtactccgagttggactgaatctcccacggaccaagaagtagccgaagcgggtgtgttgcttactgaagttggattactgaaagaaagaggtctgactgccgaagccgtggtcacagattttgtgttcaaaaatattcagccgctgaaagacagggcctatccggcatatctttaccgagggctggccgactcaactcgagttactaataggagaattccttctgttgatttggtgagccgactcgaaatgatcctcaggggtaaagtttcaaatgttggagctccagtggcatactcggcttggaacctaccttctcccaaagctttcactctttttgtatccaatccacccatgacagatagcaatttgggtcttagagtgcgaccctctgctgaagaggtccgttccttagttgcttcgctcggggagatacctgatgatgaacggcagatttattttgaagtacccctgaaccctagtgatgcagacataaatgacatgctcgatctgctagccgaggattcatctgatactgttcctgatggtacattggcagtggtgccccttccagaggttaatgcgaccttggacgtctcgaaacctgtcagtactcgcccgaggcgccctagccgaaccagtcagcccgagccttctgcagatgagcagaagaagaaaagaagacgcctccggcgagtgtccagctttgacgaggatgccagcaccttagctcctgctgccgaggaaatgactgctactggccttgctgacgttgatcccaatgggtgtgcccaaactgtcgttgatcccaatgggtgtgctgcttgtgttgccactgtagaggatgaagaggaagatgatgaaattcctttaactcggaaaaacagtcagcaattcattgctagcggtgaaagtagtggggttccttctcctgctttgtctgcccttattggtctgcaagaactatccatggccaattttgatcaagctctagaggatatggtccctgagaacttgctgttggaacctgcagacgttgatgcaacagaaacttatgcggccgtgccagatgctgggttgaggtcatcccgtgcctcgtcgaccttagagcacgatctcgagggccggaatgatgacttggatcgtcctgatcctgcggaggtagctgaaggcccgtcgaccttagaggtggtcacggcagagagcttggatcctttgaacagtgctgacatgtgcccagcccccgagggtgtcgccggggaggactcagcgcaggtgaggagcgtaggccactacccagcccccgagggtgttgccgggggtgacccggctcaagtgggcagtgccaaccttgtcccagcccccgagggtgtccgagcagggtctccttcctgcacttcgatggacgttcacgtgggttcacctccacactctggtggcatggtggtggctcaagctccagatcagggggtcgctttagagggcagcgtccccactggtctggtgttaggctctgctgaatgtactgagctcgttcctgctggtctactgcaagctgcttcgggtggtggtccgacacctgattatcagttgatttctcctgacttggggatcccttcgttcttttccaacctccaggctttggtgaatggattggccagtcaactgaaatcacagggtgcttctaccccagaagtggcgtcatctctcgagcgttggaatccagtgttgcttcatcgtcgtgtatctgagttggaggccaccaatgctggtcattgtcctttcttcttcttctttgttcttgcccggatgactcggcagatcacagttattgaagaaaaacactttcaagatcaagctgaaatggctcgacgatgcgctgacttcgaggagaagtattctcaaagtcagatcgagttgagtcaggtctctgcggctttggatgatgccaacgctctgagttcttctcttcatgctcagcttgactctgagaaggaagaaaaacgtattcttgttgcttctcgtgacaacttggacagattgtaccgagattccagtaactcgctgaccatcttggagaggagccaccgttttacgatggaggagcttgacaatcagcgtcgtcaactgcaagagtcttcagacgaagtggcccgccttactcagttgttatcagcaaaggatgccaccatcaaggaactccgagcttccaagaaaaccactgcccgggagttagaaactgctcagctggccgctaaaactgctgaagagactgctgctactttcaaagcccagcgcgataaagccatggacaaggctattcgagcggggcgaatcttgatgagaagacccggagtggtagttcctgaagatataaaagctgatgtgcatgccacccccgattcctcaattcgcccctcttcatcggtcgttcctgagaaagatattggaaaatag

SEQ ID NO: 60946 - DNA, 412 bp, Zea mays
  unsure (1)..(412): unsure at all n locations
  Clone ID: MRT4577_15557C.1
cacaagtccatattccagcccgatcgtgagctcagctcagctccgctagtccgctccccgcacgcaccaccaccatgggcggcgccctgctcctcgcacttctcctcgcggccgtgcccctctccttgggcggcggcggcggcggcgcgcacccgggctactccgacgacgacgagagcgcgtgcacggtggacgcgggcgcggagctgctgcggcggctggaggagcgcgggcccggcgggcgcagcatcatcgacatcacgcacgcggtcgtgccggacctgccggcgttcgccacgggggcggtcgcggngcccatgctgcgcctcagggagtccatggcggacgggtccgagtacaacctgtcggagctgcggatggagtgccacaccggcacgcacgtcgacgcgcc

SEQ ID NO: 60947 - DNA, 155 bp, Zea mays
  unsure (1)..(155): unsure at all n locations
  Clone ID: MRT4577_155580C.1
gagggcttcttattccacaagaacgaaagcaccttttcattctttcatatactagtgggtttttgcttggacgaggcattgtgccatactatnggcttccggggcctggccgcgatctgcagtggcctggatgttgtccccgcttgggggggggg

SEQ ID NO: 60948 - DNA, 2829 bp, Zea mays
  Clone ID: MRT4577_155581C.1
atggcgcccaagaggaaaactgcgaacttgtctgctgcagtgatccccgcaatcgaccccaacagtcagttacccttcgcaggtaaccatatgtctgttatttccgaagttgagctcctccgtcttgtctccatcggggttcttcctccgcgggaactctgttcttggtgggtttgccacgggactactgtcccaactgaatatacccacgagtcagtagtttacactcctttccttctccgcggcctcggccttcccatatctccttttttccgtggcctccttgatttttatcacatcaacctgactcatttgaaccctaattccattctccaaatctccattttcgttcacctgtgcgaagcctacctcggtgtgcttccgcattttggtttatggaagtatctgtatcactgccgtcctgggatggccggggggcaacatcagttggtcggtggtgccagtttggagatgcgtcgtgggcggaaaaccgagtatcttgaaatacccctcaaagacagcattaaaggttggcgtttggagtggtttatagttgataactatggaaattctctcccctcccggtcaggaagacagccagacgttcgtactccgagttggactgagtttcccacggatcaagaggtggccgaggcaggcgtgttgctttctgaagtcggattactgaaagagagaggtctgactgctgaagttgtggtcacagattttgttttcaagaacattcagccgctgaaagacagggcttatccggcatatctttatcgagggctggccgactcaacccgagttaccgataggagaattccttctgttgacttggtaagccgacttgaaatgatcctcaggggtaaagtttcaaatgttggtgctccagtggcatactcggcttggaaccttccttctcccaaagctttcaccctttttgtgtccaatccacccgtgactgatagcaatttgggtcttagagtgcgaccctctgatgaagaagtcagtactttggttgcttcgctcggggagattcctgatgatgaacggcaggtttattttgaagtgcctctgaaccctagtgatgccgacataaatgacatgcttgatctgttagctgaggattcatccgatgctgctcctgatgaaatgactgcaactggccttgctgacattgaacccaatgggtgtgcaccgcctgctgctgaccccaatgaggatgctgtttgtgctgttactgtggaagatgaggaggaagaaaatgaaactccattaactcggaaaaacagtcggcagttcattgccagtggtggaagtagtggagttccttctcctgctttgtctgcccttattggtctgcaagaactgtccctgaccaactttgatcaaactctagaggatatggtcccagaggatttgttatcagagcctgtggatgttgacgcaacagagatctgcgctgccgtgcctgacgctgggttgaggtcatcccgtgcctcgtcgaccttagagcgcgatctcgagggtcaggatgctgacttggattgccccggtcccacggaagtggctgaaggcctgtcgaccttagaggtggttactgcagaaagcctaggccccaagaatggtgctgacacatgtccagcccccgaggatgtcgccaggaatgacttagctcgggcgaagagtgtaagtcactgcccagcccccgagggtgttgccggagattacccggctcgagtgggcagtgccgactgttacccagcccccgagggtgcccgagcagggtctccttcctgcacttccatggacgttcacgcgggttcgcctccacactctggctacatggttgtagcccaaattccgaatcagggagtcgctttagagggcagcgttcccgctgatctggcgtttggctctgtcgaaggcactgagttgattcctactgatccgttgcaagctgcttcggatggtggtcttgtacctgattatcaactgatctctcctgatttgggaataccttcgttcttctccaaccttcaggctttagtgaatgggatggccagccagctgagattgcagggtgcttctgtcccggaagtggcttcgtctcttgcgtgctggaatccagtgacgcttcaacgtcgtgtgtccgagttggaggcaacaaatgctggaatgactcggcagattgcagttcttgaagaaaaacattcccaagatcaagctgaaatggctcaacggtgcgctgacttcgaggagaagtattctcaaagccagactgaactgaatcaagtctccgctgctttggatgacgccaacgctctaagttcttctcttcatgctcggcttgactctgaaaaggaagagaaacgtatccttgctgcttctcgcgacaatctggacagattgtatcgtgattctagcaactcgctgaccatcttggagaggagccaccgtttcacaatggaggaactggacaatcagcgttgtaggttgcaagaatctgtggatgaaatgaccagccttaggcgattgctatcagcgaaggatgccaccatcaaagaactccggacttccaagaaaaccattgcccaggagttggaaaccgctcggctggctgctaaggttgccgaagagactgcagctactctcaaagcccagcgcgataaagccatggacaaggctattcgggcaggacgaatcttgatgaggagacccggcgtggttgttcctgaggacataagggctgacgtgatcgctgcccctgattcctcaagtcgcccttcttcgtcggtcgctcctgagaaagacattgccaaatag

SEQ ID NO: 60949 - DNA, 945 bp, Zea mays
  Clone ID: MRT4577_155582C.1
tacactaaatctgtcaatactcgcccgagacgccctagccgaaccagtcagcccgagccttccgctgatgagcaaaagaataagacaagacgcctccggcgagtatccagttttgatgaggacgccggtaccttaactcctgctgctgaagaagtgcctgcaactggtcttactgacactgatcccgatgggtgtgcccaaactgttgctgatcccaatgggtgtgcttcttgcgttgccgctgtggaggatgaagacgaagaatatgaagctcccttaactcggaaaaacagtcggcagttcatcgccagcggtggaagtagtggagttccttctcctgctttgtctgcccttattggtctgcaagaactgtccatggccaactttgatcaaactctagaggatatggtcacagaggatttgctatcagagcctgtggatgttgatgcaacagagacttgtgccgccgtgcccgatgctgggttgaggtcatcccgtgcctcgtcgaccttagagcatgatctcgagggtcgggatgctgaattggattgttccggtcccatggaagtagctgaaggcccgtcaaccttagaggtggttacggcagagagcttggaccccttgaatagtgctgacacgcgctcagcccccgaggatgtcgctggggaagacttagcttgggtgaagagtgtaagccactgcccagcccccgagggtgttgccggggatgatccggctcaagtgggcagtgccaactgtgacccagcccccgagggtatccgagcaaggtctccttcctgcacttccatggatgttcatgcgggttcacctccacactctggcggtatagtggtggcccaaactctggatcagggggtcgctttagagggcagcatccccactggtctggcgttaggctttgttgaatgtattgagctcgttcct

SEQ ID NO: 60950 - DNA, 546 bp, Zea mays
  Clone ID: MRT4577_155583C.1
atgcctggtcccgaggttgagctgcgccaaaaccgtgtcaaaaggatttggtttgagttcaaactttcccagaatgtgttcaaggaagaaaagtgtatccttgctgcttctcgtgacaatcttgacagattgtatcgtgattctagcaactcgctgatcatcttggagaggagtcaccgctttacaatggaggaactggacaatcaacgttgtaagctgcaggaatctgcggacgaagtgacccgccttaagcaattgatatcagcaaaggatgccaccatcaaagaactccgagcttccaagaaatccattgcccaggagttagaggctgctcggctggctgctaaagttgccgaagaaactgctgctactctcaaagcccagcgcgataaagccatggacaaggctattcgagcgggacgaatcttaatgaggagacccggcgtggttgttcctgaagacataaaggctgacgtgaatgctgcccctgattccttgagtcgcccttcttcgtcggtcgcacctgagaaagacattgcgaaatag

SEQ ID NO: 60951 - DNA, 2988 bp, Zea mays
  Clone ID: MRT4577_155584C.1
atggcgcccaagaggaagaccgcgaactcgtctgctgcagtgatccccgccatcgatcccaacagtcagttacccttcgcaggtaaccatatgtttgtgatttctgaagttgagcttctccgccttgtttccatcggggttctccctccacgggaactctgttcttggcgctcttgccatgggactactgtcccaaccgaagatacccacgaatcagtggtttacactcctttccttcttcgcggcctcggccttcccatatctccttttttccgtggcatccttgatttttatcatatcaacctgactcacttgaaccctaactccattctccaaatctctattttcgttcacctttgcgaagcttatcttggcgtgctgccgcattttggcttatggaagtatctgtatcactgccgtcctgggatggccggggggcaagatcaattggtcggaggtgccagcttagagatgcgtcgggggcggaagactgagtatctcgagataccccttaaagacagcattaaaggttggcgtctggagtggtttataatggataactatggaaattctctcccttcccgctcgggaagacaagcagacgttcgtactccgagttggactgaatctcccacggaccaagaagtagctgaagcgggcgtgttgcttactgaagttggattactaaaagagagaggtctgactgccgaagccgtggtcacagattttgttttcaagaacattcagccactgaaggacagggcctatccggcatatctttaccgagggctggccgactcaacccgagttaccaataggagaattccttctgttgatttggtgagccgactcgagatgatcctcaggggtaaagtttcaaacgttggagctctagtggcatactcggcttggaacctgccttctcccaaagatttcactctttttgcgtccaatccgcccgtgacagatagcaacttgggtcttagagtgcgaccttctgctgaggaggtccgttccttagttgcttcgctcggggagatacctgatgacgaacggcagatttattttgaagtgcctctgaaccctagtgacgcagacataaatgacatgctcgatctgctagctgaggattcatctgatactgctcctgatggtacattggcagtggtgccccttccagaggttgatgcgaccttggacgcctcgaaacctgtcagtactcgcccgaggcgccctggccgaaccagtcagcccgagccttctgctgatgagcagaagaagaaaaggagacgcctccggcgagtgtccagttttgacgaggataccagcaccttagctcctgctatcgaagaaatgtctgcaactggcctagctgacattgatcccaatgggtgtgctccgcctgctgctgaccccaatgagggtgttgtttgtgctgttgctgtggaagacgaggaggaagagaatgaaactccattgactcggaaaaacagtcggcagttcgtcgctagcggcggtagtagtggggttccttctcctgccttgtctgctcttattggtctgcaagaactgtctatggccaattttgatcaagctctagaggatatggtccctgagaacttgttgttggaacctgcagacgttgatgcaacagaaacttgtgcgggcgtgccagatgctgggttgaggtcgtcccgtgcctcgtcgaccttagagcacgatctcgagggccggaatgatgacttggatcatcctgatcctgcggaggtagctgaaggcccgtcgaccttagaggtggtcacggcagagagcttggatcctttgaatagtgctgacatgtgcccagcccccgagggtgtcgccggggaggactcagctcaggtgaggagcgtaggccactacccagcccccgagggtgttgccgggggtgacccggctcaagtgggcagtgccaaccttgacccagcccccgagggtgcccgagcagggtctccttcctgcacttctatggacgttcacgtgggttcacctccacactctggcggcatggtggtggctcaaactccagatcagggggtcgctttagagggcagcgtccccactggtctggtgttaggctctgctgaatgtactgagctcgttcctgctggtctactgcaacctgcttcgggtggtggtctgacacctgattatcagctgatttctcctgacttggggatcccttcgttcttttccaacctccagggtgcttctaccccagaagtggcgtcatctctcgagcgttggaatccagtgttgcttcatcgtcgtgtatctgagttggaggccaccaatgctgggatgactcggcagatcatagttcttgaggaaaaacattttcaagatcaagctgaaatggctcgacgatgcgctgacttcgaggagaagtattctcaaagtcagatcgagttgagtcaggtctctgcggctttggatgatgctaacgctctgagttcttctcttcatgtccagcttaactctgagaaggaagaaaaatgtatccttgctgcttctcgcgacaacttggacagattgtaccgagattccagtagctcgctgaccatcttggagaggagccaccgctttacgatggaggagcttgacaatcagcgccgtcaactgcaagaatcttcggacgaagtggcccgccttacacagttgctatcagcaaaggatgccaccatcaaggaactccgagcttccaagaaaaccattgcccgggagttagaaactgctcagcaggctgttaaagttgctgaagaagctgctgttactttcaaagctcagcgcgataaggccctggacaaggccattcgggcgggacgaatcttgatgagaagacctggcgtggttgtccccgaggatataagagccgacgtggttgctgcccctgattcctcgaatcgcccttcttcgtcagtcgttcctgagagagacattggaaaataa

SEQ ID NO: 60952 - DNA, 373 bp, Zea mays
  Clone ID: MRT4577_155585C.1
gagaggggaaggtcagcgtcaccagcaaccccgtcaggacctcgacctcaccgtcggcgacttctaggaggatgagatcgaccccgagctgcgctagtccttacagcgaaacagcagggtcctcgccatttcgggggattgttaccctgtccctggaacacgctgaacacgaagcagctgccagaggcggagccccctgcgaacaacgagctgctcacgacgaagcacgcgagagggggcggcgcgtagggagcccccacactggcaactcatccttggcttatgcgaattggcggacacccactggtttgggtgatgctgtcggtctgcgccagatgccctccactgtcgtcgatgtcagatcactgcctat

SEQ ID NO: 60953 - DNA, 906 bp, Zea mays
  Clone ID: MRT4577_155586C.1
ttggacgtcgcaacaccctatagtgagttcgtatgtccgagagaatcggctcggacagtcggactcgatcatcaattaagcgaacctcgccgcgatcgtatcagccatggcgaccgccgcgcacgagggcgtgacccagcgcgtcgctgccagtggcagcagggacgacggcgccagcggcggcatcgcggcggtctcgggtcccaacaagaagccgggcggcggcaggaggcggcgcggcctccgttcggtcgccgccgcggtgtccatccccgcggcgctcgtggctctgtccttcttcgccgcgggccactccacgccgccgccgagttccgccacggtggcggtggtgcgggccgggtcggtggcgtcggaggcggtgctggcgctggcggcgtggatggcgtgggcagagggcgggctgcacgcgcgtccggccgccacgctgctgccctacgccgcgcggctcggcgccgcgctcgcgtgggcgccgctcgtgctgggccgccacgccgcggcgcgcgcgggcctcgcctgctgcgccgccatggccgtgggcgccgtggcgtgcgcgcgcggcttcggcgccgtcaaccctgtggctggcgacctcgccaagcccgccgtcgcctgggccgtcatcctcgccgtcgtcaactacaagatgctctgagctcccgagaacacgcgcgcgctgttcgtgttcgatcctcggcagccaggcccctggttatttgttgtgaacatgtaataatgcgttggtttgtgtacagtatacgttctgagtatgttgttgtgtcctgcatattcatctgagaatgcagccaggcccctcgtcaactacaagatgttcttaaatttcgattgcgatgtaacaatgtatgtgtcccaagaggatcatcggtt

SEQ ID NO: 60954 - DNA, 1004 bp, Zea mays
  Clone ID: MRT4577_155587C.1
ctcaaggatttcggagtgacgtaccgagaagttccgcttgtagcagatggtggacttgattgcgatgctcttgcttgctccatcaggccggaaactgggtgtgccttcatacagagatcgtgtggatattcgtggcgcaagagcttaagtgtagcagatattcacaaagctataggtttgatcaagatgcaaaatccaaactgcatggtgatggttgataattgctatggtgaatttgttgagatatcggaacctgcaatggtggctgctcccacgattgcaggttccaagtctcataaagaatccaggtggaactattgcgccttgtggtggttatgttgctgggaaggagcatttagtcgaagcagctgcagcccgtctatctgcacctggccttggggtggaatttgggtcaacacctggccatgttatgcgtgcgctgtttcaaggcctgtttcttggtccgcaaatggttggagaagcagtaaaaggaggtttgctcattgcggaagtcatgtcagccaagggatacaaagttgaaccacttccgagggttcctcgtcatgatattgtgcaggcagtggagcttggcagcagggaaagactcatagcattctgtgaagtagtgcaacaaacttgtccagtaggatctttcatcaaaccaactgctggggaaacgcctggctatgcttcagaggtcattttcgccgacgggacattcatagatggaagcacaagcgaactgtcatgtgatgggcccttgagagatccatatgccgtcttttgccagggaggaacacattggacgcagtgggcacttgtccttggtaatgttctgaaggtcatataaacgtgcggtgtgataatgttgtcacatttcttgtatgggcatgctcttttcctatcctaactctgtactcgtttactaggaatggtggatactcactccgtctcagtttataaggctttataaggcgtaactacttttttaaaaaagaaacccc

SEQ ID NO: 60955 - DNA, 2856 bp, Zea mays
  Clone ID: MRT4577_155588C.1
atggcacccaagaggaaaactgcgagctcgtctgctgcggtgatccctccaatcgaccccaacagccagttgcccttcgcaggtaaccatatgtccattatttccgaagctgaacttcatcacctcgtatccatcggggttcttcctccgcgggaactctgttcttggcggacttgccgcgggactactgtcccaacagaggatacccacgagtctgtagtttacgctccttttcttctccgcggcctcggccttcccatctctccctttttctgcggcctccttgatttctaccacattaacttgacccatttgaaccctaattccattctgcaaatctccattttcgtccacttatgtgaagcctttctcggcgtgctgtcgcatttcggtttatggaagtatctgtatcattgtcgccctgggatggccgggggacaacatcagttggtcggaggtgccagtttggagatgcgccgtggatggaaaactgagtatcttgagattcccctcaaggatagcattaaggggtggcgtctagagtggttcatagttgataattatggaaattctctcccctctcggtcgggaagacagccagacgttcgcacctcgagctggaccgagtctcccacagatcaggaagtggttgaggcaggtgtgttgctagctgaagttggactgctgaaagagagaggtaaggtttcaaatgttggtgctccagtggcatactcggcctggaacctacctcctcccaaagctttcaccctttttgtgtcaaatccgcctgtgactgatggcaatttgggccctagattgcgaccctctgctgaagaggtcagtactttggttgcttcgcttggggagattcccgatgatgaacggcaggtttattttgaagtgcccctgaaccctagtgatgcggacataaatgacatgcttgatctgttagctgaggattcatccgacgctgctcctgttggtatgttggcagtggtgccccttccagaggttgatacaactttggatgtcccgaaatctgccattactcgcccgaggcgccccagccgaaccagtcagcctgagccttctgctgatgagcaaaagaaaaagagaagacgcctccggcgagtatccagctttgatgaggacgccggtaccttagtccctgctgctgaagatgtgcctgcaactggccttactgacgctgaccccaatgggcgtgctccatctgttgctgatcccaatgggtgtgctgcttgcgttgttactgtggaagatgaggaggaagaaaatgaagctcctttaactcggaaaaacagtcggcaattcatcgccagtggtggaagtagtggagttccttctcctgctttgtctgccctcattggtctgcaagaactgtctctggccaactttgatcaaactcttgaggatatggtcccagaggacttgttatcagagccagtggatgatgatgcaacagagacttgcgctgccgtgcccgatgccgggttgaggtcatctcgtgcctcgtcgaccttagagcgcgatctcgagggccaggacgctgacttggattgtcctgatcccatggaagtggctaaaggcccgtcatccttagaggtggttaccgcagagagcctggaccccaagaatggtgctgatacatgcccagcccccgaggatgtcgccggggatgacttagctcgggtgaagagcgtaagccactgcccagcccccgagggtgctgccggggatgatccggctcaagtgggcagtgccaactatgacccagcccccgagggtgcccaagcagggtctccttcctgcacttccatggacgttcacgcgggatcacctcctcactctggctgcatggtggtagcccaaactttggaccagggagtcgctttagagggcagcatccccgctgatcgagcgtttggctctgttgaaggcactgagctgattcctactggtccgttgcaagctgcttcgggtggtggccttgcgcctggttatcagctgattcctcctgatttggggatcccttcgttcttttccaacctccaggctttggtggatgggatggccagccagctgagattgcagggtgcttccgtcccagaagtggcttcgtctcttgcgtgttggaatccagtgtcacttcatcgtcgtgtacccgagctggaggcaactaacgctgagatgactcggcagattgcaattcttgaggaaaaacattcccgagatcaagctgaaatgattcaacggtgcgctgatttcgaggagaagtactctcagagccaaactgaattaaatcaggtctctgctgccttggatgacgccaatgctctgagctcttctcttcatgctcggcttgactttgaaaaggaagaaaaacgtatccttcttgcttctcgcgacaatctagacagattgtaccgcgattctagcaactcgctgaccatcttggagaggagtcaccgctttacaatggaggaactggacaatcagtgttgtaggttgcaagaatctgcggacgaagtgacccgccttaagcaattgatatcagcgaaagatgccaccatcaaagaactccgagcttccaagaaatccgttgcccaggagttagaagccgctcggctggctgctaaagttgccaaagaaactgcagctactctcaagacccagcgcgataaagccatggacaaggctattcgtgctggacgaatcttgatgaggagacccggtgtggttgttcctgaagacataaaggctgacgtgaatgctgctcccgattcctcgagacgtcctacttcgtcggtcgctcctgaaaaatacattgcgaaatag

SEQ ID NO: 60956 - DNA, 2004 bp, Zea mays
  Clone ID: MRT4577_155589C.1
ctcgaggtcctggcccgggaaaaaaaaaaaaaaaaaaaaaaaaaaaaaaaaaaaaaagccgccaggcgggtgggctgaccgccagacccaagccaacaagcaagagcattactacttctgcttgtgatccgaaacctttcttcgaacgcaagaaggatccccaccccgaccgacctaccgcgagccggcgatggcgacggtggcgatggacatctcgaagcccacgccagtggcgtccggcgacgaggccgcggcggcggccaaggggaggagcggcggagggggcgaggggctgcggcagtactacctgcagcacatccacgacctgcagctccagatccggcagaagacccacaacctcaaccgtctcgaggcccagcgcaatgacctcaactcccgagttagaatgctcagggaagagttgcagttgcttcaagagcctggctcatatgttggtgaggtggtgaaggtcatggggaaatcgaaggttctggtgaaggtacaccccgaaggcaaatatgttgttgatatagataagagcattgatatcacaaagatcacaccttcaacaagagtcgctcttcgtaatgacagctatatgctccatctgatcctaccaagcaaagttgatccattggtcaatctcatgaaagttgagaaggttcctgattctacttatgatatgattggaggtcttgaccagcaaattaaagagatcaaagaggtcattgagcttccaatcaaacatccggaactatttgagagccttggaattgcacaaccaaagggtgtcctcctttatggacctccaggcacaggaaagacattgctggcacgtgcggttgctcatcacactgactgcaccttcatcagggtgtctggttctgagttggttcagaagtatattggtgaaggctcccggatggttcgggaactctttgttatggccagggaacatgcaccatccattatatttatggatgaaattgactctatcggatctgctagaatggagtctggaactggcaacggtgatagtgaagtgcagcgtaccatgcttgaacttctaaaccagcttgatggttttgaagcttcaaacaaaattaaggttttgatggcaacaaacagaatagacattttggatcaagcccttttgaggcctggccgcatagacaggaagattgagtttccaaatcctaacgaggactcacgtttcgatattctgaagatccattcaaggaaaatgaacttgatgcgtggtatcgatctgaaaaagatcgcagaaaagatgaatggggcctcaggagctgagctcaaggccgtctgtacagaggctggaatgtttgctctccgtgagagaagggtgcacgttacacaggaggacttcgagatggcagtggccaaggtgatgaagaaagacacggagaagaacatgtccctgcgcaagctctggaagtgaggctcgtgcccacctttcacggcctccccgaagctagtggcagtgccttcatatccatatcttttaccaaagcagtggaatggtgtaacggcatgctctggacaatgttatctcaagttgcgccgcgcatgcttatgtttaaaattttccttataacggctgtagtgtgttgttgcaaagttgattggatttatcagatcagctagattacggtactaatacattgctagctcgcgatgtggacactgcataatggttacttgctcggattatccacattctcgtgtgtaacatgcattgcaatgtcgtggcccattcaatatctcatatttttaaaaaaaaataaaaaaaaaaaaaaaaaaaaaaaaaaaaaaaaaaaaaaaaaaaaaaaaaaaaaaaaaaaaaaaaaaaaaaaaaagcccccacccaaattttcgtgtgtagcgaggggatggtgatagattttgccatcgagtggagccttgccgacaacgcgaatagaggaaaaagagagcgcgcaccggtagctcaggttttgaacggtg

SEQ ID NO: 60957 - DNA, 548 bp, Zea mays
  Clone ID: MRT4577_15558C.1
ggacacacaaaccacagatgtttattagacgacgacttccatatagaggtacaccagagggcaccagacgacgcagatacccaggtacagaagcagtttaaatgacccatggtttactgaccaccggggaggcggagcaccagggggaaagggctctccttctggatgttgaagtctgctagggtgcggccatcctccagttgcttgccaaagaaaatcaaacgctgttggtctggggggatgccctttttgtcctggattttcgccttcacgttgtcaatggtgtcggagctctcaacctccagggttatggtcttgccagccaaggtcttcacaaaaatctgcataccacctcgcaagcggagcaccaggtggagggggctctccttctggatgttgtagtcggcgagggtacggccatcctccagttgcttgccagaaaagatcaggcgctgctggtccgggggaatgccctccttgccctggatcttggctttgacattatcgattgggtcagacaactccacctccaaggggatggtcttgcc

SEQ ID NO: 60958 - DNA, 2520 bp, Zea mays
  Clone ID: MRT4577_155590C.1
atggcgcccaagaggaaaactgcgaactcgtctgctgcggtgatccctgcaatcgaccccaacagtcagttacccttcgcaggtaaccatatgtccgttatttccgaggctgagcttctccgcctcgtctccatcggggttcttcctccgcgggaactctgttcttggcggatttgccacgggactactgtcccaacagaggatacccacgagtctgtagtttacgctccttttcttctccgcggcctcggccttcccatctctccttttttccgcggcctccttgatttctatcacatcaacttgacccatttgaaccctaattccattatgcaaatctccattttcgttcacctatgcgaagcctatctcggcgtgctgccgcatttcggtttgtggaagtatctgtatcattgtcgccctgggatggccgggggacaacatcagttggtcggaggtgccagtttggagatgcgccgtgggaggaagactgagtatcttgagattcccctcaaagatagcattaaggggtggcgtctagagtggtttatagttgataattatggaaattctctcccctcccggtcgggaagacagccagacgttcgcactccgagttggactgagtctcccacagatcaggaagtggccgaggcaggtgtgttgctaactgaagtcggattgctgaaagagagaggtctgactgctgaagctgtggtcactgactttgtttttaagaacattcagccactgaaagacagggcctatctggcatatctgtatagagggctagccgactcgactcgggttaccaataggagaattccttctgtagatttggtaagccgacttgagatgatcctcagaggtaaggtttcaaatgttggtgctccagtggcatactcggcctggaacctacctcctcccaaagctttcaccctttttgtgtcaaatccgcctgtgactgatggcaatttgggccttagagtgcggccctctgctgaagaagtcagtactttggttgcttcgctcggggagattcctgatgatgaacgcgatgcggacataaatgacatgcttgatctgttagctgaggattcatccgatgctgctcctgatggtacgttggcagtggtgccccttccagaggttgatacaactttggatgtcccgagacctgtcagtactcgtccgaggcgccctagccgaaccagtcagcccgagccttctgctgatgagcaaaagaagaaaagaagacgcctccggcgagtatccagttttgatgaggacgccggtgccttagctcctgctgctgaagaagtgcctgcaactggcctttctgatgctgaccccaatgggtgtgcccaaactgctgctgaacccaatgggtgtgctccatctgttgttgaacccaacgggggtgctgcttgcgttgttactgtggaggatgaggaggaagaaaatgaagctccattaactcggaaaaacagtcggcagttcatcgccagtggtggaagtagtggagttccttctcctgcattgtctgcatttattggtctgcaagaactgtccctggccaactttgatcaaactctagaggatatggtcccagaggacttgttatcagagcctgtggatgatgatgcaacagagacttgcgctgccctgcctgatgctgggttgaggtcatcccgtgcctcgtcgaccttagagcacgatctcgagggtcgggacgctgacttggattgttctggtcccatggaagtagctgaaggcctgtcaaccttagaggtggtcactgcagagagcctggaccccaagaatagtgctgacacatgcccagcccccgagaatgtcgccggggaagacttagctcgggtgaagagtataagccactgcccagcccctgagggtgttgccggggatgatccggctcaagtgggcaatgccgactgtgacccagcccccgagggtgcccgagcaaggtctccttcctgcacttccatggacgttcacgcgggttcacctccacactctggcggcatggtggtggcccaaactctggatcagggagtcgctttagagggcagcgtccccgctgatctggcgtttggctctgttgaaggcactgagctcattcctactggtctgttgcaagctgcttcgggtggtggtctggcatctggttatcagctgatttctcctgatttggggatcccttcgttcttttccaacctccaggctttcgtggatgggatggccagtcagctgagatcgcagggtgctttcatcccagaagtcgcttcgtctcttgagcattggaatccagtgtcgcttcatcgtcgtgtatccgagttggaggcaactaacgctggaatgactcggcagattgcagttcttgaggaaaaacattcccgagatcaagctgaaatggctcaacggtgcgctgacttcgaggagaagtattctcagagccagactgaactaaatcaggtctccgctgctttggatgacgcctga

SEQ ID NO: 60959 - DNA, 247 bp, Zea mays
  Clone ID: MRT4577_155591C.1
tgtcgttctcttctcgagccgcacgactacatcggcctgtgcgctgtggtggcgtccccgacgccgagctcgtcgtcctgctcgtcctcgtcgaacccaggcggcgaggcccgcggcctacgccttacgcttcgcctcggtctcccggggtcggagtcccccgagcgggaggttcgtccccgcggggctcaccctcgggcctctgtccccgtccaccaccaaggcggcctccaagcgcgcctttccc

SEQ ID NO: 60960 - DNA, 360 bp, Zea mays
  unsure (1)..(360): unsure at all n locations
  Clone ID: MRT4577_155592C.1
ttttattttaattataagtctattagttctcggactagtacatgtgtttccacccacgcgtccgcccaaacggntanatgaacaattagnttttttctgtaacgaatgttcatataattaagaacaatcttgcctgcatatcttttatttggttacgacaacttatctttttttttccgttgctttatttaacgatcaatccgggtaccatgatatgattttatcaggaaggcatatcatcagtattcacttgcgagctcattttttggtgtcagcttccgcgaatcgtgcctggaggaggtggggaaactctcctatttggtctgtgtccgggatgaccttcttgtctacttctagcgc

SEQ ID NO: 60961 - DNA, 485 bp, Zea mays
  unsure (1)..(485): unsure at all n locations
  Clone ID: MRT4577_155593C.1
gaagaaaaatgtatccttgctgcctctcgcgacaatctggacagattgtatcgagactctagcaactcgctaaccatcttggagaggagccaccgttttacgatggaagaactggacaaccagcgtcgcaggctgcaagaatccgcagacgaagtgacccgtctcacgcaattgatatcagcaaaagatgccaccatcaagggactccgagcttctaagaaatccattgctcaggagttagaagctgctcagctggctgctagagttgccgaagaaactgctgtcactctcaaagctcagcgtgataaagccatggacaaggctattcgggcgggacgaatcttgatgagaagacccggcgtggttgtccctgaagacataagagccgatgtgaatgctgcccccaattctttgaatcgcccttcttcgtcagtcgtccctgagacagacanttggaaatagagaaacatttcggtgctatgagc

SEQ ID NO: 60962 - DNA, 2331 bp, Zea mays
  Clone ID: MRT4577_155594C.1
atgggcaagagtaacaaacgcaagcgcgagccgactcctccgtcggaggacttcggcgactcggaatactcggaggaggagttctcctccgagtccgaggggtctccggctcccgtctctcccccggcgtcgtctgatgattcagacgactcccaggggattgtcgcggaagtctggacgtacatccgggccgtcgagcgctccaggctcgagggctcggatgagtcggagtactcctcggatgaggaggactcggacggcggtgaggacgaagacgacgacgacggcgacgacgacgacggtggcgacggcgacggtgacggcaacggcagcggcgggggtagcggcggcggcgacgggagcaagggcagcaccagaggcggcggcagcaagggcagcaccaggggcggcagcagcaagggcagcaccaggggttttggaaataaccgtcgggtgatgactgggcactttttgaaacggtatctggctcgagaatatcccataagagctgtgcttttagccgcctttgctttccgtgccctagttcttgcattcccgcttccgaatcctctctgccattcgcctcctactctgctcgctggtgaaatcgagatggcgcccaagaggaagactgcgagctcgtctgctgtggtgatccctccaatcgatcccaacagccagttgcctttcgcaggtgccagtttggagatgcgccgcgggcggaaaactgagtatcttgagattcccctcaaggacagtattaaggggtggcgtctagagtggttcatagttgataattatggaaattctctcccctcccggtcgggaagacagccagacgttcgcactccgagctggaccgagtctcccacagatcaggaagtggctgaggcaggtgtgttgctaactgaagttggactgctgaaagagagaggtctaactgctgaagctgtggtcgctgactttgttttcaagaacattcagccactgaaagacagggcctatccagcatatctgtatcgagggctagccgactcaactcgggttaccaataggagaattccttctgtagacttggtaagccgacttgaaatgatcctcaggggtaaggtgtcaaatgttggtgctccagtggcatactcagcctggaacctgcctcctcccaaagccttcaccctttttgtgtcaaatccgcctgtgactgatggcaatttgggccttagagtgcgaccctctgctgaagaagtcagtactttggttgcttcgcttggggagattcctgatgacgaacggcaggtccattttgaggtgcccctgaaccctagtgatgcggatataaatgccatgcttgatctgctagctgaggattcctccgacgctgctcctgctggtacgttggcagtggtgccccttccagaggttgatacaactttggatgtccagaaacctgtcagtactcgcctgaggcgccctagccgaaccaatcagcctgagccttctgctgatgagcaaaagaagaaaagaagacgcctccggcgagtatccagttttgatgaggacgctggtacctcagttcctgctattgaagaagtgcctgcgactggacttactgacgctgatcccaatgggtgtacccaaactgctactgatcccagtgtgggcgctccatctgttgctgatcccaatgggggtgctgcttgtgttgtcactgtggaagatgaggaggaagaaaatgaggctcctttaactcggaaaaacagtcggcagttcatcgccagcggtgaaagtagtggagttccttctcctgctttgtctgccctcattggtctgcaagaactgtccctggccaactttgatcaaactcttgaggatatggtcccagaggacttgttatcagagccggtggatgatgatgcaacggaggcttgcgctaccgtgcctgatgctgggttgaggtcatcccgtgcctcgttgaccttagagcgcgatctcgagggtcgggatgctgacttggattgtcctggtcccatggaagtggctgaaggcccgtcaaccttagaggtggtcactgcggagagcctggacctcaagaatggtgctgacacatgcccagcccccgagggtgtcgccggggatgacttagcttgggtgaagagtgtaagccactgcccagcccccgagggtgctaccggggatgatccggctcaagtgggcagtgccaactatgacccagcccccgagggtgcccaagcagggtctccttcctgcacttccatggacgttcacgcgggatcacctcctcaagctttcatccttcttcttcacaaatag

SEQ ID NO: 60963 - DNA, 447 bp, Zea mays
  Clone ID: MRT4577_155595C.1
tcgtcccacgcgtccgtgctgccgccgcagcggaacaggtctgaacctccccttcgccggagacagccgcgacttcgcgagcggcatggtactgcctccccttcgccgacccaagaggctgcccggcggcggcgctctgccgcgacggccagggtttcctcgtcgcccgttgacgcgtccggctgctgattgatctgataaagaatggtatttagaaaaagctgtgttcctgatttttctgctgggcttcatccctcatgataggtgctgttatgctcatccgtttttttttgtggagatctttcttatcatttactttacaggatgattcatatctggagagagctagatcagtactattggagttgatttcgtacgttagtttatcgatgagattaagcaaagctgattccttctgtagtgtcagaccgtgcttgcattgccttg

SEQ ID NO: 60964 - DNA, 540 bp, Zea mays
  Clone ID: MRT4577_155596C.1
cacaactccaccggtagtaacaaagccagtacgtagcgcaagcagagagtttaggtcgctcccagcccggccgctcaccatgtggaccaagaaggtggcgacgcaggtggctttggtcctgcttctccttctcatcgcacaggaggcggcggtgccgggggcggaggcgaaggtctgccggcagcgcagcgcggggttcaaagggccgtgcgtgtccgataagaactgcgcgcaggtctgcctgcaggaaggctggggcggcggcaactgcgacggacccttccgccggtgcaagtgcatcaggcagtgctgatcataatatgtggtacggctagctggccctcaccgtacgtcagctagctagcccatggaatcatacgtctgtgtacctacttgaatgtgtgtgtgtgtgccgccttctacgtacgtatgtcgtatgtatatccgtatcaccactagccagctgctgcatctcgatcgatgcatgcgagagaataataataagaataaaaacgtacggttcatgttccgttccttgtc

SEQ ID NO: 60965 - DNA, 302 bp, Zea mays
  Clone ID: MRT4577_155597C.1
cgaggccggccgggccgggccttcgctccgccttctcatcactgggcctgggggagatcgagacctagagcggaggacgggtgggcggcgctgagggccttaggcgaatggcggtagaggaggccgcggagagctgcggcagccacgccgcggccgctgcgtccggcggcggcgcggtggttctcgctacgtcctcgtcttctgtcgtcgcggtttttaattttcttttttttttttgtcccttctttttttcctcccttggtcgcgttttttctttttcttctttgttttttttttttttt

SEQ ID NO: 60966 - DNA, 2622 bp, Zea mays
  Clone ID: MRT4577_155598C.1
atgtctgtgatttctgaagttgagcttctccgccttgtctccatcggtgttctccctccacgggaactctgctcttggcgtgcttgccacgggactactgtcccaaccgaagatacccacgagtcagtggtttacactcctttccttcttcgcggcctcggccttcccatatctccttttttccgtggcatccttgatttttatcacatcaacctgactcacttgaaccctaactccattctccaaatctctattttcgttcacctttgcgaatcttatcttggcgtgctgccgcattttggcttatggaagtatctgtatcactgccgtcctgggatggccggggggcaacatcaattggtcgggggtgctagtttagagatgcgccgggggcggaagaccgagtatctcgagatacccctcaaagacagcattaaaggttggcgtctggagtggtttataatggataattatggaaattctctcccttcccgctcaggaagacagccggatgttcgtactccgagttggactgagtctcccacggaccaagaagtggccgaggcaggcgtgttgcttactgaagttggattactgaaagaaagaggtctaactgccgaagctgtggtcacatattttgttttcaaaaacattcagccgctgaaggacagggcctatccggcatatctttaccgagggctggccgactcaacccgagttactaataggagaattccttctgttgatttggtgagccgactcgaaatgatcctcaggggtaaagtttcaaacgttggagctccagtggcatactcggcttggaacctgccttctcccaaagatttcactctttttgtgtccaatccgcccgtgacagatagcaatttgggtcttagagtgcgaccttctgctgaagaagtccgttccttagttgcttcgctcggggaaatacctgatgatgaacggcaggtttattttgaagtgcccctgaaccctagtgatgcagacataaatgacatgctcgatctgctagctgaggattcatctgatactactcctgatggtacattggcagtggtgccccttccaaaggttgatgcgaccttggatgtctcgaaacctgtcaatactcgcccgaggcgtcctagccgaaccagtcagcccgagccttctgctgatgagcagaaaaagaaaagaagacgcctccggcgagtgtccagctttgacgaggatgccagcaccttagctcctgctgccgaagaaatgactgcaactggccttgctgacattgatcccaatgggtgtgctccgcctgctgctgaccccaatgaggatgctgtttgtgctgttgctgtggaagatgaggaggaagagaatgaaactccattaactcggaaaaacagtcggcagttcgtcgctagcggtggtagtagtggggttccttctcttgccttgtctgctcttattggtctgcaagaactgtccatggccaattttgatcaagctctagaggatatggtccctgagaacttgttgttggaacctgcagacgttgatgcaacagaaacttgtgcagccgtgccagatgctgggttgaggtcgtcccgtgcctcgtcgaccttagagcacgatctcgagggtcgggatgacgatttggatcgtcctgatcctatggaagtagctgaaggcccgtcaaccttagaggtggtcacggcagagagcttggatcccttgaatagcgctgacatgtgcccagcccccaagggtgtcgccggggaggactcagctcaggtgaggagtgtaggccactacctagcccccgagggtgttgccgggggtgacccggctcgagtgggcagtgccaaccttgacccagcccccgagggtgtccgagcgaggtctccctcctgcacttccatggatgttcatgtgggttcacctccacactctggcggcatgatggtggctcaaactccggatcagggggtcgctttggagggcagcatccccactggtctggcgttaagctctgctgaatgtactgagcttgttcctgctggtctgctgcaagctgcttcgagtggtggtctggcacctggtcatcagctgatttctcctgacttggggatcccttcgcttttctccaacctccaggctttggtggatggaatggtcggccagctgaagtcgcagggtgcttccatcccggaggtggcttcatctcttgagcgttggaatccggtgttgcttcggggtcgtgtatctgagttggaggccaccaatgctgggatgactcggcagatcacagttcttgaagaaaaacactctcaagatcaagctgaaatggctcgacgatgcgctgacttcgaggatgtgatacccggtttgcaaagaagagaagttgaagccctcaccacccaaaaccctagccgcccccccatttctccccctcctccaaggtgcagccctcccgtgtggttctccgtcgtgtggctgcgatctcaattggagtttggagggaggaagaaggaaggagaaagggaagaacctaaggtggtggacttccggatcgtacttagggatttgcccaaacttccggtacttgatacatgttgggaatga

SEQ ID NO: 60967 - DNA, 193 bp, Zea mays
  Clone ID: MRT4577_155599C.1
acccactcgtccgactgttaattcgttctatctgcctacctttcgcattctcttgaacccattctctatacgagtatcgatatcactgagctaaaacttatcattcgactgcattccatcatctatatataaactatcgacttcgatctcttcgccacgatccatctctaaatcagcactcactaccttacct

SEQ ID NO: 60968 - DNA, 1493 bp, Zea mays
  Clone ID: MRT4577_15559C.1
cttcttcaagaccccggtatatgccaaccatctctctccggtccgggccggatccgcgtccgaaacaagataagtcgcggtttgcgacggcgagaagcgccggacgagtgtccactgacgcgtccctctcacaagtccagattccaattccagtccgatcgtgagctcagctcagctccgctagtcctctccccgcacgcaccaccaccaccagcagtccagcaccatgggcggcgccctgatcctcgcgctcctcctcgcggccgtgcccctctccttgggcggcggcgcgcacccgggctactccgacgccgacgagagcgcgtgcacggtggacgcgggcgcggagctgctgcggcggctggaggagcgcgggcccggcgggcgcagcatcatcgacatcacgcacgcggtcgtgccggacctgccggcgttcgccacgggggcggtcgcggggcccatgctgcgcctcagggagtccatggcggacgggtccgagtacaacctgtcggagctgcggatggagtgccacaccggcacgcacgtcgacgcgcctggccacatcaaccaggcccacttcgccgccggcctcgacgtcgacacgctcgacctccacgtcctcaacggacctgcattgctagttgatgtgccaagaaacacaaatataacagctgaagcgatggaattcctaaacatcccgagaggggttcgccgagttctgttcagaacactgaacactgacaggaagttgatgtggaggaagggaggtgacatgagctacgttgggtttacagaggatggcgcacagtggttagttgacaacaccgacataaagctagttggagttgacagtctgtcagtggcatcatttgatcacctgatctctgcccacgtggtctttttcaaaaccccggatataatccctgttgagagcctgaatctggacgacatcgaggcggggatatacatgctgcactgtctacctctcaggctggtcggagccgagggtgcaccgaccagatgcatcctcatcaagtgatcgttccccggccggcctgctcttgctgccttgctggaggtggcgacactggaccatgccagctgagctggtgctccgtcgtgggtcgcgtggccaatatttggctcgcatgcagtcgtcgatctatatggaacagaacactgcatgcctatgtagatacgcttgtatggacaataaaggaaccgcagtacttctgtcgatgaaatacttttgggtgagccggtaatctaaaacaccaggcctacaggttaagctggaggccctggaaggctgaggctagcggctggggatggatccagatttttatttgaatgttatttttttgtcatctttctttgattgtaaacaaataacatatatgattttctatataaatttatattgttgtttttaaaaaaaaaaaaaaaaaaaaaaaaaaaaaaaaaaaaagaaaaaaaaaaaaaaaaaagcggcc

SEQ ID NO: 60969 - DNA, 376 bp, Zea mays
  Clone ID: MRT4577_1555C.1
cgccagtgtgaggcaatctgcataatcgcccttacgggggcggggcggagggcaagcttttttttttttttttatttctttttttggggggtgggggtgttttggcttttttttgttttggtgtgttggggtctgcttcttgccggggttggggtccgtccttttttcgtttctgctgggttgggtcttttcgggggggggggcggtgggcgtcgtggtggcgggttcctgctggtccggggggggggtcttgcgttccttttcggcgttgtgatggtcccgctgtcggggtctttttcgtctccttgcctctgttgttcgttctctggggccgggtgcgtcttcttgcttggttgggggggctgctttgcccccg

SEQ ID NO: 60970 - DNA, 145 bp, Zea mays
  Clone ID: MRT4577_155600C.1
gccactcgtacgaagacgcgttagactgcatgcaggcggcactaatccctgcgtacggtgcacgctcgacccaataactttcacacgtaataccgtacgtactacaggcacctctccccggcttccatctgtcatagtgcagata

SEQ ID NO: 60971 - DNA, 1122 bp, Zea mays
  Clone ID: MRT4577_155601C.1
gggagggccgtccggcggggaggagctcgacctcttcatgacgcactatgtattgctcctttgctcatccacgcgtccgcccacgcgtccggcagcatgtacgtgttcatgcaatggaagcagtgatgggttgctgggagcttgaacaatctttacaaagcctaacaggggcatctcctggtgaaggcactggagcgaccatgtctgatgatgaagacaaccaggtggatagcgaagccaacatgtttgatggaaatgatggatcagatggtatgggctttggccccttaatgctgacagagggtgaacgatccttagttgagcgtgtacggcaggagctaaagaacgagcttaagcagggttacaaagaaaagcttgttgatatcagggaagagattatgcgcaagcgcagagctgggaaacttcctggagatactgcatctgtgctgaaagcttggtggcaagctcattccaagtggccatacccaactgaagacgacaaggcacgactggtgcaggaaacgggattgcagctaaagcagattaacaactggttcatcaaccaacgcaaacggaactggcacagcaacccaacatcctcgggtgaaaagactaagaagaaaaggtgatattgatccagagcaatcttgacgatgctaaacgtccactgtgtactttatggcgaagtacattaccctccctccgtagccaggagcggagatgtgcatcttgggtggcccagtggtcacttaatgccccaagtttgaccacgttgtgggactggtgctagtagtgacctctgcagtatagtaatattcactaatgttgtgggaatcatgtggtgtataaccggcgaacgggagggagtaatttatgttttattgtaattgtctatctttaccttgtaatgatattttagggagaatcccaagatctcagaatggccgttcactgtattgtcggtggtaaaagtggtgggcaatcatcgtgttcagattacctccagaagggtatgcaatggctcgaatgttccatgtcgtgtttagctggttgtcgtttgtcttacttcctgctgagttggatacttgattccttcgaagatgtaaagcacccatcgatgcc

SEQ ID NO: 60972 - DNA, 891 bp, Zea mays
  Clone ID: MRT4577_155602C.1
ttcttcgggcgcgagacacatggcagcagttgagataggttgtgagccaattgtgagaaagcatgtacgaggcatcttcatgaataaagcagttgtgtcaacaagtcccacatctgagggaaatacaatcatagatccatatcaccaactatcgggtgttaagtggctgagagagaaaccacttagcaagtttgttgatgcacagtggctccttattcagaaagcagaggaagaaaagctcctcaaggttaccgtaaaattgccagaagatgcaaagaaaaaactcatgtctgaagcacgtgagaattatctaagtgattgtgtcagcaagtctgcacaattgtgggatgagcaacggaagatgatactggatgatgctttcttcaacttcctccttccatcaatggaaaaggaagctcgatcactgttgatgacaaaagccaaacattggctccatatggaatatgggaaacagttgtggaacaaggttactgttgctccttggaagaagaaagatgcggacaagaaggatgctgacattgatttggatgatgaatcagagttgagagttatggcttgctgctggggtcctgggaagccagcaaccacctttgtaatgttagactcctcaggagagttggttgatgttctgtatgcaggctctatcagtaacaggtctcaaggtgtcgctgagcagcagcggaagaagaacgaccagcagcgagtcttaaagtttatgactgatcatcaaccacatgttgtgtgtgtaggagcatcgaactacaattgcagacaactgaaggatgatctttatgaggttatttttaaaattgtagaggatcatccaagggatgttaacgcccaaaaaaaaaaaaaataaaacggccgctc

SEQ ID NO: 60973 - DNA, 750 bp, Zea mays
  Clone ID: MRT4577_155603C.1
gcttgtcgatatcagggaagagacatgcgcaaacgcagggctgggaaacttcctggagataccgcatctgtactgaaagcttggtggcaagctcattccaagtggccgtacccaactgaagacgacaaggccagactggtgcaggaaacggggttgcagctaaagcagatcaacaactggttcattaaccaacgcaaacggaactggcacagcaacccaacatcctcggctgaaaagaccaagaagaaaaggtgatgatggcccagagcaatcttgggaaaagctagagatgtccactatactttattatggcgaagtacattctccctcacttcgtaggcaagagggaaaagtatcttgggtgacttgagtggccacctaaggctttgtttgggtactctagcattgaccccaatccacatgtgttgaggtggattggggtgtaaattagtttaagttacacctcaatccacctcaatacaagtggattgaggtcaataccagagtacccaaactaagcctaatgtgcaagtttgacaacgtggttgggctggagttggtagtgacctcagcagtatagcattcgctaacgtgatgtgggtgaatcacgtgttgcagtagaaccggcgagcgggaggggggtaatttatgttgtattgtaattgtgttttttattaccttgtaatgatattttagggtgaatcccaagattcatattcgcaaaaaaaaaaaaaaaagcgggcgcttggg

SEQ ID NO: 60974 - DNA, 925 bp, Zea mays
  unsure (1)..(925): unsure at all n locations
  Clone ID: MRT4577_155604C.1
caaggaacagctgcagcagcatgtacgtgttcatgcaatggaagcagtgatgggttgctgggagcttgaacaatccttacaaagcctaacaggggcatctccgggtgaaggcactggaggaaccatgtctgacgatgaagataaccaggtggatagtgaagccaacatgttcgatggaaatgatggatcagacggtatgggctttggccccctgatactaacagagggtgaacggtccttagttgagcgtgtacggaaggagctgaagaacgagcttaagcagggttacaaggaaaagcttgtcgatatcagggaagagatcatgcgcaaacgcagggctgggaagcttcctggagataccgcatctgtactgaaagcttggtggcaagctcattccaagtggccgtacccaactgaagacgacaaggccaggctggtgcaggaaacggggttgcagctaaagcagatcaacaactggttcattaaccaacgcaaacggaactggcacagcaacccaacatcctcggctgaaaagaccaagaagaaaaggtgatgatggcccagagcaatcttggcaaaaagctagagatgtccactatactttattatggcgaagtacattctccctcacttcgtaggcaagagggaaaggtatcttgggtgacttgagtggccacctaatgcgcaagtttgacgacgtggtggggctggagttggtagtgacctcagcagtatagcattcgctaacgtgatgtgggtgaatcacgtgttgcagtagaaccggcgagcgggaggggggtaatttatgttgtattgtaattgtgttttttattaccttgtaatgatattttagggagaatcccaagattcatattcgcaaaaaaaaaaaaaaaaaaaaacaacccctntcgctgttaccactgct

SEQ ID NO: 60975 - DNA, 144 bp, Zea mays
  Clone ID: MRT4577_155605C.1
ctccaccgattgaccaaccaaaaccctcaagcccattatgtacttctactcggactccacctccgcgatgcattacatggaactcacctttcctctaactaccggaggactgtcccggttgcggccggcgttttcatctcatcc

SEQ ID NO: 60976 - DNA, 475 bp, Zea mays
  Clone ID: MRT4577_155606C.1
aatcctaatgtaaatttaaaaggaaatttcaggaaattttttggtcctcccggtccaaattggggggggggtaaaactcctaaagaatacattcccggggttccctccttttcactttaaataaacctaaggaccaattcttttttacccagcttgtttgattcattaaaacttaacaacccccaagttttaaatttggcttgagtaaagggttaacaaaaacattttttttttaacccccccaagggcccaacttttaggttccagcacaattttgtctttaacacacacaaattgtgccccaaccccccttttttaaaggatttttttttaaaaaaactttttttgcccaatagaaggccccctttttttatttttcccctttgtcacttctggtttttggggaaaaccaccttttcccattttttcccccccaaccagcccaattcctttttttgttttttgggcttttttt

SEQ ID NO: 60977 - DNA, 283 bp, Zea mays
  Clone ID: MRT4577_155607C.1
tggatagagcgggctcccccttcatggtgaacgcctacccgtacttgagatacaacgcctgccacgctggactacgcaggtgttcctgcccgaacgctcggcgtgtacaaccgcgacgacgcggataaactacaccagcatgttacacgcgcagatggacttctcttcacacggtgaggaagaagctcgcgttcaggggggtgcacatcgacgagagagaggtcgggtgggccaccaacgcgtaagccggacaccacggaggatgcccctaggaggccagaga

SEQ ID NO: 60978 - DNA, 1432 bp, Zea mays
  Clone ID: MRT4577_155608C.1
tgtacacaatttcaaaaaaaagacatgtagagctgctcatcaagcgaccgcgtgtggagaaggaaccagtcagtttacataattctctacacagcaataggttttctaaggcttcaagagaaaacctgggtcaagaaattatacaccaattccaaggtccagttcaagcaccacttggcattcagttacgtcatggcagttttggtgtggcccaaatacctttaccccttgcttctgtgagttcaaaggatacctctgatacttgtattgaagatggtgaactctgtgatacttcgtcagtgaagaaaaggatggacaaagtggcaggagcaaatgggttggaaggggtctcgatagagtgtgctaatttgttgaataatggcattgatgttttcatgaagcagttaattggatcttgcattgaattagttagagcaaggtctcgacatggcaaactaaggcatgagacattgaagcagcagctgtgccgaaagctaataaatggtgtatcagtgcataaccatgttcctgggcagagttctgttatacctccagagacaaattccatctccatgcaggacttaaaggcagtaatagagttaaacccttgtttgcttgggattaatgcatcactgctacacgaaaagatcaattcatatgactagtaggatggagctagttgtattcatctcgtcacaagatcctatgatcttgatggtctgtcttgtttcatggctgttgtaatcaagccataagtttattgatgggtggcggtgaaggcaagcgcattctgtgcagtaccctgattgttttgcatgtcatctccagtgcaatcttccagaatgaacaaaaaactgtgtacctgctgggtgcagtactaaaataattcatttcatccacctaaggagtaaggactacgatgggcgaaagtgctccagagataactatgttgctggactccagacaaattgaggaaccatatcaaagatttgatctgtttgggtgtcacggccccacaaagctttcctctgcaattgatacaaagatagggtagtgtgaaacaaagcctggtggctgtttcttcgtgctgtttgcccgagcgttggcaaagcatttgttcttaatcatggtttattggcacgctcagtgttgcgtccccaggcactctccttacagaagtgcaataatgcggacaaaccactccactggtttttctatgttgattgttgtgtaaacgccgattgatttgtacaagtaaatcaatgtatcatgtctaaataactcatacatagtgttggtttcatgttttagttcccaagttttgcaaatatatgtttacggtattatgtttgtataaacaagttttgtgacgacacttctcgattcttcatgactacttgcattgtaatgcaataaagtcgtcatagtatcc

SEQ ID NO: 60979 - DNA, 384 bp, Zea mays
  unsure (1)..(384): unsure at all n locations
  Clone ID: MRT4577_155609C.1
taaagcttcttcagctcgaggctcacttctcgttacaggacgactgcggcgttttttaaagatcttcaggtattccaacagctnnagagcagaaagagggacgagctgcaccagaagttcttaaacacaacgccagcgtatactaccgtgacgagatctgccagctgtttacccaactcctgctcatggaaagattcctgcacaattatcaagttccatcgtaggtcctaaaacagtgctcaatatactcagcaaaccctatacgtatcccttatgcaatgcatcaggcatttcctcataaggcagcataccaagttaaaactcttatacttgacagggaaatccaaccaattactacaacccttgcgtaggaatgccttatga

SEQ ID NO: 60980 - DNA, 584 bp, Zea mays
  Clone ID: MRT4577_15560C.1
cgggttcccccctcgagttttttttttttttttttttttttttttttttttttttttttttttttggtttttttttttttaaggtcaaacatcaaacttcataaggattcaagccatactgctgcaaaaaagttttgggtacaacacagaggacacaacaggtccattaaaccaacgaagccacaaccacgattcatgacacacaaaccacagatgtttattagacgacgacttccatttagaggtacaccagagggcaccagacgacgcaaatacccaggtacagcagcagcttaaatgaaccatgggttactgaccaccacggaggcggagcaccagggggagagggctctccttttggatgttgaagtctgctagggggcggccatcctccaactgtttgccggcaaaaataaaaccctgctggtctggggggatgccctctttgtcctggatctttgccttcacgttgccaatggggtcggagctctcaacctccagggttatggtcttgccagtcaagggcttcacaaagatctgcataccacctggcaagcggagcaccagggggagggggctctcct

SEQ ID NO: 60981 - DNA, 540 bp, Zea mays
  unsure (1)..(540): unsure at all n locations
  Clone ID: MRT4577_155610C.1
ccgnccgggaatcgactaaaaaaaccagcagctagctagcgatggctggagcctgggcactgctcatcgtcctcgcggatgccgtcgcggtcctggccgcgcggccggcgtctgcagacgggggagcgccggcggcgctgaggagcctaacgaacactgaggcccccaaggagagcgccaggagcagcgcgcagcccgggaaggctcccagggcagcaggccagcaggactccaggatacataaagctcaacgagccgggcgcgcacatgctgaagcactagcctgctgaacgccctgctagtcgcggcccacagagctgcccaccgatggcatagtggagggccagggtgccttccacgtgcatgccgagtaccccagacgaggggggcggcacctacgcccacgacaggctggacaatgtcatgactgaggaggcctggaacacacgcacggccccaacgaccggaagagcccccagggcctcaagcgtgaccccacgtgccatcagggcggagcacgacaagacgctcgacacctac

SEQ ID NO: 60982 - DNA, 854 bp, Zea mays
  Clone ID: MRT4577_155611C.1
attgtagcgtgttggctgtgaccagctccaaattaaacaatccatggtgaggaagagaactgctactatggcgagcttcctcgagaagttcgtagacgctgttgaatgggacgctgaggacatctccggtcggctgggcctggtcttgcatgccgccttcctgttcgccggtttccagccctacggcagacagccacgggcgggataccttctgaagaagcaatcacgcaagaggggaggctcggcgtgcctgtcccgactgtacaccgcgccagagcttgcgcagcgtgagggcgcagacgctgccgtgctgatgttgtgtgtgcagggaagcaacgtggcgctcctcgtgttcatcaccaccgacggcgacgacacaccggaggacgtgtacctggaacatctggatctcgagatcgtgaggccgctcctctcgcgcagccttgggggcgtggagccatgggcgtcgcggatctgtaagtcgctcgccaacggcgtgtgttggtgcttcctcgacaagctgtgccgcaggaacggtctggcgctgagcggcttctcgtccctgcacgacgacctcaaggctgtggtcttggaaaagctcaccgacggcaaggacctcgcgagggtggagtgcgttagctcccatctgaggctgctcgtggcggagcgcgaccatgagctgtggaggaccttgtacaaggccctgcctgcgggccggcgcaggggctggtggtggcctctgcggtggttcatccccaacgccgagagctccgacgaggaggctctcgatttcgcatcgacctggaaggacaagtatgtggaggccatgcggcgtccctatccctatcgtatgt

SEQ ID NO: 60983 - DNA, 351 bp, Zea mays
  Clone ID: MRT4577_155612C.1
tcgttccgatccccccgggggttttccagctgggggctttgtttaccggaaccaaaaactaccccccaaaaaaaagaagaaaaccccaaattcttgagatctattaatttcgagccacttaccaatccgattgctagggtttaggttcggaaaaatctgaaaaaaaattcttgtcgaggggaggaggccatgtccgcccaagtggcggtggttcctaatgggggcccgggcgctgtccccgcggtggtgtcttccggagctgtcggcatggcttaagcccttccgaccaccttgctttacattggcgaacttgaaggggccggcttggactttcaggtgtaccaacttttc

SEQ ID NO: 60984 - DNA, 269 bp, Zea mays
  Clone ID: MRT4577_155613C.1
gtgtccttggatattgtcttctgcccatgatcctactttccagctttgcagtgatattttctttgcaaggcatggtaggaatcattctcactgctgggattattggatggtgtagtttttctgcttccaaaatatttatttctgcattagccatggaaggacagcaacttttagtagcatatccttgcgctttgttatatggagtctttgccctgatttccgtcttttgaaaattatctgggatgtggacatcagtgggccagatgtac

SEQ ID NO: 60985 - DNA, 1176 bp, Zea mays
  Clone ID: MRT4577_155614C.1
cggacgcgtgggcttcggctcgagcttcaaacacactccaaactccaagcctcaataatctcgacctctgtaatgaccaagaagctcatctccatctccaccatggccgggaagcaaggttgcaaggagcagtccaatgatcggaggatccaggcttcgatccaaggagacgccaagagcgtggtggtggggttcggcggcaggctggtcacccgtgagcaggagcaggaggacgccatcatcgtcgcggcgctgcggcacgtggtgtccgggtacagcacgccgccgccggaggtcgtcgtcacggtggcgggcggggaggcgtgcgggacctgcggcatcgacgggtgcctcggctgcgacttcttcggggcgccggagctggcgcaggaggcagtgtcctgcggcacagggcaggtggcgacgacggcgtcggtcgggggcggggcagcggcggcggcgctgaggccccggcggcgtaggaacaggaacatgtaccgcggcgtgcggcagcggccgtggggcaagtgggcggcggagatccgcgacccgcggcgcgcggcgcgcgtgtggctgggcacgttcgacaccgcggaggaggccgccagggcctacgactgcgccgcggtcgagttccgcggcccgcgcgcgaagctcaacttcccgggccacgaggcgctgttccagggccacggcgacaccgcggcggcggcggacaccgagacactgacgccgtcgccgggagagtggcagctgggcggcggagcaggagacgagctgtgggaaggtctacaggacctcatgaagcaggacgaggtggaccgctggctcgcgccggttttcggcgccgcgtctagtttttgagctgttgtactgtgcacacacaagcgtggttactgacaggatcacagctagactgaccaccattcttttgctgtctattgaactagttggttcttttgtagcgtatttttttagggaaacatgattcttttttttttttttgccgtgtgttgattgggatatagagagtttttttcctctcttgatggaagtacttgggaagctatgttgatagactgaacatttttttgtactctggctgctgagattctttgacgaattatacggtgaacaaagcatcgttttttatataaataaaaaaacagttgaccg

SEQ ID NO: 60986 - DNA, 823 bp, Zea mays
  Clone ID: MRT4577_155615C.1
ccggccggaaaaaaaaaaaaaaaaacaaaaccggacggcatcttcttccttctcttgcgatcgacatccacctttttactatctacttcaaataccatacacagcaaacatggccgactcacttactgaagagcaagtctccgagttcaaggaggcgttctccctgtttgacaaggatggcgatggtcaaatcaccaccaaggagctcggaaccgtcatgcgctctctcggccagaacccctccgagtctgagcttcaggacatgatcaacgaggtcgacgctgacaacaacggcaccatcgacttccctgagttccttaccatgatggcgcgcaagatgaaggacaccgactccgaggaggagatccgcgaggctttcaaggtcttcgaccgtgacaacaacggcttcatttccgctgctgaactccgacatgtcatgacctccatcggcgagaagctcaccgatgacgaggttgatgagatgatccgggaggctgaccaggacggtgatggccgaatcgactacaacgagttcgtccagcttatgatgcaaaaataagagattaatattcggatacctcgccgaccgattcctcggctttgccgtccttatgctctcgccagtcgatgagcgacgaatatgtatggcataacgaggagtgggttggatcttgtttacttagtgggcaaaactgcaagcgatacgaagggcatcttggacttttgggctgaaatgaatgaaggtagtggctagctttccgcggtactagatgtgcacggttattacgccatgaatctctacctgcatggcttctagcaactg

SEQ ID NO: 60987 - DNA, 3254 bp, Zea mays
  unsure (1)..(3254): unsure at all n locations
  Clone ID: MRT4577_155616C.1
aaacgaagttccatcgccctacctcacgatcccgcctggcctgagcccagcaacgctgctggagtcaccagtcttcgtttctaattccatggtatgtgctcttctctaggttatgatagggtgtggacgcgttaccagaatcagtattgctttcgtctatggatgctaaactggcagttcaagaatgcttgctttaataagcttttgacctctccagggagttcgtgaaagctctacttcagttccatgatgatcagttctgccttgttttgtagcatccagtctcttctttccaaacaggcttctgtttgttttctcaaaagcagaaaaatagtatcgtaccattcaaatatttcaaagttttcttgaaagcaggaatatgatgatcaatctctgttctttccatagttatgtggcaatgtatgcccccacacttcaggtccaaacttcccccttatgtactacttggaactccaatataatagctgttaatgttgtcaaagctgcataggaatttcatgtgtttgctctcttcatattcatatctgtattttgaatcatcatgttatttcatatgtaaattaactaaggaggtatcaactaggacaattattttaataaactccgatactgaagctatttcgtacctgacagcaatgttttttgtttccttgcaattcttcagggccaggcctcgccaaccacggggacgctattcatgtttggtagcacaaatgacaatgatcctattagatttggaggtggtcctccttcagttggagatggccctaatgcttttcctttcaagcccttagatctgaaatcctcacactacactgctgaagcaatgaaggttagcaacatttgaatagttcataggttattcctgcgacgcttgcgtggtaatgattgaaggtaacatttgaatacttcataggttattcatgataacatttgcttgtgcgctaatggtaaaaggatctcttaacttagaaagtattcgtataaacgtgcagtttgcagtgatgtttgtttctgaaattttgccccgagtctagatgagaaatcggttaaatccaaatggttttgctctgtaagtcttttatctgttgcactacctgtaacagactagtttgtctttttggaatggttgaggcttgaagcacatttgtctattctctgagtgttagtgacacaaagtggctgttttgctgcatattgttcatactaattggagaaagaccagagaccagctagtgttagatagtttagaagttcaataaaaataattctcactggcaactaaacaacaggttagtcttccttgagttccaactaaacatataagaacatcgttctaattgtacatttcaaaatgtcaatgaacatttttttttctattcatgatccaataccttttgataccatttccttacgagttagttcataattgctccgtcaggaacaaaatacgaagtcttctgtcaagactgaaaccaagattctgacagtacaagaggctagtttgctgagccaactgaaccagctgaatcacaattcgcagatcattattgatagtggcggtcctcatgaccccaagctcagccgtcctgcatctggcgccggtgcaggcaatgaacacatatcacccccggatcacggacagacagctgaggaaactgatgcgagggaagactacccggcaatggctattaccacgccagcagaggacgggtacagctggaggaagtacggacagaagcaggtgaagcacagcgagtacccgcgtagctacttcaagtgcacgcatcccaactgcctggtgaagaagaaggtcgagcgctcgcacgaggggcacatcacggagatcatctacaagggcgcgcacaaccacccgaagcccacgcagagccgccgtccaggcgtccagcccgtgcacccgtttggcgacagtgcgcaggcggacgcagccgacaacctggggtcacaggcaaacgcagtggacgccaaccagccgaggcgtgcgggtgttcaggatggcatggacgcgacgtcgtcgccctcagttcccattgagcgctgtgactcgccggcctcgatgcaggtcgactcggcagcccggtttggatcccccgagggcgcggatgtgacgtctgtgtccgacgaggtgggcggggacgacagggtgactcgtggcagtatgtctcagggcggtgccgacgcggagggtgacgagctggaatgtaaacgaaggaagctggagtcgtacgccatcgatatgagcaccgcgtcgagagctgttcgcgagcctcgcgtggtgatccagacgacgagcgaggtggacatcctagatgacggctaccgctggcgcaagtacggccagaaggtcgtcaagggcaacccgaatccaaggagctactacaagtgcacgtacccgggctgcgtggtgcggaagcacgtggagcgcgcgtcgcacgacctcaagtccgtgatcaccacgtacgagggcaggcacaaccacgaggtccccgccgccaggaacagcggccacccgggcaccgcggcggcgacaggcgcgggtggcccgcgcaggctggagcacccgtcgctgcgcgacggcctgatggggcacttgggcggctgcggcgtgccgttcggcctgccgccgcctagggatccgctggcgccgatgggcaattacccgacgtatgcctcctccattccccttggcggcgccggccccacgtcactgccgagcctgccggtgccggcggggaccctcagcgccgtcgatgggctgaagctcccgatgctggcgccgtcgtccctgcagcagcacccgctgctgaggcaccggcaggcgatgcaggccgctggcctcgtggcgcccaaggacgacgtgaaggtcgagggcaacgttgccggcggcgctgccccgtcggtgtaccagcagatgatgtgcagcgggctgcggttgcgccagcagatgtagatacataaataaatgtggagaggattagtgattctcaagttattagtttcttaccagtcgtattaggatgagttcgtgataattgttataacgtgggaacaaacacccgttgctttctgtttttttttcacccttccacttcatttttagctcagcaactatttatttatttactgcccctcttcattgaggtttggtcgaaaaaaaaaaaaaaaaaaaaaaaaaaaaaaaaaanaagggcggcccccggaaaagtgagctc

SEQ ID NO: 60988 - DNA, 3027 bp, Zea mays
  Clone ID: MRT4577_155617C.1
atggcgcccaagaggaaaactgcgaactcgtctgctgcagtgatccccgccatcgaccccaacagtcagttacccttcgcaggtaaccatatgtctgtaatttctgaagctgagcttctccgccttgtctccatcggggttcttcctccgcgggaactctgttcttggcgggcttgccacgggactactgtcccgaccgaagatacccacgagtctgtcgtttacactcctttccttcttcgcggcctcggccttcccatctctccttttttccgtggcctccttgatttttatcacatcaacttgactcacttgaaccctaattccattctccaaatctctattttcgttcacctttgcgaagcttatcttggcgtgctgcctcattttggtttatggaattatctgtatcattgtcgtcctgggatggccggggggcaacatcagttggtcggaggtgccagtttagagatgcgccgggggcggaagaccgagtatctcgagatacccctcaaggatagcattaaaggttggcgtctggagtggtttataatggataattatggaaattctctcccttcccgatcaggaagacaggcagacgttcgtactccgagttggactgagtctcccacggatcaagaagtggccgaggcaggcgtgttgcttactgaagttggattactgaaagagagaggtctgactgccgaagctgtggtcacagattttgttttcaaaaacattcagccgctgaaagacagggcctatccggcatatctttatcgagggctggccgactcaacccgagttaccaataggagaattccttctgttgatttggtgagccgactcgaaatgatcctcaggggtaaagtttcaaacgttggagctccagtggcatactcggcttggaacctgccttctcccaaagatttcactctttttgtgtccaatccgcccgtgacagatagcaatttgggtcttagagtgcgaccttctgctgaagaggtcagttctttggttgcttcgctcggggagatacctgatgatgaacggcagatttattttgaagtgcccctgaaccctagtgatgcagacataaatgacatgctcgatctgctagctgaggattcatctgatgctgctcctgatggtacattggcagtggtgccccttccagaggttgatgcgaccttggatgtcccgaaacctgtcaatactcgcccgaggcgccctagccgaaccagtcagcccgagccttctgctgatgagcagaagaagaaaagaagacgcctccggcgagtgtccagctttgatgaggatgccagtaccttagctcctgctgctgaagaaatgactgcaactggccttgctgacattgatcccaatgggtgtgctccgcctgctgctgaccccaatgaggatgctgtttgtgctgttgctgtggaagatgaggaggaagaaaatgaaactccattaactcggaaaaacagtcggcagttcgtcgctagcggtggtagtagtggagttccttctcctgccttgtctgcccttattggtctgcaagaactgtccatggccaattttgatcaagctctagaggatatggtccctgagaacttgttgttggaacctgtagacgttgatgcaacagaaacttgtgctgccgtgccagatgctgggttgaggtcatcccgtgcctcgtcgaccttagagcacgatctcgagggtcgggatgctgacttggatcgtcctgatcctatggaagtagctgaaggcccgtcaaccttagaggtggtcacggcagagagcttggatcccttgaatagtgctgacatgtgcccagcccccgagggtgtcgccggggaggactcagctcgggtgaggagtgtaggccactgcccagcccccgagggtgttgccggggatgatccggctcaagtgggcagtgccaactttgacccagcccccgagggtgtccgagcggggtctccttcctgcacttccatggatgttcatgcgggttcacctccacactctggcggcatggtggtggctcaaactccggatcagggggtcgctttagagggcagcatccccactggtctggcgttaggctctgctgaatgtactgagctcgttcctgctggtctgctgcaagctgcttcgggtggtggtctggcacctggttatcagctgatttctcctgacttggggatcccttcgctcttttccaacctccaggctttggtggatggaatggtcggccagctgaagtcgcagggtgcttccatcccggaagtggcttcatctcttgagcgttggaatccggtgttgcttcggcgtcgtgtatctgagttggaggcaactaatgctgggatgactcggcagatcacagttcttgaagaaaaacattcccaagatcaagctgaaatggctcgacggtgcgctgacttcgaggagaagtattctcagagtcagatcgagttgagtcaggtctctgcggctttggatgatgccaacgctctgagttcttctcttcatgctcagcttgactctgagaaggaagaaaaacgcatccttgctgcttctcgcgacaacttggacagattgtaccgagattccagcaactcgctgaccatcttggagaggagccaccgttttacgatggaggagcttgacaatcagcgccgtcagctgcaagaatcctcggacgaagtgacccgccttacacagttgctatcagcaaaggatgccaccatcaagggactccgagcttctaagaaatccattgctcaggagttagaaactgctcagcaggctgttaaagttgccgaagaagctgctgtcactttcaaagctcagcgcgataaggccctggacaaggccattcgggcgggacgaatcttgatgagaagacccggcgtggttgtccctgaagatataagagccgatgtgaatgctgcccctgattcctcgaatcgcccttcttcgtcagtcgttcctgagaaagacattggaaaataa

SEQ ID NO: 60989 - DNA, 380 bp, Zea mays
  Clone ID: MRT4577_155618C.1
gtccgacggaggtggcgcggggcacaagagtgttgctagtgatgtggtttaggatcaggaggagatccacttgaagccgtttgatggagctcgctggacgctagtcttttgcatttctagaatctagagcacataatacatgttgaaacaatggaggtgtgaagtgaagtgaagaagatgtcagcaacatgaagggtacatccattagatgtgtcctatagctagctgcacaatgcatgtaacataatctaggcatgcatgacacaagagagacaaatgttgtgtacatatactacataatgttgaacagtccatatgatagtgagagggagaaaggtatattatggtggtggtcacggcttacttggttgtgagggttt

SEQ ID NO: 60990 - DNA, 366 bp, Zea mays
  Clone ID: MRT4577_155619C.1
attcgccggtccacccacgcgtacgcacaagtttgattgattgctatttgctaccaacaaaaaatagctacacacaggttctgcgttgccttgcattcaaagcattttttattttattgtaaagaatttgttgttatttaaacttgataagtcttgacaagaaagttccaatggacttcaaaattgtaaaaaagattaacaaccccaagttcaattagcctggaaataaccttaaaggtgaattaccaaggttggaaaaagttaattcaattttaaatttttttcccggacaaaaaatggttggatccgaaattaatttaaaatggaattaaaaggaaaagttgcccttgggcaatttcaaattat

SEQ ID NO: 60991 - DNA, 483 bp, Zea mays
  Clone ID: MRT4577_15561C.1
cgggccaaactcatcttacctacttttgctcggaacgcacacacagcccgctccccgatgtgcgatcccctcgtcgatccaagatgcagattcttcgtcaagactctgactggacagactatcaccctcgaggtggagacctccgacaccatcgacaacggcaaggccaagatccaggacatggaaggcattcccccggaccagcagcggctcatcttcgctggcaagcagctcgaggacgggcgcacgcttgccgactacaacatccagaaggagagcaccctccaccttgttctccgcctcaggggaggcatgcagatcttcgtcaagaccctcactggaaagactatcaccctcgaggtggagtcttctgacaccatcgacaacgtcaaggccaagatccaggacaaggagggcatcccctccggaccagcagcgggctcattctttgctggcaagccagctcgaggaccgggcgccacg

SEQ ID NO: 60992 - DNA, 308 bp, Zea mays
  Clone ID: MRT4577_155620C.1
ttttcacgtagggagaaatcgatccaactattcgattagtaggacctacatctttggtgtcgatgattgacacagctaatggcattggagtcagaacttggatgtcaatataatgttcatatgttaattgactatggacaggttacccgaagggtggatacacaatatggacagtggagttaacaggagccgtaaactattggggcaatattgagagcaagagagtttccactgtggatagttgatgttgggtttggtgatgaaccatggaacatgatgcacctgtttgctgacaatatacctgctgg

SEQ ID NO: 60993 - DNA, 368 bp, Zea mays
  unsure (1)..(368): unsure at all n locations
  Clone ID: MRT4577_155621C.1
ctgccctatttcttcctcaagcccgcaggccgctccctctgctgtccagggtgcaggctgtcttctctcgcccctgctctcccctggccggaccggcccctagctcgagcagggagctcgtcgtcgcccatggctggcctcctctatacagcgaccgccaccccctgtagcttcccctctgcctcggcgcccccttcttcttgtacctccagcagcaaggatttaaccccccatggcgtgtggccttgcctgctccacggtctgcagcagccctgcgctcacctnccatggaaaaccagtccgcttcctgcctccggcaagccgcatttgttccctgcgcgagctcgctgcggggcgccctagccact

SEQ ID NO: 60994 - DNA, 400 bp, Zea mays
  Clone ID: MRT4577_155622C.1
aatgtaacaaatgcaaaccctgctaggcccacgtaaccactttcttaataagaccatcaggacagattcacgcgcaaaagactaacacgagaagttcttatacatcaaaacagcaacgatttaaaatatcaaatactagatcgcggacactttgcacaaaaaccgctagccttactttcagcggcacttgtttggggagtggcccaccgtttcaaaatatattataatgccacggggtgtgaccagatcaaccgaatccaacgttgcttcttttttgtggaaaaattgtcaacgtgcttatgtggcaatttggttgtggagctccaatggtggttatcaaggccagatttgcaagaccccgattatactgacaagttgatggacttggaaacctggggcc

SEQ ID NO: 60995 - DNA, 475 bp, Zea mays
  unsure (1)..(475): unsure at all n locations
  Clone ID: MRT4577_155623C.1
ccccagtccacctgaacgcacgaagcagcagagcagtggactggactagcaaggtgggcaacatgaagcctgcggccaccgacagagttgctggcctcctcttcttcctcgtcctgctcctggcgctgccttccctccgcgggcaacaaggacgagtgcccatgctaccgcgacatgaccaccggacacggcaaccgcaccaggcccaagtgcccctgatgatattccttccttcgctccggggagccagctgccagctggggctgtcttgcatgcgtatgtaatgtataggctgtgcaatgcatgcatacatgatacatgccgtgactctggatcggtggatgcctatgcatgcttntcagttttcactagctgctactactactactcttnctgtcttcctagttcctactatgtgcaccagagagtgagagggacgacatgcatggagatgagatgtcctgttatgtgcact

SEQ ID NO: 60996 - DNA, 122 bp, Zea mays
  Clone ID: MRT4577_155624C.1
acccttcgcacaccagttagggaaaatcagccaccgaatgacctccccgtaaccgttttggccgagcgaaatgcgtctaatagcatacatttcactggaacctatgtttcattagggggttg

SEQ ID NO: 60997 - DNA, 634 bp, Zea mays
  Clone ID: MRT4577_155625C.1
gggtaccctcgaggccggccgggagacaccaggcacgccagcctcactcactccccagaccacctcacacgcacgaagcagcagagcagtggactggactagctaggtgggcaacatgaagcctgcggccaccgccagagttgctggcctcctcttcttcctcgtcctcctcctggcgctgccttccctccgcgtctccatggctggatcagggttctgcgacggcaagtgcgcggtgaggtgctccaaggcgagccggcacgacgactgcctcaagtactgcgggatctgctgcgccacctgcaactgcgtgccgtccgggaccgcgggcaacaaggacgagtgcccatgctaccgcgacatgaccaccggacacggcaaccgcaccaggcccaagtgcccctgatgatattcattccttcgctctgtcttgcatgcgtatgtaatgtataggctgtgcaatgcatgcatacatgatacatgccgtgactctggatcggcggatgcctatgcatgcttttcactagctattattactactactactactcttcctgtcttcctactgtgtgcaccaaagtgagagggacgacatgcatggcgatgacatgtcgtgttatgtgcactggcggcc

SEQ ID NO: 60998 - DNA, 927 bp, Zea mays
  Clone ID: MRT4577_155626C.1
tgggaccctcgaggccggccgggaaggcaaggcagcatgtacacccagaggccagagctagtgatgactgatgactgacgagcctctatagcatacagcaccgcgcgcggcggagccaaagccaaggacggtccggtcgtatgaataagtatcacccccaccagaaccccaagccacacaccaggcacgccagcctcactcactccccagaccacctcacacgcacgaagcagcagagcagtggactggactagcaaggtgggcaacatgaagcctgcggccaccgccagagttgctggcctcctcttcttcctcgtcctcctcctggcgctgccttccctccgcgtctccatggctggatcagggttctgcgacggcaagtgcgcggtgaggtgctccaaggcgagccggcacgacgactgcctcaagtactgcgggatctgctgcgccacctgcaactgcgtgccgtccgggaccgcgggcaacaaggacgagtgcccatgctaccgcgacatgaccaccggacacggcaaccgcaccaggcccaagtgcccctgatgatattccttccttcgctccggggagccagctgccagctggggctgtcttgcatgcgtatgtaatgtataggctgtgcaatgcatgcatacatgatacatgccgtgactctggatcggtggatgcctatgcatgcttttcagttttcactagctgctactactactactcttcctgtcttcctagttcctactatgtgcaccagagagtgagagggacgacatgcatggagatgagatgtcgtgttatgtgcactggcggccacacggcctggtcataattcatgctctgtgtattgtaataaaaaaaaaaaaaaaaaaaaaaaaaaaaaaaaaaaaaaaaaactcgagactagttctctcctcgtgc

SEQ ID NO: 60999 - DNA, 912 bp, Zea mays
  unsure (1)..(912): unsure at all n locations
  Clone ID: MRT4577_155627C.1
aggccggccggaaggcagtatgtacacccagaggccagagctagtgatgactgatgactgacgagcctctatagcatacagcaccgcgcgcggcggagccaaagccaaggacggtccggtcgtatgaataagtatcacccccaccagaaccccaagccacacaccaggcacgccagcctcactcactccccagaccacctcacacgcacgaagcagcagagcagtggactggactagcaaggtgggcaacatgaagcctgcggccaccgccagagttgctggcctcctcttcttcctcgtcctcctcctggcgctgccttccctccgcgtctccatggctggatcagggttctgcgacggcaagtgcgcggtgaggtgctccaaggcgagccggcacgacgactgcctcaagtactgcgggatctgctgcgccacctgcaactgcgtgccgtccgggaccgcgggcaacaaggacgagtgcccatgctaccgcgacatgaccaccggacacggcaaccgcaccaggcccaagtgcccctgatgatattcattccttcgctccctccggggagccagctgtcttgcatgcgtatatgtaatgtatgtataggctgtgcaatgcatgcatacatgatacatgccgtgactctggatcggcggatgcctatgcatgcttttcactagctattattactactactactactcttcctgtcttcctactgtgtgcaccagagtgagagggacgacatgcatggcgatgacatgtcgtgttatgtgcactggcggccgcttggccaggtcataatccatgatgtgtattgtaatacgtacacacccttggctttgnaactgctactagatgcatgacatcgtgcttcttggtacgaaaaaaaaaaaaaaaaagcccct

SEQ ID NO: 61000 - DNA, 663 bp, Zea mays
  Clone ID: MRT4577_155628C.1
atggcagagcgggaagtattcctggaggatgtacgccatcgcctggagcaggctcaggctgtgcagaaacggttctatgacaacaaacaccgggcggtggcctacaacgtgggggactgggtcctgttgcgtctccgcaatcggccggtggcgtccatgtccctggcacagaaggggaagctgcagcccagattctttgggccctattgcatcacggaaatcatcaatgacgtcgcggttcgcctagctcttccaccaaaggccaagattcatgatgtgttccatgtggggctcttgaagaaatgggtgggcgcaccaccaacctctaccccggagcttcctgagctgctccatggaaaggtgatacccgagccggaacgggtggtgcgtttccgcctcgcgagggggataaaagaggtcctggtgcgttggaagggtcagccagcatcagctgcaacttgggaagactgggaagatttcagcgccaagcacccgtcgtttcagctcgaggacgagctgccagtcgagggggggagagatgtcatgtggggcctcccctataaccgtcggaggcgcgcaagagacgggaggcgcgctgcagagagagcagcagccagtgccacgtcagcagcagaaaaggaaagccaagaaatcagtggctag

SEQ ID NO: 61001 - DNA, 601 bp, Zea mays
  Clone ID: MRT4577_155629C.1
aacatcagaaagggagataacaatcgtgggcaaaagatccttcctccttgttcagtgttatcgactttaatgggaaaaatgactacaaagcgctacggcgacccaaactgtccatctgcttattagcagtgttctacattcttggtggtcacgggaaaaaaaaaagaacttcatagtggcagagctcgtcgtgctgcttctcatcatcagaatccttgctatcctcggcatcagagtcggccttgtcctcgtctgccttctcatcgtcttcctcatcctctaggtcatcatcctcatcatccccacccttggcggcatcctcttcttccttctttttctcggcctcatcaaaagcagccttttctgcctccttgtgcttgccccaagtctcctctgcaaaagtcttggccaacgcagggtcatcagtgatgatgatgttgtcaaacagagtgcccgatttaacctgccacagctcaatgccaatgtacttcaagctgtcgaaggcgtaaatgtatggatcatccttaaaatctgggttgtcaatcataggtgccttccatttaccctggtagttcgggttcttgattttcttttgtttcca

SEQ ID NO: 61002 - DNA, 220 bp, Zea mays
  Clone ID: MRT4577_15562C.1
aaatctgggacaattccatatcagacaataacttgggagacaggccctttcactggggacaggcgcgaagctgataatttgtttttatctccttgcagggtgaacataaggcgtgcgcatttcgcgcccaacacaacagtttatttgactgcgtaggtcatcaggtttagactagtgacctcccctcaaaggaggggcaagatggggggcaaatcccccc

SEQ ID NO: 61003 - DNA, 383 bp, Zea mays
  Clone ID: MRT4577_155630C.1
ttccataagtttccatcgggcttcgccgctcgccggtatggcgatccgcaaggggtcttcgtacgccaagggtggggatgatgaggatgatgacctagaggatgaggaagacgatgagaaggcagacgaggacaaggccgactctgatgccgaggatagcaaggattctgatgatgagaagcagcacgacgagctctagatggcgaggatgatgttgcggccgctggcctagatttatcagctctgccactatgaagttcttttttttttcccgtgaccaccaagaatgtagaacactgctaataagcagatggacagtttgggtcgccgtagcgctttgtagtcatttttcccattaaagtcgataacactgaacaaggagg

SEQ ID NO: 61004 - DNA, 1657 bp, Zea mays
  Clone ID: MRT4577_155631C.1
gttgtccctgctccttttaagcagccctgcgcgcggtccggccgggaccgatagaacacgacctggggggttcagatcggatcggaagcttccataagtttccatcgggcgtcgccggtatggcgatccgcaaggggtcttcgtacgccgtcgcggcacttctcgcgctcgcctctgtcgccgccgtcgcaggggaggtcttcttccaggagaagttcgaagatggctgggaaagtcggtgggtcaagtccgagtggaagaaggatgagaacatggctggtgaatggaaccacacttcgggaaaatggaatggagatgccgaggacaaaggtattcaaacctccgaggattacaggttctatgccatttcagccgaataccctgagttcagcaacaaggataagaccctggtgctgcagttctctgtgaagcacgagcagaagcttgactgcggcggtggctacgtcaaattgctgggtggtgatgtagaccagaagaaatttggtggagacacatcttacagcattatgtttggaccagatatctgtgggtacagcaccaagaaggttcacactatcctgaccaaggatggcaagaaccacttgatcaagaaggatgtgccttgtgagactgatcagttgactcatgtttacactttgatcatccgtcctgatgcaacatacagcattctcattgataatgaagagaagcaaactggcagcatctacgagcactgggatattctgccccctaagaaaatcaaggacccagaggctaagaagcctgaggactgggatgacaaggagtacattcctgaccctgaggacaagaagcctgagggctatgatgatattcccaaggaaattcctgaccctgatgctaagaagcctgaggactgggatgatgaggaagatggtgaatggactgcccctaccattccaaacccagaatacaagggaccatggaagcaaaagaaaatcaagaacccgaactaccagggtaaatggaaggcacctatgattgacaatccagatttcaaggatgatccatacatctatgcatttgacagcctgaagtacattggcattgagctgtggcaggttaaatcaggcactttgtttgacaacttcatcatcactgatgaccctgcgttggccaagactttcgcagaggagacctggggcaagcacaaggaggcagagaaggctgctttcgatgcggctgagaaaaagaaggaagaagaggaagccgccaagggtggtgatgatgaggatgacgacctagaggatgaggaagacgatgagaaggcagacgaggacaaggctgactctgatgccgaggatagcaaggacgactctgatgatgagaagcacgacgagctctagatggtgaggatgatgatgttgtggccaccgaacttggagccgctggcctggatttatcaactctcccactatgaacttctcttttttctgtgatcatcgacaagttactgcatagagcattgctaataagccgagggatagtttgggttgctgtagcgttttttttttcccattattagaactgatagcactggacaaggaagatgtttgctcacaactgatatctcccattcttacgttaaatgtgatcctgcgaaagcataggtttcgtg

SEQ ID NO: 61005 - DNA, 1726 bp, Zea mays
  Clone ID: MRT4577_155632C.1
attgggtacctcgaggccggccggggaccgatttccacgacctggggggttcagatcggatcggaagcttccataagtttccatcgggcttcgccgctcgccggtatggcgatccgcaaggggtcttcgtacgccgtcgcggcacttctcgcgctcgcctctgtcgccgccgtcgcaggggaggtcttcttccaggagaagttcgaagatggctgggaaagtcggtgggtcaagtccgagtggaagaaggatgagaacatggctggtgaatggaaccacacttcgggaaaatggaatggagatgccgaggacaaaggtattcaaacctccgaggattacaggttctatgccatttcagccgaataccctgagttcagcaacaaggataagaccctggtgctgcagttctctgtgaagcacgagcagaagcttgactgcggtggtggctacgtcaagttgctgggtggtggtgatgtagaccagaagaaatttggtggagacacatcttacagcattatgtttggaccagatatctgtgggtacagcaccaagaaggttcacactatcctgaccaaggatggcaagaaccacttgatcaagaaggatgtgccttgtgagactgatcagttgactcatgtttacactttgatcatccgtcctgatgcaacatacagcattctcattgataatgaagataagcaaactggcagcatctacgagcactgggatattcttccccctaagaaaatcaaggacccagaggctaagaagcctgaggactgggatgacaaggagtacattcctgaccctgaggacaagaagccagagggctatgatgatattcccaaggaaattcctgaccctgatgctaagaagcctgaggactgggacgatgaggaagatggtgaatggactgcccctaccattcccaacccagaatacaagggaccatggaaacaaaaggtatggcagttccttttaacctataaactgacagcaattcatattctgatatctgacagcatgttgtttcacttgccagaaaatcaagaacccgaactaccagggtaaatggaaggcacctatgattgacaacccagattttaaggatgatccatacatttacgccttcgacagcttgaagtacattggcattgagctgtggcaggttaaatcgggcactctgtttgacaacatcatcatcactgatgaccctgcgttggccaagacttttgcagaggagacctggggcaagcacaaggaggcagaaaaggctgcttttgatgaggccgagaaaaagaaggaagaagaggatgccgccaagggtggggatgatgaggatgatgacctagaggatgaggaagacgatgagaaggcagacgaggacaaggccgactctgatgccgaggatagcaaggattctgatgatgagaagcagcacgacgagctctagatggcgaggatgatgttgcgccgctggcctagatttatcagctctgccactatgaagttctttttttttcccgtgaccaccaagaatgtagaacactgctaataagcagatggacagtttgggtcgccgtagcgctttgtagtcatttttcccattaaagccgataacactgaacaaggaggaaggatcttttgcccacgattgttatctccctttctgatgttaaatgtgagcctttgcggcgagtttaggttcaaaaaaaaaaaaaaaaaa

SEQ ID NO: 61006 - DNA, 254 bp, Zea mays
  unsure (1)..(254): unsure at all n locations
  Clone ID: MRT4577_155633C.1
tcattctgttatttgtgacccagcggcgcggccacaagcagtcataccaggtaagattctgaataaacaatgacccaaaggctattcacagcggacgcacatccataggtcgccgagctagaggatctgctgataatnnnacttacccgggatagtaaaggtacccaatgctcggtaacgaacagaggccttaatgccttttctctgaccctacgcatccctgcagggcttaagcctatggacaatccttaagg

SEQ ID NO: 61007 - DNA, 1822 bp, Zea mays
  Clone ID: MRT4577_155634C.1
cgggggaaaccgtaaaccaacccgctccccctgctccttttaagcagccccgctcgctctccgcagtgaccgatagaacacgacctggggggttcagatcggatcggaagcttccataagtttccatcgggcttcgccgctcgccggtatggcgatccgcaaggggtcttcgtacgccgtcgcggcacttctcgcgctcgcctctgtcgccgccgtcgcaggggaggtcttcttccaggagaagttcgaagatggctgggaaagtcggtgggtcaagtccgagtggaagaaggatgagaacatggctggtgaatggaaccacacttcgggaaaatggaatggagatgccgaggacaaaggtattcaaacctccgaggattacaggttctatgccatttcagccgaataccctgagttcagcaacaaggataagaccctggtgctgcagttctctgtgaagcacgagcagaagcttgactgcggtggtggctacgtcaagttgctgggtggtgatgtagaccagaagaaatttggtggagacacatcttacagcattatgtttggaccagatatctgtgggtacagcaccaagaaggttcacactatcctgaccaaggatggcaagaaccacttgatcaagaaggatgtgccttgtgagactgatcagttgactcatgtttacactttgatcatccgtcctgatgcaacatacagcattctcattgataatgaagagaagcaaactggcagcatctacgagcactgggatattcttccccctaagaaaatcaaggaccctgatgctaagaagcctgaggactgggatgacaaggagtacattcctgaccctgaggacaagaagccagagggctatgatgatattcccaaggaaattcctgaccctgatgctaagaagcctgaggactgggacgatgaggaagatggtgaatggactgcccctaccattcccaacccagaatacaagggaccatggaaacaaaagaaaatcaagaacccgaactaccagggtaaatggaaggcacctatgattgacaacccagattttaaggatgatccatacatttacgccttcgacagcttgaagtacattggcattgagctgtggcaggttaaatcgggcactctgtttgacaacatcatcatcactgatgaccctgcgttggccaagacttttgcagaggagacttggggcaagcacaaggaggcagaaaaggctgcttttgatgaggccgagaaaaagaaggaagaagaggatgccgccaagggtggggatgatgaggatgatgacctagaggatgaggaagacgatgagaaggcagacgaggacaaggccgactctgatgccgaggatagcaaggattctgatgatgagaagcagcacgacgagctctagatggcgaggatgatgttgcggccgctggcctagatttatcagctctgccactatgaagttcttttttttttcccgtgaccaccaggaatgtagaacactgctaataagcagatggacagtttgggtcgccgtagcgctttgtagtcatttttcccattaaagtcgataacactgaacaaggaggaaggatcttttgcccacgattgttatctccctttctgatgttaaatgtgagcctttgcgaaagcactggttccgtcacgcatgcggacttgcatgtgcagcgtgtttaggttcaggatcgttgtgccgtttccgcgaagggaaacaaatattcgtgcctgatcactgttctagctatcgatatggtctcgtttcaggcaaaaaaaaaaaaaaaaaaaaaaactc

SEQ ID NO: 61008 - DNA, 1803 bp, Zea mays
  Clone ID: MRT4577_155635C.1
gagtggaaaccgtaaacccacccgttgcccctgctccttttaagcagccccgctcgctctccgcagtgaccgatagaacacgacctggggggttcagatcggatcggaagcttccccataagtttccatcgggcttcgccggtatggcgatccgcaaggggtcttcgtacgccgtcgcggcacttctcgcgctcgcctctgtcgccgccgtcgcaggggaggtcttcttccaggagaagttcgaagatggctgggaaagtcggtgggtcaagtccgagtggaagaaggatgagaacatggctggtgaatggaaccacacctcgggaaaatggaatggagatgccgaggacaaaggtattcaaacctccgaggattacaggttctatgccatttcagccgaataccctgagttcagcaacaaggataagaccctggtgctgcagttctctgtgaagcacgagcagaagcttgactgcggtggtggctacgtcaagttgctgggtggtggtgatgtagaccagaagaaatttggtggagacacatcttacagcattatgtttggaccagatatctgtgggtacagcaccaagaaggttcacactatcctgaccaaggatggcaagaaccacttgatcaagaaggatgtgccttgtgagactgatcagttgactcatgtttacactttgatcatccgtcctgatgcaacatacagcattctcattgataatgaagataagcaaactggcagcatctacgagcactgggatattcttccccctaagaaaatcaaggacccagaggctaagaagcctgaggactgggatgacaaggagtacattcctgaccctgaggacaagaagccagagggctatgatgatattcccaaggaaattcctgaccctgatgctaagaagcctgaggactgggacgatgaggaagatggtgaatggactgcccctaccattcccaacccagaatacaagggaccatggaaacaaaagaaaatcaagaacccgaactaccagggtaaatggaaggcacctatgattgacaacccagattttaaggatgatccatacatttacgccttcgacagcttgaagtacattggcattgagctgtggcaggttaaatcgggcactctgtttgacaacatcatcatcactgatgaccctgccttggccaagacttttgcagaggagacctggggcaagcacaaggaggcagaaaaggctgcttttgatgaggccgagaaaaagaaggaagaagaggatgccgccaagggtggggatgatgaggatgatgacctagaggatgaggaagacgatgagaaggcagacgaggacaaggccgactctgatgccgaggatagcaaggattctgatgatgagaagcagcacgacgagctctagatggcgaggatgatgttgcggccgctggcctagatttatcagctctgccactatgaagttcttttttttttcccgtgaccaccaagaatgtagaacactgctaataagcagatggacagtttgggtcgccgtagcgctttgtagtcatttttcccattaaagccgataacactgaacaaggaggaaggatcttttgcccacgattgttatctccctttctgatgttaaatgtgagcctttgcgaaagcactggttccgtcacgcatgcggcctttgcatgtgcagcgtgtttaggttcaggatcgttgtgccgttttcgcgaagggaaacaaacattcgtgcctgatcactcttctagctatcgatatggtctcgtttcaggcaaaaaaaa

SEQ ID NO: 61009 - DNA, 545 bp, Zea mays
  unsure (1)..(545): unsure at all n locations
  Clone ID: MRT4577_155636C.1
aggtaaagtaaacaaggcctcagttacggcttggctggacccagtataatgcacggacggaaggcgacacgcgctgcgctttgtgcatcagtgcatgacactcatcatgccctgatcgagcaccacaagggatgcgcggcaacatgtggctacactacacctgctactacacgctaatatgaccttttatgcttgctacctcggccgcagcgtgaatctcgccacgttcatggacgccgccgcaggcaggcaaggctttgcggcagcacatgtgacggcgagcgggcgcggggcgcgcgcagcgccgaggccacggacaagaccagcacagtgatgccgtgacgccgacgacgcagttccccgtcgccgtctcggtcccggtcggtgtgcccagttgcccacgacgaacccaggtccccagtcccaggccgcgcgcccgctgcacgtcgggctcgatcgacggaccacgcgccgnaggcgcacgggcggtccagcgtcggagttggaccaccttcgtccacgccccgggggccgcggaactcgta

SEQ ID NO: 61010 - DNA, 249 bp, Zea mays
  Clone ID: MRT4577_155637C.1
tcgtcttctcaatgtctttggttttacagaacatgttccaagcaaccatcgagacatcattcctggtgcttgagtactccattagccagcttattaacaaccgccacgttctggccaaacttcaaaaagaggtgaggaccgcgacccccgaccgccgcattgtgattgaggaggaccttaacccgattccattccttgagggcaccattaaggagtccattcgcattcaaccggcggcgccgtttcttc

SEQ ID NO: 61011 - DNA, 477 bp, Zea mays
  Clone ID: MRT4577_155638C.1
aaaggaaaaagccggcgggggaaaaaataaaagggggtatacggggaaacagcgtccatggaaaaaaaaaaagaccgggggaacccaaaaataaaccaaaccgccaaaggggcaggggggggtttccggctcctttttttttaaacacacacccaaacccaagggccacgggcgcggagggggtttttattcaaaaaaaaaccccctagcaaaagaaaaaatgcaaggggggacaaacatgcctggggagctaaaaatgggaaaaaagggccaaaccgggggcccccaccaacgggggaaaaaaaaaggaacgttttaagggggcccccccccccccccggcggcgttaaggggtaaattcaccccgaaacaaccgggggaggggcttatggggtaggggattctacccccccatttggaggggaatctggggggtttccccgcgttgaggccccttaccccggggggggggttttt

SEQ ID NO: 61012 - DNA, 424 bp, Zea mays
  Clone ID: MRT4577_155639C.1
atacggctcgaggccacctcactctccacttgtttcttttccgccgaaagggcgggggcgactcccggggccacctaccgcgccatgggccgcaaaaccctaaaccccgccccctccgtagccacaggcgccacctccgactccttccccgccacgcagcacccaggcctgggcgccgcctccggggaccgacgccgggccgcggctgcgaaggtctcgccgccgagggccatcggaaccgccatgccggtgcccgacttcgagacctccgacttcaaaaaggaaaaggtgtcccaggccgcccatgaggagcatattgcgaggggtgggagggaaaccgatcccgctgataccggaggcctccaagggaaccaaacagaccggtgcacccggctggggctcgcaggcgcctgcgcaagcacag

SEQ ID NO: 61013 - DNA, 872 bp, Zea mays
  Clone ID: MRT4577_15563C.1
ttcttggggtccctcgagccggccgggacgacctgtgccacagcgccgtcttctggagcagcgtccgaaagtgtgtggagaacctgcccgatccctcccgccgcctccgacctcaccgtcggcgggctcagcttgttcctggggtctgatcagccatgttcaagaaacctgttgatgtgaaaaccatacagcgcttgtctggggcagacaaaaagaagctaagaagaactgccaagggaaggtttccacaggcttctgatgctgaccttgatgccatccttcctcccaaggctgagataacagttgctaagtacccgaaccatgttcttgtatatggcatagagggagagttcccaatgattttcaacactgacgcaagaggtcatgaactgtttcctacagtttatgcgctttggaaggtcccccatctgttgccagcttttacgcttaaaggtggtgaggtttcacgtttcgtgattggtggcgctgatctgatgtttcctggtatcagcatacctccagaagggtttccatcttttgaagctggccaaccatgggcagtaaaagttcctggtaaccctgctgcaattgcggttgggagcacaactatgagtagtactgaagctttgaaggcaggactacgtggcaaggctttaaagattttacattactacagggatatgttatgggattcggctgatggttgttatgtccctaatgaaggattttttgatgacattgttgttgaagatcctaatcctgtttcgacatctcaggctcctgattctgctgaagaacctgaagtcacgaatgatggtagtgtttcggctgaagatgcaggagtcgatatttcagacaatcatggtacaaat

SEQ ID NO: 61014 - DNA, 556 bp, Zea mays
  Clone ID: MRT4577_155640C.1
aaaaagaactagcctcttatcttcaagcaaatgggagacaacacagatcatctttcccaaatcctcctgtttacaacaacaaccctaggaatacttcctttcgtggtatgatggacaacgaccagattgtaataacacacccttgtaatcttcagagatcaggttaccagagaccacaagtacctaacacacaaggatacatgtcatctacatttcaagattgtcgccgtccacataagttgcgatccattagcatctcaagccgccttgcaatatgtagccatgttaaggtttcagtttcttctagctaccgggccagaagcctgtatgatggcatgtcctcaatcctctgaatatcttcaattaacagctccctttctagctgacgccgtgtagacttcatgaccgtgttgaagtccatgtaagtagcatgcatgtcaagccattgctgatccatcagcttgaaggttatgcagtagagaatgtcaaaagcttgatcgttttctgaaagaagctttaggaaaactgctccgaacaatgacctcggtttaactga

SEQ ID NO: 61015 - DNA, 883 bp, Zea mays
  unsure (1)..(883): unsure at all n locations
  Clone ID: MRT4577_155641C.1
aatcacggacggaagtggcgaggcaaggccgccgcgaagccgagcaatagcccccctcctctacccgttcctctcctgccttctcgggatctgcccgcccgccttgtgcccccgcggttggagctccggctgcacgacaccatgagcccccgcgcgtagaggctgggagagagggagcggggaacaaagttaggcaccaacaaagttaagtggggaggccagagctggccagctgggtcgctgttctaccagagggatggacgggagcgccggctccttcgtcgccgtccgccggctctctggctccgaccgcgccgccgccttccaccactcctcttcgggtgcctcgcctcgcctcgcctccgatttggatagttcctcgtttgttttcttacatagcggctgttgttgctcccgcctcacgccacgggacgatgcttatggttatggtctgtgctgtccctacgctgttgctgcagcggaggtcgtgacggggtcgacggcgtggatcgggagggggctctcctgcgtctgcgcgcagaggagggacagcgatgcgcgcctttccttcgatttgacgcctgtgcaggaagaatgcctacagaggttacaaacncgtatagaagttcagtatgatagtgcaaacagagagcatcaggaagcactacagtcccctttggtgtgcttcttttcctggcaccgagctacggnggctaatatcagaacagtggaanagagatgggttggcaagggaaagcccatctacagattttagaaatctttcaggaactccttcgncagcagaatggtgaccgtgcaatctgggagtatcattttgctgtcgctggtgtaatataccttcatgctcattcagatgcttgat

SEQ ID NO: 61016 - DNA, 1685 bp, Zea mays
  Clone ID: MRT4577_155642C.1
caccgtccagcacacaccagcattgtcctgaggcctgagcagcgctgcgccgcccaaacagaacgacgaagcggagccagcgccaacgaaccaactaaccaacggacggaagtggcgaggcaaggccgccgcgaagccgagcaatagcccccctcctctacccgttcctctcctgccttctcgggatctgcccgcccgccttgtgcccccgcggttggagctccggctgcacgacaccatgagcccccgcgcgtagaggctgggagagagggagcggggaacaaagttaggcaccaacaaagttaagtggggaggccagagctggccagctgggtcgctgttctaccagagggatggacgggagcgccggctccttcgtcgccgtccgccggctctctggctccgaccgcgccgccgccttccaccactcctcttcggcggaggtcgtgacggggtcgacggcgtggatcgggagggggctctcctgcgtctgcgcgcagaggagggacagcgatgcgcgcctttccttcgatttgacgcctgtgcaggaagaatgcctacagaggttacaaaaccgtatagaagttcagtatgatagtgcaaacagagagcatcaggaagcactacagtccctttggtgtgcttcttttcctggcaccgagcttcgggggctaatatcagaacaatggaaagagatgggttggcaagggaaagacccatctacagattttagaggtggaggcttcatctccttggagaatctattgtacttcgctaggaactatccaaaatctttccaggaactccttcgcaagcagaatggtgaccgtgcaatctgggagtatccatttgctgtcgctggtgtaaatataaccttcatgctcattcaaatgcttgatctccaatcagttaaaccgaggtcattgttcggagcagttttcctaaagcttctttcagaaaacgatcaagcttttgacattctctactgcataaccttcaagctgatggatcagcaatggcttgacatgcatgctacttacatggacttcaacacggtcatgaagtctacacggcgtcagctagaaagggagctgttaattgaagatattcagaggattgaggacatgccatcatacaggcttctggcccggtagctagaagaaactgaaaccttaacatggctacatattgcaaggcggcttgagatgctaatggatcgcaacttatgtggacggcgacaatcttgaaatgtagatgacatgtatccttgtgtgttaggtacttgtggtctctggtaacctgatctctgaagattacaaggtagggtttttttcctggtgatagaatgccacgtagggtaactgaagtgtgtgggcagctcccatggccaaaaaaaaaatttttgtagggtgtgttattacaatctggtcgttgtccatcataccacgaaaggaagtattcctagggttgttgttgtaaacaggaggatttgggaaagatgatctgtgttgtctcccatttgcttgaagataagaggctagttctttttaaaaaaaaaaaaaaaaaaaaaaaaaaaaaaaaaaaaggggcggccctttaaaagggccgaggttttagaccgtcccatgccaagtcatatgttttctattgggtcccctaaatttaatgcaacggacattcaatta

SEQ ID NO: 61017 - DNA, 111 bp, Zea mays
  Clone ID: MRT4577_155643C.1
aggatagcatataacgagtccatgtacaccatgtacaaggtcgtcgagctggacactgaaagtcggttcatcaggtgtctctgtacaaggctgtgagtgcgagttttcggt

SEQ ID NO: 61018 - DNA, 365 bp, Zea mays
  unsure (1)..(365): unsure at all n locations
  Clone ID: MRT4577_155644C.1
ggggtcttcanacnatnatctnnatntactttatagcttttaagaacccgatcgacaccatgagggtggtgctcgttgccctcgctctgctggctctcgctgcgagcgccacctccacgcatacaagcggcggctgcggctgccagccaccgccgccggttcatctaccgtcgacggtgcatctgccacctgcgggtcacctggcaactccggagcataatccaccgacggatcacctgccagcagctgggcacctgccaccgtcggagcatgtgccgcccgttgctgatccagcgccgtcagtttctgaggcaccaatgcagcccggcggcgacaccctacggctcgacacagtgccaggcgct

SEQ ID NO: 61019 - DNA, 2094 bp, Zea mays
  unsure (1)..(2094): unsure at all n locations
  Clone ID: MRT4577_155645C.1
gtgaaaattgaaatgttcatgatgatatggcattgtgatactaaaaaagaaaactcgacctgcgggggtaaaacaaccccgagcattatgataagaagaagaccttctcactcaggtcgagaacctttgaaccattgtcccactcatacacagcggcactgtagcccatgtgagaaacgaccgtgactaggactagaccttagacctgtgcttgttgtaggatagacgagaggatttttttaaccatggcctggaattcgctcccacggggagtcgaactcaggacctgaggagtgctactcaaaccacccaaccaactcagctagaggccctttcgctggcattgagatacttaactgttaactcacatacttattcataccggccgggcaatggagcgcgattggtttggcggcaggagcactgcaccgtccagcacacaccagcattgtcctgaggcctgagcagcgctgcgccgcccaaccagaacgacgaagcggagccagcgccaacgaaccaactaaccaacggacggaagtggcgtggcgaggcaaggccgccgcgaagccgagcaaatccagcctccctcctctacccgttcctctcctgccttctcgggatctgcccgcccgccttgtgtgatcttgccgcctcgccccccgcggttggagctccggctgcacgacaccatgagcccccgcgcgtagaggctgggagagagggagcggggaacaaagttaggcaccaacaaagttaagtggggaggccagagctggccagctgggtcgctgttctaccagagggatggacgggagcgccggctccttcgtcgccgtccgccggctctccggctccgaccgcgccgccgccttccaccactcctcttcggcggaggtcgtgacggggtcgacggcgtggatcgggagggggctctcctgcgtctgcgcgcagaggagggacagcgatgcgcgcctttccttcgatttgacgcctgtgcaggaagaatgcctacagaggttacaaaaccgtatagaagttcagtatgatagtgcaaacagagagcatcaggaagcactacagtccctttggtgtgcttcttttcctggcaccgagcttcgggggctaatatcagaacagtggaaagagatgggttggcaagggaaagacccatctacagattttagaggtggaggcttcatctccttggagaatctattgtactttgctaggaactatccaaaatctttccaggaactccttcgcaagcagaatggtgaccgtgcaatctgggagtatccatttgctgtcgctggtgtgaatataaccttcatgctcattcagatgcttgatctccaatcagttaaaccgaggtcattgttcggagcagttttcctaaagcttctttcagaaaacgatcaagcttttgacattctctactgcataaccttcaagctgatggatcagcaatggcttgacatgcatgctacttacatggacttcaacacggtcatgaagtctacacggcgtcagctagaaagggagctgttaattgaagatattcagaggattgaggacatgccatcatacaggcttctggcccggtagctagaagaaactgaaaccttaacatggctacatattgcaaggcggcttgagatgctaatggatcgcaacttgtgtgtccacgtcgggcgacaatgttgaaatgtagatgacatgtatccttgtgtgttaggtacttgtggtctctggtaacctgatctctgaagattacaaggtagggtttttttcctggtgatagaatgccacgtagggtaactgaagtgtctgatcagctcccatggcaaaaaaaaaaaatgtagggtgtgttattacaatctggtcgttgtccatcataccacgaaaggaagtattcctagggttgttgttgtaaacaggaggatttgggaaagatgatctgtgttgtctcccatttgcttgaagataagaggctagttctttttaagtgggcagctactgtgctgtgccgctccccaagatctgtttgcgctgttcgtgccaagccaaaaaaaaaaaaaaaaaaaaaaanttagg

SEQ ID NO: 61020 - DNA, 461 bp, Zea mays
  Clone ID: MRT4577_155646C.1
gttttgcttctcatgatgagtcgtacgtatacacaaatatatccccatcaccacaccaattactaataataattactggtaatttaattgtgtatgcagggaaacgggacactcacgctgcagaaacaaatcacgctgttctccaaaactcaagcaagaatgtcgtgggcccgctgcaagctcaggtctatggtatcgaggtccttgttccttgtcagcgccggcggcaatgacttctccgccttcagtgaaatgggcatgggcgaacaagacgccccagcctacatcagtagcatggtctcaacctatgtccagcatatcgacgtacgtgtgaggcgggaccatgcatcaaatctgtcattgcacattaattaaaggtctcgatgcaataattagtggacgacatcgatgcctgcaggcgttgtacaagttgggagcacggaaggttgggatcctagacg

SEQ ID NO: 61021 - DNA, 243 bp, Zea mays
  Clone ID: MRT4577_155647C.1
ctaccctaagcttatcaaagaagcactgatactgtggttctacactgcctatgctgatgtttagggacccggcgatcggatcggggtatcagctggaagccctgtacctcgcctgtcattacccaatgtaaaccattggacctgcacacacatgttgccagctgatttagtaagtaccagggcctgaccatggggactatcagacgagcggggaatttgatgcctctcaacacacctgcagaa

SEQ ID NO: 61022 - DNA, 229 bp, Zea mays
  unsure (1)..(229): unsure at all n locations
  Clone ID: MRT4577_155648C.1
ggactccggggggaccggtcccgaatttccgntcacccaccctttcgcttctgtgttatcaaagctgagcttacactgggggtgacagggaagcagcggccgctaactagggagcggtcgccggcctcggcggcggagtatggggcgtgggggtgctagatgaggacggcgacaggatgtaggaactatccgctctgctgcaccggtggcctcgtcctgtgggccgcta

SEQ ID NO: 61023 - DNA, 289 bp, Zea mays
  Clone ID: MRT4577_155649C.1
tttacctgggcatgcatgtgtttttatttaatcaattaataaagccccaaatttaagaaaaacgggcgggataccatttttttggaagttttccaagcttgtttaacaatggggaaatgcattaaaaatggacattggactctgatctgatttaacaatgggcgaagcaactcttttattttttttgggcattaccgatgggtttttttttaaagggttgaaaaaattttgtgctttcgcaatttcttggcggggcccaataatgtagtctgagggcataatttttctg

SEQ ID NO: 61024 - DNA, 596 bp, Zea mays
  Clone ID: MRT4577_15564C.1
aacctaatcttctctccttttgctcggaacgcacacaccgcccggtctccgatctccgatccccgatcccctcgtggatccaagatgcagatcttcgccaagactctcactggaaagactgtcaccctagaggtggagtcctctgacaccattgacaacgtcaaggccaagatccacacaaggaaggcattcccccggaccagcagcggctcatcttcgctggcaagcagctggaggacgggcgcacacttgccgactacaacatccagaaggagagcaccctccaccttggtctccgcctcacgggaggcatgcatatcttagcgaagaccctaactggaaagactatcaccctcgaggtggagtcttctgacaccatagacaacgtcaaggccaagatccaggacacggagggcatccctccgtaccagcagcggctcatttgtgctggcaagcagctcgaggacggacgcacgctggccgactacaacattgagaaagagagcaccctccacttggcattgcgtgtcatgagcggaatgcacatcttcgcgaagactctgactggcaagactatcacccttgaaggcgagtct

SEQ ID NO: 61025 - DNA, 713 bp, Zea mays
  unsure (1)..(713): unsure at all n locations
  Clone ID: MRT4577_155650C.1
ccggccgggaaaacccgtcatcatctcacgatcgaaatgcgggaaggcaccgaggtcaacaaggtcatttagcatacgcccgtacataatcctgctcttctcgccaatcacaaaaaccctaagcgccgccggacaattcgttgctcgcgatcctcgcttcgggatccggaagagatggccaagtcgaagaaccacacggcgcacaaccagtcgtacaaggcgcacaagaacggcatcaagaagcccaagcgccaccggcagacctccaccaaggggatggaccccaagttcctgaggaacctgaggtattcaaggaagggcaacaagaagagtggtgaggctgaggagtaggaaggaaagcatggttgtgttttctatgttttagctcagttgtaaggtggaactaaatggtgttatctgatggcaaggaccttttgctccgaaatgtttttatgataatcatgttttgaagagttacggtttactttcattatttcctttgcccttggtaactaanattagttgtttcgattgcgtctgggtttcattggaggctaacctgtttgggaggcggtttaatgttttatcttgtggtcgagtgagcattagagcatgtacnacttanagcttgatcggttttcatggtattatcatgcantggaatgtttttaaatccctgtttgacaaanaaaaaaaaaaaaaaacccgcggcc

SEQ ID NO: 61026 - DNA, 792 bp, Zea mays
  Clone ID: MRT4577_155651C.1
aagcaggactaagggcaccactttaaaatgcccaaataaaaactgaaagcctattgagaatctgtatccctttatatgattctattagcattggaatctagatcagtttcaagcacttgtatagctgtatcttgagtatcattgtttaccacacaagatcgcaaactactgttctatggagcaattactgaatgcctgtttagcaaaattatgagttgtaatgaaatgaaaggtcgaatgagtaatttgataggccccttgggcctcggaagatttagccctttatcttgttcccttccaatgctggtggagtggtggtactgagtcaaaccgatgttgtgtggttagtgtctcacatgtgtcaatttcttattcctgtttgaacatggtggtgatactaacgccatcctactgtcttggcctttcgaggacaagaaatgtgactttttttggtgatctgttcagcgatcacatttcactgtggttactttttcactgcacaatgcagcatacctttctccactaatgaatgttcgattgccgtgcaggttaatccgaattctgaagtcatgggtgcgcttccagtcacagcgtctttagctaacaagctcgcatacatataggcaacttgagtgagctatgtagtacggatatggttgtgtggcaaactgccaatgactattgacatccttgcatatattgacatgtgacaaggatcaacctgcaaaactggtgccctgctactcgcagaccttattatcttaaataacacaggtggtgtgtttttcaatt

SEQ ID NO: 61027 - DNA, 1200 bp, Zea mays
  Clone ID: MRT4577_155652C.1
ccgaacctcaggaactagccgttgcccgcacctctccacgtcgcgcttcccatggactccgccaccgtggcgctcgccagccccgcctccgacgaccgacggttctgggaccgcctccgcacccgcgtcgacaccatcctcgaggaccgccgtggcctcccgccagccgccgccgccggtgcccccatgcgcggggtggaatctgagcgggggaagcggctccgggaggactccctgatgctcgtccgtggcctcgactctgtggcggagtctctggcacagctctccgacaccctcaccgccgcgcagaagggagtgagtgctctcgcgacctgctcttcgcaggcgaggggatgcgaaggcggcgcctgcccctgccccgaggaggtgaaggcagaggaggaggagcccagggcgaagcggatgtgtggcggctccacggaagattctccacggaacggcctggacagcaattctccggccgctggagaggaaacggcggctggtcctgatggtctggggaaggggaatgtccaggcctctgctgagatcgcacagagcactaacctgaagcgggccagaagtctggcggtgtcaatggcaagcagagccgctgcactcgctagggagctcaagaacatcaagtcagagctgcacttcatgcaggagaggtgcggtttgctagaggaggagaacaagaggctcagagaggggtgtgacaatggagttgcccctgaagaagatgacttggtgaggctgcaactggaggctctgcttgcagagaagtcgcgtctggcgcaagagaacgccaacctgacgagagagaaccagggcctgatgcagctggttgagtatcaccagttggcatcccaggatctggatgagtcctatgaggatgttatgcaggggatacggcttgacttctcgtcaccgctggggaagatcagcgacgatgaagaaggcgagcgcgacgatgaagttccggtcaccccagctgaggtgccatgctcccccgacgagtaggcaggcgaacgggaggaataagatgggttttccatcgatggaattcctttgtaccaggtgccaacagtaggcagtttttttttcctatgtgatcactaccggtggccagtttttgatgtttctatgatttatataaaaacttctatgtgtagcaattttatatgatgcatcttgcac

SEQ ID NO: 61028 - DNA, 393 bp, Zea mays
  Clone ID: MRT4577_155653C.1
cagtcccttggccccttttattttgcagcgccctctcggcggcgagggcaggggggcgcgcgctccgcggtcaccgcgcgcgctctaagcgcctatatctatggaccagcggccccccttctacatggcgcggagactgccgttgtggacagcaatgctccttccccttcctcctcaccggcgttggtaccgtcgtcgctgcatccccgccccacgatgagtgcccggcgcctacttatcgtggaatccgctcttagttcttcagacgcgtgctcgacgctggaactctgttaacccggacggtgctatggagggggataagttcaccttagcaacggcagttaaattttctcatgcaaacaaggatgactatattgccgaacttcttaatgc

SEQ ID NO: 61029 - DNA, 568 bp, Zea mays
  Clone ID: MRT4577_155654C.1
ccccaaaaaacggacctttaaaggagctttttataataattataccccaaaaaattccctttaaccaaaaaaaggaagggttttaaaaacccccccctttttttaattatggggcccaaaataataattcccgggggggggccccccaaacaaaaaaaaaaaaagggggcggttttcccgcaaaaaaaagccagggaaaagggcccttggcccccctttaaggcccccccgtttaacaaaaaaaagggggcggggcccccaaaaaaaaagggggggaaaaaaaaaggcctttttttctcggggcccaaccaccgctttttttttagttgggtgggaaagctagcaaaaaaaacccccggccccccttaatggcctgctgcgggggggggccccacccccgggccccaaaaaaaaaaccaaagggggccccccacctccatggggggggaacccccccgtcaaccagggggggttttgaagaaaaaacaaaaggcccggggtttgacctaatccccaaaagaatttggggaagggcccccaccctgggggccatctccttctttggggt

SEQ ID NO: 61030 - DNA, 578 bp, Zea mays
  Clone ID: MRT4577_155655C.1
gaaagcctcctaatacacgtgcaggaaacagcactcttaaattagcacgccgaagcagatgcacatcttcgatagcctacttttgtaggacttcttcctcttcggaaccactctgacggtcttgacgtaaatagccactctcaccgatcaccgcttgtcatgctctgatcctcgaacatcatcatcgaaagtgcctgccaatcccttcactgacgccatgctcgacactctgtggtctaaaccgggtagaaggactacggtgacgtaatcttccagaaaattccatgtgctacaatacgctgactaccggccaaggtcagcaataatcgagttcaccttacactgagaaactccttgatctccagaatcacgtctgttgcaatcgtattctgctccaacacccagaacttggtacatgtcaatagtctcccacgagatccggatactaatcagtcagattgcctcgaacgaggcctcattgttaataagcacgaatcaaaattcttggactctgagctcccgtcaatcgcttaccagacgaacactgcttgcaccgccaacttattatatagagtatc

SEQ ID NO: 61031 - DNA, 496 bp, Zea mays
  unsure (1)..(496): unsure at all n locations
  Clone ID: MRT4577_155656C.1
aattcggcttcggcacgaggcaaactcctccgctccacacctctcgccaagaccaccccttccctgcccacacacggcggcgccccaatctctccaccacgcgtgacggcgacgacgccccatccctctccagcgcgcgtagaggcggcgtccctccctctcccgtgcgtggcggtggccggatgcggtggaggcggagggtatcgtcgtcggcggcagcggcggcggaggaggaggcggcgccatgaggggggcacggcgggagtggacgctggctgcggcggcaggaggtgggacggcgagcctgtgagcttctacacgacgtcgcggaagtcggacttgtcgatgttgtacacgggngggctggggaggcgggtggtcggcagggatgtaggaggcgggcggggagccgacggcggcgggcaaggcgctcgcatggtggaggtggaagacgactgcttggagatcttgtaggaggccttgttgagggacttga

SEQ ID NO: 61032 - DNA, 339 bp, Zea mays
  Clone ID: MRT4577_155657C.1
gcaccccatctgtcccatccgcgagccgggcacgggttcatttggatgccggatccggcccatccttttcgccggctatccccttcggatgaccggtggcccagtccatccccttcttggtcaacatccggttcctttggaggccccccttccttccaaacgaacatgggggtctgggtgggggcctttcgggcctggtggggggggaaggttggcaccgggcttacggctttggcggacaaccttttgaagaaccaagccaggttaatcctcggtattttccccggttcttcgggcaagttttttccaacttcggcgggccgggccttctgggttccg

SEQ ID NO: 61033 - DNA, 345 bp, Zea mays
  Clone ID: MRT4577_155658C.1
cgacaatggcaagggccaaggaagacgagcagatcatgggaattgacctagaatcttgcaatctagcaaaacgatcattttatgatgccatgcaacatgacattctagaaatatgggtggctaccacgaagtgagtgtagcattatgtattatgttctcatttgttcatcagttgcaacaactatttgctaaactctttgaattttgtaataattggaatgtggtcgcatggtcagactatgtttgctttctaaaacactcatgtcttagtttataggtcgtgtacacttatttaagttattggttgattaagatctgggcttcaagtgcaaaaaagaagacgag

SEQ ID NO: 61034 - DNA, 842 bp, Zea mays
  unsure (1)..(842): unsure at all n locations
  Clone ID: MRT4577_155659C.1
cctcgaggccggccgggccgggctcttcgccttgaggcccctacctccctccgttcgcgtcgcccggcggccatccctctctccagtctccactgatgtccatgccacaatccttcctcctcctcccctcctttttacccccacctcccttagttcgcctcgcctcgcggccgccatcgtcgccatccctgaccgccctcagattccaccgcgtcgacgccaagctttccccgccactcctcgcggcatcccacagtcctcctggcggcttccgcggatactgtgattctggcggcagcgatggaggaagcggaggtgatggcgggcgaggaatggattctcctggccctggggacgggtggtggtgggagcggtggctccaggccctccaccctgagttcctcctcctgttcctgctcctccagtccggcgccgcatccgcactcgctgaggccctcagcacttccggtgatgacgcgggggacgtgtgggaggtgaggggcggcaagcgcactcgcctcatgccggacccaacctggacctcctatcttattgctggggacgacggaacaaagcgggaggacggggatgaaaaggttggaagcatctctaaggacctggccgccctacagaggcagctggggcggtcgtggcggcggtacgccgaagttgctgttcatctgctgctccctgacggataccctcatagtgtcagcagcgactacctgaactactcgctctgggcgcgcgtacagggtgtggcgagccagatcagcggggtgcttttcacacaggctctgctctatgcggntgggttagggaaaggggcgatacccactgct

SEQ ID NO: 61035 - DNA, 314 bp, Zea mays
  Clone ID: MRT4577_15565C.1
aaatcaaactagcagggcgggagggaaaaactaaaacgttatgttagcaatcacatgatcaatagcagggacaaacctaatgaactgtagatggacgatggagagaccatcaagaaagacttgggaagcaaggagttcaccagagtcacatcttggaacaataatttaaagatgcagtctagtattatgggaacttaaaaagcaacgtgaggatggtgggtcaatatggggctggtagatgtccatgggggccagtgcggccacacaagaatctatggggcccatatccttcttctgtatggagctggccttct

SEQ ID NO: 61036 - DNA, 355 bp, Zea mays
  Clone ID: MRT4577_155660C.1
cagacatgttttattttcaccacatacactgccgtattaaaacactttattgtggttatacaatcactgattttattatttgatcactgtattatctacaaaaattacgaatatgcctactcctgtatcataatcacttgttgcctactctgtcaacctttgcaaagattgctactgatttgttgactaaaccactggctatcaaaatttcttaaagtgttacgttaattctgtaaccttcatcgctctagatattttgcatctaatcatcctctaataagcacatctgttaagttcaagttaacacagttacactcccatacatgtatacaatgacgatgacctgttgtacatt

SEQ ID NO: 61037 - DNA, 573 bp, Zea mays
  Clone ID: MRT4577_155661C.1
gggggtgggggttttttttttttttttttttttttttttttttttttttttttttttttttttttttttttttttaaaaccatgcctttttattggttcaccacaattccatctttttttattcgttctgacagcaacaggaaaccccaggggggggccccacgtgacaaaacacacgggatggggtacctgggggatggggctccacgaacaccacccactaacgggacagattaaagctaaccggtcgaaggggattcattcggccaacaacaacaaaggcccagattaaaagaaaaaaccccgggggggggccggcccaaataaaaccctttttgcatgctggcgcggggatgctcccttaggggtccacaaccttgtggtccttggacccaataacaaactccttgggcagggccggggaaaccttgggggtgggcccccccacggggttgggcctgcccagggcctttaaggccaggggcccccccttttggccggagatcattatggggccaaacgttgggcccatccttggggggccggtgatcttggggacctccatcccgggga

SEQ ID NO: 61038 - DNA, 392 bp, Zea mays
  unsure (1)..(392): unsure at all n locations
  Clone ID: MRT4577_155662C.1
agccgcgccaccgccgtctacgccggcgttttgtccgcggccaccggcttcacggnactgcggctactcctaccgggtcaagccagccgtctaccgaccgccgacccaaatgccgaaaactaagcacctatacccaatccccccggcggcagaaggtcgtccacttaaaccgccgccgcggcggttcccggtggtaccacgaccagcggaagctcacggtggctgtcttaatcagcggcggttaggcgctcgcgttgtatgttgaccatgtgtagaccgtgccctacaccaaccgttaacacctacgaccgacgtgccggaagtaaatgcgtcaaaaaagccagtcccagtttgaccagctcaagaaggagttaaggcccaaaatactgcca

SEQ ID NO: 61039 - DNA, 338 bp, Zea mays
  Clone ID: MRT4577_155663C.1
ccacaccaaggccagctgcggctatactttaactacgggggtggcgaaaacaaccatttattgaaccatcacaagaaggacgagaaacacacctgcatggagtttcaagactatcagaccgtggtcacagtcacggtccagggaaagtaccatcggcacaagaaggtggacacagagcgcatgcacaacaaccacctgcctgaggactgaaccatcgacaccagcgcctatctactatacgagaaacacgaggataagagggacctcgagcacacgcacaggcacatgcatacggtggtagcatctgtctcagaacacgatgacgacagcaggtacat

SEQ ID NO: 61040 - DNA, 195 bp, Zea mays
  Clone ID: MRT4577_155664C.1
tcgctcttctcctcctcctcgaagctccgatccgatcccccaatgtctgacagcagtccaggtcccggcgcctactactccggccctcccgccgcgcctccgtccgaatcttatcccgttgactgctgtcaggtcaacgccgatgatcctggctactacttcttcgtccctgctgcgaaatctggctccttctgt

SEQ ID NO: 61041 - DNA, 627 bp, Zea mays
  Clone ID: MRT4577_155665C.1
gacctcgagaacaaataccgctagcgttaattctcttctaaattgattatatcttatccaatctctagatttcggtccccatacacgctctaatcccgtattgtaccagcgtacagcatgatctgtatagttgccaataagcctagttaaatcattataacgactattgatagtcgcggcatcaaatccccacctttgtccaaacactgaaacatctctcaaaactgataaatgtaaatttgcagcttgaacatatactgataaaagaggaacttgataattttgaactgcaaaaagaggaatagcggttgtaagggcactgttcatgtcattgaattgaatacgcatctcttctcttaatgctggattagtaggatctgcttcccactctctaaaagattctgcgtaaatttgataaagattgcttagtccttctaatctagaaatggcttggttcctagcgaattcttctattctttggttaattaactgttcaatttgtacaagaaatgcgtcccattgagagggaccaaaaattccccatatcatatcaactagtcctaacacaaatccagcaccgggaacaaattcactcaaaagaaattgcgttagcgacaaggaaatatc

SEQ ID NO: 61042 - DNA, 748 bp, Zea mays
  Clone ID: MRT4577_155666C.1
ctcggctcgacctagccaggcttcccttgccctactttgcgccgccgccgccgatccagccggcctctccccgcccgccggccgcgatgtacaacggcatcgggctgcagaccgcgcgggggtcgggcaccaacgggtacgtccagaccaacaagttcttcatcaagccccgctccacatccggcgggggcccgggcggaccccacaggccgccgctccccgacgccaccggcgcggatggcggcgggctcggcgggatgcgcaagcccaacaaggagatcctcgagcacgaccgcaagcgccaggtcgagctcaatctgctcgtgctcagggacgcgctcgaggagcagggctacaccgaagacgagatcgaggagcgcgtagaggaggcgcgcaaggctgctgaggcagaggcggccgcggtcgcggcagcggaggaagcagggagcgttagcggcgccggtcgaccgcctctacccggcagagggtttacagacacacagagccaccatgttgcagcacggaaggagaaacaacttgagacactaagggctgctttagggctgaacgtggaggatgcaaagaagggggatgtagaaagtgatgtagaatctggggagcttgttcctggtaagtactatgaggaactggttactgttggggaaaataatagtaaggattcaaagaatgcaaagaagagcaaaaaaaaaaaaaaaaaaaaaagctacggccgctcgcgatctagaac

SEQ ID NO: 61043 - DNA, 384 bp, Zea mays
  Clone ID: MRT4577_155667C.1
ttgcccctgtacaggatagaggcgggcttggactcgagatggtgttctgagacctgatctgatgacacctattatggtaagagcagctgcggctgatgcgaagagtgaaatgactacagatctctatactagaagggctttaactacgaatgcatgtagaagaactaagctggtaacaaaaaggaataactacagactgccgggacctacagcatggggtagccactttactaggtcaaaaagaatggacttgcgagtgactggcacgcagaaatctggaccgtgttaacgtacctgcaatggaaattgtcaaatatactgaaggagaaccagctgtcgccaccatatctagggcaaaaaagaaagagggcgtacaagcgacag

SEQ ID NO: 61044 - DNA, 375 bp, Zea mays
  Clone ID: MRT4577_155668C.1
ggggaaggtgaaccctttcagatgggtgtattggatgaccgagctgctagctaaaacagaatccagaaaaactgttctaaacaagactactaacagcagcagcaatcatatggaatccaacgtttagcatcagatggacatataataaccaaaaaatgtaaaatgtggccaaaaaaataaattacagtgtatatatatttacagcaaacttaagtgtttcagtcaaacaaaatcagctagcagcttagcattcatgaccttggaacgatcagatcctccagaggtcggcgctgctgtcggcgctgctgctgctgctggtggcccgccgatcggagaactgcggcgtggcatcggcggcgagcatgtcccggtacg

SEQ ID NO: 61045 - DNA, 162 bp, Zea mays
  Clone ID: MRT4577_155669C.1
atggcgtttcctgcccacctcacgcgcatacaggccttcagaaaagagagaatcaatgcaaatgcctggaatttggacgttccaaagagatgtgtctgctttcgtatgatcctggaaacttgcaagcggcaaactccagcaaggagagcgcgcagagaatga

SEQ ID NO: 61046 - DNA, 509 bp, Zea mays
  Clone ID: MRT4577_15566C.1
cccaggaattgaagccccttctgctgcttatgagtcctgggtacgtctcatatgtctcaacaggtccattaaaccaacgaactcccaccctcgattcatgtcacacaatccacagatgtttattcaacgacgacgacgcatatacccaggtgcagcaacattttaaatgaaccatggcttactgaccaccacggaggcggagcaccaagcggagagtgctctccttctggatgttgtagtctgatagggtgctaccatcctccatctgcttgccagctaagatcagactctgatggtctggggggatgccctctttgtcctggatctttgccttcacgttgtcaatggtgtcagagctctcaacctgcagggttatggtcttgccagtcaaggtcttcacaaagatctgcataccacctcgcaagcggagcaccaggtggagggtgctctccttctggatgttgaagtcggcgagggtacggccatcctacagctgcttgccatcaaag

SEQ ID NO: 61047 - DNA, 578 bp, Zea mays
  Clone ID: MRT4577_155670C.1
gccggccgggccgggaaaaaacagatattctatcgtcagcaatcctgcgttccctgcccgacggaggtgcttccctcgttgctgcgttgcactgcggcggcctcgagcttgttgtcgattccagctccatgcgcccatgatttactttacttgtaattgccaagaacctgatggagaaagctggccaaagattcgcacgttcgttggaagagctttctaccaagaccgcaccactttgaaataaatgagaaggcaccttgacgtcacccctcttctcttgaagctccagagttcaggctcaagtcagaagccaatccgtcgttaattctgccatccccgcggttccctgtttttgccgcttgtattgctccactatttcagttgctatatcattcattccttggttgtgcacaattgccaatatgtatttctctgacagaatgaagtgataactgtggctagggcttttgttttcatgtgcacaattgctatatcattcatgtggcaattagtataaatactccaggcaatgcaatagagaagatagttcataaaaaaaaaaaaaaaaaaggccccta

SEQ ID NO: 61048 - DNA, 615 bp, Zea mays
  Clone ID: MRT4577_155671C.1
cctcgaggccggccggggcccgattcaggtgcttccctcgttgctgcgttgcactgcggcggcctcgagcttgttgtcgattccagctccatgcgcccatgatttactttacttgtcgcataactatatgggattgtcccgtcttgaagaagaactgccaagaacctgatggagaaagctggccaaagatttcgcacgttcgttggaagagctttctacaaataccgcactggcttccttagagttgccactttgaaataaatgagaaggcgccttgacgtcacccctcttctcttgaagctccagagttcaggctcaagtcagaagccaatccgtcgttaatgctgccgtccccgcggttccctgtttttgccgcttgtattgctccgctatttcagttgctatatcattcattccttggttgtgcacaattgccaatatgtatttctctgacagaatgaggtgataactgtggctagggctttttgttttcatgtgcacaattgctatatcattcatgtggcaattagtataaatactccaggcaatgcaatggagaagacaatggtgtagcagagaagttcaccatggaaaaaaaaaaaaaaaaaagcggcc

SEQ ID NO: 61049 - DNA, 930 bp, Zea mays
  Clone ID: MRT4577_155672C.1
atcattcgttcgcccacgcgtccgggagcttttagtatcatgctatgaacaaattggttgaaagagcatacagaaaactcaagggtgggcggattggctctagtcacaaggctggtgtcagtaaatctgccaacaaagctgcaaaacagctagccttggcttttgccaaacgcactcttgttcgatgccacaaatttgatgaaacagggctccggattgaaatcgggacgtcattcatcaggtggtagcggcaggagcggcgagcgcaaaaacaagacaaagccaaagcaaaagcttgcacagctatcaacctcggggaacgtgctgggtagagtcgttgagccattttcgtctccaacagtgcaggagccccctgaacctgcaagcgagaaaaagacccagcatccaactaggggtgcttccagcagcgctgcccagcggcttaccgtggacgctggactgccagtgttgcctgggttagatgacatattggacgtcccggaagggcttgacgggcagggcaacgatatcagctcgtggtttacggatggccttgacgactcgttgcaagacattgatctttctggcgccctggaaatcccagacgatgacctcacccagctgggatttatgtaaggagaaggaagcaatcgttgtttgtcctgtgcatatacatgtctttccttcacctaatgtatggtagcgctgatccattgatctccctgccacaacctggtaggtcagaggttgtaatctgtaattaggctgttggattcgtgtcgatattcagtgtctgctggcatggactggatagttgcagatgaggcgaggtagcagcaacaagaacatgctgagatttgttaatgttatcctgtagtttgtgcttcaaaaaaaaaaaaaaaaaaggggccgccaacgactagtgagctc

SEQ ID NO: 61050 - DNA, 802 bp, Zea mays
  Clone ID: MRT4577_155673C.1
ctcgaggccggccgggaatggttatctcaagctctctgcgacttctatcgcttcttggcatggatgacctgcagcaccttccgtcgtctggcattgtgctcacgctcctcatcgagatgaacttctgcgccaacactctccatgtgccgcccttcgacccgtccctggaaggaaactactaatagacattcgcctgtgattgctggcacaaggacttactgctagatgatccaatacgaccacctcatgaaggtgactgccctgaggtgcacaagactatgagggccaacgatctgacactgctaggagtgtacagactcacgtttgacccacttgctctccgtgctccacttggaaagaacacgaacctcttgaggggacccaagaaaggccatcgaggttgtgaaattatcttccaccaagacatccggtgagagccgttcagacatctacactacataatgtgcgctccaatatggagcgcacacactacagacatagcttcgctgtgcacagagagaacatcacgtgcctgtcaaggtcatacgaattgccagtgccatcatgatactattcactgcctaccgaggagtagcacacttcgtcgccttggcttggctactgatagagtttcccgacgaggacactgggtactgttggaccaaaaacacataggtcttttgcacctctttttatgatgacctgatgaaattcagcctccagcttgattttttgacacactctgacaggttgaactgcacctgtggcgtaatcataggcctaaatgggtcctggactaaat

SEQ ID NO: 61051 - DNA, 352 bp, Zea mays
  Clone ID: MRT4577_155674C.1
gaacaatttgaagacatttcatagtcctacgcttttctgtagcacctgcttattgatacctaggccttaaatgtggaatggccaaatatacatgccacttttcagatgaaatgaccagaccacacgtaggtgtcaatcaactcctagatgaaggcatgaaaggtaggtgctaagttatggcactggatgtacgggatctagaaaaggtgccactttgaggccattcattagagctgttgttcaaaagaaaaagccgtaatgataaattcataagctaccttataaaatgaaacaatattgaatgcatgtgatcttgtgattctatgtaagactatcctgtaagataaaaact

SEQ ID NO: 61052 - DNA, 697 bp, Zea mays
  Clone ID: MRT4577_155675C.1
cctcgaggccggccgggaacactgactctcacgcgcgctgacgaggcgaggcggctgtggtcgtggtcccatgcgcagactcaacgagctcgcgcctcgcccccggatggggtgcctgttcttcccaaactacgagagcgagggagcgagacgagattcattgaccacttcagctgcgcctccaatcggagtgcgaaccctattcactcaagacggaggtgagagagtagccatggcgcggtgcctcgcggtcgtcgacctcctcatacgtcggcctgctgcgcacgacgaccgctctcctggcggcctgacagcgctcctatcagttccgcctgcgtaacagagtagagagtttgcgactcttccgcgctcgccaagatcgaggctgtctgagcgcagtctgccgtctgccgtctgacctctacagacaatgatgcgcgactgcctatgatgggtgcattagtggcgactcttggccaacatgaaggtttgagcttggctgtggagagatactccaagacattggaaagggttgaccctggcgccactgtgtcagacacatatggcctggagaacacagcacatggcaggctgcaggaggctgcagctatcgttacataccgagtgtcccactaagacaggtcttcaggatggatactgaagtcccatcttcccactggatattctcgctgagaga

SEQ ID NO: 61053 - DNA, 387 bp, Zea mays
  Clone ID: MRT4577_155676C.1
ccgtgtccttgaggcgacggccggcgagcgacgagtgcctccgaagacgccgtacgccccatcgagccgtagtcgttcgtcctccgccgcctgacgtcgcgcgccgaagattgagcgtgccgccaactcgagtggaagcgcgggagggtggcgtggatgaaaaaaacgaggaggacccttgaactggaggggggccgccctttatatttctcccgcgtgcgtgccgggggatgttaattatctgtgggtgtggctggagctcatggcttgggtgtgatcccttccctaagatttggatccgtttttatttgtggctgtccgtgacacccaccgcaacggatttttttttctttaaaataagcacagcattcgtctgggaggcgtgtt

SEQ ID NO: 61054 - DNA, 608 bp, Zea mays
  Clone ID: MRT4577_155677C.1
tgccggaccatcctctagacccgtttagaccgttcaacaaggtctcggtccgtccccgtctacgtggcggaccacctgcgattcacaaaactggttgcagcacttgctcgcccacctgtgcttgccccctagcgttggaggccaggatggtgatctataatgtccccctccatctggtgtcttttctgcaaccactttcctgcaagaaattttggtgactttatcagcctctcatgggtcgccgatgatgatctctttgcctttgcccttgtcagtcacactaggccaaattaggactttttcatcgtcgaaactgatcatgttaattggaagggttctgtgttcacttgcacttttttgaaacttcaattggcccccgttgatggtcgattggacctatcattgaaatatattacaatcatcagtggcatgagagaacgaattatgccacttgcaataagcacgacgtttaagctcaccagcagatggaatatggtgatttattttaatgttgctgcttttgagtaactcgtcaaatattttgtcacatatgccaacattaaatgtaaatttacccttttcttaccgtctcttctgaactggctgcc

SEQ ID NO: 61055 - DNA, 238 bp, Zea mays
  Clone ID: MRT4577_155678C.1
cgactcctatggggaaccctcgcgcgcccgcaggtcccggtccggtatagcgggcgcgatccacgcgttcgcccacgcgttcgggccatcgtcaggttccatgtcagtccgcgcgatcacttcagtcggacaagggcggacggcaagaaggtgatcgacagagggtctcatttcctcatggctgacacggaggacctggagatcagttttgaagcccgatgccgtacgaggaacagcg

SEQ ID NO: 61056 - DNA, 374 bp, Zea mays
  unsure (1)..(374): unsure at all n locations
  Clone ID: MRT4577_155679C.1
ccgggncgacccagcgtccggcggcctggagcacgnggatcngaggcccggcatccccgacgacgncgccgnggacggccgggcccgcgncccgcacgccncccaccgcgcgangcgccgggncngccgcggcnggcgnagcgccgccgcggcgccggccnncgcgncggcgcgcgccgcggcgggcgccaacgaggggcgggngnaccngangcagnncgggcgagnggcggcgggagccnggcgcgccgcccgnggngccggngnncgcgcagngcgcggcggnggggacccggcnggccgngcngggcggcngggacccgcngacccncgagcccgnggcggacgngcacgngcnggacgcggcaacgggg

SEQ ID NO: 61057 - DNA, 315 bp, Zea mays
  Clone ID: MRT4577_15567C.1
ggtccgacgcccgccgcccgcccagcgaccccgaggaggagttttgatgatgactatcctggattcgtagaataaatacaatgaattgtagaatggttatacatggtcatactaatattgtctagtacatcttttaagattctcatgcattatgattgctgtttcctgttatgtacttgtacaggcaaaattttagttttcccttttgccatgatcctggtgtaatgaagtaggcttttgttttccaagttttgcacatgtcaaaattgaactctgatgtgtacgaggtttgattctgtaagtacttatgttttc

SEQ ID NO: 61058 - DNA, 594 bp, Zea mays
  Clone ID: MRT4577_155680C.1
ccgggtcgaccctacgccgtccgatgtacgtgctattcataaacacacctagcgaagcgcactagcacgcacctatcacactggctctccatgcattatccctacgtgcgcttctcgcccttttggggagtgcaacaaatgcgatcatgatcccacagtgctcacttgctcccagcgccatgattacacacatcctccctccaggtactacaatgggctacgaacacccagctcgcgcaagcctataagctccaacacgcgcttgcggcgagcgccttataacatcctagcgcccactgacaacagcattcctcggcacatgctaaccatacacaccatcgcatccgcagcagcaacacgcactgagccacctatacgaggtgaaccctatcgactactggcaacaacagctgcttgcatacaacccactcgctttggcaaacgtagctgcatacctacaacaacaacagttgcaacagttgctacacaccgctgatgcaactacgccatggtgaaccctatggactacctacaacatcaacaacttgtgtcatactatcgccgtcgacttgggcaatgcacctacatacctgc

SEQ ID NO: 61059 - DNA, 883 bp, Zea mays
  Clone ID: MRT4577_155681C.1
cattgggtacctcgaggccggccgggaactagtccaggaaactaaggccgggacaactggacgacggctaggacgacggtgcgttgcgttgggggccgccggcgacgatgtcgtcgtccgcgggcgacaagaggaagaagacggcgtgcgtgaccggagggaacgggtacatcggctccgcgctcatcaagatgctgctggaggacggatacgccgtgaagacgacggtcaggaaccccggggtactgcgtgtcgaaggtgttcctagagaaggaggcgtgcaggttcgcggccgagcacggcatcagcctggtcaccgtctgccccgtcatcaccgtgggcgcggcgccggcgcccaaggtccgcacgagcatcatcgacagcctctccatgctgtccggcgacgagcgagggctcgccgtgctcaaaggcatcgagaagacctccggcgcggtgcagctggtccacgtcgacgacctctgccgcgccgagctgttcctggcagaggcggcggcggccgacgggaggtacatctgctgcggcctcaacacgaccgtcctcgagctcgcgcgtttcctggcacacaagtacccgcagtacggcgtgaaaacaaacctcgacggcgatgaacagcagctactcgagaagccgagggtgaaggtgtcgtcggagaagctcgtccgggaagggtttgagtacaggcacaacacgctggacgagatctacgacaatgtggtcgagtacggcaaggcgttagggattctgccctactgatatatatagatgcccgagcttaattgagtacgagggcagcatatatgttatatgttatcggacatatacgagtcttggaaagtaattaaataatttatgggcatatttt

SEQ ID NO: 61060 - DNA, 323 bp, Zea mays
  Clone ID: MRT4577_155682C.1
gatcagcatagcaggcagtctgtatagaggatcgtcgaacagaacagcatgaacatggtcatagatctcgtcgtgtgcctggctctgtcagctagcagcgcctctgcaatgcagatgccctgcccctgcccagggctgcagggcttggactggcgctggcgccggcctgacgaccatgatgggcgccggcgggctgtcccctacgcgactacctgaggcaacccatggcagcccgttggcggcggcgcctactcccggggtggggcagtcgaccgcatgttcagccgtccggcacaaagctgccgcagaaatgaggatgatga

SEQ ID NO: 61061 - DNA, 559 bp, Zea mays
  unsure (1)..(559): unsure at all n locations
  Clone ID: MRT4577_155683C.1
ctcccgctcgcccggccggagttcctctgttcggccatggccgccgtcgagcttcctgctcgcgcctatctccctcccatggcgcgccctcctaggtcggatctcgctcctgttcgccggcgtttctccctgcgccgtgctccctccagttttcctcagcgccgccgtgcccagccgtggagtccctgcgcgtgtgtcttctccgctcgccggcgcttctccctgttgcgcgcgtcgatctccagcgccgtgaagcttcttccccgcgcgcacatggctacataccgccgttgctcatctctccatcatcgcaatttctggtgtcgactgccatggaatccagctcgtcagcacaagcacctcgcctgtgttttccccgtcacgccatgatgcttggccgcgtcctgcgcgcagagctgttcctgtcgcgtccttagcagactcgcaccctccgtggtatgtctgctcgtctattctgncggcctgtacggacacggggtctcacttgagtcgcgctgccgttggacgtgacgcaacacaggggttggctctctgctct

SEQ ID NO: 61062 - DNA, 1840 bp, Zea mays
  Clone ID: MRT4577_155684C.1
cattgggtacctcgaggccggccggggtggcttacggagatgaggtcaccgccagtctcttggtcacaccaaacacccagtggttcaggctggccaaagttatgagttatctgccctgtcctcccaaactaatctagtcccaggaaactaatttcaacacacaactggacgacggtgcgttgcgttgggggccgccggcgacgatgtcgtcgtccgcgggcgacaagaggaagaagacggcgtgcgtgaccggagggaacgggtacatcggctccgcgctcatcaagatgctgctggaggacggatacgccgtcaagacgacggtcaggaaccccggttcgattctccttctcctcctcccctcttttctttcgggccggttcagtgtttgtggtggttgctgctgctgttccggccggcgttgcagctgcgcaggatcaggaaacggcgtcttttgaactccggaacgcataataatagcacaagattgtgaacgattagatttctgatgagatggttgatggttcagcagcgccatagaaatcctacactttgctacttcagccaggcctaggcgcgcatgtgcctttactttactgtcgctgttggagacgacatggacaagaactcccacctcaagggcctgcagcagctcgggccgctgacggttctccgcgccgacatggacgaggagggcagcttcgacgacgccgtcgccggctgcgactacgccttcctcgtcgccgccccggtgaacctctcggcacaggatccagagaaagagcagatcgagccgtccgtccgaggcacgctgaacgcgatgcggtcgtgcgcgaaggccgggacggtgcggcgcgtgatcctgacctcgtcggtggccggagtctacatcaggccggacctgctgcaactgcgaggcgacgggcacgtgctggacgaggagtcctggtccgacgtcgagtacctcagagccaacaggccaccaacctgggggtactgcgtgtccaaggtgctcctcgagaaggaggcgtgcaggttcgcgggcgagcacggcatcagcctggtcaccgtctgccccgtcatcaccgtggggcgcggcgccggcgcccaaggtccgcacgagcatcatcgacagcctctccatgctgtccggcgacgagcgagggctcgccgtgctcaagggcatcgagaagacctccggcgcggtgcagctggtccacgtcgacgacctctgccgcgccgagctgttcctggcagaggcggcggcggccgacgggaggtacatctgctgcggcctcaacacgaccgtcctcgagctcgcgcgtttcctggcacacaagtacccgcagtacggcgtgaaaacaaacctcgacggcgatgaacagcagctactcgagaagccgagggtgagggtgtcgtcggagaagctcgttcgggaagggtttgagtacaggcacaacacgctggacgagatctacgacaatgtggtcgagtacggcaaggcgttagggattctgccctactgatatatagatgcccgtgcttaattaagtacgagggcagcatatatgttatcggacatatatacgagtcttggaaagtaattaaataatttatggacatatttttcattggaaaaaccagtgtgagagttctagactaaaggcctagtttggaaacttcttcctctgctctcggccggcgatcaggactggattttaaaccgtccgacaaaataagtctatttatgctgctactgtgcccaaccgtaattggaccttaaaaaatgtcattacaaacaatcaagtgtgtcaagaaaaattgtctatgttttgctttt

SEQ ID NO: 61063 - DNA, 212 bp, Zea mays
  Clone ID: MRT4577_155685C.1
cccacgcgtccgcctgaggcgatggatgaagaccaagtggatgaaatcactggggatctgtgcccctcactttgggttgtggacaaaacatcctcggcgtactgtcactgatgctgatatccgcaagtatcacgcgttagcccagacattgcagcattcccagcggttcggcagagagttccgcttctcggatcagccggctacagctggtg

SEQ ID NO: 61064 - DNA, 422 bp, Zea mays
  Clone ID: MRT4577_155686C.1
tgtcctttattttttagatgtataaaatagagtatgaaggttatgagacttttttctaatgtcctgatgtggagttttcagaatgatcatgagagtacataaagtatgttcttatagcaacaacacgtatttgttttgcacccactttatgttcctgtaacctgtaaaaatattgttaataacttggtatgcatattaaactacaaatgtaaatacatattttaaaaatacaaaaatactaataatataacccagttaaggaaccaagtcgtggtcaatcataccaaaccccatatattgtgcattataggatgttatctgtcagaagctcctctatcataaaactgttagcaaattactcttttgtacttatggacctacattatcccaatatttacatttaaaacacactatagggacat

SEQ ID NO: 61065 - DNA, 616 bp, Zea mays
  unsure (1)..(616): unsure at all n locations
  Clone ID: MRT4577_155687C.1
gtctactagttgagagaatagactaacaagctgcaatagaaacctgtgtttataataaaatgtttcgtttttgtgaaccacaaacttctggccttcatctaaaagatgtctaggcaaagcatgtgttatcaattggttggaagtatgggtgggtactagtaatactgtacaatattattattttttggctttttaatctccagtgcaatggtttttgtagaatataaataaactctgctataatatattttttcaatcatctcacttcaaatgatggcatagaaaacaggctttatgatttcccatgctatggatgatctctctcacttgcattcggattatgatgcagggacaatatagtggcatcagaacaaaggaggtactatatcttaaactctatgatttcttcataataattagatccctcaacttctactgcaacacataaatttatttcatccatttctatacaaggttatttatgtcatactgcaacataaatttatttcatgcatttctgtacaaggttatttatgccatagagttgatcccttgttttctttctaatgagtgcacactgtacattggagaaattttgaatgttntactctatgca

SEQ ID NO: 61066 - DNA, 1500 bp, Zea mays
  Clone ID: MRT4577_155688C.1
gaggctttgataccaattgtaatgacccctgaccgaagatggtgttcttccatggcgtgagccttctcgtcaccgaaaatccgccgcgacagagagaagctgatatttgaagtacaagcaaccggctcaattctgtccacaacactgcctgaaccagaccaaccgtatcagcatcagcgtaccggccgcggaggagccctctctctctctctctctctctccaggcgcatcaagccatggctgctcccaagaagacgatgagagctctgcggtacgacaagtatggtggaggagctgaaggcctaaagcatgtggaagtgccggtcccatccccgagcaagggggaggtgctgctcaagctggaggcggccagcatcaaccccatcgactggaaaattcagaagggcatggtccggcccttcctgcctaggaagttccccttcataccagttggagacatgtctggcgaagtggtagagctaggcagcggtgtgaccgacttcaagccaggtgacaaggtcatctccatcactttcccgaatggaggcgggctagccgagtacgcggtggcgccggcgtcgctcacagtggcacggccgccggaggtgtccgcggcagaaggcgcgtctctgcccacggccgcgtccaccgcgctgcagcagctcaaggccgcgggggtaagcagcttcgacggcggctccggctctggcgccgacagcgacggccccaagaacgtgctggtcaccgcggcctcgggcggcgtcggccactacgccgtacagctggccaagctggcggggctccgcgtcacggccacctgcggcgcgcgcaacctgggcctcgtcgcgggcctgggcgccgacgaggtgctggactacaagacccccgagggcgccaggctgctgagcccgtcgggcaccaggtacgacgcggtggcgcactgcgcgactggcaccccctggtcggtgttcgcgccggttctggccgacagggccacggtcgtcgacgtcaccccgggggtcgccgccgcggccaagtcgttccttcagaaggtcaccttctccaggaagaggctggtgccgctggtcctgatccccaagaaggaggagatggagtggctggtggagatgaccaggcaagggaagctcaggacggtggtcgactccaggtactcgttgagcagagcgcaggaggcgtgggccaagagcatcgatgggcatgccaccggcaagatcgttgtggaaatgggcggtgctgcagagtgaaccggcaagcgggcatggcaagcgtgcacattgtgttggttggttcatggattcgttctctctgttcgatcatcgcgacagccattcataataagccatccatctgatggaaagagaactttgcacaccaacacactactgagtactgactgacacaattgtttacgttcacagtacgtacttgtaagcatgttcgaaggcatgccctgtctgatatcagtatccgatacatccg

SEQ ID NO: 61067 - DNA, 319 bp, Zea mays
  Clone ID: MRT4577_155689C.1
cgatgcaaagactccatctgaagtttaggtactagcttgccatgaaatatatattcttctgtaagaacatcacttgcatgctctttttgtcatatctactccttctgttccaagtataggacgttttgacttttctagacagataacttttggtatgcatttagatatgcattatgtctggatacatagaaaaacaatatatctagaaaagccaaaacattttataatttgtaatagagggattatatgattacttcaaaaaaaaaaaaaaaaaaaaaaaaaaaaaaatataaaaaaaaaaaaaaaaccaaaggaaaaa

SEQ ID NO: 61068 - DNA, 413 bp, Zea mays
  Clone ID: MRT4577_15568C.1
gcagatcttcgtgaagacacttactggcaagacgatcacccttgaggtggagtccttagacaggattgacaacgtcaaggccaagatccaggacaaggagggcattccaccggaccagcatcggctgatctttgacggcaagcaactggaggatggtcgcaccttgcctgactactacattcagaaggagagcaccctccacctggtgctcctactcacgggtgttatgcaaatttttgtgaagacattgactggcaagaccattaacttgcaggtggagtcgtctgacacaatcgataatgtcaaagcctagattcaggacatgcagggcattcacatcggaccagcagcgcctgatctttgctggcaagcatctggaggatagtcgtaccctattcgactacaacatccat

SEQ ID NO: 61069 - DNA, 183 bp, Zea mays
  Clone ID: MRT4577_155690C.1
gtgtttaccccaccgacaagagcatccagaaaggcgagccatttgaagcacattattccccattttaccaacaacggctaccaagatattatctcctccacgcgcatgtcgcgctaacagcgagcgcaacaaaagcgttcataaagccacaatgcagactggcctcaagactcattgtcacac

SEQ ID NO: 61070 - DNA, 414 bp, Zea mays
  unsure (1)..(414): unsure at all n locations
  Clone ID: MRT4577_155691C.1
gcacgagcagcagtgggcagtggcccgctggtggcgttctcccgctgagtcagccgagtccgcgcccgtgcgtctctgtctcgtgacgaatccggccctctgtggctgtcacatgacggatccggccctcggacaccctggattagctccagtatttaaagaaaggttggtttagtggatgagggcaccagctgagctgccacgctatagcgcattggattcttcatgttacaaaatatgtataacatgtgatcaaccccctcccctgacacttttcccccaagggacacacccctntgggagactctgtatccacttgtatataagcaagtaactctgtaataaagacaacagttctgtcaaaaaaaaaaaaaaaaaaaaaataaataaaaaaaaaaaaaaaaaaaaaaaaaa

SEQ ID NO: 61071 - DNA, 416 bp, Zea mays
  Clone ID: MRT4577_155692C.1
cgctgagttctctcggcgcactgcgacgtcgtcgtcgtcgtcgtctcctctccggccgtgctgcggtccggagctccttcacgtcggcgacttcgataacccacggcctctcctccaatcacatcgcactcactcgcggtgtcgtcgtgaagacgctagctgcctgcctcgccgatcacgttttcggtgaatcgatcacttggtgaagcaattttctagaggagctgcccaggaggttgcccccgacccagcaccagagcctgcacctgaggacctgcctgccactactttggaaggatctctgtaggacatggttgctggagtgacttggccgatcacctttaccaccggggttggactgtttagggggaccctgccttggctgaggaggggcatgaggagtgatgggacaggct

SEQ ID NO: 61072 - DNA, 307 bp, Zea mays
  unsure (1)..(307): unsure at all n locations
  Clone ID: MRT4577_155693C.1
gggagngcggcnatccagatgacagatgntatgaacatcngcatggacgatcaaactcatccaccctcatacctataccaagncctcaccangcgctcaaagnacttttagaggtcgtgggggggcccnncctattgngttgcccgcncngggccnncncccccgcgcccctgcccccccgccccgctcgcncggcccgncccccgcccccccgccccccccccctcccctgtccgcgctgccccccccccgcccccccccccccccccccccgngcccgcgncccctggccgcccccccccccggg

SEQ ID NO: 61073 - DNA, 288 bp, Zea mays
  Clone ID: MRT4577_155694C.1
atgacttccaaagttctcagcactcagatcgccaagaatgttctgtcatatgtcgatgatatcatagtcaaaatcatgaaacaagataatcacattgctgatttgcaagaaacatttgccaacatcaggaaggctggcctcaagctaaatccagaaaaatgtgtcttcgaggtgaagaaggaaaattttcttgggtgcctagtatcaacaaaagggattgaagccaacccaagcaaaatagaagctatacttcggatggagccactgaagacaagaaaaggtgcttag

SEQ ID NO: 61074 - DNA, 866 bp, Zea mays
  unsure (1)..(866): unsure at all n locations
  Clone ID: MRT4577_155695C.1
gctttccagctttggcctacaccacaatccctgtcctctccttcgccatcgccaccgccaccgccacctcctcccgttcttctctggccgccgcctcagacttggtgcccgcgtgctgccacccgcaggagccgcagatggcgtcttcgacgtccaccctagagatcgaggctcgcgacgtggtgaagataatgctgcagttctgcaaggaaaactcgcttcatcagacgttccagaccctgcagaacgagtgccaggttgcccagctgaagctgccgcgcaagaagctcgaggacctctacgagcagattgtgctggagatggcagagctccgtgagcttgacacggcccgtgcaatccttcgccagacacaagtgatgggggtcatgaaacaggaggaacccgagcgatacctccgactagagcacctccttgtccggacatactttgacccgaatgaggcttaccaagaatctaccaaggaaaagcgacgtgcgcagattgcccaagcaattgcttctgaagtttcagtagtcccaccagctcggctaatggcactgattacccaggctttgaaatggcaacagcaccaaggtttgttaccccctggcacacagtttgatttgttcagaggaaccgctgcaatgaagcaagacgaagaagaggcatatcctactactttgtcacatcaaataaagttcgggaagaaaacccaccctgagtgtgctcgattctcacccgatggccagtaccttgtttcatgctcagtggatggaatcatcgaagtctgggattatgtcagcggcaagctgaaaaaggatcctcaatatncagccgatgaaagctttatgatgcatngagatgct

SEQ ID NO: 61075 - DNA, 457 bp, Zea mays
  Clone ID: MRT4577_155696C.1
cttcccggacccctgggcccaaagccaaaccagattaaaaaaaaggttattccgacggaaaccaccagggccccggccaaggccggggaccaaggtccgggaaaggccttgggccccgggggccgcccaaccccttgggattctgtgaaggttattgcctgtcttcttcgccgtggaaaacggcttttgttttcccccccttagcccaggccgccacaaggcccggcggcggggccagcggcctggcttccttgaccgtgaagaacctcttccgcggattttacaggaacttgcccaccccggcgccgcccgcttcgaaccccgaccgcccaaggtcgccggccccggccccgaaggtcgccacccgaagaacggcgaagaaggtttgaaagaaaatcaccgccgaaggtggcagtggggaccccgtgccccttgtggcggttaaggttgccgtccc

SEQ ID NO: 61076 - DNA, 3351 bp, Zea mays
  Clone ID: MRT4577_155697C.1
atgcctccttgggaccgcttcgctaaattgtgtcgtctccgcttcggaccgccagagcgaggctcacgcatcgccgagctggggcgcctgcccttcctgcctacggtccaagagtactcggaccgcttcctaacgttgctgtgtcgagcacgcgacatctccccgctccaaaagacagagttgtacatgggtggccttcccaaacatcttcgggtagacgtcgaaatgcgagcaccacaagacctgcagacagccatgtacctggctcgtgcattcgagcgccgcgcggcagctatgccaccaccgcagccacgcggggcgcggccaccacaacggtctcaagctcccaaccgcgccctgccagcagcgcccgctgtatcaccagccggtgctgcagtcgccggagagggcaatcccccgatgcgccaattccgccgcctcaccccgatcgaggagcaggagcggcgccggcaagagctcttcaactgcgatgagccctacgtccgggggcacatgtgccagcaactcttctacctcgaggtgggcgacttcatcgacgacgcggtccgcgagggtgccgtggagcagagcgccgacttcctggaggcaccggtggccgctgacactgcttgtggtctcgctgcacgccctcacgggcatccgtacagacaagaccctgttgttgtccgtcataatcaaaggagagcggttgttggcactcctggacacgggatcaacccacaatttcctcaacggggacacgatgcgtcgcctcgagctacctatggagggcgtggacttcttggagacgttgggaaccattcagtggaacttccgggagttgaccctgtcgttcctgcaccagggccgacgtatatgctggcagggcgtgcgtacctcgcggacgcctggccctcagcagcttgtggtggccgtctccgacgccgcttagcagcccctcatggacgtcctccttcggcagcacggcgctatcttcgacgagcctacagggctgcccccggcgcgcccgtacgaccaccacatacatctgctgcccggtaccgctccggtggtagtccgaccgtaccggtggcctacctcggccatgtcatctccaagggcggggtcgccatggacgcagacaaggtcgcgactgtggcctcctggccgctcccgcggtttgcgcgaggactccggggtttcttggggcttgcaggataccgcaagttcatcaaggacttcgacctcatcgccgccccgctcacacgtctcttgcggcgagacgcgtttgcttgggacaacgacgcgacagccgccttcgacgcacttaagcacgccttgtcgacagggccagtgctccagatgtcggatttctccaaactcttcatcgtcgactgcgacgcgtcgggagtggggttcggtgcggtccttcatcaaggcgtcgggccccttgcttacttcagcaaaccgtttgccgcccgccatctcaagctagcggcttacgagagggagcttatcggcctcgtgcaggtcgtccatcactggcgcccttacctgtgggggcgtcactttgctgttcgcactgaccattacatccttaagtttttgcttgatcagcacctgtcaaccgtacctcagcaccagcggatcagcaaactcttcggcttcgacttctcggtggagtacaggccggggcacctgaacaccgtaccagacgccctctcccgccgcgatgctgagaagtcgatgtcggcacccttggagggggcgggtgtggcgtcccgggccatctcgaggcccacgttcgccctattagacgacatcaagcgggcgacagctgtcgcgccggacgggcagcaccttctccagcagctacgaaacgaccagttggccgcctcgtggcgcctctctgacgggctgctgctgcatgggactcgcgtcttcgtgccagaccacggcgacctacgtcatgaggtgctactactggcacactccactgaacacgagggcgtccaaaagaccctccaccgactgcgctcagacttctacattccctgcgatcgcgccctcgtgtgggccgacatctccatggacttcatcgaagggctgcccaaggtggcgggcaagtccgtcatcctcacggtggtggaccacttctccaagtacgcccacttcatcgccctcggccacccctacaccgcctcgtctgtcgcacgggcgttcttcgacagcatcgtgcgtctacacgggcttccgctgtccattgtcagtgaccgggaccctgtcttcaccgaccatgtctggagggacctctttaagatggcgggggtgacacttaagatgagtaccgctttccaccctcagacagatggtcagtcggaggtggtaaacaaaatcatcgtgatgtacctatggtgtgtgactggcgaccggccacgtgcttgggtggactggctgtcgtgggcggaatattgctataatacctcctaccacaccgccctacgcgccactcccttcgaggtggtctacgggcggcctcccccgcccatgctagcttacacgcctgggacaccccgcaccgaagctgcagatgccatgcttcgctctagggatcagattttggccgaggcttgtcagcgcctcctgcaggcccagcagctagccaagaaatactacgacgccggacagcgtgaggtggagttccaggtgggcgactgggtatggttgcggctagggctggaaaaaaagcttgagctcgacgagctggctcgggctcgcagcagctcggctcggctcggaccggctcgacgctcagaacgagcccgagccgagcctgtttttgtggctcgtgaaaagagcgagccagctcggctcggctcgtctctccacgtcggcgccaaaggcaagttgggacctcgctacgccgggcctttcagtgttcaggaaaagattaggtcggtggcctaccgccttcagctgcccgagggcgcccgcatccatgatgtcttccacgtgagcttgctaaaacctcaccgtggagatccccctgcagccccgagtacgttagagcctgtgatggatggtcggctgctcccagtgccggccaaggtgcttcgagcccaactgcgacgtggcacatggcaggtgctcgtccactggcgcggccttgctgaagacgacacgacatgggaggacctcgacgaatttcgcgccacctaccccgacctacagctaaggacgagctgtttgcgaaggcggggagagatgttatgtacggcaaggcaaatgttaggcgccggcagcccattaggggctgatagccggtcggccagggtgggccaaggcccatag

SEQ ID NO: 61077 - DNA, 434 bp, Zea mays
  Clone ID: MRT4577_155698C.1
gcaacacccaaaaacggggaacggtttccattccctccaatacaaccttttaactaaaacacccaacccttaacaccccaaaaccaacttaatccaaacttaccccagtttttccaagccctaacaacaacaacaacaaaaaaaacccgttttgaagaagaaacaaaacaccccgggccccaaaaaccttaacaaactacaagggggccccaaggtaaaaaaacaggcccaatttttccaaaaaaaccccccctgaaataatttttgaaccaacccccgaaccttgaaaaaaaaagggctaatccttgtcccccaaggggggaaaagctttaatttttccgaaaccaaataactgcccaaacggggggccccttttgtaggctcgaaattccacctgccccttttttttgaccaaatccaccattcaaaaatac

SEQ ID NO: 61078 - DNA, 291 bp, Zea mays
  Clone ID: MRT4577_155699C.1
accagactcaggacacggaggtcgtggagtccaggcctgcaggggatggaaccttccagaagtgggcggctgtgtgtggtgcattctggacaggggttgagatacacgtgccatgtgcagcatgagggtttgcccaagcccctcaccctgagatgggagccgtcttcccagtccaccatccccatcgtgggcatcattgctggcctggttctctttggagctgtgatcactggagctgtggtcgctgctgtgatgtggaggaggaagagctcagatagaaaaggagggagc

SEQ ID NO: 61079 - DNA, 282 bp, Zea mays
  Clone ID: MRT4577_15569C.1
aagctcgaattcggctcagacactgtccacccaatggtaccccacccaacgggcgctgacaccacaggggggcaataaaaaagcacaaggggatatcaacacgagccccaaggcaccatactaccaactagccagagaccagatgctgctacaaccccaaaaacaagcccgccgccaaacacaaactccgccaaaagccggccacggggccctccaccacgacgaaaaccgatgcatacacaggcgcttacggcaaaaaaccggagcccaaagcactcaacc

SEQ ID NO: 61080 - DNA, 479 bp, Zea mays
  Clone ID: MRT4577_1556C.1
ctgtcgggcggctgatcgtatccccccgcgttgctcatataccattcctcgcagagccgcccgacacaggacccgcgcccctacgactggttcaatgcgctgcgcccactatcgattgactgaagaacgtctaggctgatctgacctgataaacctatacggctgcgcactgcattactaatgacgacatcacgccttcagcctcaactccaactgaagccccgagcgtgcatccacctaatgccagccaatagggctagaccatctgtacggctagtagcactaaaaaccacgtgacaagggtgttggtgcatacatggctctggaatctactgacctggcctgtgcagcggggggtgaccataactataagacatacctcgcacattgcggaacagaactgaagaagacctgaacaatatcgtaatcctgcagccagtctcgatgcctctgctgatgtgaatgtaagtggtaaatcc

SEQ ID NO: 61081 - DNA, 616 bp, Zea mays
  Clone ID: MRT4577_155700C.1
ggagggagcaagaagcacatacatctttttaaacatgattagatttaggccatgtgccaaatcacaataaccaaatgacatttccaaactcagttcactacaaggtgtgacttgcgcgctgactcgaggaaacagaaagctggcgcaaatcttacaacttacattatgcaactatgctaagggatgggtggggctaaggtcaacttcaggctcaaatcttgacaagatgccagatctctgtcacacgctggcaaattcgaacttgagcagttgcaaggacaaagttcatgtgttcaaatacttccgcaacttctgagcccgatccctccaggaacctttttgcatggacagtacctccacagtagaaagccggaagctctttccaatattcttgaccattgaagcatgatcattagcaactccaacatacccattatcttcatcaagtggagcatccttattaaattgaaatctttcccaccccacagttgcagttgcaagagtggaatcttttgcagctgtctctgaaagctgaaacttcatctttgctttaactctctcagctggagtcattttatcatatccttttatgagccgcgagtagtccattttgccc

SEQ ID NO: 61082 - DNA, 204 bp, Zea mays
  Clone ID: MRT4577_155701C.1
agggcgtaccaactacgcaaaaagggaatacacaagttgtatgggttcacatctaaattgcgggataactgaattttaaagcacttgacaagaaccaaacatctctttcacaggaagacccaacagcaggaacacatttaacaagctagagggtgaacaacctctcatctattaagtccctcttaagtcttctttttcgtacag

SEQ ID NO: 61083 - DNA, 1385 bp, Zea mays
  Clone ID: MRT4577_155702C.1
cattgggaccctcggggccggccgggaagtaggtcctttgggagaaactgtagaccggagcaatggaggaagagaaagcggcggcgtactacgacgagctcaatcgcaagggcgagggcgcccgccgcttcaagcaggggcttggcttctcctcctcatccgccactgccttcccttccaagcccaccgcctcctccttcctatccggttttgttcgcgcgggcgcagcccctggccccgccaaacagccgttaccgcattccaggaccccatccagtccgcaccatcgctcaagttcaccgcctctttcgcgtcccaggatccgctccaggtccaggtccaggtccccgtctcgctccagccggcgccaatcgagatcgaggtcccggtcgagggagcgcaggcgccgctccaggtctagggagagggaccgcagggcatcctgtagacgctctaggtcgcgggggtcgagatcgccttctcgccggagcggcaggagcctgcacttggaagcccggcgggaacggcatggggatcagcggcggcggcacgacgacggccatcagagctctaagggtcgcagtgatagggacgggggcaaaatggactactcgcggctcataaaaggatatgataaaatgactccagctgagagagttaaagcaaagatgaagtttcagctttcagagacagctgcaaaagattccactcttggaactgcaactgtggggtgggaaagatttcaatttaataaggatgctccacttgatgaagataatgacgatgttgaagttgctaatgatgatgcttcactggtgaagaatattggaaagagcttccggctttctgctgtggagtcaaagcgcgaagataaaatcagagatgcgcatgatgaggctatatttggtgtacctacaacttcatttgttgatgttgaaattggtggtgacgagcttaaaaccaatcatgaagacgggaaagttgaagacacagaatctgatgaacctagcagctccctcatcagcgataaagtactggccatgcaaaaaggttcctggagggatcgggctcagaagttgcggaagaatttgaacacatgaagtttgtccttgcaactgctcaagttcgaatttgccagcgtgtgacagagatctggcatcttgtgaagatttgagcctgaagttgaacttagccccacccatcccttagaatagttgcataatgtaagttgtaagatttgcgcctgctttctgtttcctcgagtcagcgcgcaagtgacaccttgtagtgaactgagtttggaaattcatttggttattgtgatttggcaaatggcctgaatctattcatgtttataaaaaggtatgggcttcttgccccccccc

SEQ ID NO: 61084 - DNA, 302 bp, Zea mays
  Clone ID: MRT4577_155703C.1
tcctaatagcctccgccctttttaatatttatcaaaaataaccacaaaaatctgctaatttaaaaataacgggggcgttacaaccccttttcgcacccaaaatcataaaaacaactttgacacacatgcccattgtttatccaggattgttatacaacacaactgcccaataaccgaatttaactatcaaactaataattcaatcgtgtccccttccccccttttaaattttaccacaccctaattggtatctatacacaatacccgaccccaaccttttgtaaactttaaccatctgcttc

SEQ ID NO: 61085 - DNA, 1854 bp, Zea mays
  Clone ID: MRT4577_155704C.1
tcgggcagtgtccctctcgttctcgtccatcttcttcctttcctccattccatgaaggagaagaagacatatatatcatagaatgatagtatgacggaggcttgacagccgcacatcacatggatccttctgtttccgtttgccgcctccacccgggcgtcgccgtcaccggcttctgccccgcctgcctccgtgaccgcctctccggcctccaccctccctccgccgctgacctacgccgctgcaagtccttctcctacgcgcgctctgcagccgcggtggagccgcagcgccgctcatgcgacctcttccgccacggtcagcccatcgcagcggcggtaccggaggaggaggaggaccagcaggagcacggccgctcacacagtcaccagtccaaaaagtcgtcgtctttgggtggcctcctgggcaagaagctgcagcaatggcgccgcaagaacaagaaggagccggagatggaggtgccctccagctgggacgcccggttgggacccgtgccggcgctcggccgcctgccggccacgatgctgtccctgcccgtggaagaggacgacgacagcatggcagcgccggcggtcccgcgctccgatgggcaaatccccgtggaggaagactactgctactactacgacaacgctaacaatatcaatgctgcggcggcggtgcccggcggctccgagcagacgagggactactacctggactcgtccagctccagcaggaggcgccgaagcgtggaccgctccaccacctccgggcgcaactccttctctgacgccaacagcagcgaggcggcgtgcaggatgatgatgatgatgaatgccgccgccaatggcaatgccagggtgtcaccggcgggcatcgccgccgcagagagtctgcaccactaccacgagtcccatcatcatcaccatcaccagagcgtgcttgtccatcatcagtgctacagagaagaagatgagcagcagcaggaggcctataatctccgcgccggcgacttctccggtagcaatggcgtgccggcgagcaagcctaataagaaggggattaaggggtggagcatctggggcctcataagcaagaagagcagcagcagcaggaagcactctgcagctgggggaggagcagtagcaggaggaggaggagagtacgagtacccatggccggagctccgggcaagggggtacaacgggcagatgctccggtgcaacagcagcataagcgcgagaagctccttcagcggcacaggcactgggagcgggaggaggagcgtctctggtgtggacatgcgcgataagtataacagtaacaatggcggcttgaggacgaggagggacgaggtccttctggagaggcacctcagcacgaggtcgtcttcttactcgagatcaggacatcatgacctggatccagcagctatggcaccgccgcagatgggaatgcagttgagcagccggccgcccaacatcccgaggcgctcctcttccaactccaagcatgaattgggcaagacaaggaggagcacacttggactctagctgcctgttccatcccaagtgcccgtagcattcagcatgacgtacgtacgtagtctgttctggctgacaaggtggactatagctggtgaactgaactgcaactcatagtcagtccttcttgtgttgggtactgtactctctagctcttagactgttacataaacactctacaacaggtactttaggtgggagggggacttatatatttatcacaggcacagcctttctttctccatgattaagcatgacttgctcttcccttgtctattcaagtcaagcactgtgtcaggccaggatc

SEQ ID NO: 61086 - DNA, 388 bp, Zea mays
  Clone ID: MRT4577_155705C.1
agattgattctacatatttttattgttgactatggttattgtttcacggaaacacaacaaccgtttttgaccttagaaaacgctgtccgccaccatggaatgcattttgggcggggggagggattttttacaaaagaagaaagaggaacgccaaatacgcgcgcgcacataggggtggatctattcaaccaaaaattaacaacgaagaaccttcgccgggccgcaatttggacatacacatgtgcgggttttatttttttttggacgtttttcctcccgtccctcgtttttgctttggggttttttacttgacattaagggggatcggtttggcgccccagtccttgagggacttaggcttggggatctacaggttggccttggttat

SEQ ID NO: 61087 - DNA, 479 bp, Zea mays
  unsure (1)..(479): unsure at all n locations
  Clone ID: MRT4577_155706C.1
ggtttttggagtggctgcgtctagatcgctggtttacacgcctttgttaaccggttcgagtggcaactacgtaattaacgtgaaatcgattagagtcaacggggaaaagctctccgtggaaggtccgttggcggtggagctgagcacggtggttccttacacgattttagagagctcgatctacaaggtgttcgcggaagcttacgccaaagctgcgggtgaagctacatcggtgcctcctgtcgcaccgtttgggctctgcttcactagtgacgtagattttccggcggtagatctagcgttgcagagtgagatggtgcggtggaggattcatgggaagaatctgatggtggatgttggtgngggagtccgatgctcggggattgttgacggcgggtcaagtcgagtcaacccgattgtaatgggtgggctacaattagaaggctttatattggactttgatttgggtaactcaatgg

SEQ ID NO: 61088 - DNA, 694 bp, Zea mays
  unsure (1)..(694): unsure at all n locations
  Clone ID: MRT4577_155707C.1
acggccgccgctcgatcaagctccttgctgatcgattaaccctatctgtacgcgccgccggcgtcgcaccacgcatgtcgacattattggacccctctcacgtggcggagtgcttctactgcgagacgccgaggcgaggcctgttgcggcgtcctcgtctggcccccaagatttgcccgctcgtcctctccccgaataggatcggtgaagacatcggccaggagaccgccaggagtggaatgcctccgctctccgggaggtcatctgcgcaaaaccggcacgaccaggtgtccgatcttatcctccgccgcgatgctcatcatctgggggctcatggaaccctagagagacaggatgnaacgtcatatgaacatgaatgacagtagggacgtccttctcaacgacgtcgtcgatatcgccatagacgcatgtctgtcatacagagtctcgatgcttccatgtagttggacgctatcgacaaggagatgctgatgatctgcgccatggactcacgcatcgtccatgcgtgggagctcttagacttgcatacccagatctangacgtggatgtccagatcccctcactttaagggctatactactagaagtcatgcggacactattgagcactgctgttgttgcgtccatatgcagaacctgcacctcagacgcctatgattgactgctgtatgtc

SEQ ID NO: 61089 - DNA, 269 bp, Zea mays
  Clone ID: MRT4577_155708C.1
gaggctcggccaaaaaaaaaaaaaaaaaaaaaaaaaaaaaaaaaaaaaaaaaaaaaaaaaaaaaaaaaaaaaaaaaaataaagaaaaaaaaaaaaaagaaaaaaaaagagatttacgagttgaaggtgatagctcgcaggcctgtggtgcctacatgttggtcccagggtgtcgggccgacacagagatgtggcaatgtgaatcgcccgaaagtgaccacatgccacccagagttggctgggactcgcaaagttgtttataactttccc

SEQ ID NO: 61090 - DNA, 402 bp, Zea mays
  unsure (1)..(402): unsure at all n locations
  Clone ID: MRT4577_155709C.1
gagcgaagacagttagcattagcaagaacaggcggcgctctgccgctctctcgctcgctcgtcaagattcaagaacacccaactaagccttcaacaacgtctccacttccgacgcgaagtggtccatagccggccgcggcagcgccatcaacacggcgacgtcgtcaccgttccctgcctggacgaagaagctcaacccgaagagcgccacggcaggacccccgtacgccggcacgccccaccccaagtccagccggtggaactccgcgcgccggttgtcggacacgaggaacaggttcgcgagcgccacgcacggccgcccccgcagcaccagcaggtccagcgtggaccgcacgtactcggcggggaccgccgncttggtcccccgnaccagcgccaccg

SEQ ID NO: 61091 - DNA, 628 bp, Zea mays
  Clone ID: MRT4577_15570C.1
ccggccgggatgcctcaacgagacgcgtgcctatcatgtatcgcatgcgacgacctctcctcctcagtgactctctgtatctgcaactgcaagcaaagaaagtaattatcagaacatcgtcttcatggtagccaccacgacagtgatgcacatcatgccacagcaacaggaggcaaagaagatgatgcgcttgatagcgttgacgccgtctacgcggaacaacactcagcaactgtcctgatcactgcttggctgcatgcaaaaggtgaaccatctgctgccagtgtctcctgtgccagcgtctgctacagaaaaccaaccatcacaaccttaggaacatccactgcattagcaaaagcacaaacgacagcatcatcaccacaaccagcataagagccaggcaccaccaccgccacgacccctatcagatgaatcaagctatcatcaccaacgactccagcgcgagcatgaactaattaaagacccatgcatcctgcatgaatgcctaagcgtacctgcccactctctctcgcttctacaatgcatgcctcgctgatattaatgtaatcagcatgcatccatatgtacatacgacccctacgacactactgtacatacttacgcactc

SEQ ID NO: 61092 - DNA, 331 bp, Zea mays
  Clone ID: MRT4577_155710C.1
gtaagctcggaacctgtatagcgcacgccacactgctcgaagaatgctcttgcatctcgtaatagtcataccatatcgtccctagcttgatcggtcgaccatggcagcatcagcagcagcagccacgagactcagcggcggcagactcaccctctcagctctggcgctgctggccgactgcacctacacctcgtgggagcagctctccaccggattctactcgcactacagccacggcgtgcacgacaccaacaggtcgcagctgcaggccgccatagccagggagcagcgcatgggagcctccatactccgcctctagttgcacgactgg

SEQ ID NO: 61093 - DNA, 155 bp, Zea mays
  Clone ID: MRT4577_155711C.1
tcgtttacacaaaaactttgatttggaagctctctcaaataaatagctcgctggaaagcgagatctgatagatccgtcattgatcgctgtttttgtgtaaatcccgcggcaaggaagatgcaggttctgtttgattacccaagaccagctaggta

SEQ ID NO: 61094 - DNA, 1136 bp, Zea mays
  unsure (1)..(1136): unsure at all n locations
  Clone ID: MRT4577_155712C.1
cattgggtacctcgaggccggccggggacacatccaccggccccggccccgatcgctatctgggtcactctcacgtcacgaggtcgcccaatggctcggagctgcagcatgacggcgacggcgccgccaccactggtcggcgccggcgtccgcctcctggcagtcgtcgtggcgatactggtggtcgcgggcggcggcgggcgctgccacggcgcgctgctgaaggcgcacttctaccggcacagctgccccgcggcggaggcggtggtgcgcgacatcgtgctggcgcgcgtcgccgccgaccccgccaagctccccgccaagctgctccgcctcttcttccacgactgcttcgtcagggggtgcgacgcgtcggtgctgatcgactcgacgccgggcaacacggcggagaaggacgctgcgccgaacgggtcgctgggcggcttcgacgtgatcgacaccgtgaaggccgtgctggaggccgtgtgccccggcaccgtctcctgcgccgacatcgtggcgctcgccgccagggacgccgtctcgttccagttcgggcgggcctgttcctagctaatttggttacatatagcccatagccttctctgtcgtgtaaaaaaactgggagggatgcagcgcatctagctcccgcgtagcgtagcgcgtaggccagtagatattcatccggcaacctgaaaaaagaaacccggtcaatgcaggggctgttcaaagtaccccttgtttattcgtccgagtgcaatccatcttggatgcttctttgaccagcgcccttggcctgcgttgttttttttaataatacctctatcttaaaatagtagtcattttatctattgttaaaaaaaaaaaaaaattaaaatctgacgcgccagagccagcacgccaggttcctcctccagctcctgttcgagatgttgtaggctccatggttggaggaattggatccaccattgctcaaggtatggcgtttggcacgggtagtgccatggcacacagggctgttgactctgtattacgtccccgnaccatccagcatgagactcttgccacagaagctcctgctgctgcccctggtgctccagggatgaatgctgatgcttgcagtttccattgtaagg

SEQ ID NO: 61095 - DNA, 247 bp, Zea mays
  Clone ID: MRT4577_155713C.1
cactttttcattttattttgatgggcattccttcattgttcgttctttcaattttattcttctttctttctttccttctttccctttttatttccgttcttcgtccttactctcaacgatttcactggcagcgagtacgccctcttcaccgagcgctgacattcgctctccaggctcgtcggcgtcgatgtcacgaccgatgctgacttccgcgaggttaacctatctgtctactaatacatgcgac

SEQ ID NO: 61096 - DNA, 572 bp, Zea mays
  Clone ID: MRT4577_155714C.1
ccggccgggacatccaccggccccggccccgatcgctatctgggtcactctcacgtcacgaggtcgcccaatggctcggagctgcagcatgacggcgacggcgccgccaccactggtcggcgccggcgtccgcctcctggcagtcgtcgtggcgatactggtggtcgcgggcggcggcgggcgctgccacggcgcgctgctgaaggcgcacttctaccggcacagctgccccgcggcggaggcggtggtgcgcgacatcgtgctggcgcgcgtcgccgccgaccccgccaagctccccgccaagctgctccgcctcttcttccacgactgcttcgtcagggtacgtacgtacggtacatgcatgcgtgtacacgacggtataataactgatgtgccatggtatggtacacgtacgtacataggggtgcgacgcgtcggtgctgatcgactcgacgccgggcaacacggcggagaaggacgctgcgccgaacgggtcgctgggcggcttcgacgtgatcgacaccgtgaaggccgtgctggaggccgtgtgccccggccccgtctcctgcgcc

SEQ ID NO: 61097 - DNA, 282 bp, Zea mays
  Clone ID: MRT4577_155715C.1
caggagcttctgcttgctctggggggaatgagatagagagagagcgagagagagatctgttggggatgctagtaggcggtcctagaacgaacaagctcgcggtgttcatcgggcaggtcgtcgaggtgcccatgccaactggtcgcgctgcttcaaaccggactccgtactccaagacgaaagcagtagaattggtggtgctcttcctagaaccatccgagccaatcgcatgcctacagatctgagaccacagtcacctcacctactaccacaccaaccact

SEQ ID NO: 61098 - DNA, 180 bp, Zea mays
  Clone ID: MRT4577_155716C.1
ggcgtgaccctaatcagatgccagcaccttcgactgtagctgcacctcaggaataggtgtggaactgtttcttctctttgaaaatacagtttttgaatgtatatgagtccaaatccatacctgtcttcggagcagggatctagtgttgagcttgtctttgagcaggagccagaagaagac

SEQ ID NO: 61099 - DNA, 444 bp, Zea mays
  Clone ID: MRT4577_155717C.1
gaatccccccttctagggttttgttttttggtgattaatttgtcgctgattaaggcatgtttggatgaaactttcttactacctttgatagagatttttatgatcttcaacttgtttaattagcccatatgatgataaggtccgatttgtctttggttttcatgttttcagttttggcttacaacaaccgagtggtttagacttaggttttctgaaatctttctcttgtcatgagcaccatatggtcaaggtaagcaccatatgaacttagacactagctaatactcttgtggctaaattgtgttcatcaaagatttctttattccacatgtgctgacagattagggtgtggctctagagtgtaaaccctaagtaacaccaaggggtgttacagcccttcatcctaaaaagaatctcgtcccgagatttgggtgagatcttcag

SEQ ID NO: 61100 - DNA, 330 bp, Zea mays
  unsure (1)..(330): unsure at all n locations
  Clone ID: MRT4577_155718C.1
nttcttttttttttttttttttttttatttcgggggggggttttttttgttttggggcagtccaaaggggaattgttgaatcgtgttatactattgtttaaagacacattgggcaagtttttgacaaactacatgtaccattttatgagattggaaatgcttttaacccctcattttttacaacacgaacaacttattgcaacagcttaaagctgaaaaaaaaagcacctcccgcctcgagaaaaccacaaatggtgcgtggatttcaaagggggttggggccctctactttttagttgggacccttttggacggttcctctttttccag

SEQ ID NO: 61101 - DNA, 633 bp, Zea mays
  Clone ID: MRT4577_155719C.1
tcccggccaccctccgatacctagaccccccaccccgcatctaactactgcgtactcccacccgcaatcccctcctccggcaatgcgacaggccttgggtaactgctaatatcgccacgttccaatcaatcagcgacatcttgaaccccccccgccaacaacacccctgcaactaaacaacacccgccctgggcctattcacacaatacaatcaatcatcatcgccagatattactatcagtttaactaactaccagtactacatagacctcagtcaccacccaataggctgaacaagaagatcgaggttttaactttaataatagtaactatttttatgaagatgaacgtaataactataataaacgtgaggacaaatataaagttgcacgaggttatcgtcgttttggtactcttagagaactagaaggacgaggtgaagatccagatgaataagattatctagttggttatgaactaactagtcgttaatatgatcgttatgaagatcgaggaggaggtgacgattaattactaggttcataccgaggagatgaaggtcgatgtggtatacgtggtgcttctgctggagaactatctggaggttaagacaaggaggaggttagaagcgaa

SEQ ID NO: 61102 - DNA, 622 bp, Zea mays
  Clone ID: MRT4577_15571C.1
ccggccgggatcttttattacttttgcttggtacgtacactcgagcgctgctctcacgatatcacagatcacctgtacgacgacccgcgatgctgatgttgcaagactcatgactggtaagactagtatcatcgaggcaggacgtcctgtgacaccattgacaacgccaaggcacaagatccaggacaaggaaggcattcccccggaccagcagcggatcatcttcgctggcaagcaggtagaggacgggcgcacacttgccgactacaacatgcagaaggagagcacccttcaccttgagatccgactcaggggaggcatgcagatctttgacaagaccctaactggaaagactatcaccctcgaggtggaggcttctgacaccatcgacaagcggaaggccaagatccaggacaaggagggcatccctccggaccagcagcggctgatttttgctggcaagcagctcgaggacgggcgcacgctggccgactacaacattcagaaggagagcacccttcacttggtgttgcgtctcaggggcggcatgcaaatcttcgggaagactctggctggcaagactatcacccttgaggtcgagtcttgtgataccatcgagcat

SEQ ID NO: 61103 - DNA, 495 bp, Zea mays
  Clone ID: MRT4577_155720C.1
gccggggtacacgatgttgcggcggccgcgactgagtgcagaggtgctgcagatcccggcgctgatgcggcagtggccatcgccgacgctgatcctggtgaccacgctggttctcgtgacaggcacctctcacgaggacgagcttcttctatgcatggacgattccaaccttgaggataatctgaacgagatccgaaagaccaacagtcacctgtgaatcatcggaaagctcacggcctacaccaaggaggaggacgacgctgagggggaagacgactatgcagacaacgtggaggagcaatgacggagacgtattttaccagcagaccgtgtgacccacgaggatgccacaagctttgtaggagctcttgatcgctgtgatcaaccaatgacatcttgcataccttaatccctgctttgagccttatatatagatacgatgcaaccatatgtttacactgaacgctgttaggaattgagcatgacctctattac

SEQ ID NO: 61104 - DNA, 183 bp, Zea mays
  unsure (1)..(183): unsure at all n locations
  Clone ID: MRT4577_155721C.1
cgtccgnncccacgcgtccgccgcacgcggtccgcggnacgccgtgggacaaaaaccattaacgagggggtgcccnngtcctgctagncgcggtgtgggcttgctgtangcgatgcgtttggcatgtgcctttgttgaggggggttgctagggngagttggagagggattgaagggnnattaa

SEQ ID NO: 61105 - DNA, 499 bp, Zea mays
  Clone ID: MRT4577_155722C.1
agcagggggggaaatacaacttttttccacaaacagggccctaaaattaaaagaggaaccattacaaccccgccccccggatttaaaaaacaggcaacctagctactaggcgggtagggggggggactgggaaaaggacccaaaaaaaaacccttttaaaaaaacccgggaccccccagcccccccaatggcggggaaactgggggacggccttggttcccccgaaaacggggggcttggcaacccctccggggaggaccaggcccccgggggtctggatcccccgggacgggagggggggctttttgttgaccccccccaccttgggggccccccccgcccccttttaaaaaatgcccttgaaaaaggagttcaaaagggacacggccctggagaaaatccccatgggggggggcccctgcttaacaccttaaaaaaaaaaacttggaggccccacccttttttgggccttttttttcccctttttttccccgccccc

SEQ ID NO: 61106 - DNA, 421 bp, Zea mays
  Clone ID: MRT4577_155723C.1
aatactaacattttttttgacacatggtcaagactaaaacctgacacatcccaaacacagatctaaacacgagcatgctacaccacacagcgcaaatcaacacccttcttaaggggggggggggacaaactcgccacacccatagggggacttgaaatattaaaacacggctgtgcccggcttatgcgccgtctaattgggcctgaacacggactggctgttgggaaggaccccatcttcctctatattcaagcacctcaggaactttccgaggtcctccttattgcaaatctccaggaacactgggcgcgacttgatgcacttctaattttggcctttcgtggcatttcctgccaaccacagaaattgggggttgggggcttctcaaacggaatccaggtaaaccgtggaaagggttccc

SEQ ID NO: 61107 - DNA, 356 bp, Zea mays
  unsure (1)..(356): unsure at all n locations
  Clone ID: MRT4577_155724C.1
tcgcctgcaggtaccggtccggaattaattcccgggtcgacgagctcactagtcggcggccgccctttntttttttttttttttttttttttttttttttttttttttttttttttttttttttttttttttaacaaacaaatcacgatggggttttgccttgggtagactggggccccgggcgaacactttgtttgggcgagccggggggggttcaccttagggaacaagtttttttttgtttacaagcaacgctttcctgttccatttacactagggaagcctctggaggttttccacccttttggacaggttctccacggggacccccattggcttggacaccttcttcattt

SEQ ID NO: 61108 - DNA, 334 bp, Zea mays
  unsure (1)..(334): unsure at all n locations
  Clone ID: MRT4577_155725C.1
acgcgnccacccacgcgggcgnctacacgaacctccacgcttgcgccgtaaaccgcttgagcaagggggaatatcacttgttcatgctcttattacctattgtgtcactgaagtaacagaataaatattatccttcggcctttatcgacattggcaaaacccctttcgcactttatgacggatcgaggaccgaatggggcagtccattctgacactctatttacaactcctgtttgatctctcaataatattacgaccgtgctcttcatagaggacctgttgattgaattttgccccctgctgaaatttctatggatgttagcttgaccctaga

SEQ ID NO: 61109 - DNA, 499 bp, Zea mays
  Clone ID: MRT4577_155726C.1
ggcttggaacctttgggctgatttatgtgcttgtactgggtgagtctcggcgcaggcagaaaacggttgacgttgaggacacttagttttctgctcgtgataatggaatcggtacggctaaggtcgggcctgttggtgatgatgttttgagggttgctccttttagtactgcggggtgtttgtgttatatcggcgctacggctgggacggggtagaaggatgttcatgctggcgatgaggtgtagcttaagaggggcacttcgatttctaagcattttactgagtatgggactgctagtaatcgggatgatacggagaagactcggtactatattcctcataatgagtcttgtgcggtctttgaggagtattttgcttcttctattgaggtgttttcgaattttaaggtcaatagggagaagacgatttagactacgcctgagattcctaatatttttgtcacgcatgctgttacttaggttgcgtctctctcgcacgt

SEQ ID NO: 61110 - DNA, 483 bp, Zea mays
  Clone ID: MRT4577_155727C.1
ctataccactttgcggtactggaagcgaaaaaaggtgtggtgtaaatactactactactagcagcagccgaagtcggccgtcgctcccatcccacacaaacatcactcgtcggcaatcaagcagcagcagcatcatcatcatcccctactacccgtcggctgggggacgctcagtcattgtcagtccgtgtcctactaagcggagctgaagttctcgagaaagaagaagatgaagatgcagataaagaagatgattattgttatgaagttgcagtagttgcagattcacatcttgatggacgtggtagagattaagattgtccagaacgagatgaacgtaaagaaaaatgtgcaactgtacctccttaaggaagtattccacgttatttccagtagatagacatataattccacgagaagttcgttcttgttctggtaatcgtccttgttcataacgaggactaaaatgtttatttcgtgata

SEQ ID NO: 61111 - DNA, 430 bp, Zea mays
  Clone ID: MRT4577_155728C.1
ctttctttatctccatttttactctatgctattcttttttactttttgtgggggaaatggaggccgtcttcgtcgccgatgacgaagctagccctgattccaaaaaaaacggtacccggcgcctgatacgggccagtataggtctcccgttcccagctcccaaagacccggggaaagcggtgaccgcccgtacaaaaagccggggaggggggtccctcgaataaccggcccctacggagcctgtccttggcctgcgctatgggcccaaccgtgcccctccggagaccgcctcccccaaggggagcgaatagccactcgaccgaggaagcaccctgctgggcccaccagagaccccacccgtgggtgcaaccctcaacggccagaggcagtggccttctctttcccaggaacacccggttgagcctttttt

SEQ ID NO: 61112 - DNA, 418 bp, Zea mays
  Clone ID: MRT4577_155729C.1
gggggggaaaaaattaaatctttggattatggggggcccaacaggcccaaggggcccctaaaaattttcacagggggggttaaacccaggggtctaaggttcggaacaaaaggctaaggcccataaattgggccttttaaggagggccccttttttttggggggggaagttccccacagaagcaaaggggccttttaaagggtcctggggaaaaccaaggcccttggggttgttggggaacccctgcctgaaaaaaaggaccccgttcttcctgatcaaaccgggggggttcgcccaaacccggaaaacccgggacccagggccgtattttttagggggggggtcccacccggggggggggcccatgggggggggcccctgggccccccttttccttccggcctggggccaaattccg

SEQ ID NO: 61113 - DNA, 430 bp, Zea mays
  Clone ID: MRT4577_15572C.1
aaaaaaacggggggtatggactaaacaacgaggatacggatccagcgaccggatggttccacaaagggaaacaacacaattcaacgaaaatttcaacactaaaaactcaaaacttattccccaaaaagcccggcgaggcatttggttcaactggctattcccaaccttgaatctggctgaaaggggcggcccaggccctgccagccaccccaaaaccaaatttctggcggcgcccccaaaccctggcgaggtcccgttccaaaaaacaattcttttattaaacggaccaagaaccccgctccccaaaggggggaaattggcaccaaaagggctaagcccccttccaaacgggtttgcaaaggctgcaaaaaacactttatggcccctattgccaaaaggccggggcccaccccatggaccaaaaccaagg

SEQ ID NO: 61114 - DNA, 324 bp, Zea mays
  Clone ID: MRT4577_155730C.1
tgttgagaaatacgaaagtggaatgtgggtcgagtcttagtcggatatttcatatctcttctcttcttgtccaaacagatggaagaggagatgatttgtgctgaccggaaaatccatatctctcgtagccatttagagcatacggatcgatttataagaatcgaatgttgggtttttatgttattttgtgatagaatggaaagaattctagacagaaggggttgggaattatgcctacatcacgtattggtggagggttcagtgattggacggtcgcagattgtaccaatattttacttcaaataattccgacaagctccgggg

SEQ ID NO: 61115 - DNA, 347 bp, Zea mays
  Clone ID: MRT4577_155731C.1
actagttctagatcgcgagaccgcccttttttttttttttttagttaattgactcttatttacttctctctagtcatctttctcagcccttcaaacacactccacgcttttaacattagagaatgttcggcccgggcacccgcccccaaaaacacgctacggccacgctactgacgggcggctgcacaagcaccgttagagagcccgtccacccccgaacgagatgccagcgcttgctgaaactctcgtggcaatgcccactgcgtggggcgagagccgcggagagcctttcatggacgatgacggaccccaccctagctatgtcggacgatgatgctctgctcacg

SEQ ID NO: 61116 - DNA, 2708 bp, Zea mays
  Clone ID: MRT4577_155732C.1
cattgggtacctcgaggccggccggggttccgtagaagctttcgtgtacccttcccatccccgccgttctctctctcttttcccactctcccacacttcctccattgttccctttttctctcgcggagtagcggtgatccagattccagacaccgagtgtcctacgcgtcacggaccgtgcacatggcggcggggtcgatccgggtcaccatggaggtgggcgccgacggcgtcgcgctcataaccatcgccaacccgcccgtcaacgcgctccaccccatcatcatcgccgggctcaaggacaagtacgcggaggccatgcgccgtgacgacgtcaaggccatcgtgctcaccggtgctggaggcaagttctgtggaggatttgatatcaacgttttcacaaaggttcaccagactggggatgtatcacttatgccggacgtatctgttgagcttgtgtcaaatatgatggaagagggaaaaaaaccttctgttgcagccattcaaggtcttgcattgggtggtggcctagagttgactatgggttgtcatgctcggatatctactcctgaagctcaacttggattgccagagctaacccttggcatcatccctggatttggaggtactcagcgtttgccgagggcttgtaggtctacccaaagcgattgaaatgatgctgcaaagtaagttcattgcggcaaaggaagggaaggaacgtggtttgattgatgccctttgctctcctgatgaattgataaagacatcacgtctttgggctctggaaattgctaattgccgtaaaccttggatgagatctcttggcagaacagataggcttggatcactatctgaagctcgtgctgtattaaatgcagcaagacagcaagcaatgaaggttgcaccaaacatgccacagcaccaggcctgccttgatgtaatggaagaaggcatattatatggaggtcaagctggtgttttgaaggaagccagggttttcaaggaactggtggtagcaccaacatcaaaggctcttgtccatgttttctttgcacaacgttccacgacaaaggtgccaggtgtaactgatgttcaactgaaaccaaggccaattagaaaagttgctgttattggtggtggtctgatgggctctggaattgctacatcacttcttgttagcaatatttctgttgtgctcaaggaagtgaaccctcagtttctgcaaaggggagagaaaatgatagcaggtaatcttgagggcctgataaaaaaaggttcactaacaaaggataggatgcacaaggccatgtcgcttttcaagggcgctttggattattcagatttcaaggatgttgatatggttattgaggctgttattgagaagattcctttgaagcaatcgatattttctgacattgaaaaaatctgtccgaaacattgcatacttgcgacaaacacatccaccattgatttgaatgttgttggcgagaagacaaattctcaagatagaattataggggctcactttttcagccctgctcatattatgcccttgcttgaaattgtccggacggagaagacatcaccacaagctatccttgatctcatcactgttgggaagataataaagaaggtccctgttgtggtcggcaactgcacaggatttgcagtcaaccgtacattttttccttacacacaggcttctcatcttctagttagtcttggtattgatgttttcagaattgatcgagtaataagcagctttggcatgccaatgggaccttttcaactccaagatgtggctgggtatggagtggctttggcagtaaaagatatctacgctgatgcctttggagaaagaaatttgggctctaaccttgtgggcctgatggtaaaggatggacgacaaggaaaggtgaatgccaaaggttactacatttatgagaagggtgcgaagccaaagccagaccctagtgttaagcatgtgatcgaggagtaccgaaagcaggcaaacacaatgcctggtggaaagcctgttactttaatggatcaagatattttggagatgattttcttcccagttgtgaatgaggcatgcagggttatggatgaaaatgttgtaattcgagcttccgatcttgatattgcttctgttcttggaatgggctttcccaaatacaggggtggtcttgtcttctgggctgacactgttggagcgccttacatacattcgaagctaagcaagtgggccgaaatgtatggtcccttcttcaaaccttcatcgtatttggaacaacgagctaaaagtggtgtaccattgagcgcaccaggaacatcacagcaaggttcggcgaggtcgcgcatgtgaggtgctgtccagcattgggaagaagaattcagaatacttgcggccgggatgagccatagacggctgcttcgcagatcaaaaacacctccttgaatacaaataggaggcacagaaatgatgaaaaataaatggttttgcatagctgtaacagttttggtgccttgaactgtaactatggcagagtttctgtgaacagagtggcatgcattaattatacttgaccactctatatgtcgctgtttgtgtgcaattttcaatacgtacaagaactaaaatatattattggatagtattttttataataaactcatctgttgctatacttaaaaaaaaaaaaaaa

SEQ ID NO: 61117 - DNA, 242 bp, Zea mays
  Clone ID: MRT4577_155733C.1
gggtaggtttctactaatcctcaggctcggtatatggtactggaggttgtcaggtgtttttcatcctggttcagcatacatagattgtgggtgacatatgatacgacagtgaattactatggaggaaacacctgctcacgcgtaatggtataaccatcaatgccttcatgaaacgaaaagcattgtactccctaattatttcatgctgaacatgctaacagcatgatggtctctatttaaac

SEQ ID NO: 61118 - DNA, 2737 bp, Zea mays
  Clone ID: MRT4577_155734C.1
ctcgaggccggccgggccgggatcagccgagtggttgtgccgtggaagctttcgtttaccgttcccattccccgtcgtctttcctctccttcccactctcccacccgtcctccattgctcccttcctctctctcacggagtcgctgcgatctagccaccgagcacgagcgtcctactcgccgcggaccttgctcatggccgcggggtcgatccgggtcaccatggaggtgggcgccgacggcgtcgcgctcatcaccatcgccaacccgcccgtcaacgcgctccaccccatcatcatcgcggggctcaaggacaagtacgcggaggccttgcgccgtgacgacgttaaggcaatcgtgctcactggtgctggaggcaagttctgtggaggatttgatatcaacgttttcacaaaggttcatcagactggggatgtatcacttatgccggacgtatccgtcgagcttgtgtcaaacatgatggaagagggaaaaaaaccttctgttgcagccattcaaggtcttgcattgggtggtggcctagagttgactatgggttgtcatgctcggatatctactcctgaagctcaacttggattgccagagctaacccttggcatcatccctggatttggaggtacccagcgtttgccgaggcttgtaggtctacccaaagcaattgaaatgatgctgcaaagtaagttcattacggcaaaggaagggaatgaacgtggtttgattgatgccctttgctctcctgatgaattgataaagacatcacgtctttgggctctggaaattgctaattgccgtaaaccttggatgaggtctcttggcagaacagataggcttggaccactctctgaagctcgtgctgtgttaaatgcagcaagacagcaagcaatgaagatcgcaccaaacatgccacaaaaccaggcctgcctggatgtgatggaggaaggcatattatgtggaggccaagctggtgttttgaaggaggccatggttttcaaggagctggtgatagcaccaacatcaaaggctcttgtccatgttttctttgcacaacgttccacgacaaaggtgccaggtgtaactgatgttcaactgaaaccaaggccaattagaaaagttgctgttattggtggtggtctgatgggatctggaattgccacatcacttcttgttagcaacatttctgttgtgctcaaggaagtaaaccctcagtttctgcaaaggggagagaaaacaatagcaggtaatcttgagggcctggtcaaaagaggttcactaacaaaggataggatgcacaaggccatggcccttctcaagggtgctttggattattcagatttcaaggatgttgatatggttattgaggctgttattgagaagattcctttgaagcaatcaatatttgctgacattgagaaaatctgtccaaaacattgcatacttgcaacaaacacatccaccattgatttgaatgttgttggcaagaagacaaattctcaagatagaattataggggctcactttttcagccctgctcatattatgcccttgcttgaaattgttcggacggagaagacatcaccacaagctatccttgatctcatcaccattgggaagataataaagaaagtccctattgtggtcggcaactgcacaggatttgcagtcaaccgtacattttttccttacacacagggttctcatcttctagttagtcttggtattgatgttttcagaattgatcgagtaataagcacctttggcatgccaatgggaccttttcaactccaagatgtggctgggtatggagttgccttggcagtaaaggatatctacgctgatgcctttggagaaagaaatttggactctgaccttgtggatttgatggtaaaggatggacgacaaggaaaggtgaacggcaaaggttactacatttatgagaagggtgggaagccaaagccagatcctagtgttaagcatgttatcgaggagtaccgaaagcacgcaaacacaatgcctggtggaaagcctgttactttaacggatcaagatattttggagatgattttcttcccagttgtgaatgaggcatgcagggttatggatgaaaatgttgtaattcgagcttctgatcttgatattgcttctgttcttggaatgggctttcctaaatacaggggtggtcttgtcttctgggctgacactgttggagcaccttacatacattctaagctaagcaagtgggctgaaatttatggccccttcttcaaaccatcatcatatttggaacagcgagctaagagtggtgtaccattgagcgcaccaggagcttcgcagcaaggttcggcgaggtcacgcatgtgaggtgctgtccagcattgagcagaataatgcagaatacttgcgggatgagccattgacggctgcttcgctgatcaaaacacctccgtgaacacaaacatgaggcacagaagaaatgatgaaaaataaagggattgtaacagttttggtgcctttgactgtaactggcagagtttctggggacagagtggcatggattaattgcacctgatcactctgtatgtcgctgtcatgtgtgcaatgttcaatacgtacgtaataaagaatggaaatatatgccgcaaaaaaaaaaaaaaaaaaagaaaaaaccaaaaaaaaaaaaaaaaaaaaaaaaaaaagtactctgcgttgttaccactgct

SEQ ID NO: 61119 - DNA, 1034 bp, Zea mays
  unsure (1)..(1034): unsure at all n locations
  Clone ID: MRT4577_155735C.1
cgggccgatgcaaagcttcaagnatacagnaaaccacagnatactccatgcatttggaggaggaacatactaagggaaaatctgacaaacaactatcagaagctaaaccagccaataatgcttcatgctcaagagttagtgcatcaattgagaaaacaacaaaaagtgttacacaacttgatttgatgcctgattcgctaagccaggcagatctaacagttctgcaggaattacctgaggatgtgaaggctgatttgtttagtgcacttccactgcatagatcaggagatcctgcatgcagcacttccaatgtatctgaaagtaaatcacctaatgtggttagagctgaaaatagatcttctaatgatggtggaactgatgatctgaaaaccccaaggtcttttctcccaccaggaagttctcaaaaatggatcgaacagtttagagttagcagttgcctgattttgaacgtaattgcagagcaacacacagattccagctgtcaacgaccattgtcttctgttctagagcctgtagcttcgttcctacctttgtgtcctacccaggtagtgaagaatggaatgaaactcattcatgtctctccgagcttcttaggcactacatacaactgaaagttgaatatgatattgaagagctctacaaatgtttttgccttttgaaaagattctcgtcagcatcagagttttttctggatctacatgatagcatccttccttttctacaggattctatcagccagcattacggtgggacactgcaattctagctccaagataaagttgtagccattctattttgctagaaaggaagaagcaatgccgtgaatgtgcggaaagacgtgttatgacaatttgcgcctccaagcagctactcaaatcccgtgctggcagattccttggacgcgtttataactttattataactaattgatgccaatgctggaagttttattgatatattcattgcaaaaaaaaaaaaaaaaaaaaaaaaaaaaaaaaaaaaaactcgagggg

SEQ ID NO: 61120 - DNA, 392 bp, Zea mays
  unsure (1)..(392): unsure at all n locations
  Clone ID: MRT4577_155736C.1
aaccaaccgagcgcatggaggccgtggcggcgaccgcgctcccgggggcggggggtaccgcgctcccgnncgcggcgggcgnccccacngccnggagggggcgcgcgagcccgcggacgcggcggcgcnccgnggcggcgaagcnggagcgcgggcgcggcaaggggnggcccaccaccaacnacgnggcgccgcgcgagaggggggccggggagacgcgcccgcncgccgagaaccngcgggaccgcaacaagcgcgnccccgacaagaacagcgaccccgacaccaacaccggcaacggggaccaagccaacagaacgcgcaacgcagacgcaccacccaggagcgcgagaagggggggagaggaccaaagcggagaaaggaaccgcaac

SEQ ID NO: 61121 - DNA, 1967 bp, Zea mays
  Clone ID: MRT4577_155737C.1
caagaagggaaggtgctggggaaccaataaaatatatgggatgtggtgactgtgaaaccacgagtcgttctatgacgattgcaggtgcaactgacagttttgtcactctccagagaattgcaaaacaattattttcagctcttcatcttgatgtgaaggaagttcgtggaattggactgtcactatcaaagcttgagcatgcagatttgggccggggagcatcgcaaggacatatgcttgaatcgtggcttgcttcaccagccgccaagctcaagaaacagcagagtgagatactggggaatgttaatgttgcagggaccagcggactgaaggatttgagatctggaccatcacatacagcagaagcgaaccttagaaatgataggtctactgtatttcacaatgtcgagctgcctccgttgtcccaacttgatttggaggtcctgaagaaccttcccccagagataatgtctgaaatgaatgaaatgtacaagggagaattacaaagtcttgtggacaccctcaatagtgacaagggcaaggaaaatagttcaaaatctcttgctttgcctgcagttattcgtaagtctgtacctgccgatgcaaagcttcaaggatacagagaccacagagactccatgcatttggaggaggaacatactaaggtgagctgtgtcactggaaataaagtggcgctggaactttttaaacaaagtgcaagcacgtgatttagttgctgtcacctcctcatcttgatatttggaagttggaacctgtttcacactattctaattttacctttacacccgtagggaaaatctgacaaacaactatcagaagctaaaccagccaataatgcttcatgctcaagagttagtgcatcaattgagaaaacaacaaaaagtgttacacaacttgatttgatgcctgattcgctaagccaggcagatctaacagttctgcaggaattacctgaggatgtgaaggctgatttgtttagtgcacttccactgcatagatcaggagatcctgcatgcagcacttccaatgtatctgaaagtaaatcacctaatgtggttagagctgaaaatagatcttctaatgatggtggaactgatgatctgaaaaccccaaggtcttttctcccaccaggaagttctcaaaaatggatcgaacagtttagagttagcagttgcctgattttgaacgtaattgcagagcaacacacagattccagctgtcaacgaccattgtcttctgttctagagcctgtagcttcgttcctacctttgtgtcctaacccaggtagtgaagaatggaatgaaactcattcatgtctctccgagcttcttagacactacatacaactgaaagttgaatatgatattgaagagctctacaaatgtttttgccttttgaaaagattctcgtcagcatcagagttttttctggatctacatgatagcatccttcctttcctacaggattctatcagccagcattacggtgggacactgcaattctagctccttgctcaagttgtagccattctattttgctagaaaggaagaagcaatgccgtgaatgtgcggagagacgtgttatgacaatctgcgcctccaagcagctactcaaatcccgtgctggcagattccttggacgcgtttataactttattataactaattgatgccaatgctggaagttttattgatatattcattgcatctatggatcaatagatgccatgtggttcgatatatcattcgtggagcaatggtttgaagggacctttgctgtgctttgatgttcccaggcgaatttcatgtttgcttcataacccatatgaatttcatgttatctttgtgttgctaccaaaaaggttcctggtttgaagttctttgcgtcaaaaaaaaaaaaaaaaaaaaaaaaaaaaaaaaaaaaactcgagaagggggcccggtacc

SEQ ID NO: 61122 - DNA, 505 bp, Zea mays
  Clone ID: MRT4577_155738C.1
ttttttttttttttttttggtttttttttttttttttttttttttttttttttttttttttttttttttttttttttttttttttttttttgggccccccttaaggttttggggccaaaacaacaccccaaaaaggggttttaagggggggggggcacgactttaaaaacggggaaaaaagggggacaggttatttaaaattttttggaaaaaaataaaaaaagggttttttttccacccgtttgggaaaggacgggccaaaggggcccccaaaaaccttctacggaaaaacaatcctttttgaaaaaaagggctccatcctcctccccctggggcatttttacctattctttttaaggaaaatttaaaagggggccctccaggtgataaggccacttactaaaaaaaaaaccccctggggggggccaggcctggcaggccaagcaaaggggcccgttttcgggaggccattttgaaaacaagaaaccccttggccggggggggg

SEQ ID NO: 61123 - DNA, 286 bp, Zea mays
  Clone ID: MRT4577_155739C.1
ggtcaacatattctgccaggtccatgaccacacgtctgtaccatgccatttaactcttacctacattgctgtgctaagattggtcatttgcttaggtgtgcatacattcattcagcgagtgctgagcaacagccacgtgcacagcagtagcttttactagtcatagctctacgatttaactccatgtgtccaaaggggtgaacatattctatttgtcaccaaaaactagtagtttaccagatgactgaagggagctatagatgagttagttcatgggtacaaaaat

SEQ ID NO: 61124 - DNA, 756 bp, Zea mays
  Clone ID: MRT4577_15573C.1
gatctccgttcgccgatcccctcgtcgatccaagatgtacatcttcatcaagactctcactggaaagactatcaccctcgaggcggagtcctctgacaccattgactacgcctggggcaagatccaggacaaggaaggaattcccccggaccagaagaggatcatcttcgctggaaagtagctcgaggacgggcgtagacttgccgactacaacatccagaacgagagaaccctccaccttgctctccgactcacgggaagcatgcagatcttcttcaagaccctcactgcaaagactatcaccttcgacggggagtcttctgacaccatcgacaacgtcgaggtcaagatccaggacaaggagggcatccctccggaccagcagggggtcatttttgctggcaagcagatcgaggacacgcgcacgctggccgactacaacattcagaaggagagcaccctccacttggtgttgcgtctcatgagcgtgatgcagatcttcgagaagactctgactggcaagactatcacccttgaggtcgagtcttctgataccattgacaatgtcaaggccaagatccaggacaaggagggcatccctccggaccagcagcggctcatttttgccggcaagcagctcgaggacgggcgcacgcttgccgactacaacattcagaaggagagcaccctccacttggtgctgcgtctcaggggtggcatgcagatcttcgtgaagacacttactggcaagacgat

SEQ ID NO: 61125 - DNA, 455 bp, Zea mays
  Clone ID: MRT4577_155740C.1
tgggcgtccacctgactccttcctcctcacccgctcacccgacttcctctgctgtggtgcaacacctacaaccaggagggcagggacttggagccggatctggccgctgcgggatagctgatgctggtgacatatgtactgcctactggacagaaactatgactgacgctaccaatactcgcgcccgcggggaggaatccaccaatataagagctcggttccagatacgtgattatagcagaggaaccaccaactgttctatacatactcggatcacttatacgtgcatgaaccatgaaactggattggttgaaccaagctgtgtactatgctgggcatgcaggatagcacacataccctggctgacattctgagcggcctaagaaggtagatgtgcactcctccataccgcaggctcaaccagactgatgaaggtaacgaagatcaaagagtag

SEQ ID NO: 61126 - DNA, 650 bp, Zea mays
  Clone ID: MRT4577_155741C.1
atctccccccgacctcccgatgccgcccaaatctaaggccgcggccgccgccgccgccgagccggtctccgtggaggacctcttcacggcgctccaccgccacatcgaggccggcgagttcccccaggcggtcaaggtcgccgaccaagttctcgcggcgtctccgggcgacgaggacgcggtgcgatgcaaggttgtggcgcacatcaagtccgacgcgacggacaaggcgctcgcggccatccgcgccgccgagcgcctccccatcgatctcagctactacaaggcatactgctactacaggcaaaacaaattgcaagaagctctggatatattgaatggtcaagaagaaacagctgctgttctccagctggaatcccagatctattaccgattaggaagaatgaatgattgcatgagtagctatgagaagctccagaagttcaaggttgactcaatagatctaaagataaatatcatcgctgctctagttgctggtggaagggcttctgaagtacaggtagccatgaaggcgcaaaaggttgatcttaccactagagcactcagagatacaaggagcttcgagcttgcatataattcagcttgcaccttgatagaaaataagaagtattcagaagctaaagagcagc

SEQ ID NO: 61127 - DNA, 440 bp, Zea mays
  Clone ID: MRT4577_155742C.1
ctgaaggttcacaacgaatgatgaccttagaaaacactgccccccaccatgggaggtacacagttctcaccgtggcaacggccatctacacataagaagaaagagttaagcgccacaagcacgcgcacttgcagggtggacagtacaaccggaagtggtacttaggaaagaacggagacgccgatcgggagatacacgggcacacggttgataatgttttacaaattcgctcccctcgcttccattttcttgggggtttttacataaacgtggagggcacggggtaccccgccccaaactttgtgaacatagacactggggtccacagcctgaccttgtatgggccccggaaacacattgtgcaccctgaatcgagggacttgaggccgctagcaggccagaacaacaaaggcgaagtcttatcccacaaagggaaccaa

SEQ ID NO: 61128 - DNA, 282 bp, Zea mays
  Clone ID: MRT4577_155743C.1
tgcgacaagaccgtccacttgatcaacctcctcacagccgacggcgttacctaccatatgacatgcttcaagtgcagccactgcaaagggatcctctacatgagcagctactattgcatggacggcgcgctgaactgcacgacccacttcgagcagatcttcgtggacaccgacagcttctccaagatcttcacgccaagtggccagtcttcagacatgggtgtactggcctgaggccccagcatgctatcatctgcgtagtctggtactcacgagaagtgt

SEQ ID NO: 61129 - DNA, 401 bp, Zea mays
  Clone ID: MRT4577_155744C.1
ttttttatctattaaggaaacggatttaatgcggcctaagactagaattatattttcaaaagtttttcggagggaaaagggattaattgacggaatttgggtctttttacatttaacaaaacaaatagtctctgagccgtaccctagttttcttttcaaggggtcgagaaaataacttcctgatatgttggtctggccatactgaggatccccaatccagcggggggtttcccccgtttttgctgggtttggagatcccaagcttcccgttttttttgaaggacaacttgtaaatgggttttttctttccgaggaaaacttttaaagaactgttgaagtatttttttttagggtgagcagaatggggcatcgccttacggttttggaaaaacaagtttttc

SEQ ID NO: 61130 - DNA, 700 bp, Zea mays
  Clone ID: MRT4577_155745C.1
cctgccggagtcgccagcccaacgcctcgctcaacccgtgcccgccgcccaggcagtcgctagtcaggtgcacgtcggggacaagatcatcgtctccaacttgcccgaagacgttaacgagcagcagatcaaagagttgttccacacgaccgtcggaactgtccgcagcgtcaacctctcgtacaacgcccaaggaaaatcaaagggaatcgccacgattctcttccaaaaggccgaatctgccacggcggcgtaccaacaatacaacaagcgtctcatcgacggaaagcgacccatgaaggtcgagattattgttgacccttcccgcgctggccgaaccccgaccggacccgccgcgtcgctcactcaacgagtcgctcccgctgctccttctgccaccgtcgctgcggcaggtggacaagccgttcaaggaggtcgtcaagctggtgccggaggacgaggacgccgcggaggaggaggacgtggaggacgcggcgcggcgagaagtgagaagcgaccggccgcgacggtcgagagtttggaccaagagatgagcgactggcaggcacaggcggcgactgcgacgaacggtggtgctgaagctgcgactgctgaaggagcgtcggcttgatgatgagtcggggaagacccggtcggaccaaatcattttcccttgacgtcttcatcaaaagtctagctc

SEQ ID NO: 61131 - DNA, 421 bp, Zea mays
  Clone ID: MRT4577_155746C.1
aaaaaaaaaaaaaaaaaaaaaaaaaaaaataaaaaaaaataaaaaaaatataatagggggtaaaattaaaataaaacaaaataaaattaatacatctctgaaaggtcctactttaaaaaaataaattgggcgggcctttttagagaatcaaattttacttccgcttggttgaaacttataaatttttttttaggttcactaaatttaatttatctgtccgtgtttttaaaacgtttgcaactggtaaacccttggcgttcccaaatttattcgctttaaagaatttccccttttcgccagttggtttattaacaaaaagacccgcaccattcgactttccaaaaattttccaaccctaattggaaattggacccccccttttttcggccctttaaccccggtggttttgttgtttaccctc

SEQ ID NO: 61132 - DNA, 1297 bp, Zea mays
  Clone ID: MRT4577_155747C.1
tcccggggccacattggcgaccgccgatctctcccactctcccacacagacacaggtcacacgcacactgcagcgtggcgcggctactccccgccatggccaccacctccgtcgccgcctcctctccccatccccatctgtcccgcccccgccggcggaactccagcgccacctccagagcctcgatccggggctgcctcctgcccatccgatgctcgtccgcctcgtcgtcgcaaccgccggcaaccggcggcgaggagggagagtcggggcgccggcggctgtcgaagcagtcgtcgtgggaggacagagatgtggagggggacgactacctctaccgcctcgggaaggaggctgacaacttgaacatcaccgtcggcgcacggtccggcatcgtcgacgaactcttcgtcggaaacttcctcgggaaagactcggatatcgtgttcgactaccggcagaaggcaactagaacgttcgagtacctgcagggggattactacatcgcacctgccttcctcgataaagttgcatgccacattgtaaagaactacattgcgcatcttcttaataatatcaaggttcccctaatacttgggatctggggcggaaaaggccaagggaaaacattccagactgaacttatatttagagcaatgggtgtggagccagtaattatgtctgcaggcgaactagaatctgaaaaagcaggtgaacccgggaggctaatacgtgatagatacagaactgcctcccaagtaatccaaaaccaggggaaaatgagctgcttgatgatcaacgatctagatgctggtgttggaagatttggaaacacgcatatgacggtcaataatcaaatagctgttggaactttgatgaatttggcagataatcctactagggtgagcatcggccagaaatggagagaatctgatgttacacacagggtgccaataatagttactggaaatgaggtttcaactctatatgcacccttaattcgtgatgggagaatggaaaaattctactggcagcccaaccgtgaagatataattagtattgttcatggcatgtatataaaggatggattatctgttgaagaagtatcaagaattgtagacgcattttcagaccaagctctggacttctatggagctttgagatccaggacatatgatcaggctatcttggagtgggtcaaagaaatcggtgggcatgaacagctaaatgagaagcttcttagccgaagaaggcgaggagcttccacggttattacccaaagccaacactggagcat

SEQ ID NO: 61133 - DNA, 234 bp, Zea mays
  Clone ID: MRT4577_155748C.1
taaaaaaaaaaaaaaaaaaaaaaaaactacaaacataaaaaaaaaaaaaaaaatcacgtacggggacaaagacactttcgttttgtagaaggcaagcgacgcacgggcctgcagtcatgatcccaatttaccccaacggggggttcctgtcgtaccggaagggtggggagcttctagatgtgtgttgtttacccccgtggcgttgggcttctttttttttctttgggggcgcct

SEQ ID NO: 61134 - DNA, 120 bp, Zea mays
  Clone ID: MRT4577_155749C.1
attcgtcgaccacgcgtcgtatgtaggtcagagaacctgaacgatatctaagatgaggataccagagccatgacagccatagactgatacaaatataacagtaacctgacaatttaacta

SEQ ID NO: 61135 - DNA, 382 bp, Zea mays
  Clone ID: MRT4577_15574C.1
aaatatccgggtttttataaaaaaaaaagttttactgcttcgcaccaccgggatcataggaccaaaaccgtagttgatgggagggactaaactagcggtttggctactcaataaaaactgaagggcccggcttgtatccaacatgtagaagttccggctacgagtctatcccataagacatcttcagacggggggcagcccagagctccattggatctacgggctttgttccaagccgcaaagctagcaagggctgcaaaaacatccaggggggagagtaatccccgagccgagggccaggggctcccctccgccgttttaaaaactggaccgaacccaccggggccatcccagggtccaggcctttcggttcctgcatgct

SEQ ID NO: 61136 - DNA, 716 bp, Zea mays
  Clone ID: MRT4577_155750C.1
cagatcctttggtcgatggaactaggtataaactgcaagaaatacatggcatagggaactccatggaaggtgatgctaatgcaaatgatccatagaaagaatgtgttatttgcctctcggaaccaagggggatattattgtcctcccatgtaggtatatgtatgtgcagtgagtgcgccaaggtcctaaggtaccaaaccacttagtgcccctgcagccccatctacaggcagcctgttgagagtcgcctcgagatcaaagtgaacaacaaatctgaagattagtagctgacgccctaatcaccaccgctcccagagctgcggtgtagtcgtgatcaaattcaggtctgatgtattatatggctctaatttgcgagacttcaggccttccctcaaggtttgttctctcatttgagcaacggggaatgtaactgatactttttcctttagcatatgtaagcttctagcatcgcatggctttgccaacctctgttgtatatgcatatctggaggtcagagaccaagatgccaaggagagtgtgtatcatatacacatcattcatgcatgtgccatggctacctgaagaagcgtggtgaggaggattcctcatgccaggttgacttcctcttgggaaaaagggggagacaaggtggtctcttaaatttgtaaaaaataactatttcaccttgattccataccttcgctattacagcctg

SEQ ID NO: 61137 - DNA, 508 bp, Zea mays
  Clone ID: MRT4577_155751C.1
ctcgaggccggccgggccgggatctacagaagtatgccttttacttgggaaaagctcctggatcagctactgatattgcagttggtgctaatggacttgtttggatccttaatactaattcattccccaaccaatactcagtctttgactctatcagacaagcttggattgatgctccaatcgatgattatttggccaagaacccatcagtgagtttcagcaactctagtggccaaagagttgccgttgctccaaatggtgatttgctcggtgttaaggctaatggtgaattgttcagaatcagattcaactggggtgacaattaatctagaccctttataactgcataaaatctagttatatagattgacctcaatcttggtagaaatccaagtatattgatatggataagggatgcatttattcttgatatatcgtggttggtaattccttattcaatttataagcctaaaacctaaaaaaaaaaaaaaaaaaggcccctagggcc

SEQ ID NO: 61138 - DNA, 516 bp, Zea mays
  Clone ID: MRT4577_155752C.1
gcccccctctactgcccgaaatccagcagcgaccgccggcgcatctcaccccgggccgaggccggcgaactccgaagggaatcggagatgcagcagggcgatggcacggaggcgcaggtgacgtgggatgaccagcagaacatcaaccggttcggccgcctcaacaaccgcctccacgagctcgccgacgagatcaggctcgccaaggaagcaaacgaaaacctcgaggatgctgggaatgaactcatcttgtctgatgaagacgtggtgcgattccaaatcggggaagtgtttgcccacatgccagtggacgatgtggaagctaggctagagcagatgaaagaggacgcagctaagaagttggagaagctcgaggaagagaaggaatccatccttgcccagatggccgaactgaagaagatcctctatgggaaatttggagatgccatcaacctggaggaagattgatgtcaagaactggagctgcctttttaagtgtcgagtcatatgacacct

SEQ ID NO: 61139 - DNA, 425 bp, Zea mays
  Clone ID: MRT4577_155753C.1
ggacggactagtcgcccgcgcgcaaggtgctcgacggattgctgctacaccgggcaggcatgggggcgggccggggcgactgggaggacatggtgcgccggatgttcccgccggggaccaccatcccggagccgctgcccgacatggactactccttcgcgctgacgtacaacgggccggacgtgtcgtacgagctcccgcggatccagcccgtctgcgtccccgccatacccaccgccgagccgggctgggggcccctggggctcggcagcggcgtcgtgcccgtcgcgcccgtcgtcggccctgctgcggcccgtgcccgtgccaacccgccggcagcgtcccgggctggtgctgctgatcgccgggccgcgggggtggctcccgcgggttcctcgcgtggcgaggggggcggcgccgggggg

SEQ ID NO: 61140 - DNA, 572 bp, Zea mays
  unsure (1)..(572): unsure at all n locations
  Clone ID: MRT4577_155754C.1
gcccttctctttctccctcctccctgctcgttcctcctgccgcgcgctctcaccggccaaacttcctgcgccgcgacttctcagtttgccgcgttttgctcggcgcctaacttccctgcgcgcagctcaccgagctcggcctctgttcctcctgcgccctgctccctgcgccggagttccctccctgctcctgcccagcgtcgcgcccctcccttctccttgctcctgttcggagctccagctcggtgctcctcagcttgattttcctctgcgtcgcgcgccgggcttgctccctgctcgctccgcgtgtctggctagcctctgctcggaccgcgcccagcgccatgcgcgtcttcctccctggtgccggagcttcctctgcgcgccgagcctcttccagccatgtgtctagtccccagctccttccctgcggcgccctgctccctttgcttgtctccatggttgcgcagcagaccgtgatgccccagcccggnatttcctgctcgccctccagcttccgtagcccagctcgggatcttttcccatggtcgctgtgcactgggccctgcttg

SEQ ID NO: 61141 - DNA, 503 bp, Zea mays
  Clone ID: MRT4577_155755C.1
cgaaaataatagtaaaatagattaataaataagaatacaaaaaatagcattaacaacactgacggtttcaagcaaccacaacagtacggttccagttcactgctaacctgccatcggttaagttttcgacagtgaggatataaaccagactgtgaggtcctactctgccaacaagcaccacgcatacgattttacccggctgggccttaacgaggctcaaggcagcgtggaggcgacctgccgctcagacaaagtagacccaaaggctctagacatcttaatgcagcaaccagaaccatgcatttcagaaaagcaaaaggattccgtttcgaatcagttaagcatgatgatggaacgaaacagacaaaagagtgaggtgagttcacagttaccacatcatagatcaatccaagaaaatgtcgcatgcacgctttttaggaactatttggaatacactgcagctttagcaatagaacatgaacttgtgaacatactccttgatc

SEQ ID NO: 61142 - DNA, 624 bp, Zea mays
  Clone ID: MRT4577_155756C.1
ccgggatccgctttctacacccaacctttgttcacctttcacgatcatccttctgttgctctaaacaagcccagtcttcttcgcctttggattgcttttacccttttttttacatcttttgctagtccaaagttcattttttcctcttttttttggtttacacaagttctttttgtttctcagtccactgctcctgcacctgaaacatccatttcacctgtgtaaatttttttagtccccaagatgtacgcctcttcgatctttgtcgccatgaccattgccttctcgcaagttagcgcaagtggagttggaatgaacacgattgccccccgaaacgactactcaaacaatggcggtggtgcccctgccggtggacctgctggtgctccttcccctgctgacgccgctgatgaccttcctggcaccccggcagatgcctcgcctgctgatgctgccgacgcgccctctgctaccccggctggtcctgtgcctacccctggcgcccctgccccgggtggcgctgttgcatcaccacctggtgcccctgctccaggcggtccccccgctcctcttgttccaggagacatgtcttcgggcaaggcatgtgccccgccccccctgctt

SEQ ID NO: 61143 - DNA, 272 bp, Zea mays
  Clone ID: MRT4577_155757C.1
aaggggggggcgtaaaaaggctgaggggaaaaaattgaaggggaaaaaattgtaaaaaattgaaaaatggcccaaaggggtgggaaaggcccctataattattaaaactggaaaaaccaggccaaactaaaataaaccctttttagttacagaattccaaaggagcacggaaaaaaaaaagggggaaagggaattaaatagtcgggaacccaaaattttaaatttaaaaaaaggccaacatcccgattttttttccgggggtcggggatttt

SEQ ID NO: 61144 - DNA, 163 bp, Zea mays
  Clone ID: MRT4577_155758C.1
acggacaattatagctccgtcgatgaggtaactactgttctgacagaagctgccctggccagggcaaatctaatccctggtatggctttcaccaatagcaatgattggtcagggaggcatacctttagaagagctgctgcgcatgccacgtatggatgcatga

SEQ ID NO: 61145 - DNA, 442 bp, Zea mays
  Clone ID: MRT4577_155759C.1
agccgttccggcgacagcttaggcggacgcgcagggcctagttaaagtttgctcaaaacaaaactgcccaccaattgcggcgggccgtgggtggtccttttcgctcctattttgaccccttcggcggcaacaatagtcttcactggggggaaacgggtctgtaaggactacttaggaagcctacctttcgtgtccagctgaaggacactacctatcagggatgactctagcagatccagaacggccaaaggcatacggagttaaaacttagggcaaatgattccttcagggcaatcaggctctacctaggttatagacttctgcggccagaccattgagctgattcttacagaggcagttacctgctcataccttgcatttgcccaggcaaactgagagaactgcgtaaggcttgcccagaaggctacaaatgccaccgaaa

SEQ ID NO: 61146 - DNA, 476 bp, Zea mays
  Clone ID: MRT4577_15575C.1
cttgggttttttttttttttttttttttttttttttttttttttttttttttttttctttttttttttttttttttttttccagggggaaacatatttatcccggccaatttaatacaaattttccaaaaaacaaaccaaaaagttttcccttacttaacggtgtttttggcctaaaccccccctaaaatatatttttcccccaaacctgcggttgggggggatttaccccccccctaaaattctcaaccataactgaaaaatggggggtaaaccatcgggcccttccaaccaaccatggcgccccttttttccccccccttggcccttttgaccccctcccccattcactaccaaccccggttggagtacccgtctcacgccccgctggcaacatattttttcggggacactcttccccttcccccccccctgggcaccgaaaccactttggaaggcccatctaaccccaattcc

SEQ ID NO: 61147 - DNA, 464 bp, Zea mays
  Clone ID: MRT4577_155760C.1
ttcctttttataaacaaacgccttttttctttaatacaagaaatcagcttgttacaaacattggtaacgccttttacgtttctattggcacgtatctccttggccaaaaaaaataaagaatacggagggctactccttttggacaaaggaggccctttctttaaaggacatattatctctggatttgaaatggcgatctccaagaagaccgttttctagaatttgggcctgctgttttgaattggcctgctttttcccatcggtttgctgatggtgacggctgaaatgggcctatgaatggtggatgatctcactggttgcccactaacagaggttgaccttattggctgatatgaccttgcaaaagttttccttggcatagcagactgcaatcttgctcgactggaaacctctatcctagcctctttcagtatagggctcttggagctgacactggatactct

SEQ ID NO: 61148 - DNA, 143 bp, Zea mays
  Clone ID: MRT4577_155762C.1
gtatgttcgagaggactatgtgcttgatgaatagtacgggtcagaatagcgagatccactcttgtatttgtcctgtataatgcatgctttgcatcagccgcatgtccaatcatggagcttcagtttcatcgaaatgaagatct

SEQ ID NO: 61149 - DNA, 533 bp, Zea mays
  Clone ID: MRT4577_155763C.1
atagatggaagcaaatctagtgagaggaattctgtgcaaggtgatgagcttgatctctcctgtcaagatatactacaaacggagactggtggggggcacagtagcactgtagtggaggaagattcaggtagcaaggatcctactgcaagtgacggccaagaaatcctgatcgaagaaactgaaccaaatcagcagagcaagcatgcgttaactggctcatttgagaaagtccctgacattgagtctgttgggtcttctgctgagaaatctgtcggtacaggtgatgacttgcttcaatctggtaaaggtgcttgccactcagaaataccagtcgatatcatagctcagctgcaacttgaccctacctctggaacggcagatcatccggcaatctccaaaggggcagacaattttgaaggacaacattatcatacaacagatgaaagcatcggagcaataccaagtacatttgaacctgctgttggtgccaaagttgtatcagttgatgtcactgctgaccttacagaggatgt

SEQ ID NO: 61150 - DNA, 208 bp, Zea mays
  unsure (1)..(208): unsure at all n locations
  Clone ID: MRT4577_155764C.1
tgcccagtcctcttgcgacggcgtgctgtgtcanggaaaggaaaaatctgccctccaacgcgctcctctctcgccgtcgccaaccatcgccggctcgcgtgcggacccgccgttcctgcgaggaaatggctgcactgcaggccctcattttgaccggcaatgactgtgaagagtggctgcgtggccctgaaggggccggaagctgggc

SEQ ID NO: 61151 - DNA, 654 bp, Zea mays
  Clone ID: MRT4577_155765C.1
tttttgtttctagaacaaattggcattttttattcttgcaaacagattttttttttttttttcgagagaaggaatttaatcccctcatattccaaaataaaatacgcctaggatccataaagcttactgacaaaagagaacgaccacaacccacacacagactactcagcagcctagctggagcggagctggcgcctcaaggtctggcactgtccagccaaacagcgccgccaaggccctgacctgctcttgattaagcggttcaaggaacagcttggtataagcatcaagggctttttgagataggagatcagagccatctgaaatcttcagagccttcaagacgtttttcttgggtctaccaggtcgaatatgagccgaatcagcgctcaaccctgctagtcttctgctgcgcctcaacttttccttcgaacgaggttcccttgacattctcgtcctgccagcccctggagtcgggagcactgcgccgatcattgaggtaactctgctcaggaactgctcctggggcgatgacaggtgagactgagtctgctgttgcactgcagggttgcaacttcatttgtcttgggcttgaacagctaaactttctgaggtaggaagctacttctatatctgcagactcgtgccgaattc

SEQ ID NO: 61152 - DNA, 950 bp, Zea mays
  unsure (1)..(950): unsure at all n locations
  Clone ID: MRT4577_155766C.1
cattgggtacctcgaggccggccnnnnnnnnnnnnnnnaaanaaaaaaaaaaaaaaaaaaaaaaaaaaaaaaaaaaaaaaatttatttatttggcgaaagcatcgaggccggccgcacagcacaccccaaatgcttatacctgtccttgagctacttactagcgagggacagaggaaagatgagaagtaagtgcgccatggccatatcatcctccacctcgcgaacacaagatctggtgccattgctgtgtctgttgctaatggcagcagcagcaccacagcatagttgtgcgtcgccgccgttgcctgtgacactcccagggtgccccgacaagtgcggcaacataagcatcccctaccctttcggcaccaaggagggatgcttcaaacccgacttcgaggtcctctgcaacgacagcttccatccgcctcgcgccttcatccagatggcgggagcgaagatcaccgtcgacgacacgtactacaagaccaacgaggacggcatgccggacaatgatatcggaagttctgaatggccgatcgagctcgtcgacgtgtcggtctcggaggggaaagcgcgggtgctcggcgccttcagctacgactgcaagatgaacgacacgtaccacgcggtgaggcggcaggagatcgacttgggctactggatgccgttctccatgtcggacgccgatgatgtgctcatgggcatcgggagcaacgtcgtcgccaagcagacatccggaccgcagtgccagtcctacctcttataccagctctccaccaggaagaccgacgaccccgtcaacgggtcttgctctgggcagggctgctgcagcgccaaccttcgctctggtggcatggccgccaccgaggtgacaatccagaagacaccanagacgacggcggcttctacggcgacggtgtctcctgctcgtacgccatgatcgtgg

SEQ ID NO: 61153 - DNA, 420 bp, Zea mays
  Clone ID: MRT4577_155767C.1
aaacacggaacaccggggttaattaattgggttattggttaggttggggttaacacccatcaaaaacaaggaaaaacatagggattggaaaaaaagacccacgggcttatagaggctaaaggttacagattggacaagggggaaggcttacccgggaagctgaacatgcaaaagttgcaaataaggggggccccatagggaagaaaatttaaaaatcctaaaaaacaaaaaccccccaaaaagggggggttggggaacagaaaaacttgccctgaaaaaaggctgacaaacatgggaaaacaatggaataaacaaaaagcaagcttttaaagacgggggccacaattttagttgcccacggaaagcttccgccttttgaagaaaaccataacctcgcccttgaggccaaccaccatgggg

SEQ ID NO: 61154 - DNA, 334 bp, Zea mays
  Clone ID: MRT4577_155768C.1
cgcgtccccacctccgtcgccgatgacaccgagtgccccgcagggtcggcatcacccgccgtacctcctcctcggcgaggctgtcgtctactgggaccctttccacaagaagccatgtttcacggaccgctccacggttccccccttctctgcccgactcccctatgcggatactccgacgcctgccccctcggtgggcggtagcggcggatccttccggtggctctggctccgcaagcggcgcctcctcggtccgggctcgcgggccgtgtccggcctcatcagggaccggcggagatccggcacgtgctccgacttccatttcacatgcggt

SEQ ID NO: 61155 - DNA, 2403 bp, Zea mays
  Clone ID: MRT4577_155769C.1
gaaaaaaaaaggcgagaccgcaacggcgcaacgggcttctcccgttctccgtcggtcgcggtcttttcccgtccgccccgcctccagctcccgtctcccaccccaacccggatctcgcgcgcgacgccgcgcaggcgaaccccacctcctctcagaagcctctagaagttcctcaccccgctcccgcgcggatgagtggcagctcgggccccctcccctactcgatgcgcgatgtgggtgctggcggcgcctacaacaacgccaagttccgccaccggtctcgcctcaagatggttctacagtccttggctactaacagaagcaaataccattgtggaaagttcactgttggtaaattcttgagcctgttgatggtttctggcttattgtacttatttatgcacaaaggctcagagggtattgtatccagtgagcttcatggcaaagaagtacagaataaaaatgttaggagatctcccagtatacgcacattctggagaaaaccaccaaggctgcccccacgcctccctccaaatgaaatctacaaaaataattctctgcttcagcagtctccatctgagtggacatcgaggcagaagaaagttaaagaagcatttgaacatgcatggtctggttatcaaaagtatgcaatgggttacgatgagcttatgcctctgagccacagaggcacagatgggttaggtggtctaggagctactattgtggattctttggatactgcgataataatgggtgctgatgatgttgtttctgaagcatcaaaatggattgaagacaacctaatgaaaagaattagtgagaaagggcaggttaacttatttgagactaccatccgtgtcttcgggagggcttcttagtgcataccatttgagctactgatcatccaggggcagttgactatttccacattgagggtgatacagaaggggggcctgatggtgggaataaaagctccaaatatatcaatggtatcgtaataaaaccacttgaccgtcacaatcttctacgcccagagactgtggaatcactatttgttttgtatagaatcacagaggattccaagtatagggagtggggttggcagatctttcaggcttttgagaagtacacaaaagttgattctggtggttacacatcattggatgatgtcacaagcctacctccttccacgagagataaaatggaaactttctttcttggagaaacattgaagtatttgtatttactgtttgatgaaaacaatacccttcccctagataagtatgtgttcaatacagaggcccatcctcttccagttatgcggtctgcagaacaggcttcacattctgtgtagtttcccaagtttatagctgttgtaccatggtgagaagtacagatctgtgacaaatatacttgacaacatagttggaggaacgagaaattgagaatcccttgcatgactgttcttggaggcaagctcatggttctggaatctccatgcctgatttgaggatttgggggttttacttgtatttactggaaggccatacaacctttgtactctgtactgtctgtagtctgtaatacctaacttcaaattttgaaatcggctagcagttataccaagaagatcttgccaaaacatgtgttgagatgtacttcgtgacctctaccggccttgctcctgaaatagcttatttccacattgagggtgatacagaagggggggctgatggtgggaataaaagctccaaatatatcaatgatatcgtaataaaaccacttgaccgtcacaatcttctacgcccagagactgtggaatcactatttgttttgtatagaatcacagaggattccaagtatagggagtggggttggcagatctttcaggcttttgagaagtacacaaaagttgattctggtggttacacatcattggatgatgtcacaagcctacctccttccacgagagataaaatggaaactttctttcttggagaaacattgaagtatttgtatttactgtttgatgaaaacaataccctccccctagataagtatgtgttcaatacagaggcccatcctcttccagttatgcggtctgcagaacaggcttcacattctgtgtagtttcccaagtttatagctgttgtactatggtgagaagtacaaatctgtgacaaatatacttgacaacatagttgagaggaatgagaaattgagaatcccttgcatgactgttcttggaggcaagctcatggttctggaatctagatgcttgatttgaggatttgggggttttacttgtatttactggaaggccatacaacctttgtactctgtactgtctgtagtctttactacctaacttcaaattttgaaatcggctagcagttataccaa

SEQ ID NO: 61156 - DNA, 368 bp, Zea mays
  Clone ID: MRT4577_15576C.1
gtgaaaagcaagagcagatttatcttaataaaacacaagtgcatactgtacaccgcccaccttaaatacgtcaggtaaaatggactttccacgtgcacgatcacatgtcgggaaatgacgcgggggcggggatgcactcagtgttgctatgggtccgtccgaggaactcggcgcgtgcggcacgccgggtggttcccggggcggatcgagccgctgtattgatggcgtgcgaggcggtggccctgctggcggaccccaggtcgcgcgtcgccgtttgggaggcgctcctgaggatgctgctgcttctcgtcgcggtgcgcggagcgcgggtctaccggtggatggtctcccagcggggcggcgcgctg

SEQ ID NO: 61157 - DNA, 286 bp, Zea mays
  Clone ID: MRT4577_155770C.1
ggcggagtgacggtggaggttcgcggctctaacggggctttctacaagggatttatcaaagatgttcatgaagactcccttacagttgtttttgaaaataattggcaaccagaacgccaggttccatttaatgaagttagattagcaaaaccacctgatataaaaaaagaaattagtgaaggagatgaagtagaggtatattcaagagcaaatgaccaagagccatgtgggtggtggttggctaaagttcggatgatgaaaggagaattcttatgacattgatatg

SEQ ID NO: 61158 - DNA, 1607 bp, Zea mays
  Clone ID: MRT4577_155771C.1
acaacctaatgaaaagattagtgagaagggcaggttaacttatttgagactaccatccgtgtcttgggagggcttcttagtgcataccatttgagcggtggtgatcatccaggggcaggtgactccggagtaactgtaacatataaaaaggctaatccagagcgacttttggaagtttcaaaggatttagccgacaggttattattggcttttacatcaagcccaacagctatacctttaagtgatgttattcttcgtgaccatactgcacatgcagcgcctgatggcttaagcagcacttcagaggcttcaacgttgcaactagagttcagttacctcagtaaagtattaggggatcctaagtacgacagggcggcaatgaaggtgttagagcatatacatacactcccaaaggtggagggtctggtgcctatttacatcaacccctcctctggtcaatttagtggtgagaatattcgattaggatctcgaggggacagttattatgagtatctgctaaaagtgtgggttcagcaggaggaatatcgtcacagtagtttaaagtatctatttgaaatgtatactgaggcaatgagaggggtcaagcatcttcttgttcggaaaactgttccaaatgggttggtatttgttggggagcttccatttggacgaaatggcgggtttagtcctaaaatggatcacctggtgtgttttcttcctggtacccttgctcttggtgcaactaaaggtatcaccaagagaaaagctcttgagactaatttgttaactgatgaagatatagaaaatctgcagcttgctgaagatcttgccaaaacatgtgttgagatgtacttcgtgacctctaccggccttgctcctgaaatagcttatttccacattgagggtgatacagaaggggggcctgatggtgggaataaaagctccaaatatatcaatgatatcgtaataaaaccacttgaccgtcacaatcttctacgcccagagactgtggaatcactatttgttttgtatagaatcacagaggattccaagtatagggagtggggttggcagatctttcaggcttttgagaagtacacaaaagttgattctggtggttacacatcattggatgatgtcacaagcctacctccttccacgagagataaaatggaaactttctttcttggagaaacattgaagtatttgtatttactgtttgatgaaaacaatacccttcccctagataagtatgtgttcaatacagaggcccatcctcttccagttatgcggtctgcagaacaggcttcacattctgtgtagtttcccaagtttatagctgttgtaccatggtgagaagtacagatctgtgacaaatatacttgacaacatagttggaggaacgagaaattgagaatcccttgcatgactgttcttggaggcaagctcatggttctggaatctccatgcctgatttgaggatttgggggttttacttgtatttactggaaggccatacaacctttgtactctgtactgtctgtagtctgtaatacctaacttcaaattttgaaatcggctagcagttataccaagatttttatctt

SEQ ID NO: 61159 - DNA, 235 bp, Zea mays
  Clone ID: MRT4577_155772C.1
agttcgttcacatagctaactaattggttcattacaaagaaacattagaacaagcataatgatgacttggacataatgaaataaaatacataggttgagggaaccaaacataatggaacacagaacaaatagaggacaacatcatagaaaacgacataacttcacatgggttttacgccaattgctccacgccaagtccataagtgctcgatgagatcatgttgaagttggttgt

SEQ ID NO: 61160 - DNA, 238 bp, Zea mays
  Clone ID: MRT4577_155773C.1
aactctgcagcaagcactacctgtttatatctgcctggatagcggagccggactggtaggtagagaggagcagctggacctggaactagcaggtggagtgcataggagcttggccgatagcgtcgccgcgtatcgatgtctgatggcccatgtgtacgatcgacatgacacacgcatggctgaaggtgccaccgttaatcgtgttgcctgtcgagcgtttgatgacttgttgtgggag

SEQ ID NO: 61161 - DNA, 1065 bp, Zea mays
  Clone ID: MRT4577_155774C.1
atggcaaccataaatgcacagagcctgattcaagtatcagagattcagaacttgaacatgccatatatcggagctccagcacaaagagatggtttggaggcggatcacacacctcaggaggctgcgaggatctcgtcgattggctcggatgatgatacccagctgagacatcgcagcaagagaaagaggagacgttccaagcttggacgtgggcaggaaaagccagggtctagctcaagacaggcgtccctggtatccgcccagggtgcggaggtcagaaggcctgtgattccttcttgtgtcttggagttcaattctgatatggggcgagaagaagttgcacttcgacgtgccttattcgtaacagtggtgggaactaggctgaagctgaaggtgtcaggtgttgaggtgctcgaagaagtggcacgcaactttggcattgatgctggatcaatgacaattcatcaagccatgccagaagattttctcttgctcctaccggatgaagaaacagcagatcgagttctcaatggcagaagagcgtttagagggccactgttcagtctcgctttcaagcgctggacaagattcgcccaagcatcgacgacgtccatgtccggtctggtggatattgaaattcgaggtatcccgccgcatgcgtggtccctctctacagcggaggtgatcctgagcggggcttgcctgatatctgagttgcacccggacacggtgaggaaggcggatctttcttcctttgtggtgagggtgtggtgttttcatttagagggacttaactggaatatggatcttcacatcaccgagccaggtgtatccagtcaggggaagaggttattgacatacaagatcagcgtgatagtagttccggcggaaggtcagtcaacatcaatggagcccccacccaccaatgcagcggatgacatgcagcctgaggaagatgatgaccgtgggaaccctgacttccattctcagctttcgggcaataatctggttcagaagcgatcggtccatcttcgcctgggaccacagcagcctgtgatggaataa

SEQ ID NO: 61162 - DNA, 352 bp, Zea mays
  Clone ID: MRT4577_155775C.1
ttctgatatgtggcgatagttatttttctgttaaagataaactgtttgaactaataacttgctgcagcttacccattaatttccataaatcatggtagagcaagatggtgtattgtaaatcttccttgagcctcacatggattaatacgatataatggttcataatttatccattatcttctaagaacccatggatgagctagtacagaactagatggtcttgcatgattaacaggcaagaagcatgaataatagcaatgcataactaggtagtaagaaatgcgaagagcatggaagtctcctaagttgcccttcaacatagaggatgtagtttctatgccaatgatttgtt

SEQ ID NO: 61163 - DNA, 381 bp, Zea mays
  Clone ID: MRT4577_155776C.1
gaaccgtgttcacaatacaatcgccggcacctaaggcaccacagtgtccaccatgccatccgaagctcagcagtccaaacttcaacagccatggaaacagtggcaggcctcacttaatccctggagccggaaagacgtccgggaaggcaacgttatccttgtcaatgcggatagcgggcacgggaccacggctgttgatcagaagaacatcgacctaaaggcctacaagaaaactcccacgatataattcgcctcaactgtcgcttgctacagcgaaggagaatcatatgagttcgcactggaaagacaagattcatatacaagacaaatcatgtattacaatcacagttgactcttgttgatttttttttatgctgtcta

SEQ ID NO: 61164 - DNA, 140 bp, Zea mays
  Clone ID: MRT4577_155777C.1
attcggctcgaggcggctgtaccagtgaaggagaagccgcacacgatgaatttttttgggcgttctagagcatgtatgagggacagttacaccagttgaggttaatcaggcaagggtctttgcaatccctgcatacatgg

SEQ ID NO: 61165 - DNA, 502 bp, Zea mays
  Clone ID: MRT4577_155778C.1
gtcttaaatttatgatatttgggccaaaaaatgatgaagtccgccaagacaaaggagggagggaaccggaagaaagttgcgaaaggcaaaaaaaaagggggggaggggaccaacagaaccgaccaggaacaacgccggataggaacgaaaacacaggggcggaccaaagcaggaaaaaagggtgccccaaccaggaaaaaaaggcccgcacagggggcacacaaacccccaaccgggcccccggatagacccaccaagacccgaggggcaccccgggaagtcccaaccgggcccaggggggggaccaggataccctagagggagcagggaaaaagctgggcgcaaacaggaaaagagatgcgcccagggggaaaacaaatccgatccaaaagcacaaaaaatacagcccgggagggacaaaggggaaagcccggggaccccaatgagggagcgaacacacaccaattggcaggcgctaaacgcgccgtgcccagtgcggaaa

SEQ ID NO: 61166 - DNA, 452 bp, Zea mays
  Clone ID: MRT4577_155779C.1
tttttgggggttttttttttttttttttgttttttttgttttgaatattttttctttttttggtggtttaacctttttgaaaaaagggaaattttcttcttttcgaaggaagaaaaaaaccttttttttggggtcaacccttggggcgatggaactgggcgaccttttttttttttttttttccaggggcccttaagatggggcccccatggaggaccacaccccccctcccttttttttggcccaacccgaacgaaaaaaagggaggaaaaaaaaaaggttgaaaccgggacttttttcccttttaagattgccacccaaaggggggaaaaaagaaaagttatttccaaaaaaaaaaagagaagtccttccgaagataacggaatttgtgccctttcacggccctggatgattttttaacccaccggtgccttcacccctttgtggggggg

SEQ ID NO: 61167 - DNA, 394 bp, Zea mays
  Clone ID: MRT4577_15577C.1
tcccgggtccgatcacacgtccacgcatgcaacaagtacgcacgcagcgcagcctcgagccgtcgccatggcgagcaagcacctcgtcctctccgcatgcctcgtcctcatgcgcaccgcctcggtcgccaccgacgtcaactactgcagtaagaaggactactcggtgaaggtgagcagggtgcagatcgtacccgatacggtcgaacaaggcaagcccgccactttcaagatctctgcttctactgatacaaccatcgataaggggaatctggttatcgaagtcaggtacttcatcttcgacgtgcactccgacactcgcgacatctgaggtcaaacttcttggacaacgaccggatacttcgtgctgtccaaccaggagacactgccaagc

SEQ ID NO: 61168 - DNA, 200 bp, Zea mays
  Clone ID: MRT4577_155780C.1
tcggccaatcctaacccaaagcccaagccgaataggaaaggataggatacggattgggtacccgcgattaggcccgccgccgccagtaccggcgggtttcatatcgtgctccccatatgctcacaggctgcctactagttttactagcattagttgccgaataggtgaaaggattctttcggtggcagcttcctgcggtg

SEQ ID NO: 61169 - DNA, 501 bp, Zea mays
  Clone ID: MRT4577_155781C.1
ggcggcggcggcgtaccacgtggcccagctcgcccggtgcttctgcatggagcgcctcgccatcaccggcggcggcggcggatgccggcgtctcgggagagccgtcgcgtgcgcctccttcctcctcgacaagggatgcgcgtacatggtgttcgcgacgacggtggcggcgctgcaggcgtgcttcgtggggctgctcggcgtcgacgccctgcagtggagcaagctctgcaacatctacacccgcttctgcgagcaggccgccgccggcatggtctgcagcctgctggccgccgccgtcatggccgtcctctccgcgttctcggctcgggacctcttccgccgcccctgctccccggagtatagatgaattccagtagtacaagaaacctcaccaagatatttatgatgtaagaattggcgcttgggctttgatcaagttcataagaaaaatgagaaagagatctttatggaataaaaaaaaaaaaaaaaaaaaaggac

SEQ ID NO: 61170 - DNA, 741 bp, Zea mays
  Clone ID: MRT4577_155782C.1
ggccggccgggtcgggaagtgtccacagactcgtcgccgtcgtcgtcgtcgcccagcagcgtgctgcaggcgctgaggtactcgacgtacctcggcagccagctgggggactcgtccgccggctcctccaacaccatcgacggcatcatgaacggggtcatcaaggagaagctcaagatcatccccaaggacgtcaggtgggtggaggtctccaatgccgtctactacgcgctggtcaacgacttcatgaagccacgaatcgacgagattgatgagctgctatcgtatggtgtgaatgttactgtatacaacgggcagctcgacgtgatctgctctaccgacggcgcagaagcatgggttcagaagctcaagtgggacgggctcaggaccttcctgagcctgcccaggcagcctctgtactgcggccccggcaaagggaccaaggcgttcgtccggtcctacaagaacctgcacttctactggattcttggggctggccactttgtgcctgccgaccagccttgcatcgcgctgagcatgatcggcagcatcacccagtctccagccagttagaagggttttgtttatgtcatacgcaaagatcaaatgactctcgagtacagtgaaggtcgcatatatagttgaaagccaattcagttgatcatgatacatgcatacagttctccatcctgtgaaagaaaaaaaaatacagcactcgcgtgacaggccccccacattagg

SEQ ID NO: 61171 - DNA, 282 bp, Zea mays
  Clone ID: MRT4577_155783C.1
cgtacctgcactgaaaacacttcccagcgccatttatcgcctaccaaacccttaggctgctatggctcaccatgacattcatggcgctggatccgaccgccaatttcatgcactgcaagaatgcttgcatcgttccacctgcatgacatgtctcttctaccagcgtagggtctggtgccagataccgccaacattaaaacttacgagaatcagctcacggtagtcgacgtgatattaactgacctactgtcgatgaaggaacattgatcagcgctagttcaa

SEQ ID NO: 61172 - DNA, 575 bp, Zea mays
  Clone ID: MRT4577_155784C.1
gaaaaaaaatagaatagtattaatatctaagataataaaaggtagaacaaattaaagcatgaacggagagagagcgagctcggtgtggtattgatgagagacgggataattagtcccttcctcgccatgcattaaacaccgccatatgcacatgcatatactctctatactatacatatgcgaaatgtggctgtcacagtagtccatttcactactttgatggcgacgtctctccatatgtatgttacagttggtgacaagatacgatacgactgaggctattggtcggcgctccagatggcctcgagctcggcagcgaagaggcgctcctgcccgacgacgatggtgatgtggtccttgcgctcgtagacggtgacgcgcgcgcggcgcaccctggcccccgccgccaacgtgcagccgacggggaccagctcgtcgtcgcggccgtggaagagcgccaccttgcaggagaaggcggcggtccaccgcgtccaggtacgctcccatccgccccgcgccgccgacacgacgttgtgcagcgtgtgccagccgcgttgttgcgtgtggcacatgaa

SEQ ID NO: 61173 - DNA, 305 bp, Zea mays
  Clone ID: MRT4577_155785C.1
cgtcgagatgcttcgtggctccggcgccctcctgcgtcgcctagcccctaggatgtagggcggaggctgcggaaacacgactcaccggcagccttattccttccatcgtccgcttgatacgagcccgcttgttgtgtgcccctacttcctattaaccggcttgttcgtcttcagctgactgcctcgaggaggatgcggaggacagagacctacccaagatctgcaatagagatgcacgtgcccggctcaacatctccagagaccgctccgggctctacatgcccacagagcactcgcacgagccg

SEQ ID NO: 61174 - DNA, 566 bp, Zea mays
  Clone ID: MRT4577_155786C.1
cattgggaccctcgaggccggccgggaaaagcttttaacgaagtgagagcgacccacgtccacacgacacgaaccaccaccaccaaccagtcagccgcaccacgcacccaagagcaaagcgatggcgtcgctcatcatgatgacgtccttcgccatcaaggcggtggtcgacccctcgcgccgcttccaccttcaacgagtgcaggtcctgcaaggacgactgatgacaaaaatccaccacgatatcaccaacaaatggctctcccgcaggctactcatgacgcgcgcggatggtacgctacctgtagcgcatgtcgtacaaggcataggagaagctttcccacacatattaaatgccctgaacttgacacacaacactcagaaaatatgatgcatctgtaatccttgcatgatgatctaagattgtcactgatgaatatcacctcaacgcctgttcatgcatgcatatgcatatatgatataactagtgtgcgagacacattgtgagggtcgctatagatggacctagtgtcacatgagtggctgaatagaggacatttacttgc

SEQ ID NO: 61175 - DNA, 453 bp, Zea mays
  Clone ID: MRT4577_155787C.1
ggggttatgtatcaataaatgctttgctttcttctaaaaaaaaaaaaaccgaataacgacagtgttgggcttgacatccccctgcccctggttgggagtgcagtttttaaaaccacaatttttcaaaaaaaaaaaaaaaaaaaaaaaaaaaaaaaaaaaaaaaaaaaaaaaaaaaagcgaccccaggtcagtcgggactacccgctgagtttaagcatataaataagcggaggaaaaaaaacttacgaggatccccctagtaacggcgagcgaaccgggaaaacgtgaaaaggaaaaggagaggcggaaacgggaggagaaggaaaaggaaagggaggaggaaaagcggaagagggaacgggaggagaaggagaggaaggaaagggaacgggaggaggaaaagaggagggaagaggaaaaaaagcgggccaggaaggagcaggagaagcagcg

SEQ ID NO: 61176 - DNA, 318 bp, Zea mays
  Clone ID: MRT4577_155788C.1
cttttcttgaacttgattgatcttatcatgtttaacttggttgtccaatatgattctaggactgaaatatttgtaagaacaatgcaatgggagcatggaacatcttctacttaaaatcacttatgcattttgttgttgcgtttattgggtaagctttagattgcccatgaataaacgtgttattcaggatatcatctttttacttcagtggggatgaaattggacttatcgaaactaccatcaggatagatgacttttttaaagaggccaattgccataggatttgacatagtcaattgtccattgtccatgagttga

SEQ ID NO: 61177 - DNA, 1467 bp, Zea mays
  Clone ID: MRT4577_155789C.1
ctttgcccagtcatttcgtcttgaaatggtatcaagtgataggtatactttttcttcggacccagggaaagcaatggaaaaagttatactaggtgcagcacccagcgtctgagtgacttgccacggatttgccttgcaaaatagacatggttggtattgtggtggcaataaaatgtggcatgaaatagtttccgtttaaaaaaaaacgcacgcgccgtcggacgcttgtgcagagggctcaaccgcaaagggggccccaatttctgacccagcccctcccctccatcgcgttccatctccgcctcgagcacaaaaaccctagcacgcaggcgcagccagggctgcacccaaagcttccggagaattcctcccttgccccgccgtcgcatcctcttcgaagttcgaatcgaatcgcgccgcgatcacccacctcatggcggacaaggagcctgtcgtggagcggccagaggcgggtgaggaggaggaggacgcctcagccgccgccgccgcgggggaggaggaggacacgggcgcccaggtggctcccatcgtgcggcttgaggaggtagccgtcaccaccggcgaggaggacgaggacgtcctgctcgacatgaaggcgaagctgtaccgattcgacaaagacggtaaccaatggaaggaacggggcacgggcgctgtcaagcttctcaagcacaagcagaccggcaaggtccgcctagtcatgcgccaggctaaaacgcttaagatctgcgcgaaccacctcgtggcctccaccacgaagatgcaggagcatgcgggcagcgacaagtcgtgtgtttggcacgctgctgactttgccgatggcgaacttaaggaggagatgtttgccatcaggtttggttcggtagaaaactgcaagaagttcaaggagttggttgaggagatagctgagtcgcttacaaagaacgagggcaaggaaggtgaagatggtggttccacggctggattgctggcgaagctcactgtgagcgagggcaaatctgagggaagtggcaagtctgagtccactgattctggcaaagtgactgaaaccaaagccgacacagccccagctgagtagttggtgtggttgcacttgcacgcagattcgcctggtgctgaactagtttgtctgtccgcgtccagtggaagtttggtgccctttagccatggaatacgattgctatcatttgggcccgggccgagttggaggagtctcaggtgttcggtctggtttggtccgggcttgattttgctaaaaacttgggagtccatgggggttgggaacgtttgatatgtgagtcgctagtatttaactgcatggatcgttgtggattgcggtaaattcataaagtggaccctatatattttttatttcgttcaatacacattcatatcatcaatgatttataatggcagtgcctgtggggagacttgaatgtgtgtcaa

SEQ ID NO: 61178 - DNA, 277 bp, Zea mays
  Clone ID: MRT4577_15578C.1
cgtacaacgtgtgatgactctgccttgatctagctatgagttggaagatgagacaccctcttcccgcttactaaaatcaggcttctagtacgtaaatcggtcaaatattagttttttacattgcgtgggcaagccattcggactagcgctcatgacgctgtatggtttatctcgtaagatgtgaaaagcactgcagaagacatggttcatatgatcgctacaagacaaatttgatatatatctagttggaaaaaaaaaaaaataaaaaactaaaaag

SEQ ID NO: 61179 - DNA, 317 bp, Zea mays
  Clone ID: MRT4577_155790C.1
attcggctcgagcccatcgccacgcacccggcttttttcacgcgtgcccgccccccgtcggttcccctcacgccaaggtagccggccggaacaccacacccggacgtgcaccgagaccgcgcacgcataaaggaccaccctgcttgccagcatcggacgtccgctctgcaacacacaacctaccacgcttagctgctcagccgcaccgagctgatcaagatcacccagcagatgctctggaggaaggccatcatggtcgtcataaagatgccgaacgacttgtacacggtgcccaaccctgccaagcagaataacac

SEQ ID NO: 61180 - DNA, 629 bp, Zea mays
  Clone ID: MRT4577_155791C.1
cccacgcgtccggacaaatcgtgcgtctggcacgcttctgactttgcggatggcgaactgaaggaggagatgtttgccatcaggtttggttcggtagaaaactgcaagaagttcaaggagttggttgaggagattgctgagtcacttacagagaacgaggacaaggaaggtcaagatggctcttccacggccggattgctggagaagctcactgtgagcgagggcaaatctgaggaaagtggcaagtcggagtccactgattctggcaaagtgaccgaaaccaaagccgatgcagccccagccgagtagttggtgtggttgcacgcagatcctccccgtgctgaatcagttcctctgccctttagccatgaaatatgtttgctaatttttttggggcgagttggagcagtctcatgtgtttgggtttgttcttaaaaactttgagttaattggggttggaacgttcggtatgcaagtgtagtatttcactgcgtggatcgttatggattgcggtaaattcatataaggtgcatctattttttgatttctttcagtacacaaaaaaaacaaaaaaaaaaagggcagccgctcgcgatctagaactacccacgcgtccgcgaacgcgtggg

SEQ ID NO: 61181 - DNA, 139 bp, Zea mays
  Clone ID: MRT4577_155792C.1
aacatcttgattctggaaaacattgaattaaagtccacaatactgttattgtagtgtaacaagtctccttttttgtagggtgatttggtgacagaatttgctaacaatgggaataagataacctgtgatccagagatgc

SEQ ID NO: 61182 - DNA, 368 bp, Zea mays
  Clone ID: MRT4577_155793C.1
tttttttttttttttttttggatcgaatgtcacatctttatatataacaggagttctatacaaaataaataattacattataaggagacaacggtccagcaacccaaagttgactgggagacgacgacctagacctctcacgaactcgtcgcagcatcctccacgcgcctcatcctgtggtacctgttcttgaccttccacgagctcctgctcagcagtctctacttgctgaacctcagattcctgtgtagcctgctcgtctatacacacctcggcgctggagaaccgccgcacgccgtctggtcgaacgcaacgagccctcccccaatccgattttgggggcagggatccggccagagcctcgtgcc

SEQ ID NO: 61183 - DNA, 338 bp, Zea mays
  unsure (1)..(338): unsure at all n locations
  Clone ID: MRT4577_155794C.1
gctcgaaaaaaatttttatacacacctttaacaaaaaacccgggaaacaacacggcggttttcgaaattttatggcacaaacaaaacgnanaaacacacaccgccaccataaaacactacaaaaagaaaccgcaaaatccacaacacatagtctgttcaatatcacgcacatacaccaacccgaatcaggaccaacccctccaaacctaagagcgtccacgatacaccatcccatccaaacggcatgcacacaaaagcacatccatactaaactccattgaccaaagaaaagcccttcagattatcacaaaaagcaaccaggaaaagcatagaccaat

SEQ ID NO: 61184 - DNA, 502 bp, Zea mays
  Clone ID: MRT4577_155795C.1
atcttattaaaagaaaccaaaaggggaaaacctaatttttagggacctttattccctttggcttggcaaaaaaaaattcccgggggggggctttggcattaccggaatggctgaaccggaaaggaattctggtcactttttttagggcccggaccccacccggggggaaataccaacatgccccttaaaaaagtttacaacaatggcccaaacccttttgggccaaaagggcattttttttttaaagcgggtccacccctcctttttggatttgctttaaaacccaaatttcaagaaagggacctttgggattattgaccaacaattttaacccaaaaatttttttttccgaagaactttggggaaaaaacatgggcccaaaaagaaccctttgggggggtaaaacggtttttggaaacaggtgggggaaaaccccccaaggtattgggccccaattccccttgtctttgtttaaaaaccctaaaagggttttcctgggccc

SEQ ID NO: 61185 - DNA, 173 bp, Zea mays
  Clone ID: MRT4577_155796C.1
acccactcgtccgccgactcttcctacccgacaaattctttgtacctcacctgaaaaatattgccttggtgagtctatcgtacacacatttataacctcaaaacacacccactatactttaaatccacccgtttcttaaacgccagtctaaacaaactctcgttaatcttgaa

SEQ ID NO: 61186 - DNA, 235 bp, Zea mays
  Clone ID: MRT4577_155797C.1
gaagaaacatgtcttgtaagatactccttcaaaggatcgggtgcctgtagctgtactctgacacctgcatggattgatgtcttgatgatgtagtgcaatgtagcattcagaacaataaagacatgtttcggactgcaaaaaaaaaaaaaaactaaaaacaagctaaaaaacaaaaaaaaagaaccaaaaaaagacaaacaaaacctacaaaaaaaagccataatggcaacaagtg

SEQ ID NO: 61187 - DNA, 428 bp, Zea mays
  Clone ID: MRT4577_155798C.1
ggtcgacgacgcgtgcgccgacgcgtgtgccgacgcgtaggttcgactttcactttcaagacggaagccagcctggacgtgttcaccttgatatgaccggtcagaacgtgaccgaatgcaccggcgggtcaagcaacgtcaccttcgacaacctgagagaccgctaccacacgcattgcgaccccaggctgaacacgtaccactccctggagctctccttgatcctctcctagaagctgaagaagcggatgatgcggcggtcgtacttggcgcctgtgctcggcggcagcatcttgtccttgacgaactttgggtcttgatgtcttgcacgctatctgtgtgcatgcacagtgcactgcatgagtgtggtatgagaatcttacgttgctcattgccttgctatgtaatatgtaatgctttaatttact

SEQ ID NO: 61188 - DNA, 335 bp, Zea mays
  unsure (1)..(335): unsure at all n locations
  Clone ID: MRT4577_155799C.1
ggcgacaggccggggcccgcggagcgggaccacagaggggagacgaaggaggccccgcccgccggggccaggaggagggacgcgaccggggcgggcgcgcgcaggcacgcgcagaggaccccgacaggcccacacccgggacgagagcagggggggggggcagcggaaccggagaaacaggaggcaccacagaacaaaggacagcgaagcgcagacggaagcggcgaagaaggcaagcggaggggggaaccagccaaaccaagaaccagcacagggccggcggacagagcacgggaaacagagnaacggaccaggcaggaaccaaggacgaggcc

SEQ ID NO: 61189 - DNA, 559 bp, Zea mays
  Clone ID: MRT4577_15579C.1
ttttttttttttttttttgtaactgtcactgcctgtcctgattcagttttcatttatgcaatacaagcaaacaactgtcactacatgtacccattacaaactgggatatgatattggaccggtgatttctggagtcgtagttcacctacaagatcaaattcagcaaaagcctctgaaagcatggaccgcgctgtcatagcgccgaaatctccagcgctgcgctgtcatggcatccatctcagacgtcagaccccgtatcggtttatgatctgtgccatgaggaggtcgtagcccctctccgtgaggtggtaggtgtcccagaagaggaacttgctggggtccctgcagggttccgccgtgtaccggttgcacgtcagcgtcacctcgaacacccccgtgccgcagcacccccggttcgtcacgttgaatccgtaggcgtcagggcgctggatcatgtcgagcagcggcgtgtagaggtcgatgtactggagcacggaggccgggagcgcgtcgctgccgttgagccgcttgatctccttctccagcgccgcgttgaaca

SEQ ID NO: 61190 - DNA, 8313 bp, Zea mays
  unsure (1)..(8313): unsure at all n locations
  Clone ID: MRT4577_1557C.1
atggctggacgtgttcaagacttcatcacgctccgcatcggttcgctttggctggatgtgccactcggacctctccatgctagcgatagtgatggctccctgcgtaccacagctgcatcaccagccatgatcgggcttgagcaggagctcgcctccactccccatgatgctctcaccccaatggagggttccatcgccaggcaagatgcagggagcctgtcggcgccctcgacgacgccagcgtgccgctcacgccgtgcaaggcgcccgatgggtgcgtcgtaaggccccggtgttccagggttatggagatcgtagtgcaataaatcagtcggtcacatgataagagtactgtttcttcatacgacgctagtgcagtggcctgactgcatccataatgctgcgccaactcattttattcagtcaagggtttcctcttcatcaactcccaaagagtcagctcctgctttgacacctcccaatatgctaggggtgcggtcattaaaacttgttccaagcatacttggggcatcaccaaccaaaacagtgacaacaacaaatccaattagttcaaatgaagagatggtattggtagatcaacatcaacatccacagccctgtaataagggaaaggccgccatggtggaaaaggaggttcttcaaccatccatggacaaagggaaagaagtggtgatggaatataatacatcatcttctaagaatgggtttattactatcaattagcaaccacttgaacatccgcaacttataccgtctccgaagaagttcctccatgaaggtccaatggtatgatttttctgtgggcacggattcagattatcgaatgatggcttcgggaatatttatgccaagtgatcgctgggcctatcttatcccaggtcatctcaaatgatggttccaacacattatgtccaagattccttgtccccgaaaaggcatcgccgccaccgtcgaaataatcgtcgtgcgcgagctaacctcattgtggtcgacagtgccgcgttgacaaatgcacatcgttcattcattgtggatatgattttaactcaacaccaagaaagttgtcgtagaattcaagatgcggcaagacgagccatgcaggcttccttggaaagaaccatatgtcaagatttgaataagttactcccgggggtatcaatgtctggagagaatattaatggtgagatcatgcggagtgctgaagcatttgcacaatggccagagtatcaagtgtgggtaaagagaaacccacaacgcaagaagtatgtcaaactagttgctattgtgcgcgcttttcgtgctgctagcagacgaagtgtgctggaacttccatctaagtgtttggccaagagggtgggatgtactatgaatttgacatgtaaccatgctcgccgtattcatgagaggtttgttggacggtcgagaaggtcaacattatcacgtgttcccttcttaactcaaaagagtgtctcttctaatccattcgaagtcctttcttccttgccggtagggattactgaaaagtatttcgattctagtctttcttcctctgcttcagatcatttcaaattaaagaattctcgcaagcaaattccttctggtcatcgcccgataactcggagtttgtcaggctgtcgttcagatgattcaaatgccataagcaacgacgacttgtgttccccgctaaataatgaggatgggccaagccgtgtggagcaagtccttgcagcaaatgatggccactcagttgatcagcaaatggcccaacttatggctactcttcaacaaaaggaagaggaattggttgctcttcgtgaacaaatggctcgtgaacaagtggctaaccacagccataataatgacagggatgcctctaccatccataaccaacaacgttctgaacctgcactcactcttgaggcgatacaaagaatgatttctgagggtgtgagagcacaatacatgcaaacacattattccatgcgtccagggtatgtgaaaccatatccaccagaagttgacatggtacccttcccaaacaactatcgccaaccacagtttagtaagttcaatggaactggatctccacatgaacatgtggctcatttcttagctgcttgccaagacacctcccataatggcgctctcctcctctggcaattcgtacaaacattgtcaggacctgctttcacatggtatagtaagttggcaccgggctccgttagaacatgggaacaaatgcaagatgctttccttgagcgtttctatagcacacaaaggacagtagggatcactgagttgacccagactctacaaagggccaatgaaagggcagctgattttatcaatagatggaggaacttaagccttcattgtcctcagcccattactgaaccagaagcggtacgaatgtgcatgaacaacttgagccctgacatggccatatatttgcaaggggtgcgtccaatcacctttgaagagttagcatcaaaggcaactgatatagagaactatatgcaacatatctctaggcaggcaagaccatataataagcctgtgatggaaagaaatggaccacggtataaagttcccagtaaaccaaaacagatgcaggccatggaggctacagtagtccctcgaaaattgcaaactgggggcgtcattgaaagaaatcaacacagaggtgatgcatcagctcctagaaggccaactttgagtgagcgacaaaatcaaacatattccttccctgtggaagaagtagatgatatttttataggcttaagagagttaggcctcatagaactccctaagcccaaaaggccagaagaggcctctaagttcaaggaaccgaatttttgccactatcatcgtatcttgggtcatacccttaaagattgctttgtggtgaaaaacatcatacagaaattgatagatgaaggcaccataaatgctgacctcctcaaaagtatgaagaaaggaaagaaggtggctacatcaaatgtcaccacttttcgaaatgatttggtgagtcatacaactttaaatatgtcaccaaactatgatcaatacatgtatgatcaatttatgatgatatcaaaccctgagaatgtgaatgtgactatgccaggatatccaaaacagcaagttgagtccaagcatgaaagcaaggctctccgccggtggatccacaccccaagaggtggaacctccacgccacaaagatcaagaaagcgtcgacaacaattctcaagacgacttgctctacgacgagtgatggaaaagggtgaaggcccgtgcatctccttaaatgtagagaagcacgagcacaacccaatggaggagtatgacactttcgccatcggagtatttgaggatgatgatgaaccactttacttccccgaggaagaagtgccagaagttgatggaatacagcttagatcaagccgccaactgcctagttcgtctcagccacgaaatccccaaaatgagaatgtaactccgagaaatgtgactggccatgtatcaaatgtgtcggtcaagtatgatgtagttgcacacttgaagaaaataccagctatgctttctgtgtatgatgccttgtgtctttctcccgatttgcgtaaagcatttgttactgcattatcctttccagaagattatagagccgaagtttcccaagtggaagcagaattagctcaaactcaaaacatgacttttgctgatagagatttgttattggggaacaagaaacataatagaccccttctcatgcttggtgagattgatgacttagtcattaactgtatcatgattgatggtggttcagctattaatttgttacctctgcgtactcttaaaagaatagggtactccgctggtgatttaagccagtctaacgtaattattcatggttttaaccagtctagccaggaagcattgggaacaatttcccttgtgctaaagttagaaaagcttgtgacatatgtgaatttccatgtgattgatgcggctacctcgtacaatgcattgatcggtcgtccatggttgcatgaaaataaggttgttccatctactctccatcaatgtattaaatacaaagatacctcgggggacatagtgcgaatttttgcggacaaaaagccattcacagtggcagagactttctatgctgatgccaaattctattttgagccagttgataagatctcaaaaccgaaaacaatatcatcgtcagttcaagacttgcctgatagggacactgggaagtcttcagtaaatcaaaagagataccaatacataccaagtgaccaaagaaaaaagggagatccaatatttcgtgttataaataaagcacacaattataaaggtaccacattcccgacacctctacctcctttggtacaatatagaataaatcaagcgaaaattgagaaacataataaaaataaggtagctgcacaagtcatgttattggatagagatgatgaaattttacctatcgccttatatgataatagagtgctttatatgatgcgacagatggactatgatacatctattggcccttcactatgtgatggccgagggcagcttgcgccatttgaaaagatgatgtcccaagctcagcttgatgcattacatgaagatcaagcattaaaggaaacaaaatatgggctaggttatgaggttcatatgacctctatcgagccaattgacgctacaacagcatctccccaaatggaagatggaaaccagtcaactgttgatgagttggaggaaattaatattggtacgcctgatgaccctcgaccaatctttattagcgaatatttgtctataaagagtaagaaagagtatcataaatttctttctgctaacagggatgtgtttgcttggtcctatgaagaaatgccaggtttggacccaatggttgcggtgcataaactggttgtaaataaggacgcttgtcctatcaagcaagggcaaagaagatatcgaccggagctccttccaaaaattgaagctgaagttgataaactcatagctgcggatttcattagggaagtaaaataccctaagtgggtttctagcattgtgcctgtgcaaaagaaaaatgggcaaattcgtatatgtgtagattttagagatttgaataaagcgtgcccaaaagacgattttccaattccaatttctgagatactcatagatgccaccatgggatatgaaatattttctttcatggatggtttctctggatataaccaaataaaaatggccccagaggatgaggagttaacgacatttcgaacacccaaaggcatatactgttataaggtgatgccatttggattgaaaaatgcgggcgctacatatcaaagagccatgactatcatactcgaaggtttattatatgatatcgttgagtgctatatagacgatatagtcgtaaaatccaagcatgagcaagagcatttagaaaatttagcaatagtatttaaacgacttaggcaacataagttgaaaatgaaccccatgaagtgcgcttttggagttgcgtcgggcaaattccttggcttcatagtcacaaagcgtggcattgagattgacccagccaaaataaaggcaatcgtaaatatgccacaacctagaaatttgcatgaattaaaaagcctccaaggtcacttggcttatattaggagatttatctcaaatttatccaggagatgcaaacctttttcccgcctgatgaaaaaaggggtcccatttcaatgggaccaagcatgtcaaaatgcgttcgaggatattaaacaatatttaacaaatcctcctgtcctgtgtgccccaatcaaagggcaaccattgatcttatacacagcggccatgcctacctcattaggtgcccttttagcacaaaacaatgacacagggaaggaagtatccctgtactatctcagccgcaccctactggaggcagagtgtaattatcctgacatagaaaaaatatgtttagcacttgtatttgctgcacaaaagcttcgccattatatgttagaacatacggtacaacttgtttcgagagcagaccctctcagatatattttaagtaaaatgacattatcgggtaggttagctaagtgggcgatgttactctcacaatttgacattgtgtttgtgcctcagaaggccattaaaggacaaggattggctaatttcttagctgcacaccctatccctgatgattttcccattgacgatgatttgcctgatgaagaggtttttgccattgagatacctgatcatatatggcagatgtatttcgatggcgcaagtcgaaaatctggcgcaggtgctggggtcgtctttgtgacgcctgatgatggaatcattccatactccttcacattaacctcagcggtttcgaataatgccgccgaatatgaggctctcatcattggcctcgaaatagcccttagtatgggtataagcacactccatgtctacggagattctcaattaatagttaatcaattattgggagtatatactattaaaaaacaaggtcttataccatattttagaaaagcaaaaacgcttatatccatgtttgccgatttaaaagttcagcatgttgtacggaataaaaatgaaaaggcagatgcactagccagtctagctgctagcatgtcactaaatccacatgacacaatggatgtacatgtggaagaacgtagagtccttcctatattggaagaggaagaagacatatcatccatctttgcaacaaatatagaaacttgtgagattgagatgggggattggcgaacgccattcctcgaatatttactccatggatacttgcccctcaattcaaatgagaggtctaggcttaggaaaagatcaattaactacacctgcataaatgatacgctttatcggcgttcaagtgatggcatgctacttcgttgccttgctggagatgaagtgatagaggccttaaaagaagtccatgctggagtgtgcggagcgcatcaatccggacctaaactacattatcaacttaaacatttaggctattattggcctaccatgttcgatgattgcatgaaattcgcgaaaaagtgccatgagtgtcaaatacatggcaactttatacaccaaccacatgaaccattacatcccactaacatgtcctggccatttgaaatgtgggggatggatgtagttggaccgattcacccaccatcatccaaaggacatagatttattttagccgctactgactatttctccaaatgggcagaagctgtggcattaaaagaggtaaaagctgaaaatgtagaaaatttcataagaactaatctcatatatcgatttggtgtgccaagtagaatgatatctgataatgggtcaaattttaggagtaaacaaatcgagaggatgtgtgccaaatttaaaatcaagcatagtttctctactggatataacccgtccgctaatggtcaagcggaagcatttaataaagtgttatgcaaattgcttaaaaagatggtctcacataataagaggcactggcatgaaaagctactagagtcgttgtgggcgtatagagttacgacgcgaacggcaacagggatgaccccctactcccttgtatatgggggagaagttgtcctaccattagaagtacaaatcgcttctttacgagttgccattcaagaaaaactcacagaagaggaagcgacaaaattgcgcttaaaagaattagacaacttggaggaaaagcggcttcatgcattgcaaaacttggaggcataccaagctaggatgtctcgagcttttgataagcgattaaaaagaagatcatttaaacaggggacctggtgctagcagttatccgccccatgaatattactcatcgaataaaaggaaaatttgagcctaaatgggaaggcccgtatgtagtaaaggatgtttattcaagtggtgcatatcgaattatttctgccgacggcgaatattgccctccgccaataaatggaaaattcttaaaacactactatgcttgagtaagaaatattattgcctgcatggagggattatcgccatccattgagaccctcgacaacattcgcaacttagaccgtgtccaagaagttcctcatgaaggtccaatggtgtgatcttctgtggtctgatccagatgatcgatgtggttgggggtatttctccacgtggtgctgggtatacctttggacaggatatataanagcagttcaaccataccaatagcct

SEQ ID NO: 61191 - DNA, 342 bp, Zea mays
  unsure (1)..(342): unsure at all n locations
  Clone ID: MRT4577_155800C.1
tcggcttcagaggggcggcccaccccgggggtgtagataaacctttgggggcggttcccaannccacacctacanaacgcgtacgtcncgctgcaaacgtggaagcggcaggccatcttctccgaccccaacaacctcaccgccgactgggtaggcccgggggtgtgcaactacacgggcgtctactgcgcgccgctcccctccagaggccccccaccacctgagagcccctatcccttcggacaactacaccacaaccacggcgacatctctgccttcctcccgacagagcttggacttctcgccgacctcgccctgctccacctcaacttcaaccaattt

SEQ ID NO: 61192 - DNA, 809 bp, Zea mays
  unsure (1)..(809): unsure at all n locations
  Clone ID: MRT4577_155801C.1
agttgcctctcccctaccctcgccgtctcctctcccacgaagcgcagctcgtcgagatggcctccgaggcggcgaaggtgccggtgccggagtcggtgaacttcaagaggaagaggggagaggtctgggccgccgcgaagaagcagaaggtcgccgacgagaagaagaaggacgcggagaacaccaaggtcatctacgcccgcgccaaggagtacgccggggagtatgaggctcaggacaaggagctggtgcaacttaagcgtgaggcccggatgaagggtgggttctatgtcagtcctgaggcaaagctgctgtttgtcgtccgtatccgtggtatcaatgctatgcacccaaagaccaagaagatcttgcagcttttgcgtttgaggcagatttttaatggtgtgttccttaaggtcaacaaggccaccattaacatgctgcgtcgggttgagccatatgttgcttacgggtaccctaacctcaagagtgtcagggagctgatctacaagagaggttatggaaagctcaacaagcaaaggatccctctgaccaacaacaaagtcatcgaggagggtttggggaagcacaacatcatctgcattgaggaccttgtgcatgggatcttgaccgtcggcccacacttcaaggaggctaacaacttcctgtggccattcaagctcaaggctccgctcggtggcctgaagaagaagaggaacactacgtcgaaggtggtgatgctnggcaccgcgagaactacatcaccagctcgntagaaggatgaactaggttgaatgagcatgataata

SEQ ID NO: 61193 - DNA, 988 bp, Zea mays
  Clone ID: MRT4577_155802C.1
aaaaaaaaaaaaaaaaaaaaaaaaaaaaaaaaaggaaaaaaaaaaaaaaaaaaaaaaaaaaaaggccacggcggggtgcctgctcgggccccgcgcggaggcacaacaagacagagagatacccgatcgccaccgccgaccggactcccctcaaaggcggccacagcacagcgagcatgggagaccggcatcagcatgggcctggcagcggcgtggaggacccggcgacgctgctgcggcgggtgcagacccgcgcgcccaactcgacgcaggtggtggggttcctgacgctgctcgtctctggcgccgtgctgctgctgctgacgggggtgacgctgacgggcgccgtggtggcgctcgtcttcctgggccccatcgcgctgctcaccagccccatctgggtgcccgtcgccgtcgtgatctccgccatcgtcgccgccgcgctctccgcctgcgccttcgccgccgccgcgctccccgtggccacctggatgtaccgctacttcacgggccgccaccccgtgggcgccgaccgggtggactacgcgcgcagccggatcgccgacaccgccagccacgtcaaggactacgcgcgcgagtacggcggatacctgcgcacccgcgccaaggacgccgcgcccggcgcgtaggcgcgcgccgcccggcgtgcatgtgctgcaacccccgtccgtggtgccgctagctataggtcatcattgctgtcgtcgtcgtcgtcttagttcctcttgcattgcgtgtgcgtactctgctccaatcatcccccgcccgtgttgtcaagcaatttctggtcctcttgcttgctttctctaggagatgctgttcatttcgatctcttggcgcaatttgatctttcgcttggtgtaattaggtcattagttaaatcataagagagactcgtgttcgtggtctttctcacaaccttaaaaaaactaattgtttttggaaagtaaaaaagcaaaaacaaacc

SEQ ID NO: 61194 - DNA, 265 bp, Zea mays
  Clone ID: MRT4577_155803C.1
ccggccggaaaacgagccagccagccagccgggtcctcccgcgtagctagcgtaggcgtaggcgtagccgtagcagcgtgtgcgagaggggaagaaatgctggaggggagggcgcgggtggtcgactccgacatgccggctctctccactctcccctccctgcgccgctccctctccgtcgccgctttggagccccggcgctggcgcctcccagccgccgcccaggccgcgcctgaggccgtgcaggttgagttcgttttgcccg

SEQ ID NO: 61195 - DNA, 369 bp, Zea mays
  Clone ID: MRT4577_155804C.1
cactttattttttttttttttttttttttccaaactatacaaagttatataattgaaccaagtaaattactcataatataatttaatttagaggttccactgcgaccagtcatgctcaagaaacaggataacatcgaagtcttactatgattaattaccacatacaggaactgcattgcaggaagtaaatagcgaagggaaaacaaggggtcttaatacaaaacaggcatgaaccgtctaatatagaaaagagtaaaattcaaacgttggctatcctttcttccatgcagctcattcccttcactcagatgggcatgccttttggcacgatctggccctttatccacatgtaaattggcaccagaacat

SEQ ID NO: 61196 - DNA, 268 bp, Zea mays
  unsure (1)..(268): unsure at all n locations
  Clone ID: MRT4577_155805C.1
ctgnaggtngcttccnnnactcgccgggcttccgggactcatcaacttcttctggacgtgaccnttgggtgccgtngagccanccctatggncanacaanggnnaggggncgcgggggagagggccacgcatcgtgccttaatccanctaaacgtgacccgtgnaantgnctntancccanctgntgaggtgggtcgcaancggcnaagnccttttgcgggntgnaaggccccggggaggatgtgntggtgagaagggggtggattgg

SEQ ID NO: 61197 - DNA, 374 bp, Zea mays
  Clone ID: MRT4577_155806C.1
gtcacgaccaattcagtttttaatgtactcttatattttagtggttgttttatgtccatctattgtactggactttgttttccttgaaatatatcagttgtgaggcactattttgagtgtctttataaaaaacacagttatgtgtcatgtgtttctgtgatctacctaaccatattcagaggattgttttatgaaatgcactatttcataagtcatcgtctttgtggagtcactgcaaaagcatggttgctgcttcctatttggttccctgacccgccaacatgtgactgctaatctgcgattaaaccaacccacattccaaggccgttttttgaaaatcacacaggcgcgtgcgttctgtgtttatacacact

SEQ ID NO: 61198 - DNA, 378 bp, Zea mays
  Clone ID: MRT4577_155807C.1
ccggccgggacgacgtgagtcccatttctccttcctccccagttctcttcccacgctctccaacccttgtcgaccgtcgttgtccctgcactagctgctaggatgaagaaaaccagtcctaagaagaagaaaatgaatcctgacttggtctggatttttaatcagtatgtgttagatgaagaaaactgaatgtgtatgtgagtttctgtgtgccgtcggctgcatgtatatgcaaaactgaatatgaatgtattgcttttgttattctttgtatgtctatgcaaaactgaatgccgactgcatgtgtatgcaaaactgaatgaaaaatttatgcaaggttatgctattgccaaaaaaaaaaaaaaaaaaggggcggcc

SEQ ID NO: 61199 - DNA, 497 bp, Zea mays
  Clone ID: MRT4577_155808C.1
ctcgaggccggccgggccgggggtcaaatccacaacaatagaagagcgcccctttctcccctcacccatgcgcacatgaaccaatccaaaacctgcctaaatggagcgattcgtccactcacagtgacaaccgtgaatgcctgccattctactatttggcagagaacatcgccccaagcctacaaggaaggcatgttccctctgcatatactggtgaggactatggcggtcctccccacggggtccccccttagatacacactcgtatgacaccaatcacaccacgtactagctcataactggtgagtgaaaaagggaggtgcattcactggtgaaattagtgctgaaatgctcgtcaaccttgccgatccctggggcattcttgaacactctgaaaggaaagatctactgggacaatcaaatgagtttccatacagacaaggttgcttttgctcggactcccacctaaaggttattgcatccgttcgcgagaccct

SEQ ID NO: 61200 - DNA, 512 bp, Zea mays
  Clone ID: MRT4577_155809C.1
ccggccgggattcgtgtcctggcatccgcagagagcttgttccgtccaggctacaaattatgatgtgccccctcgcgcacaggaagaagatatagaggaggatcgtctccacgaaccgaccgcccgcgagtccacggaaggaaatggccccggtaagcaggtcgccacaaatgcggagagtaagtcggagccgacgaacgctcggtcgagaagaacgcccctcattcacagggccggaaacgtggcgctgcgggtgatccgtaagcactgtaatagcacgctcctgctgagccgcagggtgccctgcctgcgactgtggcgtgagatcgcgcacgacttcaagacagagctccgctgacagatgctcttcgccgctggagctccaacaagacggcgagggctacctcggcgttgtcttataggacataatactctgctgcattgactttaagtgcgatttcatcatgcccgatgacatccagctatgccgtcgaagccgtgtacttcgaaag

SEQ ID NO: 61201 - DNA, 409 bp, Zea mays
  Clone ID: MRT4577_155810C.1
tttcttttcccttttttattttttttttgggtgggttttttttttttttttgttcgttatttcccccacccatggggggacctttggttgaatttaatgcccctccccaaactggccatttaagggggaaaaaaagaacctccctggctgaccccgaccccataaaatggggggataagggggtcccaccctgccctcaaaaaaggggggaaaaagccattggtttgtttccctaacctgccgggtgacgaagggggggtggttaccccctggaagtgccactgaaattccccgcttttcaaagtcctcggccggaggaggaaggcccgggcaaacacttgcgttcctccaaaaaaacatgggtttttttggggagggataattggggccctcgccccacccccaggat

SEQ ID NO: 61202 - DNA, 135 bp, Zea mays
  Clone ID: MRT4577_155811C.1
gcgcctccctcgacatggccaatccacccagagatcgcttccctgacaccagaggccgcgaggctttgcagtcttggtcgcgactgacggacagttgacatgagacgcgagatctactgcacgcgtcgtgtgcga

SEQ ID NO: 61203 - DNA, 145 bp, Zea mays
  Clone ID: MRT4577_155812C.1
tttttacagcaagaaaccaactattatttatgattctattacacataagatttttacagcaagaaaccaactattatttatgattctattacacataagactttttcagttgagccatatgctgaatccaaaacattttggatta

SEQ ID NO: 61204 - DNA, 498 bp, Zea mays
  Clone ID: MRT4577_155813C.1
gggcgttgtttggtaaaaaaggggcaaaaaacaaggaccggggcaggaaacggggaaccagacgcaaaggacagcgcccccccgaggggcgcccaaaaaggcgcccacgcgcacaaacaaaagaggaaagggaccatagagcgggggcaaagccaaaagagggggttgcccggagaaaaacctgagggggggggggatgacaaaggaccccgggggggtgggggggccaagaaaaaaaaacggaaaaaagacccccgcccgaccaacggggacccgcgacgccccccccagaacaacaactgggaaaccccgggaccccaggggaccaaaacatgaaaaagagcagaccgggagaccaccccccggaaaaagccccaaaaaggggcaacccacggggacccccccccccgaaagacaacgccgggggaggatttttgcccccaaacaaggagaaaaaaaccttcttccccggcatcagggggttccccccccccccaa

SEQ ID NO: 61205 - DNA, 242 bp, Zea mays
  Clone ID: MRT4577_155814C.1
cttctttctttttgttgttgttgagaaatttggtgttttctcttctacaactattgagcatctcgtagtgtatttactagaaaaccataaaatgaaatatcttcattgtttactagaaaaccataaatttaacactatatgtggtctcactttttttgtttttttgtaccacatttatgcgtatacctcaagcatatctgttcattttggcatgtgctgcatacatctctgtatattgattg

SEQ ID NO: 61206 - DNA, 485 bp, Zea mays
  Clone ID: MRT4577_155815C.1
ggtgatatgtttttatttattattctgacttatttcattagtgtatctccatcatatcgtctagggccatttctcaacattaacatacggcgatttagaccgagcaagatacaaaattatcacaatgggctttaccaggatcgggggggagggaggcagggaggcagcactgttaaattacatggctggcttgacagggagcactaaatcattttttcttacgacgggaccacataaaagccatcctactcgagccctatggcgcgggagcacctacacaggagcaggataacttaaaaacaacagccaccctctgacaaacgaacaaacacctatggatttggagggggaaaaggaggggaagctttaggtggccgtgttggatacaattgggaacacccatgtatggcgccagggggaaaagctggctaggaccggctattaagggcgacctcaccagctttgagcctggctgtattctcacc

SEQ ID NO: 61207 - DNA, 476 bp, Zea mays
  Clone ID: MRT4577_155816C.1
aaacttctcgtattatcctccccgtgacgctcgacgcgtctcctcctctccttctctaggaagcatctgcacgtcattgcgatggaggaggccaccgacttcctctcgtgcctcctaggctatgatgctgcctatgcggcaaggactgctaaatctatcttcatacatcctataaacccctggaggcgagttgccgcggcacaggggcacatcctctcgactgggagtcatggggatctacagcgactggtagcgaaccgtcaaacgtggagagtacctccgtatggtgcaactccaccttgctatggtacaggtgtagcttccgccggatgcctacgttgataactggcatcccaccagcgacgatcacgtggtaagcagagcaccgctcaaggtacacgctgaaaatacctctaggatctccacacgccgatagggatacagtgtctgcatgtgagagaactggctctgagcat

SEQ ID NO: 61208 - DNA, 466 bp, Zea mays
  Clone ID: MRT4577_155817C.1
attcggctcgagcccactttatgtgatttttatgctaggttctgtttccgattagttggtggcctaccaaactttgccaaggatgatcagacaatcactttgaaatgactgcttctaaataaatgccatgaagattttgaaagaggagaacgagagcaggttgaagcaaatatagcttaccaggaggggggagctaaacaatctgagggtgggagagaggaaaaccggattcgagcacagagacgcatgctatgaaatattgcgctaagtggtgaattgtacaaaaagagaatgcttaccgccagaattatgcctgaatgcataaatgaactgctaggtgagtatcaaaacccagatcaggcaaacctagaggctttgcgcagattcatgagcacgatcggagcgatgatagatcatcccatgacatgcgtccatatggatttttattttgtacttatacataagc

SEQ ID NO: 61209 - DNA, 1500 bp, Zea mays
  Clone ID: MRT4577_155818C.1
cgactggggttcctgcgcacatacctgttctactattgtgtaccaatgctgtggggagcttccttcatagccatgggggtttggttacttgcccaccacaccagctgtcgtctccgaagggacgggcaactacaggctaccgccatcctctaaagctagcttccattcgggtactgctggcatgtccggttggcggccaggttcctccttctacagcctcggttgtattctcttggtgggtttctcagttatcaacggtttctaagttatctacaaccaccattttctccattgagtcaagatcctgaaccatcatcacaggatttctattttgttggtagcagtcagaactttggttctttctccccgacaccagcaccctttagtaaagggactccaccagcgatttcagcagcaggatctaagaaaaatgacattgatgacgacaatgacgtcgaggtcgacaggagtgccacccacgatgaagttagattggcaagtgcttggttgaatcattctaccgacccaattgatggctatgggctatggcaagaagaatgataaattctaggatcaagtttttttttgaaagggagggcaaaagatttgccgctccaatatattagaaaggagatacacttacaagacacgcactcgaagacaaagggaggagaaaagaaagaagaaggccaaaaacaaccgtttattgagcctaatcacaactccgaaactacctggcacaaactaactcaagaaagcacccactagctctttcactaaagaagcgatctgctttgcatttttctgctggttcctgaagatcctgttgtttctctctaaccataggctccaccaaaaatagatcagaagaccatcgaaatttcttctagattgcctattacagagacctcttatatttctccaccaaccatacaacgacacggaagcctggattcctctcaggaaggaacagttccccaatgtcaatattttatcccacacctctctactgaaaggataatctttgcataaatgagataccgtctccaacgctgagttacaaagacagcaaactgggttgcactgtcaatgtctcttctgcaggttgttagcagtcagcactttattatgtaaaagagtccacacacaaaaaaatgttaattctaggatcaagttacagatgacttcaacagcaccaggccagttgaccacaaaagaaatgttaatggactgaaaatgcattggcaagctcctcaaggcgaccaataagccatttgaacaactgctggtcttgtgtccttcaaaagctggtatagtgttcttaaaaagcaaggaagttggatctcagatgatcaaatgatggatgaagcactaaagttaaatagagtagatgtgaatcaagtaagttgggcaaaaaattagttcaaaattactagtaaaaataaaaaaaaatctagtttttttttaaagtataacaaatgtatagttagatttggaaaa

SEQ ID NO: 61210 - DNA, 265 bp, Zea mays
  Clone ID: MRT4577_155819C.1
ctgtggatggcaaggggtagctggtgcttgtactccaccacctgctcgttgatagtacagaccccggtcctcgtggtatgctacacggcatacacgcgtacggccgtgctctcggtgagtacaagacggcatactactgcgacatattccatgagcataggctgaaccaactggtgtgaacactggacacaatcggggtcatgtgacccaaggtgtgcctcaagactcagaactcaactgccatggcctaacttcagcacgagct

SEQ ID NO: 61211 - DNA, 627 bp, Zea mays
  Clone ID: MRT4577_15581C.1
ggggggggggggggggggccacacccaggttacataccgtggggcgggactcgacacggtcaattggacaccaacattgcacggctccccactttacatccttactcccagacccacccgtaacacgcctggacttactcaggccagagttgtgccacacactctatagcccggcgtcagaggactaactctaaccactcgccgcagacccaccccagagttgggaacgttctacttaccttacgaacctagaccagtagacctaagatgctcgaactttcgtccttggtagaggaacagtgtaacacaaggactttccaactctctatcgagaaggaggaaatggagaacattctgataggaacgttcgtcacggaagtaatcaggaacattatgctgaaaacatccgttgcaatttttagtaagaaaccttaagttgttaaaaccgtcgaagtattaactgaccacatcatgaaggaaaagaaacacaacgataacaacattttaattcccgtcgtgcagaacaaccaaattttcctcccttaggtgattcccttgactatgctgtagtagtatatccttcaagagaacatggacgtccaggacgaaaaggtcttgctccaaagg

SEQ ID NO: 61212 - DNA, 594 bp, Zea mays
  Clone ID: MRT4577_155820C.1
tctccccggaggactcgcggagcagcccgtggaagatctcgggcaacgcaatcgctcactccgcgcagtccttctcccgcttcgagttcgacaggatattcggcgaggagtgccgcactgcccaggtctaccaggcccgcatcaagcacattgtcgataacgtggtccgaggggtcaatggcactggttttgcgtatgggcaaactaacagtgggaagaccttcacaatgagaggagcggctaatgaacctggaataataccgcttgcggttcatgacttattccagcgtattcaagagcatatggacagagagtttcttgtgcggatgtcctacatggaaatttacaatgaagatattaatgaccttcttgtgcctgaatatcgaaaattgcagattcatgagagtattgagaaagggatctttgttgctggtttaagggaagaaattgttacatgcgcggaacaggtcatggatttcatgtcttttggagaatcccaccggcatatcggagagacagacatgaatctttatagcagtcgttctcacactatatttcccatggtaatcgagagtagagaaaaagcgatgacat

SEQ ID NO: 61213 - DNA, 644 bp, Zea mays
  unsure (1)..(644): unsure at all n locations
  Clone ID: MRT4577_155821C.1
aaaaaaactcacaacataaatacccaccttactaaacaccttccccaacatacccacctcctcccccttaatttctacmamccccctcatacmccccamtccctacttaaatctccccccccccctattcaccacttatycacctaaccccctctcacacmcaactasaacaatatatatcctccccccattcaactccccatatttaaatccattycatccccatactycatatccacmttaaamatacccamccctttattcccattctacactaacamaatttccccctctctcatattcccaacctccaacttaaaacccccaacctctttaaccttcatccccaacacccttaatactattcccttyttytctccactcccttaaatctccacaatcamcatcttaccaaccactaactcactaaatttattaaacaatttaamcacctcccccaataacaacctctctaaamccataccctacaccamyccattttccttttttcccatcacatmctcaacacttcccatttcacaacaatcanhcaaccccccctccaccaactccaccctccccctcataaamctyctcaccttttttaattctttaaccactttaaattaaccaccaccaaccca

SEQ ID NO: 61214 - DNA, 503 bp, Zea mays
  Clone ID: MRT4577_155822C.1
gggcggaaacaatttttttttgggggttaaaaacaacgggcccaaagggggggggggtaaaaaaggggtccattttaccaacccctcttttgggggggggggggggataatcccgggggggggccaaataaatggccccaaaggaaaagccgggtgggaaaaaaacggggggggcataaaaaaagcttcttcccttggggtatcaaaaaaaaaaaaagggggcctagggacccgcccttccccgtgataaaacttttaagttcctaggggggagctgttgccccaaaaagggcgttaagggtttaaaacccccaaccggggctccttgtttgcaaaaaaatgctgacaaaaaattttttccaacaagatttttgcagggggggaaatactgcccaactttaggggatgaggggggaaaacttttttctaaaaaaaaaccaaggggtccacgaaatccatttggtaaaaaaaaataaggtggggaattaaggggaaaaactttt

SEQ ID NO: 61215 - DNA, 290 bp, Zea mays
  Clone ID: MRT4577_155823C.1
ccgaaaaaaagaaaaataaaataattaaaaaaattttatattacaacaaaaaaaaaaacaaaataagaagactatcataaagcctacgggggcataaaataaaagcttccttccccatgcttccaacttcatacctatgtccacgtgtcacctaattccaattccactgccctaagctattacaacttacatactggaaaaaccttccctttccccaacttaatcactttgcacctaatcaccattcctcaatctgatcttcattgccaaaaaccccaacccaatccccc

SEQ ID NO: 61216 - DNA, 320 bp, Zea mays
  Clone ID: MRT4577_155824C.1
cgattcgaggcggttctttcaacccaggggcagtgatggtgacgaaaaggaacgttggcaaccctttgtaaggcggattttgaaggtaaaaaagtgtttgtgcgcgccgacctcaacgtcccgctcgacgatgcccagaagatcaccgacgacacccgcattcgcgccttcgtccccaccatcaagttcctcctcgagaagggcgccaaggtcattctcgcgacaccaccaacggctgcatgtcgactgggccacactttaatcctgttggcaaagagcatggtgcaccggaagatgaggaccgccatgcccgtgatctg

SEQ ID NO: 61217 - DNA, 288 bp, Zea mays
  unsure (1)..(288): unsure at all n locations
  Clone ID: MRT4577_155825C.1
ttttagtttttatatttagtttnaggggattttgttttttttttttttttttgtggaaccagcccaaacctttcattttaacaatatggggggatccacattgacagttatgacataaacttttttccagcctcaggggagagatgaaaatctggtggggaagggggcataaaacaccaagttttgccctgagacagcccccaacgcaatacggccacgagtttaaacatactcctcttatctgaccactgttcgtcctcaataccatcttttacggctgttgttgac

SEQ ID NO: 61218 - DNA, 448 bp, Zea mays
  Clone ID: MRT4577_155826C.1
ctctctaaaggccgcactaaattgggggcattaatgggggcccagggggggaaaacaaggggaggggggggcatcatccatggggggggggggtacaaacagatcgagaggcagggaagggatagctagctttaggggacggggatcttgccgaccattcctgctcctggggggggctcgcaaaaaaagccggaggggccccgcccggggggggggacgggaaaggccccccccggcgcgttggggaaccccccccgggaaaacttgggggggtcaacccccctcggaaccttttttttgtaaaacacaaatttgggcggaaagcccgcgttgttcttaaaggggagggggcccccggccctgacggggaactgggtgggctcaaaaacaaaccccccgtcgcctgggcccaaaaaaacctcctgggccatggggccccccccggaaa

SEQ ID NO: 61219 - DNA, 208 bp, Zea mays
  Clone ID: MRT4577_155827C.1
gagtccagatgcaagtccaggtttgtcggcgatgctgcgagcggcatgcgggcggctgctcgcgccggggctccgtcggctcggactgggcacatgcacctacggcaaagcagctcctgccatcgggaacggaacggtacggaagaaccctcagctcgaggtatgggacgagtcgctagcaccacaacacaaggccttcgattgcacg

SEQ ID NO: 61220 - DNA, 487 bp, Zea mays
  Clone ID: MRT4577_155828C.1
cctaacccacgcaaggagtcgccgccgaccgagcactccccccttgtgggggcgatggcgccggagcctccacccggctccgctgccgccgccggagaggaactcgctgtggacctggacgccgctacgatcagcaagaagcagcagactgaaggacacaaggaaggcggagaaggcggagcagtgccaacgccagcagcagcagagaggagggacggacgacgcggaggacccgtcacgtggccaactacggcgagggccgcgccgagcagatccaggcaaaggccatctccgggcgctcgagggcccatgatggagacctcgacgactccgctgcgggccgctctgtgcttatccgcggaggcgcgcaggccatacgtccggtcagtacgaagatggatttcggagtgcgtggccagagcatgagcaacgggcaacgcgagctcgtccctagcgccgaccccggcgaacggacgcaccaggggcg

SEQ ID NO: 61221 - DNA, 322 bp, Zea mays
  Clone ID: MRT4577_155829C.1
gtacctcgagccggccgggaacttccaagcaggtgaaggtctagctctattagctagacagggggggaaaaggctccgcttctcgctgctgccgtgaaccattctgcagaccatgctcgccttaagagccacctactaggagccccccgtggcagtctctcacgacaccacctgccgcctccttctccacgaagccgtcccccaatatgtaaacccaattatactacacgatctgcaacagaaggaacgcgaaatgtattccaaatgttaaatccctcggaaatgcaaccatagagactggttcccctctgacttcagcttc

SEQ ID NO: 61222 - DNA, 251 bp, Zea mays
  unsure (1)..(251): unsure at all n locations
  Clone ID: MRT4577_15582C.1
ccggggtcgcgcgtggaggtaggtgagngannaggaagtgangtgtctccttctttcccccgtggtccggnccgtctaaagtcctngattaaaccctaganttggctccccacggaaccgcgcgccccctcccaggcggcgacccccgactcccgggcgcggccacggcgtagtaagggggagtacaatgagcgcgggctccgagcagctgatattggttcagaagcttgagagggtttataggtcagagt

SEQ ID NO: 61223 - DNA, 593 bp, Zea mays
  unsure (1)..(593): unsure at all n locations
  Clone ID: MRT4577_155830C.1
gnaagaggccactgttcaataaaagactgtcatgtggagccctgtccagagagtaaaattccggttggaataaaagctgggcattctaataagtacttgaaaatggcaaacaataccaaagaattagaagtttgtgagcaagctaataaactgggagcaattaacagcacattaagtaatcaaagcaaagaagctttcattgactgggcaagatatgatgattcacgggatcacttttgtgaacttgatgatgagagatctccagctgctcagtatgtagacctattgctgaacccagagcgttacactggctataaagggacctctgcatggagagtgtggaacagcatctatgaagagaactgtttcaagcctcgatctgtttatcgtcctttaaatgcctctggcgcctagccgaggcgaagatgatggagaatcattctacacatggctagaaggtttgtgtctggagaaaagagtcttctataagcttatatcgggacttcatgctagcatcaatttacatctatgcgcaaattatcttttggaagaaacctgnggtaagcccagttggggacctaatattaaagaat

SEQ ID NO: 61224 - DNA, 357 bp, Zea mays
  Clone ID: MRT4577_155831C.1
agcataccaactatcaaaatacatatccaattacactatcaacatcttatcaccagtgcattccaggatttttacccttcttgccctccttgctatctcaccaagctctcctacctctactattattccacaatactcacaacaacacctctctccattcacaacctcattatatcaacacccaactatactatcctacatactacattatatccatcttatcatgcatcttaccctcattaccattaaccctccaacagccatataccctattgcaacaaccatacttaatacacttgaatctccaacaaatctctacacatcaactactacaacacttgctaccaacaatcaatc

SEQ ID NO: 61225 - DNA, 340 bp, Zea mays
  Clone ID: MRT4577_155832C.1
gccattaaggatgtagttaccagattcaacaagaccaatggattcatattgtattggttgacttccgatacccgcttgcatttgcatgtatggttggcagctgtctttgcaaaaaaaaaaaaaaaaaaaaaaaaaaaaaaaaaaaaaaaaaaaaaaaaaaaaaaaaaaaaaaaaaaaaaaaaaaaaaaaaaaaaaaaggacgaacaatctaaaaagatccaaagctaacatacacaaacatgcaacgtcataactttaatataagtgtcacggaaattcaattaaaatggccgtacttttacaaattcgtgcctggaaaaacctatgcgtttcccaactt

SEQ ID NO: 61226 - DNA, 343 bp, Zea mays
  Clone ID: MRT4577_155833C.1
aaaagggttggggccccctttagtaaaacattaacccaaaccctataaaaacaatataactgaaatactaatgtaaaggaaatattttacactataaataatcaaaataaaaaaaaaatccttttataaaatctaacacataaccacaaacatacctaaaattctaaataacaacaaattcaataatgacacaaaaaaacctatatataacaaacaagaaatcaaaagatattaatatccttaaatcaacgcatacaaagggcctattaatagtttccaccgttaatgaaccctaaacaacgcatcatctacttaaaaaccaatattttatcaaatacaaaaa

SEQ ID NO: 61227 - DNA, 684 bp, Zea mays
  Clone ID: MRT4577_155834C.1
tacctcgaggccggccgggagaagaatcaaaagagggcgatctactgcggcttgccgcgtctgcggtgagtacgactactgctgccttcgaccttacgccacctgagcatgcttgcccggaccgtttaccgcggaacactgcccatccatcactactacctgccccatgacgagcgattgctacattggggaaggatgagcaaggccctgttcccttcgccaacatcgccgaatacacgaaaagatctcttggaccacgactacagcttttaccacaaagcttgcgtttgaccgacatgtactaactctgggatgaatctcaacaacactgagagtgagtatcaaagaaaacttcattggtgatataccgacacagactaaaaccgggagacccactgctgaaggcgtctgctatacgcgattcataaagggtcaaccaacaggcccgtgtgtagacgaaggcactatgctgcttctgaacactacgtttggcttcctagatacagatcccaagcatgggaagcttgatctgtgatatggacaagatcggttttccatgcattctaccgttgtactgacttcaacacctttgcctgagatagctgcgactgtcaagacagtgaactgcgcttgaagatgaggtctacaccgacaatactgcagatgctgttaccagatactgct

SEQ ID NO: 61228 - DNA, 1371 bp, Zea mays
  Clone ID: MRT4577_155835C.1
atgcccccaactccaaatcctaaaaacctagccgcctctctacccatcctcaccctcggcggcggtgcctctggcggtggccgaccgccatccaagttcgagtccgcgaccgttgacctcccgacttcagtgattcttcttgcagcagtagatcgaggctccgacgagatggctccaccagatccagaagacggaagtagagaagagaagcgaaccaaagcaagcaagcttcaagaacaaggggagggggaggaggaggccacggggctaccgtccgacgtgccgcgcggccacttcgcggtgtacgtgggcgagcggcggcgccgattcgtggtgcccatcacgctgctggaccgccccgagttccggtacctgctgcggcgcgccaaggaggagttcgggttcacgagcgccggcggcgccctcgtcctcccctgcgaggaggtcgccttctgctccctcacctccgcgctcgcctgcgcccgccccaggccggcaccgccctccgaccgcgaccctctgggcaccagcgacatcactgccgaggagaccgccgcgtggttcccggacaccctcgacgacccgctggagaaggacctgtacacgcagctctggtacagcacgatcgccgacgccgccccgcaacacgagggcacgttccccggccctacctcgcatccttcgccgccactgccacccgttgggagcagcaacgtcgagtctagctgggccggcgacatctgctcgaccttctgcgacaacaaccaggtgcccaggacgtcgacagggatcagggggaaggacgcggcattgcagtcgaatgtgccaagcggtgccggcgcgcacgacggcacatcgtcatccgcgttattggctgctgctgatgtagagaagaagggaccgaatcaaagaaaagatgcttgtgttgcaagagctgatcccacactgcaacaaggtgcaagtcccttgaatactgaaattcaggtgccattgatcattgtcaatgttgggagatctactgaaattcattttagtatgggaaattttctattttgtcttatgggcgacatgagctacacgctgcaccaccatgaagttgttggaaagcacctctccattgttcaggtgaacgaaaagacctccattgcaaggatctatcttgccaatgcgcttcatatgataatagagatgactgatgagcaaatgatagcatttattgtacaccgtgtcacagcatcagctgtttttctgacagctttcccatcgctcccgaggaagtatgttaaggctctgctccatacctgggctagaggacgaggtgcaatgcctcttgtttcttttatgttccttcgagacttgtcattcaagtag

SEQ ID NO: 61229 - DNA, 241 bp, Zea mays
  Clone ID: MRT4577_155836C.1
ctcccaggggccaagtccgacccccatcggagcttataaagcgcacatatgggaggttttgttttgcacaagatcgatcacagctagctagctgcagcacagagagagataaatagatagatatagctcgatcggagcaactggtgtgtgaggcgatcatggcgtttctactcggctatatgttaaccggcggcagcagccggtcggctgcggcggtgaggcagctgatgctatcgaggtt

SEQ ID NO: 61230 - DNA, 241 bp, Zea mays
  Clone ID: MRT4577_155837C.1
cccacgcgtccgcccacgcgtccgtgagaaggtgcctcagtctactcctatgtcgatcccaagctccctggaagctgtcacagcaacgccaagatcaatcaaggaattgcctaagttgaattctaatgtcaagcaaagtgtaatggcttcaaagctaccaaatgcagggcatgtagctcaaaatttgactaacaatgcacccccgacggactatccggaaacagcttcatcagcaacttca

SEQ ID NO: 61231 - DNA, 629 bp, Zea mays
  Clone ID: MRT4577_155838C.1
ccctccgaggctcggccgggacacggcgccatgtcttcccggcggccgtcgcatccgtccaccggaatcacggcgattcccgtccgcctgctatcttctagtactcacccttgccctcctcgtcgtctctgccgctgccaagtcctcccgccgccccatctccgacaacgagatccggcagaagaaggaggcctgctacaccgacgtcgagaacgggctgtggggatgggtgtgcaggtactcgccgacggagaaggagaactgcgtgttgcgctgcctctcgccggagtgctacgacctcatatacggcggggatccgcttgaggaaggggagttggactatgttcgaggccaggagtacaagtattgtatgcacaaatcatcccttggagaaagcttggatggtgtgaagggatccttcagctactcatgaaggaatgagaagaaaaaggttctgttagtctgctgtaaattttatttacaatcttgaacagacatgcatctttttagataatggaactgtaattccagactttgctttttctcaaagcatcaccggtgcatcatcttatactaggtctatgtcccgtgcgttgccacgagagaaaaaaaaaaaaaaaaaagcggcc

SEQ ID NO: 61232 - DNA, 723 bp, Zea mays
  Clone ID: MRT4577_155839C.1
tcgaggccggccgggacggtgccatgtcttcccggcggccgtcgcatccgtcccaccggaatccacggcgattcccgtccgcctgctatcttctagtactcacccttgccctcctcgtcgtctccgccgccgccaagtcctcccgccgccccatctccgtacgtctccccgcctgacccgaccctgccatctctcctccgcccgcctctctagtctctatccatcccatcgcgcttaccgaactccgtggcgcaggacaacgagatccggcagaagaaggaggcctgctacaccgacgtcgagaacgggctgtggggatgggtgtgcaggtactcgccgacggagaaggagaactgcgtgctgcgctgcctctcgccggagtgctacgacctcatatacggcggggatccgcttgaggaaggggagttggactatgttcgaagccaggagtacaagtattgtatgcacaaatcatcccttggagaaagcttggatggtgtgaagggatccttcagctactcatgaaggaatgagaagaaaaaggttctgttagtctgctgtaaattttatttacaatcttgaacagacatgcatctttttagataatggaattgtaattccagactttgctttttctcaaagcatcaccggtgcatcatcttatattaaacttacaaatgcaaattaaacattggattcatttgttggccaaaaaaagcggcc

SEQ ID NO: 61233 - DNA, 345 bp, Zea mays
  Clone ID: MRT4577_15583C.1
cctcgaagccggccgggccgggtcctactctcatctccagatatatcggcgtatacatcaaacgctgcaatgtatggacgtttgtaagctagcgagaataatgtgcatccctagcgcgccacctccgagtgtcactcctcccgcgtcgcagtcccagcagcacagcgcctgggtagcgcggggactctggcaccaaccaaacggacgactaatcgcagcgaaaccagcggagtgaaatgctctgctgacgtgactgctcatgtgagaccaatgattagtaggagcgctgatgcggcgaaggtcgaagtatgaggacaagaggctgttcttcaagtaccaggaacg

SEQ ID NO: 61234 - DNA, 431 bp, Zea mays
  Clone ID: MRT4577_155840C.1
attcggctcgagtttgaggtcaaatctattttttgcttgtggttatcggggttacctttattctgttgttgcttttttttgatttgttgctttgaatcagttttgatgaatatggtttcagagtggtgaagccaatttgcagagcaaaggggccagataagtggcgatctttgcattgaaggttggcgacaacaaaaatgcagttctccgtgccgctcagattttcatctgttctgtgatggcctcgaacaagctgctacattatctcttatctgtgataacctactccctatgtgcttgaataaatcaatccatagagctgtcataagtcaatctttttttggtggattgatctcccctgttttgtgttaatgttcgagttaaccgctaactacttactgacatgtgcgagtcaaccagctgcattctcc

SEQ ID NO: 61235 - DNA, 188 bp, Zea mays
  Clone ID: MRT4577_155841C.1
gacggtggagatcccagcagcccaagcttaatagccctccccctcaacctcaccattgtgaagcacctactatgtgctgggtgcctcccacacttgctggggctcacggggcctccaacccatttaatcaccatgggaaactgttgtgggcgctgcttccaggataaggagactgaggcttagagaga

SEQ ID NO: 61236 - DNA, 315 bp, Zea mays
  Clone ID: MRT4577_155842C.1
gaactgaacaggccagatgctgaccaaggaggacatttagagcgccacgaacgataatgggctgccattctcacctgacagatctgatgctgtcaagacggcatacagcgactttcctgaaatcaaacatcgagatgtgccacaactactggcgcataatctgaatggaaagcatgagcccagggactatagagctgctcctgattaaccaaaggacgctactcaatgtagctttgacacttatgtgaagaatcatattggagcatagaaagaaggaggcaagactggacggcatgaagatcgaaagctaactac

SEQ ID NO: 61237 - DNA, 803 bp, Zea mays
  unsure (1)..(803): unsure at all n locations
  Clone ID: MRT4577_155843C.1
gtctgtgtgaccctttgcttgcgcgcgctgtgggcaacagcgcagacggcctctcgccctctcctatatatataccagtcgacttgctcacgcatcagcgtcactctcccatccccgcccccaaggcacggacagagaaagatctaagcgccgcggcgaacggcaacatatatgatggtgaagaacccaagcagcaatggagttctcacggcgaccgccttctccgacagcaaaaccaggccggagcgcggcgtaggtggcgaggcggcggggaggccgtacaggggggtgcggatgcggagctgggggtcgtgggtgtcggagatcagggcgcccaaccagaagcgccggatctggctcggctcctacgccacgcccgaggccgcggcgcgcgcctacgacgccgctctgctctgcctcaagggctccaacgccgtcctcaacttccccgccgcatcctcctcctcctcctcatcctcctccacatccgcttcctcgtcccaccagcgtgctgacagccgcggccacccggacgacgacccagctgctgccggcggcgacatgtcaccgaggtccatccagcgcgccgcggcggcggctgccgcggcaatcgacgacgacgccggcatgggcgccagcgccgctgacgacaggtgctcctccagcgccggcgcgacgaccccgacgtctgcctctctgtcgacgcagggcagcaccgccgatcacgtcggccaggagcagcacgcgacgacaacatncgccgcggccagcaccggctcgccgcccgaggggaaggaggagct

SEQ ID NO: 61238 - DNA, 275 bp, Zea mays
  Clone ID: MRT4577_155844C.1
gcgtgcgtgaagatatgcaccttgcaggtcaccgtgtactgtctctaatacatcaacatggaccggcactcaaagtgtcatggcgccactctctcacgctgctcgttgatgcttgcttccgctgcaatccggctgccgatgccgcttatacagtgctcagtctctctatagatcgcagctcgctgcactgcaaacagctgtaacagcagccgcttgcagccaaccgaacacgccctttcatacttattcaatatcacaagtctgtcctgagatct

SEQ ID NO: 61239 - DNA, 906 bp, Zea mays
  Clone ID: MRT4577_155845C.1
tatataaatttagagggcacgtacaacgctaaaatgtcgaaagcagctcactagattcagcttctctacatgacagactatacacatacggcgagagagagcaaatacgtatagtacgtatgttcctccatgacgcaaagcacacaggactcttttgccgccactcggtttcttcctaattgtgtgtagcgctagagcaaacacgttcctccatgccgcctatagctcgcatggcatgtcgtcaaggcggcgatgccgtgtacgtcttcttgcattgtgcgttgtgtccactcactgtaccccttctcgatcactggtcatcttcgccgtccttgagtagattgcagatgtccgagcactccaccaagcagtactgccggcttcggaaggtgtccttgaacaccaccaggggcctccggatgttgaaggggccggcgacgcccggcgcgccgtagccgccgaggacgcaggtgctgacgcacttggacgtgcagcgcgccgcgcgctccgacttggggtgccggatccggttcgcctcgccctgccgcccgccgccgtccgagcccgacagcgtcggcgggaggttgcacagcggcgccggcgccggcgcgggaggaggagtagcggcggacgacaccgccagcgccgccgccagcgcgaccaccgccggcgcctgcagcagccgcagccgcagcctcaggacgccgccgccgggcctattgctagttggcctgctggccagctgggtcgccccgccgccgctggcgggcttcggcggcggccgcatcttttggatggccgcaagttgccgcggcaggagcggagaagatgggagctgctgcctgctgctgaggaagccgagacagcctcacgaggcgcgcgctgacgtggccctcgtgccgaatt

SEQ ID NO: 61240 - DNA, 215 bp, Zea mays
  Clone ID: MRT4577_155846C.1
gggcacatacaccgcccacgagaaccgaccccgctaccctcgctccttcactctatcgctgacactgggtgacccgtggcctccaggcttgactccagctaagggccagcggcgaggcgacagccctagagcagcgcggcgcggaaccatagatggggagacgaatggaggccccctcctcgacggcgtcccacgctgacggactcctcctcggc

SEQ ID NO: 61241 - DNA, 304 bp, Zea mays
  Clone ID: MRT4577_155847C.1
atcgtgtttttttaagacccgcggcgacccaatggaggctcatcaggtcatgcgggggttaccaataactgcttgcaaacatcacaggatctagaaatgtaggaacagaagcataaccccttctcccactccttgtaatatgcattatcggacttttctcatctttccccaagcactcaatgtctacctcgtgcatttcatactgttcaacgattctggcatgaacaaatattactagatacaaacattatctctttctgaccatctactggcccttcaatgcatggaatattaaggagattac

SEQ ID NO: 61242 - DNA, 403 bp, Zea mays
  unsure (1)..(403): unsure at all n locations
  Clone ID: MRT4577_155848C.1
tttgggctgctttatgtgcttgagagttcatagacgccggactctcctagacccttaagcactatggacgacggcactgaggccgccagtaaggagtagaatcttctctaccgagtctagaacgtgagaaaacttgaaaactggggacgttctcgcgacggtctccgtccttacgtaaacagacggcggaattcatggcagcattccgtagtcgtcggactcccccgatcgcggcgggaccatattttccgtagtatgccggcccaagaaattccatccgttcagaccgtggcggtcgggaaccataggcagtcngaacagggccacggcggacgtatcgctctgaagttggctacctccatacacggtccgttgcggcagagaaaccaggatcacgtctcgg

SEQ ID NO: 61243 - DNA, 795 bp, Zea mays
  Clone ID: MRT4577_155849C.1
tgtgcttgaaaagactaccttcagttgtgttgagcattaagcattgtcgcagtcggttgctgaaaaaaaaaaaaaaaaaaaaaaaaaaaaaaaaaaaaatcacagctctcaatcccaatctcccatcacaaaaccaatcctcctccgcgccccgagccccaagagcatcacctgcaagcaatggacgtctcaggcaccggagctggcgctaagggcaagaaaggcgcggccggacgcaaggctggcggccccaggaagaagtcggtgacgcggtccgtcaaggccgggctccagttccccgtcggccgcatcgggcgctacctcaagaagggccgctacgcccagcgcgtcggcaccggcgcccccgtttaccttgccgccgtcctcgagtacctcgccgccgagctgctggagctcgccgggaacgccgccaaggacaacaagaagagccgcatcatcccgcgccacctgctgctcgccgtcaggaacgacgaggagctcggaaagctgctggccggcgtcaccatcgcgcacggtggcgtgatcccgaagatcaacccggtgctcctccccaagaggaccgcggagaaggagggctaggagcccaagtctcccaagaaagcgaccaagtcccccaagaagaccaccaaggcttaatcgacgcgttccatgtcgtagtgttcttcgtagtggtccggtggtgttcctgtagttgtgttgttttatcttgttgtgtgcatgtttaatggaagaatgtcagaaatttctctgacttgcccaaaaattgcggcgtgc

SEQ ID NO: 61244 - DNA, 332 bp, Zea mays
  Clone ID: MRT4577_15584C.1
cggcggacgcccttatttttttttcaccggatcggttcaatcgagagcgaggcacaaagggaggaggagcgccgagggtgcccgacattgtgccgcttaggagccagatagtggtatgagctgctatactcaccgtctttcaatacgactgaaggacgtcgccaggacagacttctagtgtgcgtctacttacttttgattcccatacgtaccagcagttttaatttaaggtgtaataattgtcgtcgcactctcttatgaactgcgctcgcctttgcctgttcatgtcactgttccactttctcccgcctctctatctcaatcacttccta

SEQ ID NO: 61245 - DNA, 773 bp, Zea mays
  Clone ID: MRT4577_155850C.1
aattcggcacgagggaagaagtattcgtcaactgttgccacgatatttactggcctagcttctgctgcatttttggggcataccttgaccattaattttctcctgggcatatcagtggtgtttatttcaatgcaccaggtaaactgaccttttattattacttgttgacctttgttgtattgtatgtcatgtatcttactatcttttgtccttagttcttctctccacttgctaaagtcaaagatgacaaaccagctgacttaatagagttggaagacacacaaaatcaccggtaagttttcatctcgcttcaaatcaaatgctattaaaatattacttcaatacttggtttacttttcacttaacattggccttagaaaaagtgttgctatagctttggcatgtgtttttgggaatcctgttaatgttgttatagaaattacaagctgtttgttgagtttcttttaagatgtggcttaatgttgcttatttgtcacaggtcatccgaatcttcttttgtaaatatgactgctggtgctgctgttgatgtaagtatctcatttttctattttagaatagacgtgtgtcattttagaggttacatctgtgttggcttccatttcaggcgagccatcggattggaactgatgagaggcaacccctgttgcctacatgaactagtttcttgaggtatacatagattcttgtctaatgacgtttcccagttggcagtttgccatgggtatgtagcatagctatatggcatagtttgg

SEQ ID NO: 61246 - DNA, 759 bp, Zea mays
  Clone ID: MRT4577_155851C.1
cggccgcgtgggcgggaaccggatgaacgtcgggacggcgcggggcggcgccatggccttcaagctggacactctgctcaagctcgccgacgtcaagggcaccgacgggaagaccacgctgctgcacttcgtggtccaggagatggttcgctcccagaagccacccgcgcgcgctgcggaggggccggacatcgtgacggggctcgccgccgagctcaacaacgtcaggaagacggcgaccgtcgacctggacgtgctcaccacctcggtgtcgagcctctcgagcggcctgtcccggatcaaggcgctagtggggacggaccagctgctggcaggcgacgagaggggccagcgcttcgtcgccttcatggccccgttcgtcagccaggccgaggaggtgatccgggagctggaggatgacgagcgccgggtcctggcgcacgtcagggacatcaccgagtactaccacggcgacgtcggcaaggaggaagccagcccgcttcggatcttcgtcatcgtcagggacttcttggcgatgctggatagggtgtccaaggaggtgaggggagccaggggttgccacggatcaaaccaaacgctgccctgaacagcttgtgaccgatactgcagaaacggtgagagaacaacactgtaattcttggacttgggaagttagacatgtattcgttgtagttcagaaacatctctcacgtcttcgttttcacctttcattcgtcaatagcgtaccttaacgaccac

SEQ ID NO: 61247 - DNA, 291 bp, Zea mays
  Clone ID: MRT4577_155852C.1
ttccttccacaacgccgacccggctcagcaccacgccttgtttccgacgctcctcctcgccgtacgccgcctgccgttccccggcgtgcaccggacgcgcgcgctccccggccccgacgtgctgacccctctcgcccgccgccttgaggggctcgcgtacgcggcgacctcccacccggtgctggagccgctcttcggcgcccactcacacctcttttactttttccaaggcaggatgcggctggtggcggcgcggcgtgcgacggtgctgttcggggggcactgtttcgc

SEQ ID NO: 61248 - DNA, 443 bp, Zea mays
  Clone ID: MRT4577_155853C.1
gcgtccggaggcaagggtggcttctcatcccagcgccatcacggcaagtcacagtcccatgtggctttcgagaacacatctaccaatgttgccgcctcgcaaatgcgcaatgcgctcaacaggcgggccgacaccgtcaccgaccccgccgaggggaggtacttcgagacggaaatggacaacttcttcgctctgttccgacgatacctcaatgacaaggccaagggtactgccattgactggaaccgcatcgctcctcccaaggccgaccaggtcgtcagctacgatgacttggccaacaccgaggctgtctaatattttttttttttggcggtcgttaatcttaacggtggtctcggtacctccatgggttgccttggccccaagtccgtcatccaggtccctcaacgtatgtccttcttggacttgtcaatgcgccaaat

SEQ ID NO: 61249 - DNA, 455 bp, Zea mays
  Clone ID: MRT4577_155854C.1
ttttttttttttttttacgaaattaggtgggccattgatattttagcagactgaatattagttgcaccaataataaggggctattcatgaatctgtaaaatctagaaaatttgaactgaagaaagcaaaactggaacaatgtcgcctaaactcggaagcctggtgtccctcaacgtgttgaatgtcacatacaaccagatctcaggtctaatttcgacgacggtcccaaattgagcagtctctatgagctgaacctggcacagaattacctatctggcctgatcccttcggatatcggcaagctgcaggagttgcagagcctgctagacctgagcagaacaatctcagtaggcacatccctgaaaggtcacactaaaaaaatctagaaccacacagcaactagtcaagaaaagaattgtcccactatagaatcagaccaggatgcagtcttaaac

SEQ ID NO: 61250 - DNA, 944 bp, Zea mays
  Clone ID: MRT4577_155855C.1
gaaacctccaccccgtccaaaaccccaccgcagccatggttcgccgactcttcctccaccacgcacgccggcgcctccactctggcaccgcctcctccattcccctttctaccccaatcttcgccatttttggtgccaacaccggcgtcggcaagaccctcgtgtccgcgggcctagccactgcgctcctctcctccccctcccctgccgtctcgtccgtcgcctacctcaagccgctccagactggctaccccgttgactccgacgcgagcttcgtcttcagcaggacccccgcgctgctccgcgccttccctccctgccgagccacccacctcatcgcctcatgccgcaccttcttccaatcacctgccgtggaggccaaggcggaatcccttcacgagagccaggagaaggtggtgacctacggagcgggtgccgcggagcagacgaaggtgctcgcgtgctgcacggcgtacgcgtggcgggagccggtgtcgccgcacctggcagcagagagggaaggaatggcggcgggggatgatgaggtcaagggttgcgtcgaacagtggctgctggaggaaggcattggggagggtggggaggtgtggaagatactggaaactgctggtggcgttgccagccccagtgcctcgggtacgctgcagtgcgacctctaccggccttttaggttacctgctattcttgttggagatggccgtcttggtggtatttcatccactttgtctgcgtatgaaactttgttgctaagagggtatgatgtgagcgcagttattttggaagatcgtgagttatcaaatgacaaattcttgctttcttacttgagaaacagggtacatgtgcttattttgccacaaattcctgaagatcctttagatgacctgactgattggttttctgagtcatcctcaatttttatttttctt

SEQ ID NO: 61251 - DNA, 313 bp, Zea mays
  Clone ID: MRT4577_155856C.1
atccggcaactttttgggggtttcacgcaaaccccatcatattcaaagacgcctcaggggacaattccaggacggcctatacatataaccattccaaactttacaagggcacactacgctgaaattatattaggcgcaaaccacaccatcattgacgatggccgcaaagagcaccacaccacgaaataactacttcacaccatcctgttgctaaaaaaaaatccactccctcctgtcctgcgcagaaaggatgacaccattattacccacgtgcaccccaccacgaaaaacagaacctaacattagaaagtgc

SEQ ID NO: 61252 - DNA, 538 bp, Zea mays
  Clone ID: MRT4577_155857C.1
gggtttttgggtttttttaaaatttttttttttttttttttttttttttttttttttttttttttttttttttttttttttttttttttttttttttttttttttttttttacaaaaaaaaaaaagacaacccctacatttccctatgggggggggggggcaaaatcctttcccttttttaaaacacctttattttattttgtttaaaaaaaaaaaaagggaaaaaaaacccaatctccgaacaaaaaacccttttttttccaaaaaacccccaaggaaaaaaaaacccatcccaacccactgttttaatttaaagcggcggggttggcaaaaaagtaaccctccccacccttaaaaaaggggggaaaaaactccttggccttgggaaacttttccttaacctccacccccggaaacagtttttaaaggaattaaaccttaaacaacctccccccgccgggcgggggctccaccttgatttgcaaactcccccttttaaagggaaacccaattccccctcccttaaaaaacgggtttt

SEQ ID NO: 61253 - DNA, 409 bp, Zea mays
  Clone ID: MRT4577_155858C.1
actctcatgacttaggtacctcggcagcagcgcgccatgggcacccacgcagcttgtcggcgtcttgcgcatgcctaccagcgcccaggaatggacagcacgtactgcgtgcagcatgaggtggacttcgcccacttcttcggcctcaggccaggatcttgctccgagagcactgccgggagggaggtctgcttgaacaccgccttggagaccatgtctgggccaaggccctgcagagaacgctgggagaacgccctctgaggcagaacatgaaggtcgcacatcaacgcttgaggccagctaggccgacacacttcctcctgctctgccagcagacgagatgactcccaccacgacgcctagcaccatcatccacatcacaagggtcaggaacgcgtactaccttttc

SEQ ID NO: 61254 - DNA, 431 bp, Zea mays
  Clone ID: MRT4577_155859C.1
cataaatgtcgtgtctagcgggcgactgcaaaaactcgggtcgctgtatactgagctgggctgtacattactgcggccgcggagtccgagattcttgatctcgggtacatggcacggaagagaagatccctgagtcgccgccaagagccagtactctcatctccgacgcttcaggacttgctgagtaatggaacgccgacggttctgacgacgatgctgagcactgagagcctcatacgcaagagccgctgatctatggcgagactgaggagcacttcacttgatgtgatgaaagggtggaaaggcatgatgacatggaccctcaacaaagtggtctgacaggcatcgatgatgatggtgcagagaatccatgtgcatggcaacacagaggaacagcgcgagcttgtacagggctcgatgtggtgcaccag

SEQ ID NO: 61255 - DNA, 198 bp, Zea mays
  unsure (1)..(198): unsure at all n locations
  Clone ID: MRT4577_15585C.1
ttnnnnnncccagttctttgtttagtatttaattgagtattatacatccatacagaatacatatacaatgatcatcatcactattcactatccatatctaggtatgggttctcgatggcttattgaagctctaaattctccaaagtatgttagtcatgtgggctttgacggaccttaattaaatactgagtctatatt

SEQ ID NO: 61256 - DNA, 312 bp, Zea mays
  Clone ID: MRT4577_155860C.1
cgctgtttaattccttgtggatcgactagagagctggtagttgcctgctagctagctgggggcagctagcaaagcaggcatgccgtaccaagaccattgtaccaatcgtataacggaacaggaagcacgactaactaagcagtactggcgatgtcaggccgcaccggcgacttcctcctgcagatcactgaaagacacgttttcatcatctgctatcggaatctgcgtgtgccccgggtcccatgcttcctcttacagccattcatccccggcgtcatcttcgacgccgacgaaaccatcctcaacattatc

SEQ ID NO: 61257 - DNA, 291 bp, Zea mays
  Clone ID: MRT4577_155861C.1
atgaggggtgaggttggcggcggaagttgtgccggtgaggaaatccagagacccgagctaccaattctccagtacgcgtttacggaaacctccaccgtatcccggcgaagctcccccaacatccgccaaagaccgagcggtggcgcgcacccgaccaactcgattaggtcccaacggcggctttcgcggcggcgcactccctccttatcttctctgcttgccgccatggcacatgtcgtaggttttcctctcgtgatgaaccgtggtggagttggccaagggtggtcctag

SEQ ID NO: 61258 - DNA, 318 bp, Zea mays
  Clone ID: MRT4577_155862C.1
gggtggttttttttaaatgtatgtggttttctcttcagctcccagtaacgaaacactagcccccaccaatcgccataaaaacaccaaggtacgcgaagcccaaagcagagcgaaggattcaacggcccacaaaaggggaacacaaaaaaacaatcatagaaaccacgcacagcaatcacgcatccaaacgcacggaaaaggggctggatgcaatagctcaaaaaccaccaaccatttacaaaaacaccaagttaatcccaaacacaaacagcgcggagaacaagaaacgccctacagcaaccccgaatcataagaacg

SEQ ID NO: 61259 - DNA, 161 bp, Zea mays
  Clone ID: MRT4577_155863C.1
ctcggctagtagtctgtacagaatcagtatgtcagtgataacatgtagcgcgcgggacccgctcttgcgcagggtgatcaagagcaagatattgatgatgttcaacgagatccaggtgatcatcagagagctccagagcttgtgggtcctcgacctcaaca

SEQ ID NO: 61260 - DNA, 265 bp, Zea mays
  Clone ID: MRT4577_155864C.1
tcataaacaagtttattatgtgtttttttaaaccaacaaaatgaaatctttgtcttttattttactgtctttacttttaatagcaccaatttggagtcagcgatctttaccttcaaaatgtaaatgtgtacctttggccgtttgctcccgatcgccgaattttcagccacgctctacattcaataaaaatcaatgtccacgccatcaagtttgctgtcctttcccgcaaatagttgattcagttgaggaagatgagtctgaagtt

SEQ ID NO: 61261 - DNA, 221 bp, Zea mays
  Clone ID: MRT4577_155865C.1
cgttcccatggacatcgatctcttccccgacatcgaccttgacggcctgctcgcctccttctccggcgaccccgccgccgtctccggcctcatcatcccgtccacgcctccgccaacgccgtcgacggcgcacgatgcgcaggcagtgtcgccggattctgtgacctcccggacgaacccactcgatgaggtggcgctctcagagatcgagaggctcctga

SEQ ID NO: 61262 - DNA, 383 bp, Zea mays
  Clone ID: MRT4577_155866C.1
accacgcatccgaccacgcgtcagcggacgcgtgggcggacgagtgagacgactcgtgagtggcggccgggatggtggacgcgatggtagtctcgacaattctggcaggtagtcttctaaaggggtgcctcaactcgggagacgggtcacctccttcgccgtcctctgctccataaagaggatcaataccgagatgccctacgggattggaggtgggattaccgttgacgtgaacgtcaacgggaaaaacggcaagggaaagggcatggtaaaattcgtctacaagtacggcgcgaacttcgacgggtacatcccaatctataacgaagatcactggtctgataacggggatgtcaacgtcgatgtaaacagtgggcttaaga

SEQ ID NO: 61263 - DNA, 303 bp, Zea mays
  Clone ID: MRT4577_155867C.1
gggagccaagggaagctctcttctttcttcctgctcctcggactctcgaattccgactcttgtctctgacctactcgctcggcttccccggctcttgagaggggaaagaggaggcggcgcctaggagagggatggtgagggtccccaggttcacagagtgggaggtcaccataatgggcggaatggcctatccaagctgcgtaggagccatgcgaaccgtctttgtcatgcaggcacacgggcccggctatctgaactaatgaagccactgcaaggctgcctgtagactatgacaggtgctcg

SEQ ID NO: 61264 - DNA, 811 bp, Zea mays
  Clone ID: MRT4577_155868C.1
ggccggccgggaaaaaaaaaaaaaaaaaaaaaaaaaaaaaacaaagtgtacaaagtttaccgtgccaacggagactgaccgaacttctacgctatgccccgaccctgctgatagataaactattcatctggttgagccaggctggccctatttattccaatggagactagactagcgttagctgaaagataggatttcaaagataggtgttccccatgatagcagtacctttctccctttcgtggtggaatggaccgcgagtaaactgagccttccgtacacagtgagacggccttttcgagacaagtcagaaagctcttaagtccagtaagctaagcaaagctttccgttggactagcaatatcggatgaaggaagcagcggtgaacggagtcaagctattggctggttctagcccacacgagatgtaggtcctgattccctgaaccggaagataatgagcatcgcggtaagagagagtctactcgacttgagaatcgttgatagacaaatcatgcccggcaaaggaataggactagtggaagtacccgatctcatagtggactcgcaatcacctcctaatggtattatcaccagggctgcactgcaagagaattcattccattgagctgatgggaggaactcctgttggttgtttcgaagtcaaggatgcggccagggttgttagaaaataaataggcaaagaagtagagccgtcttttgcatggaataggcgaaaacccttgttccttcttctagctcgggaagcagtttattagcgaggaaagacaagcctctgcttctgttgatgc

SEQ ID NO: 61265 - DNA, 727 bp, Zea mays
  Clone ID: MRT4577_155869C.1
ttttggcagccatatatagtctctagattattgcattgttagttgttacacattagcaaggcagcattaccacttctctctcgctcattgccaacgattaaccagtgacattaattgcatatccttgtttgaagatcgccggcgtccggcgagatgggcttcaaccctcccgtgccgcagcaggacagcaactgggagatccgagtggcggtgcaggtgagcctcctcctccaggtgttcctcatcttcgtgggccccatgcgcaagcgttcctcctccccgttcccccgcttcgtcgtctggtcctgctacctcctcgccgactgggtcgccgacctcgccctcggcctcctcctcaacaacatgggcaacatcggcggaggaggcagctcctcgtccagctccagcttcggcctcaagcgcggcggcacgggcgccactgccggcaacaacgacgcaagcagcagcagcagccccatcatcttcgccttctggacgccgttcctgctgctccacctgggcggcccggacaccatcaccgcctactcgctggaggacaacgagctgtggctccgccacctcatcggcctcctcttcgagctcttctccgcctgcgtcatcttcttctgctccctgcgcggcaaccccatgatccccgccaccgtgctcatgttcgtcgtcggcgtcatcaagtacgccgagcgcacctactccctctactccggac

SEQ ID NO: 61266 - DNA, 625 bp, Zea mays
  Clone ID: MRT4577_15586C.1
atcacctcatcttctctccttttgctcggaaccacacacagcccggtctccgatctccgatcccttcgtcgatccaagatgctgatcttcgtcaagaccctcactggaaagactatcaccctcgaggtgtaggcttctgacaccattgacaacgtcagggccaagatccaggacaaggagggcatccccccggaccagcagaggatcatctttgctggcaagcagctctaggacgggcgcacacttgccgactacatacatcgcagaaggagagcaccctccaccttgttctccgcctcagaggatgcatgcagatcttcgtgaagaccctcactgtaaagactatcaccctcgaggcggagtcttctgacaccatcgacaacgtcaagggcaagatccaggacaaggagggaatccctccagagcagcagcggctcatttatgccggaaagcagctcgaggacggacgcacgctggacgactacaacagtcagaaggagagcaccctccacttggtgctgcgtctcaggcgcggtatgcagatcttcgtgaagactctgaccggcaagactatcactcttgaggtcgagtcttctgataccatggataatgatcaggacgagat

SEQ ID NO: 61267 - DNA, 3031 bp, Zea mays
  Clone ID: MRT4577_155870C.1
cttgacactaggtgctatcaccctcagccggcatggtgaagggcttgagggtctgttaatactgaggtatctatttgggctcccttctgatcctagtggttccttggaatcatctggtgagagtccaagtgagattgagttattcatgaagacatatgaagagaagatatgccagggcattgaaaattcagcgactgctgttggaaagactcttttacgcaagctactgaattcgatcaaattactacgctcaattcttgagaattctggtcaatccgcagatacagttcagatggttcttgaagaaggcactgactcactgtctgaaattgctcgctctgttgttatgacagctcatcttatgccatccctagccaatgtgtcagtaaatgatgaatctccttttctcttctctaatatgtggaaggttattgttgattcagaagagcctcttgactgccaagagggtgaatttgcaaagaggctagtttgggagttgcctgattcttctcttgatagacaactagcacctggccaatctgccaggaggaaattagcactgggagagagtgcaagtaggcgtgtaagggataatcaactgcctgaacccactgggcagttctcacgaggtttaaatacatccaatgcttcttcgggacatacacgcagagacactttccgtcagcggaaacctaacacaagtagaccaccttcaatgcatgtagatgactatgttgcaagagagagaaacatagatggtgcaagtagtgcgtcaaatattgtgaactctaccccacgaggaacacttagtggaaggcctccatccattcatgttgatgaatttatggcaaggcagagagaacgtcaaaatcatgcgccagccccaactggagatgcacctcaagctaaaagtcagacaacaagtttagatgacagtcttcgtactaagccagagaacttgcgtcaacccaagactgatctcgatgatgatcaagaaattgaaattgtctttgatgaggaatcaggttcggatgataaacttcctttccctcaaccagatgatagtctccaatctccacctgtcattattggggaaaattctcctggtcctgttattgacgagacagaaaatcaggagaatgaaagagttccctttttccagagggccacatctatcccgaaggacgatgaaaatcttggcattggcatttcttcccagactgcaatgctctcagaagctaacagttctttggaactgaaacattcagtttctagcccagggaagaattcttttcgtgatcatgctgaagagtctaattatgattctattggtgtatctgggagaccatctttacaagcagatcatcaacaattatctcgtagacatgaaaagagaagtccacgaaaattttctgagacttctctgtcaaatggattccatgggcgtgagcatagacattccaataaccatccacctctgccaccaatgccacctccaatttcatccgtgtccatgcaaaatactgattcagttaataggcagtcatcttcgttcagtgctcgagatcgaccaacacctaatccttctggttatcctacacaatcttttgactctagtatgcctagtgctttcacaggccttcagggtcaaactcaatacatgcttgcaggcgctggcagttcatcagcgaatgagttacccaatgtggaggccaagcttctatggaacacatttccagcaaataggatccctctggagaccttcagctcaggtttacctgctcggccgatgccaccccttacaccttattcagctgttgctactcagcacgctacgatgaactctggctctcctgcaaacctgtatagccagggcagtgttgtccagccttctccaactgcttctattattagtgattcaaatttggccatgaactccgcatctggcagcatgcttgcatcgaatctgctgccatcatttgcatcacaatttctgatgagcaggccttcaatgcctactccgttttttggcacgcctcttcaacaagttcaattctcatccggtcttccacaaaatatttctaaccctcagccacctgtctcaatacaaccacggccacccccacccccaccacccccgcagcagccacatccttctcagacactccaacaacttggtgctatccaattaccacaccaagatcagcagcactcatatccccatagtgctatcttgccacaagttacgttgcagtttcctaaccagctacccattcctcaagtacaattgtatcatcaaagccagcaggaatctgggcaaacactgaggcaagttggtgaacaatcacaacttcagaaccagggtatgcaagcagatagtttctctcaacagcagcaagactcagggatcaacttaaaccagttcttttcatctccagaagccattcagagtctacttagtgatcgtgagaagctctgccaacttttagagcagaatccaaaacttatgcaaatgctccaggatcgcattggccagttgtagtcgcactggaggtgctattgtgaaagtgaaatctgatgctggtcgatcgctaggttcctagagtatggtgttgttttgttttcggctatggctgtagctagatgaaagcaactgccagcttgctagtcgccgaaatgtattcctatgtacattatatgtaactttgttctgtaatgtgaaaatttgtaatgttagtgcgtatctaatttatagttttaagtttacctttagtggttagatcgtgtgacatgcgcagcgacgggaaaacgacgccgccttttgtctgcaaaggcatttgacgctaactacctgtagagttctgaatatcctgttgcactcttgtgtgtatctggttgctttaatgctcgaaaatgaatatcctaaggttttgcattcgtatgcaatcataagcaatcctacgcttccgttcctattttgaacagcatggggttttatatgatatataaataaaaatcaatattggaggga

SEQ ID NO: 61268 - DNA, 491 bp, Zea mays
  Clone ID: MRT4577_155871C.1
cccaacaaaaaattaaatcatccgggttcatctccaactgttcaacggaacttttttgggatagctaaggactgaaaaaactgaaaaagaaaaaatccaggggaaaaaaaaaagggcattacaaaataagccgtgccgaggtattccaaaaacacattcccaacaaactacgtggcccatagctttggtcagtaaggaaaaagcacccaagcagctagaaccgggccaccaaaaatttccatgtgatgggccccccttaatcctaaccttgctggtttccggggggggcagcagcgtcttggtccccaaaaatacccttggggaagccggaaaccatgaggggaaggccctcacccagggggatcttcggctccccccccagaaaccccttggcgcggctgaaggcgggcttgcccttgggcgggtcagcctgggtgttcttgcggaactcgatccctgccgtggggccaatggggtccgggaaaaccttg

SEQ ID NO: 61269 - DNA, 568 bp, Zea mays
  Clone ID: MRT4577_155872C.1
ctacagcaggtttcaggcaacaccctttaagaggagcctttcttttcttaagtctatagcagagttctcaagaattccagttgtggttacaaaccaagtacgcagccagagtaatgatgatggttaccatttttcctttgaagtggacagaaaggatggtagtaactgtgctgaaaggtttgattctcatcttgttgctgcactagggattcagtgggctcatgctgtaactgtccgtctagtctttgaatcccattcaggccacaggttcattaaggtggcaaaatcacctatgtctccggcagtagcatttccattcgctgttgagtcatcaggtattacattactaagtgacgagagcattgatgtgacaggtcctgatatcacctcaattcgttgtcaagggcaaaacgttctggcctgataacaatttgaatgctactgtggctactgaaaaagtgtaatcttgctctttgttgtctactggacaatatgaatatatttaatttaatttcagcgcactctcctcaaagttcagtagtagtcttgcttctgtatcctgttttct

SEQ ID NO: 61270 - DNA, 675 bp, Zea mays
  unsure (1)..(675): unsure at all n locations
  Clone ID: MRT4577_155873C.1
gccggccgggtcggactctcgaaatcgtagtcccctgttccattctcaggcgtggtcaatcccttcacgagatccacagccgctgagtgagaagaagagatgggcggtaatgactatggcccggatatcgatatcgatgctcgagacgacggactcttgcgtcggggagtggaagcactaccgttacaagatcattgtcaactaccagggaaccgacaccacgccctcgtgcgtcaacttcaccgacttcgagcgcctcatcgctagatgctggcaaaaaccgggcccgaatgaagcccataaacagcgtttttgatgacaagcgtctcattcacagtgcaggcatacgtgatggagtatgtccacagtgatatcatgctggggccctgtcaggtgatttctggagctggtgagaagccaatgattgctgctcagcacaaaggagaggagaagcatcttgtatgtgaagagatctcctctatggatcttatcaagatgcgtgagattgctgaagctgaccttggtagcacgatcaagaatgctgtggtcacagtccctgactacttcaatgactcacagaggcaggccacaaaggatagctgngatgattgctggccttaatgtgctgcgtatcatcaacgagccaacagctgcagctatcgcctatggtcttga

SEQ ID NO: 61271 - DNA, 435 bp, Zea mays
  Clone ID: MRT4577_155874C.1
aattcggcacgagggtacggtagaatcgaacatgaaattcttccgcctccgcccgccggtcgccagagcccggagggagagcgctgcgaagcagcggtagctggggaccgggggctcagcttcatcatttcccaaagcccccgagctagcagagggagtggtgcgaggtagatcgaatggggggaattaggtcatggatgcgagggtctcattggacgatttggttcttcaaacaagaagaacatcaccatacttaagaatgtcaatggtatcctcaagccatccaggatgacacttcttcttgggcctccatcctcagggaagagcacactcatgcgggcactcgccggcaagcttgacaaaaatctcaaggtctctgggagcattacgtattgtggccatccactttcatagttctatcctgagaggactagc

SEQ ID NO: 61272 - DNA, 564 bp, Zea mays
  Clone ID: MRT4577_155875C.1
gtctccgaactccgtaaccgctccccttcaccgagtggaggatggttctcgtggacttgaggaaccatggcagatcggctgggatcaagggctcggcccaccccacaacatatctactgccgccaaggacctcgctgatttagtgaaggcccgtggttggccatggccggatgttgttgtgggtcactccatgggtggaaaagtcgctctagatttcgcggagagctgctctcgcggtgtgtatggagattctgctaatcttcccaaacaggtgagaggagccactattagtttttttggcaagatttaatcaaagaaaggttcaaagattgttttgctttctgtaacttaaaatgtatggtaactgtttttctgtggagaactggaatttcatgcttctatatatagtttaacacttagtgcatttgtttttattttttcttcgaatttgaatctgaatcacagtatggttagataattcctttgctgtttctgccatgaatgtacaactgtcctattctttacttctcatcctttgttttagtatcaccatgtatagttcat

SEQ ID NO: 61273 - DNA, 701 bp, Zea mays
  unsure (1)..(701): unsure at all n locations
  Clone ID: MRT4577_155876C.1
ctctccactgcctctacgtcatctcccactccccgtccgcctcccgctcgcctcctgcgccgccggatgcccgcgctcgcctcctcgggcctcgtcgccgccgcctcccgcttccgctccgtcccaggtcgcggccgacatcgtcagctacaacatcttcctcgctggcctctccgagtagggacacgggaggctcgcgacgctcgtgctctgggggatgtgcaagcacggcgtgccctgggacggagtcaccatgagcacaacgctcgtggggctgtgcaggaccaaacttatcgacgaggccgcgacattggcggagatgctggtccgaggccgaggaattgatggcttgggtgtggtgggatggaatgctctcattgacggctactgtaaagtctaggacatggccgcaacattggtgatggtggagaggatgactgcacaagggctggcgcttgatgtggnggggtacaataccctgagtgccgggttttgccactccggtgatgctgatgttttatgggaggtagcagagaggatgaaggcggatggagtggagccgagtgtgggcacacacactgcactcattggggagtgttgtaagatgaagcagatcgagggaggcgttcactctgtacgagggtatgggcaggggatgagcagaaagatgaggctattcggagggaacttgcttcctatac

SEQ ID NO: 61274 - DNA, 509 bp, Zea mays
  Clone ID: MRT4577_155877C.1
aattcggcacgaggaactagtctcgagttttttttttatttttttttatttttttttttttttttttttttttttttttttttttttttttttttttttttttttttttgtttttttttttttgggggagggcaaaaaaaaaaagcaggaaagggagggaaaaaaaaaacccccgcgcgggggaaaaaaaaacccacggaaaaaaaaaacccccaaaacaagggccccccaaaaaaaccgggagccccccccccccccaaaaaaaaattgggggggcaaaaacccaaaccccccaaaagggacccttcacccctaaacgccccgaccggagaaaaacaccccccccccgtttgggcccccggggggggggaaaaaaaaaaaaaccagggggaggccgggggccccccaaagggtttccccggccccccgggaaactttgggcccttcccggggcccatctttccacccgctggggaaaaacccccaccggtgtttcccggcggggcccc

SEQ ID NO: 61275 - DNA, 464 bp, Zea mays
  Clone ID: MRT4577_155878C.1
ataaaactgcatgcccgtgtttattggcaaaatgtcatgaccataataaaagcggggcggccggatgcatggggggacgtcgacaacccagttcatgagtcctcgaacgacagacgacgacttttaggaacgatggccggccatgctagctggggggtccacacagttcggggcccgtccccgtacatggggggcattattgcatgtaggggaaacctttagtagtccatatttagcgaccggccacaacgtcaatccttattaatttaattaaaggccgatatagctagcttgctaaatcctaaagcctacctagctagcactccctgaggcacttgcactggcccatgatgccgccaaatttgcccccgccgtaaccctcctgaaagcacacctgcgcccagttggggtcggacatgcaaacccccttgaagcccgcgctccggggccgggacacccccccc

SEQ ID NO: 61276 - DNA, 293 bp, Zea mays
  Clone ID: MRT4577_155879C.1
tggttgcatgggcgcgaagcgaggcgtgccgcacaggtttgttcgagagctcttacactggccctcctacaggagggtgggcgaatttcccatgccctgcaacgctatggcggctggcttagttaccgatggtaacatggtgatcctgctgtaggtgtgccaacagatgggctgggggggcgtcaccgccctgttgacagacagggacgacgcgaggggagcaccggtcgtggcgaaactcacagggctggagctctccgatgtcctgttgcacgccatggactttactgacg

SEQ ID NO: 61277 - DNA, 430 bp, Zea mays
  Clone ID: MRT4577_15587C.1
aaaaaaaaaaaaataaaaaaaaaaaaaaataaaaaaaaaaaaataaaaaaaaaacaaaaagagaaaaaataaaaagtaaataaaacaaaaaataacaaaaaaactggttctcccctttaaaggtctcagatttacttccccttacttcctacgcattctcttttttttattgccacataaatctatttacctggcccttttttaacaccttctcatttggaaaaaccctggttttacccaattatattgcttttaaaactattcctttttctcctattaccctaatactgaaaaaccctttcccgatcgatattcccaacattttggccccctaaatgcctaatgtgacgccccttttcacctcatattaatcccatggatccttcactttacacctaaccttaccatttcctttgccttctccttatac

SEQ ID NO: 61278 - DNA, 399 bp, Zea mays
  Clone ID: MRT4577_155880C.1
aagaaccccttcccttaacaaggggtgggaaggaattttaataaaggaagtacttggcccagcccctttaaaaagggggtttaccggtctttacaggggaattaacttaaaccttaaacgggtagtttaacccttttccttgtggttaaaaatttccaatccttttccatttccggaaaccgccaaagaaaaattgttttaaaagtaacattacccccacccaccgaataagttaatgtccacttcggggtcgttaaccctaccccctttcttttcaaagggaaaaaacaaaacggccagcccgaaaagaaaaattacaacctcaaaaaggaggatcgccgtcttttgttggcagttgtcccccagggcaacagcaacaagtggccaaaggatgccccc

SEQ ID NO: 61279 - DNA, 274 bp, Zea mays
  Clone ID: MRT4577_155881C.1
ctgttaggtttttatccaaaatgtttcatccaaatgtgtatgctgatggtagcatatgtttagatatccttcagaatcgatggagtccaacatatgatgtatctacaattgaaaacatcaattcagtctctgctggatgaaccgaatcctaacagtccagccaatagccaggcagcacagctttatcaggaaaacaaacgagaatatgagaaaagagtttcgaccattgttgaacaaagctggaatgattcataatagacaactggtctgttaa

SEQ ID NO: 61280 - DNA, 718 bp, Zea mays
  Clone ID: MRT4577_155882C.1
ctttcgccaccatctcgctctccgacgactgctgtatcgcccccctgtctctctgcaacgactgttgggccgccgccgccctacgccagtcgccaggtgtcgacaccttcgtcggtatctttaccggcgacgagcacgcaccaggttctagtcataaatattggaagatctttattggtaattccagctatgtgccctgcctttattggagattcttcagggtgatgatagatgccaattcatcattctctggaggtgctcagttgcagccaagtacaagcatgaatacttattccttcatgcctgctccatcgtccccaatatcattttcatcaaataacatctctggctcttcagtcattgatggctccattgtgcagcaaagtccaccccaagaccaggcgcaaaagcagaggtcttcaagtctaacatcacatcctattattgaggctggtggtgcattgcatgctccaaagaaattaagaattgatgttaggcaagatgaactgcagcaacagctgattcagcgtctgctccatggtcagggttctcttcatctccaggggcaacagaacccacagcttcaagctttgatccagcagcataatctggcacatatgcagcagaggcagcagcagctgctgcaatcatttgctcagacacaaccatctcaaattggcattcctcatcagcctcagcttccgccatcactagcaca

SEQ ID NO: 61281 - DNA, 552 bp, Zea mays
  Clone ID: MRT4577_155883C.1
ggccgcctcaccatcggtgctcgccgcgctgtccgagccggcgaacgcgctctcgctgcccacctgggccgtccacgtctccagcgtcgccgagtgggtgacggcgatgtggctggtttgggactacggcgagaagacggggctcaagggttggaaaggcctctcgtgggggatggttccacttctaggtggagcaatgtgtgcttgcacgtggcatttcttctacaattcagagtctcttgaagtaagatatttcctttgggttaaaagtgcagtttcgtgtttgttgtttgctgatatgattatcaaacgtatctgtccccaatttttatgttcttgattgtgagatgccattgtgttcctgctatgaatgaaacattgattagtgtagaccagcgactattttcagatattcttttcgctgagatccttatgcagtcatgttttactacttcttatgatgacataattattacacatgttaacccttcggagttttcatgaaaatagacaaaagtacaacccaacatttgaaacagatcttctgctcgt

SEQ ID NO: 61282 - DNA, 685 bp, Zea mays
  unsure (1)..(685): unsure at all n locations
  Clone ID: MRT4577_155884C.1
atctatgaactaaaccatcggtccttgcacgcgtcgcactggaaacacaacacccgtcagttgttgctccacgcatgacaatcgatgccattggccgtcgtggccgcgccagacgccgtggatgcctagaacatggcgttgacgggctagagcctgtagtatgccggcagcttgcggcaaccagagtgcgccacacagtgttagtgttacacaatagaatgtcaacagagtttaaaatattcccgaaatatggacagaaacccgtaataactgggaaatcatctacacgggagttctgaaccaaaacccaaagaatccccttctctgtttaacttgtgggatgccggttggggaccaattcctcacacgattgaccttgtgtcgcatgattccactgcatttgcgccggaggccatagagagcactgcacttttaagcctccaccggatgctcgaaagaatctgacgttgctcgaagagctcgaagtgcgcggcgatccacacggtgcccagcggctcttctgcatgaggaccgtgtgcgagtagaatatcatctgtgatcccctccaggtcaccgataaaatgaaactacttgcatgcaaagctgcgaggccagcggtctccacgctcgcagcggttcccggtgacgcagcaaggggcaccgncgctgaagccatcccggccgg

SEQ ID NO: 61283 - DNA, 548 bp, Zea mays
  Clone ID: MRT4577_155885C.1
tcgcgatctagaactagaaaaaaaaaaaaaaaaaaaaaaaaaaaaaaaaaaaaaaaaaaaaaaaaaaaaaaaaaaaaaaaaaaaaaaaaaaaaaaataaaaaaaaaaaaaaaaaaaaaaaaaaaaaaacgggcccctgggtggccccggggttttcgggccgggccctgggaggttcccactttttccttttggggggcgtttttagacttggccgaattgcgggccgagggggttccctgggaaaaattgttttccgctcactttccccccctccttccggccggaatgttaaaggggaaaccccggggggccctaaggggggccctaacaaacttttttggttttggcctcctggccggttttcctttggaaaaccttgacgggcaacttctttttttaattcgcccaccgcccgggaaagggcgttttgtttttgggccccctgggtgtttttttttttaccaagtgaaaggggaaagagtttttcgcctttacccgccgggccctgaatgatttgtagaaggggtccactcttgttttccccaa

SEQ ID NO: 61284 - DNA, 381 bp, Zea mays
  Clone ID: MRT4577_155886C.1
gggaaaaaaccgggggtttaaaaggaaaaggaaaggggccattggcgggctccatttgaaaaaacaaaaggccgaaattacgggggcatgggaaacccaattattagcttccatttagggtagctggggggggacccccccaagcccatttttgggggggggaaaaaatttttgggccccgggggggcttttgatttttgggggaggggaaaaaacggcaagggggctaaaaaacttgccggggaaccccttgggggtttgtttttccccctggggcttggaaacaaaaacggccttgagggccaaaccaagggaggaggcccggggggggggggctttttggaaaaacggccacccctttttgtaaaaaaacgggttggg

SEQ ID NO: 61285 - DNA, 450 bp, Zea mays
  Clone ID: MRT4577_155887C.1
cggactcgtgggaaaaaaaaaaaaaaaaaaaaaaaaaaaaaaaaaaaaaaaaaaaaaaaaagggaaaaaaaaaaaaaaaaataaaaaaaaaaaaaaaaaaaggatgaacatttttaaagtttccttttttacttactcttatttactaacatattaatttttttttaatgtcccttaatttaaattccttgcccttatttttataactttttttctggaaaatccttgtttttcccctttttattttccttgaaacattttcacttttcgccttttggattatttgctaagagtttttgaccattggcttttgccatcatttgcccatttttattgggtatttgtacgcgctatttatagtttttttaatccctttggttttgctttttacccctatttttaccttttcttttgttagttccttatctccttctctttttattttcttcc

SEQ ID NO: 61286 - DNA, 395 bp, Zea mays
  Clone ID: MRT4577_155888C.1
gaaacacatttaaagccttgtttggctacacttatacccacctaaaaacatattttatcgttttatagggggttgggttaagaaaataactttttttcataaaaataaaccccccaacatggattgggggggcacaagagcacattttcccaccaatttaaatttcccagtattccctagcacacaaattcttttggaaaacattctgtgaacaaaattgcaactgtttcacggtacaagcaaaaccaatttaatttaattcttttccgccaacctaattttttcagcctttattttaaaatacattttgccaggtgtgaaacccaaaattagattttaaagcgatttccgtgcatatcttttattaacaaaggatccaattttttgggtttttt

SEQ ID NO: 61287 - DNA, 685 bp, Zea mays
  Clone ID: MRT4577_155889C.1
agcagtggtaacaacgcagagtacggggcagatgataattcctgcattattatttatatttcatatatgcattcttctttatcatctgtcgagcttacgaaggtctcttccttcataatcttcttaaccttcgtccggaattcattatatctgaagggatataacgtactgaaggacgaaggatcttaacatttaacactttttatgttgccttgttcttaactcttagcatttaagaacaagtccccaacagatgcatggtgtttttgaactgatatcatcatcttagcagttttcttcgttgttttcttggtctgtttgtgttatttgataatatatcaaacttgttttatttgaatgtaaatgatttgggctgatatcttgcttcaatatcatctatgttttgttgtcttggatattgttactttatcttcataatttaccgctatcatttgtccttctcatattgatgttaggtagttccagttgacgatgtgtgaatcaggcaatcagcgcccttgtgcagctttgctccatggtgaatttaaattattttattttgcccaactgattctgagtttgtggaaaataccaacatacgagaacttagtttggtcaattatggcaattcatttatatcactgcttggtatgtctgctatcctcggggcttggttctctgggag

SEQ ID NO: 61288 - DNA, 369 bp, Zea mays
  Clone ID: MRT4577_15588C.1
cttaccccaaaaataaaactttataagggttcaagccatactggtgcaaaagagttttgggtccaacatagaggacacaacagggccattaaaccaacgaagccccaaccacgatttatgacacacaaaccacagatgtttattagacgacgacatccatatagagggacaccagagggcaccagacgacgcaaatacccaggtacaggagcagcttaaatgaaccatgggttactgaccaccggggtgggggagcaccagggggggagggccctccttctggatgttgtaatctgctagggggcggccatcctccagctggttgccggcgaaaatcaaaccctgctggtctggggggatgccctcttt

SEQ ID NO: 61289 - DNA, 380 bp, Zea mays
  Clone ID: MRT4577_155890C.1
ccggtgcaacccggtgcgcgtggagggcgcccgctccgtggccgtgcgccggtgccgttcggccgacgcgaagcgcgcgggcgctgtgggcattttttaatgaaagggccccgttcgcgttctttgcgctggggagatgttcgtgggccgatgccgggaggccaacatagagtgggtgcgcctacgttaacgtggccggttgacgcggcgagcgcgttgactggtgcggaaaacttaccctgggaaggtggggttccgtcgacaatagtttttgaggagccaaacgcatattatttttttttttactccaccgagggcggctgaagcatcgtcgccgtgcgccgtggcaaggtcagcatggcgaaactgaaccagcagat

SEQ ID NO: 61290 - DNA, 329 bp, Zea mays
  unsure (1)..(329): unsure at all n locations
  Clone ID: MRT4577_155891C.1
attccantgttcatcggctgagaggnncgtaggaattatatccttcttgctcancagtngatgatacgcccgngcagatgccaacacagcagccattcaagcaatcctatacaaccgtatcggcgatannggtntcatcctcgccttagcatgatttanccnacactccaactcatgaganccacnacaaatagcccntctaaacgctaatccaagcctcaccncatnattaggcctctcctagcagcagcaggcantcannccattagnctccaccctgatccttcagcatgaagcccacccatncncctatncatcactaaaatgta

SEQ ID NO: 61291 - DNA, 309 bp, Zea mays
  Clone ID: MRT4577_155892C.1
atcggagtgaagggggtggaggtgcgcaagccggagcagctcctcggcatcgactcgctcatcatcccctgtggcgagagcaccaccatggccaagctcgccaactaccacaacctggcagccgctgcgttggattgttggtgacggtcgtcctccaccgacaattatgcccgctggcgtgatcaggtcttgcttggtctcaaacagtatgccgtcatcgaccacatcttgtctgaccgcccgtcagacaccgagtaatactaggatcagatggacaacatcgccgtctgctggatcctggcaccatct

SEQ ID NO: 61292 - DNA, 293 bp, Zea mays
  unsure (1)..(293): unsure at all n locations
  Clone ID: MRT4577_155893C.1
acgcggacgcgtgggcgcgagcgccgncctttttttttttttttaatnnnngnnccgcgatcttccatccactttctttctctccaaaaaaaaggaaacagctagaatcttatcttcgaatcgaaagaacgaaggaaatgccaggtctagacgatcacacctcctgtcacggtaccagttcactcctagatcgactaagctgctgatgcacggcgacagagcaagcaagcgaggcaggcaggcactcagtcattcactccctgtgcttgaggtcaacgacgatgatgctgacg

SEQ ID NO: 61293 - DNA, 1469 bp, Zea mays
  Clone ID: MRT4577_155894C.1
cacgaccttctaggaatcacttggcggccagcgctcctggccgcattcaagatagacgaagagggagctggagagatgtgccaggagctgaagaggagagtgcagggagttccaatatttccagtttgcgccggatgactcagatccacagggcaaaaattttgagaaaaatgactgttgaaggatgactcagatccacagggcaaaaattttgagaaaaatgcctgttgaatgagactctattgtttttctttctcatgacactaactcatatgagtgggcggggattagatctgcaaatattgttgtctctggctattcctttcttgttggcagaaatcctatagggtgtgtttcaaaaaaaaacataaaagagcagaaatactataggggttgtttctaaaagaaaaaaaaaagaattttgggaggatgaagacgagtttgacatggatgaggaggaagaagaggatgagaaggaagaacaagatgtgcaatattgtgttgctgagatgacgaaacctgggcagcggttaatcatagcacgaggaggcaaaggtggactggggaatgcttttgtcatgaaggagatgcggccatccaaagcaaacagacatgagaagatagcccgtttgagtactgggcagccaggaactgagagcatccttatcctctcactgaagggcatggcagatgttggtctggttgggttgcccaatgctgggaagagcacattgctcagtgctctctctagggcgcacccagagatcgccgactatgagttcaccacgctgaggcccaacattggtagcctgatctacgaggactacttctcggttaaagtggctgatatacctggactgatcaaaggagcacatgagaaccgtggcctgggtcatgctttcctaaggcacatagagcgcaccaaagttatcgcctatgtgcttgaccttgcagccacacttaatggcaggaaaggtgtcccaccttgggagcagctgcacgatttggtcgcagagctggagcattaccaagaaggaatgactcggcggccatcactgattgtcgcaaacaagatagacgaagagggagctgaagagatgtgccaggagctgaagaggagagtgcagggagttccaatatttccagtttgcgccatcttgcaagagggggtgccagatctgagagtgggtctaaggaaccttatggatgactcagatccacagggcaaaaattttgagaaaaatgactgttgaatgagattctattttttttctttctcatgacactaacacatatgagtgtgcggggattagatctgcaaatattgatgactctggctattcctttctgaaagagcagatgacaataattgaacatttgtaatcttatcattcttgtgaaagagcagaaatactatagggtttgtttcagggcagcagcagcagaaaaaaaaaaaaaaaaaagcggcc

SEQ ID NO: 61294 - DNA, 118 bp, Zea mays
  Clone ID: MRT4577_155895C.1
ggacgagacccgccgcgccagcttgaacaatgctgagcgctggctgctggaccacactgacgccaacatcatgtccatgcagaagggcaacaacgacgatctgagccaacagcgcgcc

SEQ ID NO: 61295 - DNA, 643 bp, Zea mays
  Clone ID: MRT4577_155896C.1
agttaaagtggctgatatacctggcctgatcaaaggagcacatgagaaccgtggcctgggccatgctttctggaggcacatagagcgcaccaaagttattgcctatgtgcttgaccttgcagccacacttaatggcaggaagggtatcccgccttgggagcagctgcacgatttggtcacagagctggagcattaccaaaaaggaatgactcggcggccatcactgattgtggcaaacaagatagacgaagagggagctgaagagatgtacgaggagctgaagaggagagtgcagggtgttccaatatttccagtttgcgccatcttgcaggagggggtgccagatctgagagtgggtctaaggaaccttatggatgactcagatccgcagggcgttgattttgaggaaaacgactgttgaatgaggttcgatcttttttctctcctcatgacactgacgcatatgagtgtgttgtggatatttcttctgagaatcaggggcttatatggatagcgattagatctgcaaaggttgatgactctgtggctattcctttcttcttgttgtgttaattacaacaattaaaagtttgcaatgtttctcggatccttcctgtagaaaagcaaccttatggagtagcta

SEQ ID NO: 61296 - DNA, 444 bp, Zea mays
  Clone ID: MRT4577_155897C.1
ggacctttgggctgatttatgtgcttggatgttcagtcccggagattcgaattacccgactagcgtaataacgagcggagcgatcggtcggtcttgtcctttcggatagtcgaatctggattcgtgtaagtctgtagctaattcgaccttgcctttctgttcgtatcctcccacggctggtcccgtgttatctattctgtgcggtctgtagtagcattgcgtctctatcgctttcgagtcaatttagtagacgcgggacgttaagaatacgacgcgcgtcgtcgatttgtgctacggttgtcactctatagtactcgttacgccttgcggaaagacgagtattaaggaggcggatgagtaaacgactaacgcttagaataagaatctgcttcatcctgcggagcggacttttaataacgcgaagcttagcgcccgcgacacttt

SEQ ID NO: 61297 - DNA, 421 bp, Zea mays
  Clone ID: MRT4577_155898C.1
ggaacccccccctcctcggagttattttttttttttttctttgatttcttttttttgtttaaacagcccaaagcttcggttctccaaggccgagaccacggtatatttataatacatgttcggggctgcaacaataatataaaataacacccttggtgacaacaaagttatatttgaaaactaagaaattacaggatgccaccttactcttgctaatggcacatacagaactgccgagcatatgcgtatggttagagaacaaaagttgacaggatccagctgcaactaactcgattggatgggggaagaatgatgcgctattgagcattgtcgaggtcacattgcactagagtgtacaattatgttagtattcaattcgagttgagctgctcatccttattagcagaaaaaaattctaatt

SEQ ID NO: 61298 - DNA, 230 bp, Zea mays
  Clone ID: MRT4577_155899C.1
attcggctcgagcccccgccctcccccacgtttcttaacacccgaaccgccaacacggccacgggggcgattgccaacccgagggggagcacccggccagcgcacaccaggcgtcgccgaagtacccgacaccacacctgaggttgcccccctagtgagacacgcagggacgaccagcaacccaacccttggaggacgccctccccactaccaccctataacccaaccgc

SEQ ID NO: 61299 - DNA, 664 bp, Zea mays
  Clone ID: MRT4577_15589C.1
ctgcaaccccagctctctctcccgcattcccttttctcccccgcccgcaatccgagctctcccttcctccttcccactctccccgccccccctctgcccgcaatcccacgctcgcgccgtcgatgactcgccccaggaaatctcgcctccgcaacctcctccacgcaccgtcaatggaaggtccacccccacgtcgtctatggaaggcccacgtcgaatggaagggcctcctcctgcgcctccctttcgctatcttccccggcctctgattcgccctttctgttgtgtgtttcctggggcgaggcattgaaggtggcaggtgctcgccattgaaggtgctcgcgtcccgaacttgcatacgcagctagaaggcggttttgaatcagtttttgattttacggcaaggtccaagactttcaccgtcctcttcagcagcagtacaaaaagtgattttaccttttgtctctgtgtcttgtttttattctagaatttgtagcaaatgaagaaggacgaggacacccatccccttgtttgtaacaatggagtgtttcagtgcaaaaatgcaatccagaagtgtttttaaatgtttttataattcctcgaaaagaaagaacaccaggacacaaactcattatgccatttcaatacagttcgtttaagcttt

SEQ ID NO: 61300 - DNA, 522 bp, Zea mays
  Clone ID: MRT4577_1558C.1
gcccaacataccttttttttgaattcagcacaaaaccacacaacatgcatccggcaattcacccggagagcagaaaaatggcggaaaagaccgatttttttgccctataaactactagccgcggaaactcatttgtgcctattgtacaccgcgatcacatatctcagggacactggatgccgtccggactcattatacatgaggcgcgggcatgctgatgctgctgcgcctggaaacgtttcgcctgcaggataactggggaatgcagcgccagtcccttgggaagggtggccaccagaaggtgcagtagctgggtggactaggacaccaggagacatgggggaccttgaagatgtcttacccagggattgctcatgtgccggaacaagaacaggcggtgctgatggtccaggtaccgtaacaggtgcaggtacagcagctccaattgcaggagggagcacatcgaagacggatcttgctcggggcctgagctccggtgctgggcccatgggcacgactcct

SEQ ID NO: 61301 - DNA, 504 bp, Zea mays
  Clone ID: MRT4577_155900C.1
atcgtaccacccacaaccatggcttcgatacatgacttgctttagcaacgcatgcgcttagagaccaaacctccaatacaccgttacgttacacaccagttataaacggaatagtaataggaaacggcctaactcaacaacaagatacagacgtaccttttatgacagctgcaccaatgcaaacccacccaaccctttaatgaaccgcatggaacgaaactaaaaaccggtctaacacaccctatatatatagccttctagacgcacggatcgtgcaaggcccaaatactgatggtatgggagctaggggaaaccacgaaccatcgctgcatgaagacgacgacgttctacattaacaggaaaaccactgttctaccacccttgttggattgcaggcctttttggcttgatcattgacggacccggcggcgggcgacccgggcatgccgacgaagccggtgaagcacgggaagccggcggcgaaaaaagacatgctgccgctgc

SEQ ID NO: 61302 - DNA, 550 bp, Zea mays
  Clone ID: MRT4577_155901C.1
agttaaaacatcattttggtgttgtgaaaatatgtaactatttcagtttattggcatatttgagtttgacccggtgtgtgagtaatctaagacgtcgcatgcacgcgtacgtaagctcggaattcggctcgagaccaaatcatgcatggtactgaaatgagatgcaattccaattctattgtttggatgtcactgaattgtacgttctaattccacgcaataccgaggggtgaggctttgtattgggagaggatgttctagttatagtctaattctagggaattaggcctctgattccaaatctcaattccacgagcaaccaaacaacagaatttagaaaaactgattctaattcccaattctgtgctccaatatctatatccaaccggggtgttagtattatgtagtttcactggctcttctagttgtgcttttatgatatcttttgtgacctgaagattaaatttgagtttttcaggaagcgtacttaagacgcatgtcaacatgtttggcggcaggtatattaatattgattcaatcccacccttat

SEQ ID NO: 61303 - DNA, 2083 bp, Zea mays
  Clone ID: MRT4577_155902C.1
ttttttttttttttttttaaacaatacttcactatataaacaatgtagtacaaatcctctattacagacaacgtcacgtagtggcagaaataacgatgcagatagcacacgatattgcccggcaacggcgcgaatagtagcaacacctgtccagccatctcgggatggcaacacatgttttcttctaaaaaaaagctggatcagtaccacacaaacaataacggctgctattttacaaatggattcgacacacatattcctagttgtacactactagtgctgtgacccttaagatacacagcatgcaccaactaccaggcacagctaatgcagcctcagcctgcatctgcaatgtttgagcctgaacctgacaaggactgcctgcaccatcaactctcggttatgatcgacatttctggatgatgccatggtctagacagttagtaagttattaatactgatctggcatctgtacatcagtcacagccatctactgctccaggttgatcggagcgggcgctgaactatgaaaggtttcgccaccgtgattcggcgggcttcagattatacaggaggggtcgtcatccacgacatcggctggtttatcctgctgctggggagtgcccacttccaagaaatcctccgcgttgaatttctcaatcccatcccactcatctggtcctgtctcccacatgttcgtcatgctaactcctgtgttgtccgataagagccagtagtctgtatcagcatcaagctccgaagggacaatcttcatcatccctgaaatgtcctgtgaactactaggtgcatcagaaggtaggatcagtcctccgtgaatatttgattccatccctgtgactttgttgcaatccgcagccaaaggcgtcctaggattctctagagaatccatgcttattgtctgtgtaggccttggaggagtctccatgccactcatctcctcaaattgactaactaggtacacatctatcggacccatggtacttcttaggacaatcctatatctcctttgaggataatcattaacctcatcaggatctgggacttccaaagttgtgccatgcggtgcttttatagcaattagagtctgattctggaagcatggcaaagatttgatatcttcttccgtgacataaagccacttttgattattttcatcttcagtaagccctcttaatctgtcccgcatttcacttattcgttcatccaaattgcgctcttgcagtgtaagagcatcaatatctgcctgtaaaattgacatatcatcactaacttctccgggtcgagagtcatcaactcctttccaacggatgttgttcttaagctttttttctatcagtcctatcccttcaagaacattagtgatgtcatatatacgccttttctgtacctctagagtttctgcagcattattcagatcaacaatgccaccaggtgcaccttttagcaagttcaggaacttctttgtcaagagcccgagggagctatcatagcggcagccaccaacaggagtagaaggattgcccggagaaccaaaacccaaaggggtctgaggaccagatttctggcccttcgtagccttaggcttggtggatgcttttaaacctttccctgaagggggtgtaggaactgggctgctgccagcattagcatatccagggctcatccagtcatttgattcggcagcttcattttctgttctgtcgttatgtttccgtttcaatggcgtcctgaggacaaccgcctccaccatctcgtcggtggcggcggaaggcgcgccgaagtggtggtactcccctggcggcgtcgcaaacggccggtgctgctgcagcagcgcccgtgccctggcctcgccggccccgtcaccggccgccgccgccatggggatcggggcaggcgcgggtgcgcggatcggaggcccggtcgcgggcgcgggcgggcggcagggtcctggagctgggatctgaggaggaggaggcggcgggcgagggtttgcgcggggtagggggaagggagggaagacaacgagggaaacgaaggggtgcggcgagaagcgagctcgtgc

SEQ ID NO: 61304 - DNA, 719 bp, Zea mays
  Clone ID: MRT4577_155903C.1
cattgggtacctcgaggccggccgggatggtttccgccactcactccctgatggtgtgatgaagctcacagaccttattatcgccgccaaggttaacgatgctctgcgtatcatcagtgatcgtcgagtacgcctgtaccgctgcactcaagcaccctggtgacctcgttattcgtgactcgagataccaccgccatctgagccctccaagctctgcatggaacgtctttcggtacttccctagaacgacatcgtctctgaagcatgacctcttcgtcaccacgcactgacaacaaagatctcctcatggctgaccacatgaacaatatgcagaacaatggccttgtctgccatattgaaccctttgacgatcaaaatgatatgctcggccttgacacctactctggctgcagatgcatcatcatccaaccccacactgaccgttgtgcgttccccgagactcacgctgatgtcgttgtacttgctgatggccgcctgatacaaccttggaaatggctactgggcatcccagctttgtcatgtgctgctcattcgctacactggccattgcccaacttgaactgtggaaagagaaaaggtctgccttgtattagaagaaggtggaatgtgctccccacgcaccttgcatgataatgttgctgctctgcatttgaacaagcttggtgccaagatgaccaagctcacctagtctcagggcg

SEQ ID NO: 61305 - DNA, 602 bp, Zea mays
  Clone ID: MRT4577_155904C.1
actcagtccttctcataatgcccccctgcaagatactctcagcgcctctagaacaccatcgggcaaggacgacgtagatcgccgagttcatcgccacgctgctgttcttgtacatgacggtggccacgctgatcgggtacaagcaccagacggacgcgttggcgttgggcgacgacgagctgtgcggctccgtgggggtgctggacatcttctgggacttctccggcatgatcttctgcctcgactactgcaacgtcggaatctcggggggccacatcaaccccgccggcaccttgggactcttcctggggcgcaaggtctccctggagagcgcgctgctctacatcctggcgcagtgtgctcggcgccatctgcggcgtctggctggactggagttccagaacgcctacttcgataggtacctaggacggagcctgctctgtcatgtacgggtatttatgtgataatggtctcgttgcctacatcatcggtagcttcctgctcggatacaccgatgttctccgtcatggatcgcaatcgcaacggccgggactactacgatgcgtgtctgggtcccctccacatcggtttgaaggtggtca

SEQ ID NO: 61306 - DNA, 483 bp, Zea mays
  Clone ID: MRT4577_155905C.1
ccgtccgaaaaaaaaaaaaaaaaaaaaaaaaaaaaaaaactaaaaaaaaaaaaaaaaaaaaaaaaaggaaaaaaataaatagaggcaagctaacttaaaaacaacgtgcatgcacaaaaaaaagactctggtcgtgggtcccactatattgaatactgggatccaccctgttggcaacccggttgtatggaaaaatccctggggtgcacctaacttaccgcggcttgtagaaacattcttggttccgcccggttgctttccttagcaagagtggcccacacttgaccggcctatcggaacgcgcgcccgtacctggaggatttagcggcacgcccagttggggcgcccccattaaccccacctttacactgtgcatccccttagggccccctcctcactgcccagttgctttaccccccggtcatgtgggtttcttttcttccttaatccctacattggggggttcctccagggtttctataa

SEQ ID NO: 61307 - DNA, 2073 bp, Zea mays
  Clone ID: MRT4577_155906C.1
cattgggacctcgagccggccgggtcgagcccggcccggattcggcccccgccgccatccgctgctcttctccgttcgcccgcccgcccctcctctctctctctctcgccgcccgcccctcctctctctctctctcgccgcccggggagaaggagggctccgccgctcccggggaagagcgcgccattgccgctgccggtgagttcccccctcctctctctctctctctcccagacgttagccgccgcagcagcaaaaaaaaaaccataaacccccaatccaccaatggcgtcgagcagcacctaccttgccgacgacggcttcgcggcgccgcgcctcttctcgcagggtgtatcctacacatacgacgacgtcatcttcctcccggcctacatcggcttccccgccgacgccgtcgacctctccacccgcctctcccgccgcatcccgctatccatcccctgcgtcgcgtccccgatggacactgtctccgaggccgctatggccgcggccatggcatcactcggcgccgccgccgtcgtgcactgcaacaccgacccccacgcccaggccgccatcgtccgcgctgccaagtcccgccgccttcccttcgtttcctccgtgcccttcttctccccgtcctccgccccgacgctcaacgatttcgctggcagcgagtacgccctcgtcaccgagcgcggagattcgctctccaggctcgtcggcgtcgctgtcgcggccgatgctgtctcccgcgagttcccgtctctgtctcgcatgcgcttgacggtctggattacgcccctctcgtgtccgacgatggtgaggttgtcgatctcatcaccgtcaaggatgtggagcgcatcaggagctatcccaagttaggcaagccatcgcttggagtggacgggaagtttgtagttgcggcctccatcgggacccgtgaggatggcaagggaaggctagagcggctagttaaggcgggggcaaatgctatcgtgattgatagttcacaggggaactccatctaccagcttgatatgataaagtttgccaagaagatgtatccggaggtggattttattgggggtaatgcagtgacaattgcgcaggcccagaatttgattcaagctggtgcagatggattgcgtgttggaatgggttctggctcaatttgtaccacccaagaggtttgtgctgttggaagaggacaggcaacatcagtgtataaggtttcatcttatgccaatgatcacaatgtaccagttattgctgatggtggaatttcaaactctggacatatcgtgaaagctttgtcgctgggggcatccactgttatgatgggcagctttttagctggcagttatgaagctcctggtacttatgaatacaaggacggccgacgagttaaaaaatacagagacatgggctctctcgaagccatgacaaaagggagtgatgtaaagtaccttggtgatactttcaagctcaaagtcgcacatggcgtcgttggtgcagtagctgacaaaggctccgtactgaggttcattccttacactatgcaagcagttgggcaaggattggcgcagattctctgcggtcagctcatgatcttttgagatcagagacactcagattagaggtgagaactggtgctgcccaggctgaaggaggtatccatggactggtttcatacgtgaagaaggcattctagttccataatcaaacaaagaagtattggaacgatagtggttagctgcatgatatggaggggggcgatgctcatttatcctacctggcaaaagctcagcagcttgtcagcaaagattgtcgagttgggcagcaagtgtaccatctacttggcgtcataataataataataaacctctggcatcgtaactgttgtataagctcacagcttgtcatctaaacttttttgcccaattttgttaaaagagtaaaacctcaattgttgattgatgtactttgccccgtcatgttttaacctaccacaatgttgtaacttgtattattatgtgttcgaagaatggttgataatagtggtttgtctct

SEQ ID NO: 61308 - DNA, 413 bp, Zea mays
  Clone ID: MRT4577_155907C.1
aaaaaaaaaaaaaaaaaaaaaaaaaaaaaaaaaaaaaaaaaaaaaaaaaagaataaaaaaagaaaacatacataaatattaaaaaatttgtatacacatacatcatatcatcttaaattttctcgcatgtcactttcatttcgtttctttggccgatccttttgtttattcgcgtcgtggaatatccatatattcacccacttttatcatcttgctcggtgtcacactttttccttgtggctatattatttcttctctagctacgaattacgattcacatcttttctcgctgtctctctctctcgctcttctccctttgtttcggcgtatgtgccgcgctgtctatggtgcttacccgctctatgggctctttccttacttacgccttaatgccatttcctttctcttccctt

SEQ ID NO: 61309 - DNA, 942 bp, Zea mays
  unsure (1)..(942): unsure at all n locations
  Clone ID: MRT4577_155908C.1
agattcggcccccgcccgcccctgcagtgccatccgctgctcttctccgttcgcccgcccgcccgcctctcctctctctctctgtctcgccgcccggggaggagggctccgccgctcccggggaagagtgcgccattgccgctgctggtgagttcccctcctctctctctcccagacatcagccgccgacgcagaaaaaaaaaactccctaaacccccaatccacaaatggcgtcgaacagcacctaccttgccgccgacggcttcgcggcgccgcgcctcttctcgcagggtgtatcctacacgtacgacgacgtcatcttcctcccggcctatatcggcttccccgccgacgccgtcgacctctccacccgcctctcccgccgcatcccgctatccatcccttgcgtcgcgtccccgatggacacggtttccgagtccgctatggccgcggccatggcatcactcggcgccgccgccgtcgtgcactgcaacaccgatccccacgcccaggccgccatcgtccgcgctgccaagtcccgccgccttcccttcgtttcctccgtgccctttttctccccgtactccgccccgacgctcaacgatttcgctggcagcgagtacgccctcgtcaccgagcgcggagattcgctctccaggctcgtcggcgtcgctgtcgcggccgatgctgtctcgcgcgaggttcccgtctctatctcggagtacatgcgaccgacgccgcgctcagcctccgccgccttcgactttgaggaagcagcaaccttccttgccgatgagggtctggattacgcccctctcgtatcaaatgatggntgaggttgntgatctaatcaccgccaaggacgtggagcgcatccggagctatcccagctgngcaagccgtctcttgagccaacgngaagnttgtagttgcggcttccat

SEQ ID NO: 61310 - DNA, 621 bp, Zea mays
  unsure (1)..(621): unsure at all n locations
  Clone ID: MRT4577_155909C.1
ggtgatacactcaagctcaaagtcgcncagggcgttgtggagcagtacatgacaaaggttctgtactgaggttcattccttacacaatgcaagcagttaagcaaggattacaagatcttggcgcagattctgtccagtcagctcatgatcttttgcgatcagagacactcagattagaggtgagaactggtgctgcccaggctgaaggaggtatccatggactggtttcatacgtgaagaaggcattctagttccataatcaaacaaagaagtattggaacgatagtggttagctgcatgatatggaggggggggggggtgcgatgctcatttatcctacctggcaaaagctcagcagcttgtcagcaaagattgtcgagttgggcagcaagtgtaccatctacttggcgtcataataatattaataaacctctggcatcgtaactgttgtataagctcacagcttgtcatctaaacttttttgcccaattttgttaaaagagtaaaacctcaatgttgtaccttgtattattatgtgttcgaagaatggttgataatagtggtttgtctctaaagttgacatcctggctagtgtgttactcacaattgtaaggctttcgt

SEQ ID NO: 61311 - DNA, 561 bp, Zea mays
  Clone ID: MRT4577_15590C.1
aaggccaaacatcaaacttcataaggattcgagccatactggtgcaaaaaagttttgggtccaacacacagaggacacaacaggtcctttaaaccaacgaagccacaaccacgatttatgacacacaaaccacagatgttttttaaacgaccacttccttttagaggtaccccagagggccccaaacgacgcaaatccccaggtacagcagcagtttaaatgacccatggtttactgaccaccggggggggggagcaccagggggagagggctctccttttggatgttgaagtctgctagggggcggccatcctccagttgtttgccaaaaaaaataaaaccctgttggtctggggggatgccctttttgtcctggatcttcgccttcacgttgtcaatggggtcggacctctcaacctccagggttatggtcttgccagtcaaggtcttcacaaaaatctgcataccacctcgcaaggggagcaccagggggagggggctctccttctggatgttgaagtcggaaagggtacggccatcctccagttgtttgccagaaaa

SEQ ID NO: 61312 - DNA, 903 bp, Zea mays
  Clone ID: MRT4577_155910C.1
tcgccatacatataagctacatctattttacaatcgtgaacactctcacatcaccaccaactcgtatgcaacaaacaaaataattactcccccggtgtcctattagttgtcgttttgtatatagttcgaatcaaacttataaaattttgactacaaataacaattttgttatttagttttggaacctaatacttatatgcaccaatttaccataaaaagtacttttataaaagtataaatgtattaagagtttatttgtattttaaaaaaaaaaacattagtcaaagttatattttggagaccgtgtcgttgtcctaaacgacaactaataggaaaccggagggagtatcaactaatatctagaaccaatataagcatcgaacttcgaaccaataacatgaatagtgaatcggttcaccacaacacaatttgactcgaacgatgttctttgattgaaatcttcgactgaacatctggctagcaatgcacacgggcctcgcttcacaccatcaaatcccgggattcttctccaacgatagacgaaggagcaagaatggcgtggggagcgatgagctgggcgctggagagagcacacgctagcgcagggagccgagtccagcgagcacagggagccgcggacgagggagctggagaccgagctaggggtgggcgcgacgacgtagagggagctcggcgcggtggcttggatagatctagagcttgggcgtggaggtagcagaggggcgcgacaggcagcacccacgacgagcgtgtaggggaacggcgccctggccgagcagcggtggatgctaggcgagcttatacggtggccgacgtcgcagctgaaaggaggccgagcgcaggagatcgaagggagcacacgatggctggacgacaaagctt

SEQ ID NO: 61313 - DNA, 779 bp, Zea mays
  Clone ID: MRT4577_155912C.1
agtaactccctttcatttccaagcacaagaagtgggaagagagaacaggagggcgctgagctctctgatcgctgacctgagtggtggcggctgcagctgcccgcgcggcgaagatggctgcgccatggcttcttgcttgcagcttgctgctgctctccctggcgacctttcacggagctgagggcgcgatcggcgtgaactacggcatgatcgccaacaacctgccggcgccggagcaggtcgtctccatgtacaaggccaagaatatcagctacgtgcgtctgttccacccggacacgaccgtgctgaacgcgctccgcggctccggcatcggtgtcatcctgggcacgctgaacgaggacctcccgcgcctggcgtccgacccgtccttcgccgcgtcgtgggtggccaccaacgtgcagcccttcgccggcgccgtccagttccggtacatcaacgccggcaacgaggtcatcccgggggacgccgcggcgcgggtgctcccggtcatgcagaacctggagtcggcgctccggtccgcgggggtcacgggcgtccccgtcaccacggccgtggccaccagcgtgctcggcgcctcgtacccgccgtcccagggcgcattctccgaggcggccgcgtcggtgatggcgcccatcgtctcgtacctgtcgtcgaagggcgcgccgctgctggtcaacgtatacccgtacttcgcctactcgagcagcggcgggaaggtggcgctcgtgtacgcgctgatgacggcggacgccggcgcg

SEQ ID NO: 61314 - DNA, 395 bp, Zea mays
  Clone ID: MRT4577_155913C.1
cggcaattgccagacagctcacctgagacaaatgaacctcggattgagtcgattgtacagatggcccacaggtctgatgttgacagctttgctgaactcactggctgccctgtgttgagctctgaagacagcccaagggttatgaactccgtccgggcaagctgtgagccgtcggtcactgattgaagctagatcatagtacacggctcggactcttgaagagcactgtgggtccttggcgcagaatgggatgaaggacatgctgaccttcataatcatccgcaacagtgaggtacgttctggacccatgtcaaaggtcgctgctcaggcttgcgccaacattccttccaacccctggagtcctatccacatgggtttttgcgcctaagactcat

SEQ ID NO: 61315 - DNA, 359 bp, Zea mays
  Clone ID: MRT4577_155914C.1
caaaagcgcatatattacataaacatggaaaaagggatgggaactatttagtgtgagagcatgatacattgggacagaagaaataaagaggatgtgttaggtgcgtttactgggagatcatgaccaagaacaggaaaaatgcgcattgctttcattgaaaggcacaatttcaaatatggcttagagtgcttgaagaaggcgattgcactagagaacattgattacaggatgcaggtggaaggttgaatattgtgacttaggggtaagaagacaagaggatgggggaaaaagggaatactagctgactgaacgagccgcctacggaagtgagaagtctcagcctgtgcaaggaaaaggct

SEQ ID NO: 61316 - DNA, 458 bp, Zea mays
  Clone ID: MRT4577_155916C.1
cggacgcgtgggcccaagcaccgcgtcgaacaaagcatcgacatacagacagccagactgcgagggaaaccggctacgccaaaaccaaatactctgtgtgcgtacgcgcggcagtgagcgacgaggcgcggtgcgcgcgcactggccatgagccggggccgcgcacgccggccggttccaggcagtggcacccgcgccggcgcgctcgaggtcctgctgctcctggcgtacgacgtgctgctagcagcgtaccccgccgcggccgtggaggcagaggcaggggacgaggaggcggtggactacggcgcgtcgctgtccaagagcctgctctacttcgaggcgcaacggtcggggcggctgccgcacaaccagcgcgtgccgaggcggtgccactcgggccttaccgacgggctgcagcatggcgtggacctcgtcggcggctactacgacgccgggga

SEQ ID NO: 61317 - DNA, 239 bp, Zea mays
  Clone ID: MRT4577_155917C.1
cggacgcgtagtttggattttttttttcgaaaaagctaactaggccttttatgacgacggactacatgaactacatctacaactactacaccgtccacaaacattgacagcttggaagcatctcactttaggactgtaaaacccttgtcttaggtgaaaaatcggaccccctctttggtatcacgaaccctgagggaatccctcggggtaaggctggctctttttatgtacaagagtcc

SEQ ID NO: 61318 - DNA, 465 bp, Zea mays
  unsure (1)..(465): unsure at all n locations
  Clone ID: MRT4577_155918C.1
cggacgcgatataggaagtatgggggccnccgcggnnaaancnccnngaggggaagggggcagcaacggcaggagcgggccccagcacaacaccaagnngngaccnggananagangccaanaggncagacacaaccaacgcagagggnccaaccaccacccgcaacccagagccaagggaccctacgagggcaccannccgaaacgcaaaggaaacagnncacggcaaggaagaaaanncaacggagagnggggaanaccaaccacgngangncgacgangccaanaagccnnccagngcacccaggagcggagcaangagngagangccggacccgaannanagcaaccaagcacagcaaagcagnnnaggacagcccgcagcagaaaccgaaagcaaggcaagagagacaggagggagnagcangaaaggaggggaagaaagccccaaggccgaaacaaccc

SEQ ID NO: 61319 - DNA, 278 bp, Zea mays
  Clone ID: MRT4577_155919C.1
gagcattcaaaaacacggcaagcgaagcgcactatcaacttcttaacatcaatggctaccaatatattatccgttctttttctaattgcccttgatgttagctctacaaattcattcattattccacaatgctcacttgctcctagtaccattattccacagttccttccaccatttacttcaatgagcttcgaacacctatctatacaagccaacattcatcaacaatctctttcatctaacttcttacaacaaccaattatccaattgtaacaaca

SEQ ID NO: 61320 - DNA, 291 bp, Zea mays
  Clone ID: MRT4577_15591C.1
ggcaacaacaaggcctaaaaaaaaaaaagggcggggacccaaaccccggcccccgtttttgatttttttcggaatttaaaaaaaacacaggggcgggggcccgggggccccaaaaaaactgtttaaacctaaacgggacgggcggcccccacccagggttatcgaaggaaacacgtcgaacctcccccccgaggggtgaaacaaaaaggggagagggcagccctttaaacaggccttggtggcgtcgaaggatttaaaacccccgggagggcccttgtaaccctggaacag

SEQ ID NO: 61321 - DNA, 369 bp, Zea mays
  Clone ID: MRT4577_155920C.1
gggggttgtcgggggtgcaatcgtttttttgtggtaatttcacataaggtatgagctttttgcataaaggggaaattttggggtgtttaatgagttaggtaaataaaatttattggggggaattaaatgtgcgttttaaagtgcggaaaaatttttgcgccaattggataaatgaataagccagggggctaaaaaagggggtttgcgtattgggaggcaggggggtttttatattggcctgggggaggggaaatatgaggttggctttctccggatgatcctgacagggcggggggaggggggctaggcttttttgccccacggggggaaatttttttttcctggggggttccggggggttttttttgg

SEQ ID NO: 61322 - DNA, 589 bp, Zea mays
  Clone ID: MRT4577_155921C.1
cccagcgtccgcggccgcgtgggttaaagaggaagtaaggaactatcaaatacataaacaatctgaagcccaatttcaagctattaatgacatgcttgctgaagaaaaacatcaaaatgtgatgctgctgaggaatcgtgtcaagcgaaatgtcatctagaaaagagattgcaagctgagattcttgcacatcaaggtgtcagaaagaagattgaaggtctcaaattggaagcaaagcgtaaagatgatgagattggacaatacaaagagcatattgctgagttggtcctgcattcagaagcacagtccttgttgtttcaggagaagtacaatgaaatggaacacatggtttctagacagaggtttggtccgcatgaatcttattctgagactgtccccaagactgaaaagccttcagggcgagcaagaggatccagctcccctttccggtgcatatctagcattattcaacaaatgaactctgagagagatcaagaaatcttggtggcacgccaacgaattgaagactagaaggtttggttagttgcaaacagaaaaagtatgcttgctaacatcaagactagctgct

SEQ ID NO: 61323 - DNA, 208 bp, Zea mays
  Clone ID: MRT4577_155922C.1
attgccggatggatccacgcatccggatgaacaaccacatcttttatttttttctacggaacatagctcagccgggggaaatcaatcggggttcggtgacactcataacccaaggctgcatatggacaatcggaccaagcagatgttatccgttaaacacatcgaccagcacaggaagatctattaacacgcgcaaatggagatcatt

SEQ ID NO: 61324 - DNA, 370 bp, Zea mays
  Clone ID: MRT4577_155923C.1
gtttctttccgcttgaggttttacctgaggggggcactggaacggtcggcgtggtccggcgaggccacgctgtcgcgtctggttggcgcgctcatcgcgttcaagccgctctactcggtattgaagctcgcctcccgggaggtcatcatcagactatctcaacctgtttcatgcctacgacgaagggaatctatcatggctggctgcaacagaggctgagcctgcaacaatgtcgatcgcaaagagggccatacctgaggctacatcaatcgaagaggccaaccaaatcgtctgcggcaactggctgaatgtaattgaggagcatcgtctgaagtacttggggagctctcaggtaacctggacattggct

SEQ ID NO: 61325 - DNA, 218 bp, Zea mays
  Clone ID: MRT4577_155924C.1
gcgatagggatggcgaagttcaatgtggtgcagaagaaaagaagagctctaatagcagacaagaagagacagcttcacggagaccctttaaccggcaagctcaagatcaaggaccaacccctttccctatccggaaaacgcagacgcaagctcttcaaaaaatggcgccgggaccacaaggacgccttgcagaatggtttggtacacatgtaagatgt

SEQ ID NO: 61326 - DNA, 1861 bp, Zea mays
  Clone ID: MRT4577_155925C.1
ggcgattggcgggctcgaggccggccgggcatcgctctagccagcccgcccgccagcgagaggtcaaaaaccactacgagccaaaaactggagcccagggaaagcgacgagcaaaccaaacatggcggcgatcctcgcgcgcgccggcgtcatcgccaccgccggcaaaggtttctcgggccgccgccggggcaatggtatcgtcgtcgcggcggtcactaaaacgggggctgctgtgccacaggagggggcgctggaacggccggcgtggtccggcgagaccacgctgtcgcgtctggttggcgcgctcatcgcgttcaagccgctctacgcggtattgaagctcgcctcccgcgaggtcatcatcaggacggcggagaagtcgaacatcccgtggagggagatgacgaaggaggtgctggagtcggacgtgtacgaggtgttcgagagaatccaagacccaaacctcgtgtaccctgactactatctcaacccgtttcatgcctacgacgaagggaatctatcatggctggctgcagcagaggcggagcctgcaacaatgtcgatcgcaaagagggcaatacctgaggctacatcaatcgaagaggccaaccaaattgtccgcggcaactggctgaatgtgattgaggagcatcatctgaagtactcggggaactgtcaggtaaacgacatcctggacattggctgctctgttggagtaagcaccagatacctcgccgagaagttcccatcagctcaagctgttgggctcgacctatcaccgtactttcttgctgtggcggcacaaaaggaagaaaaactgtcacggccaaagcctattcgctgggttcatgccaatggtgaagcgaccggcctgtcttcagattcatttgaccttgtctcccttgcttatgtgcacgagcgataaccggattggtgaaggaagcattcagggtccttcgcccaggaggaacaatcgccttaacagacaattcgccgaagtaaagtacttgaggaactatccccagttttgttcactctgatgaagagtaccgagccttttcctggacagttcctggaattcaacatgctgcaattcaacatgtattgtgagcttgttctctttttttgttctatatcttatgggctctaatttcattgatgctatttgtctggtttcttatctatactgcttgagttttgagtaaactgccggatgacccaaagtgaaaaccatttctgtaccctattactaaatacttgaaaacataaatgatacctcttgacgtacatttgatcatgtatcaatacttcaatgttggaagaaattatttttaacttcatttcttcacttctatcatcttacatattatcagccccagctgaagccattcaggtcaaaatgtctgtaagcttgatttgtgtcatcgacattgtgggtgttcagatcaagtttgttcactgaacacggatgctcaaaatctactagcttgctttctctggggtattcaactgcctgtcttgcgcacttttgttcttccagatatagcttctctgcatctactttgcttcccgatgccgaactggtggtactacctctaccattcttttgaggtgcagtatactcatgcgccatctctgtgtcactttcatacccaaactctgctttatggtatccttcctcattctgcaaatgagccatcctatgttcgcttaggcttctgttgagggcaaactgtgtctcatgttcatgagatctttttctgcaaaataatgaactatcatcatatgcttttagtactccatggtgctgtagtctgtgctccttgatgaatccttcagcaacagacaaataactatt

SEQ ID NO: 61327 - DNA, 829 bp, Zea mays
  unsure (1)..(829): unsure at all n locations
  Clone ID: MRT4577_155926C.1
ccggccgggatcgctcttaccagcccgcccgccagcgagaggtcaaaaaccactacgagccaaaaactggagcccagggaaagcgacgagcaaaccaaacatggcggcgatcctcgcgcgcgccggcgtcatcgccaccgccggcaaaggtttctcgggccgccgccggggcaatggtatcgtcgtcgcggcggtcactaaaacgggggctgctgtgccacaggagggggcgctggaacggccggcgtggtccggcgagaccacgctgtcgcgtctggttggcgcgctcatcgcgttcaagccgctctacgcggtattgaagctcgcctcccgcgaggtcatcatcaggacggcggagaagtcgaacatcccgtggagggagatgacgaaggaggtgctggagtcggacgtgtacgaggtgttcgagagaatccgagacccaaacctcgtgtaccctgactgtcagctcacttcccctttcctttcctttccttcagttccgttgattaatttcagcattatattcgaccaaaagataccctatatgaagtaaagtaaactggagtacataatgctaacgcctcatttctcttgatcagactatctcaacccgtttcatgcctacgacgaagggaatctatcatggctggctgcagcagaggcggagcctgcaacaatgtcgatcgcaaagagggcaatacctgaggctacatcaatcgaagaggccaaccaaattgtccgcggcaactggctgaatgtgattgaggagcatcatctgaagtactcggngaactgtcaggtaaacgacatcctagacattggctgctct

SEQ ID NO: 61328 - DNA, 560 bp, Zea mays
  unsure (1)..(560): unsure at all n locations
  Clone ID: MRT4577_155927C.1
gttggagtaagcaccagatacctcgccgagaagttcccatcagctcaagctgttgggctcgacctatcaccgtactgtcttgctgtggcggcacaaaaggaagaaaaactgtcacggccaaagcctattcgctgggttcatgccaatggtgaagcgaccggcctgtcttcagattcatttgaccttgtctcccttgcttatgtgcacgagcgataaccggattggtgaaggaagcattcagggtccttcgcccaggaggaacaatcgccttaacagacaattcgccgaagtaaagtacttgaggtaagcttcagcagccatcagcagcaccaggtttcaacgacacaccttagatggtgacatttatttccatgtattccaggaactatccccagttttgttcactctgatgaagagtaccgagccttttcctggacagttcctggaattcaacatgctgcaattcaacatgtattgtgagcttgttctctttttttgttctatatcttatgggctctaatttcattaaccaangaaaacaactaaacgagaatgatgac

SEQ ID NO: 61329 - DNA, 252 bp, Zea mays
  Clone ID: MRT4577_155928C.1
gcgattcgaaattattcgaaataaatcgctcatgaatccctgaagcctgcatatatgtgtggctcccaagattcaggcggatgagtcgccacccacgattcagccacgcggtaatcttcttttccttctcactgtgctcacctatatggaacacgcaaggcaatgcgacaagtacagtgaacaatttcctggctcattcattatcccataccactgggaccatttttaccccggcaaagacttttttgccca

SEQ ID NO: 61330 - DNA, 280 bp, Zea mays
  Clone ID: MRT4577_155929C.1
gtggtaactattccttcgcaggagacaacggatatcactgttgagccagccagcctatcttagctaaaacactagtgagatggcgactacgagcgacagttacgcgggactgaagctgggacagattctgatcttgatgtgcatactcagccatggatctgcacactggtacaacgccatctggagcttcggggacttcatcttctacaccgaccaactctgcgtggggggccattgcacttactagctcatcactgggcagacgtactacagggagacc

SEQ ID NO: 61331 - DNA, 538 bp, Zea mays
  Clone ID: MRT4577_15592C.1
cccgggccccgctctcccccgcccgcaatcccagctctctcttcctccttcccactctccccgcccgcaatctgcccgcaatcccacgctcgcgccgtcgatgactcgccccaggaaatctcgcctccgcaacctcctccacgcaccgtcaatggaaggtccacccccacgtcgtctatggaaggtcgcgccgtcaatggaaggtggcaggtgctcgccattgaaggtgctcgcgtcccgaacttgcatacgcagctagaaggcggttttgaatcagtttttgattttacggcaaggtccaagactttcaccgtcctcttcagcagcagtacaaaaagtgattttaccttttgtctctgtgtcttgtttttattctagaatttgtagcaaatgaagaaggacgaggacacccatccccttgtttgtaacaatggagtgtttcagtacaaaaatgcaatccagaagtgtttttaaatgtttttataattcctcgaaaagaaagaacaccaggacacaaaaaaaaaaaaaaaaaaaacac

SEQ ID NO: 61332 - DNA, 101 bp, Zea mays
  Clone ID: MRT4577_155930C.1
gcaattaatacttaccagagttgcattgtttcgtgaacaaataagcagagatgtcagtatcctacctaagatgctgatctgctttgaaacatggtatcact

SEQ ID NO: 61333 - DNA, 296 bp, Zea mays
  Clone ID: MRT4577_155931C.1
gaccggccggaataattctcggttcacagcttactaccggcggccgccttatataagggggggtttgaaagaatattgggctaaaacacggaacaaaaacacatttgccacttcccagacagagaaaactactagccagccatatacgtaaatctattcgacctagcccatagtacaaaattcctggaagcagccggcgggcgtagacgcggggaacaacactacaggcaaacgcgcgtgcgtaatcaattagcacatagaaacagctacacagaaactaaaaggaaaccaagaaa

SEQ ID NO: 61334 - DNA, 180 bp, Zea mays
  Clone ID: MRT4577_155932C.1
attgtcagaagagagaggcatctgttgatcaaactgaactatttcagagagagttgtatcctcagtgtgttttatcttatcacatgttgccaccgttcaagagtgttactagtctacctgctcatcccttgtttaaagaatacacactgcggtttctactcttttaattatttctttatc

SEQ ID NO: 61335 - DNA, 372 bp, Zea mays
  Clone ID: MRT4577_155933C.1
gactttttattttatcctttggcctatatttagggtttttagttttttttaccattattttaggaagcttctttcagaaaacccaacgtgcaatgaatgatgcggagatggcaagcgggccccaagagcacatattcacatcgttcatacatcagatgcaaaaactagcttgttactcatgaaggacgccttacacaggccgcaagtctgtctatgtgaaacatgccctcataacctggcattttctgttcccacacgtttcagatgtgagatacgttggtggaacacgctctgctgccatacgtggtgtcacattacagagaaaatatttggtaagctccaaatgatggacacacctacacgctaagttca

SEQ ID NO: 61336 - DNA, 246 bp, Zea mays
  Clone ID: MRT4577_155934C.1
attattacacataaatattctttttccctcaaaataagaaattgtttggaatgttttcccgggcccagaaggagccccccagaaagtgggagcgggaaccgggagagaccaaaacaccccccaaagaggaaaaaccaaaacggggggaaaccaaacgaaaaagccgacccacggagaaaaaaaataaaaggccaaacttgaccccaaagaaaacacggagagccaaaacgcgaaagccgggggggc

SEQ ID NO: 61337 - DNA, 1152 bp, Zea mays
  Clone ID: MRT4577_155935C.1
cactcctatagggcgattgggttcctcgaggccggccggggatttcgtagtaagtcctcgaccatccctgcaaattaccgcgatggctcccaagatcctagtcatccttgtgttcctcgccgtggcctcaccggcggctctggccgccttcgatgtgatagagatgctggccgacaagcccacgtactccacgttcctgaagctcctgcaggacaccaaggtcgcgggcgaggcgaatcagctccggtcggcgacgctactggtcgtccccgacaaacttgccaagcctctggcgtcgctgcccgccgataaggtgcggccggcggtggagaaccacgtccttctcagttacttcgaccccatcaagctggacgagatgaagacacgcaccgccatcctccccacgctgctctccgtcaccgacaagaaactcggcgtcctcaactacaccagggccgacgacgggcagatgtacttcggcgctcccggcgccccctgcgtgggccaagctcgtgaaggtcgtcgcagcgcggccgtactctgtgtccatcatggagatcagcgagcccattttgccggccgcgttgccctccccccgtcgcggcgcccggccgccgcggcaagggtggtaagcgcaagatcaagccatcagcggcaacccatgaggattccaacatgatcccgcgcaagcccgtcgaagcagtggtggtgggtaagggtaaggtggccaaggataccgtgtccgagtcacatgctccaagccccgcccccgtctccgccccttagttgcgtgttgggcgccgctgcccgccggcccccggccaccatgcgtcgtgtctgcgcgcgcacgcacgcattgaacgggagatagaatatggtatcgttcaatgcagattgccatgctatagctccagagtttatctacctggtagcaccatgacacgatggcccgttcgtattttctggcttgctcgtacttttcagttccatggttttacaacaccttttactcccagcagaaaatacataatatgcatgtactcctctttttttccgtatagtaatataaacaaattttcacaaaaaaaaaaaaaaaaaaatttgcggccaaaaaaaaaaaaaaaaaggccaaaaaaaaaaaaaggggcggcc

SEQ ID NO: 61338 - DNA, 784 bp, Zea mays
  Clone ID: MRT4577_155936C.1
gggtacctcgaggccggccgggccgggatacttgagcatcgcagagataggcgtcttcgcactcgcctagcctccgcggctcatacctttcccccttctcccaattccttccgctcggccgccgctccatcccgtacgacgacatcatgagggagcgcatttccatccacatcggccaggccgatatccaggacgcaaactcgtgttggccagctgtactcgccttgagcatggcattcaggctgacggtcagatgcccgactgacaagaccattggggaaggtgatgatgctttcaacaccttcttcagggagactggcgctgagaagcacgtgccccgtgctgtttttgctgaccttgaacccactgtcatcgatgacgtgagaactggaacctaccgccagatcttccaccctgagaacgtcatcagtgtgaaggaggatggagccaacaactttgcccgcgcccactacaccattggcaaggagattgctgacctgcgacttgatcccatcaagaaggttgtcgacaactggactgatctccaggcttactcgccatcaacgctgttgctggaggaacgagctctgaacttggttccctcctcctagagcgcctgactgttgactactgcaagaaagccaagctagagttcactgtgtacccttccctccgagatactactgcggtagatgaggcatacaacagtgtactgtccgccccctccctcctcgagcacactgatgtggctatactgctggacaatgagggcatctacgacatc

SEQ ID NO: 61339 - DNA, 791 bp, Zea mays
  Clone ID: MRT4577_155937C.1
acaaaagccgagggttggactcactccaccggaagcgtgtgtacgcacggacccctcgcccccgcacggccatggcagccgccgtctccccctcatcctcgcccctgtccacaaaccctatgtagcacaggagttcccgccgtcagatccccgatacctcgcacagccgcgccgggcaggtaccccgcggctagatttctgggtgtgaaagagcgccttttttttagaagttcttagctagagagattttgggaagggagagtgctggaataatggagccgagggtcgggaacaagttccggcttgggcgcaagatcgggagcggctctttcggggagatctacctcggcaccaatatccagacgaacgaggaggttgcgattaagctggaaaatgtgaagacaaagcatcctcagttgctctatgaatcaaagatttataggattctacaaggaggaactggaataccgaacgtcagatggtttggtgtagaaggagactacaatgtcttggttatggatttacttggaccaagccttgaggatctatttaatttctgcagcaggaaattatctctgaagactgtacctatgccgcgaccacgcttgataaatcgagtggaatttgttcattcaaagtcttttctgcatcgagatattaagccagataatttcctcatgggtcttggaagacgagctaatcaggtctatgttatagactttggccttgctaaaaatacagggatacctcaacgcatcagcacatcccatacagggagaacaagaacttga

SEQ ID NO: 61340 - DNA, 463 bp, Zea mays
  Clone ID: MRT4577_155938C.1
ctcaaagcccttatttatagggccggccaaagtcaaaaaacgggggggcaccccctgggggggggggccaaaaaaataaggggtttccgggggggggccggcctgaaaaattaaaacccctggggggggctggcagctgggttaaataaataaagaaaccaaagggagccccgcccccaaaaaattcacccccgggggggaaaaaaaaacaaaaaactcccttggggaggggcgggcaaagtacccctggaaagaaccgcgggagggcctcaagggcaagccctttaagtttaaaaaaaaactcaaaaagcccttggaggggggaaagctcccgaaaccttgaaatttgggccccctttttcccctttaaagccattggggcaagttaatggtccccaccctttttgggaaaaatttgggcctaagggccctgaaccccagggggggccctttgagcatggcc

SEQ ID NO: 61341 - DNA, 356 bp, Zea mays
  Clone ID: MRT4577_155939C.1
gcgcaaagtgagcccattaaagctggcagctagttatttttaaccctaaccggtcacatcccgggggcgagggcctaggtgctggccccggcctatgcacacctgaacggggcacccccgaggcacaagcgctcggcccctggctgcacccagcagcgcgcgggcgaagccccccagcggctcgacacgggcgcgcccccctgcggcgactcagcggtcatggcccccggctgcacagcgcaccgcgggcgttgctcctcggtcagcgagcgcaagcaggccccccatcggtcagagcgcgacccccggccttagtctcgggggtggcgccgcccccgcaaggcgcgagcgctgac

SEQ ID NO: 61342 - DNA, 351 bp, Zea mays
  unsure (1)..(351): unsure at all n locations
  Clone ID: MRT4577_15593C.1
aaggncaaacatcaaacttcacaagggttcaagccatactgctgcaaaagagttttgggtccaacacagaggacacaacaggtccattaaaccaacgaagccacaaccacgattcatgacacacaaaccacagttgttttttagacgacgaccacccatattcccaggtacagcagcagcttaaatgaaccatggcttactgaccaccacggaggcggagcaccagggggagagtgctctccttctggatgttgtaatctgctagggggccaccattctccaactttttgccagcaaaaatcaaaccctgctggtctggggggataccctttttgtcctggatctttgcct

SEQ ID NO: 61343 - DNA, 266 bp, Zea mays
  Clone ID: MRT4577_155940C.1
cccacgcgtccgcccccaccccaggttgtccccaatgtacccaatgctcagaaggtgatgctggcaacatggatgacttcgaggagttccaggaatatgacgagttctagttctttcttagtggcaaacccccagtcagctgcttgtgaaggcttagcatctacgtttcgtatttccgcactttgataattatgttgaacaatggttatgtattagactctgtggatgtctcagacatcttgatgtaataaagtacctttccgctt

SEQ ID NO: 61344 - DNA, 390 bp, Zea mays
  unsure (1)..(390): unsure at all n locations
  Clone ID: MRT4577_155941C.1
gaanaaccggcgggagccacgcgtccgcgccgcctccaccgacaccgactgcctttcttaactgtcgtcgccatggtcagaaggccgcctagattctatcggcagaggaagaacaanccntaccctaagtccaggtactgccgtggtgtccctgaccccaagatcaggatctacgatgtcgggatgaagaggaagggtgttgatcatttcccctactgcgtgcaccttgtctcttgggagaaagagaatgtctccactgaggcgctcaaggctaccctcattgtctgcaacaagtacatgaccaattctgcatgaaaggatgcttcccaccttacggtctcaagttcacccgctccatgtcctccgtatcaacaatatgctttcgtgtgc

SEQ ID NO: 61345 - DNA, 384 bp, Zea mays
  Clone ID: MRT4577_155942C.1
caagtacgttgtcagctaacgacgtcgccaagtctccatcgcaaggacatcacaatctttcgtcggcttctcaccccattggtttgtatgtcttgatcaccctttcaccgagtcattgcgagcagagtttcatcagatgttttcagcttatttaaaggaagtgttacagcctctcaaggaggaggcttctatcatcgagttgtggctagcacgtgtggccaaccatttggagcatgcagagacgcatggggagcatgcttttgtctctgatttgcctgagctctttggccctgttctcctatgaagaacaattctccattgtcgatccttgcttctctcgcggcggcctgcacgactatcgactccttggtctgttaggacacc

SEQ ID NO: 61346 - DNA, 170 bp, Zea mays
  Clone ID: MRT4577_155943C.1
tcgcggataggatcggagagtagctagcacatctcgtctaggtgtattaacactctcctagctcgagtaattgtactagctagcactagtactatgtactgacagtttatcaaacgtactggcattagtactagaaccagatcagaaacatcagcagacagggaggatgg

SEQ ID NO: 61347 - DNA, 398 bp, Zea mays
  Clone ID: MRT4577_155944C.1
ttttcctcaaggccggccggggaccgtgtgttccggtcatctgctggttcagaaccgataatggcgcagttcccgtttggcactggctgaacctcccccggctggttgaggacgaactgaaagatgctgttgctctgggtcgcccagttagtgttgcctgcgaggagatcaccgtgttgatagtgtacgagagcggatgaacgctagcaaccatagccggaacactcccatgaatgtcatcctcgctgatctggatatcgtgtacgctatctaacacgatgaaccctactggatcatcagcaactcatggagcggtaaatggagtaataagactctcttgcacatgaatgtgggaaagaacatgtgcgtaggtactacatgagcatgcaacaatattg

SEQ ID NO: 61348 - DNA, 1763 bp, Zea mays
  Clone ID: MRT4577_155945C.1
gttcagtgtagaaatttactgctttttgccattgtttttccttaaatgcagcattacctttctctttagcagcttcagctgcttcttcattcatcgcctgtttacttgaaacactagatttcgctagtatctccacttgctcttggatggttgtatacatggtttgtgtggtgtccaacaaaaaccgatcaccaccatgcctagcaatcaacgaaactgaaatggggcacttatcatgtgtacccaaaggaatggaaacctggcaacaccctgacatgctagctaaagacaaaaggcgtagtgtctgagaattgtagctttcagacgagagttccttagcgttaagcttcggggggcaccccaaagcagttggaatcaccagaatcccatcatccttaagaagtccacttagagcagagcgcgcttctttcctcacattttggcagccatcaatatctgaatcaccatcctcagacaaatcactgactatgcgtgcatccacagcaggcttaactgaatttatccactcccatatgcttatctttgaattcccgcttgtgaagtgatatcatggagttacaaagtgctagcaacagagggaactttgaatccccattcttatgcccatttgaatagttacccaggctggatattcttgaactcaaataattttcgagattcacatgccggacttgtcttccaaagagtttctccacagattttgtcaccacctgagtaagtctcctagcaggtatctttgaaagttcaaagcaatcatctgctatgtaaaaaattctcggttggcgaataccagcataaggaagtctaagaagaagatgcccaacacgatgcaaaacacttggatcctttgcaaaccaacctatagtgtccaggctaggtgcaacaggaatgacaccactattggaaaccacagcatgcgaaggcctgaatgctaagacaccacaataagcaccaggtatccttacacctccaatcgagtcaatacccagggcaaaatctaccattccaccagcaactgcaacagctgatccacttgaacatcctcctggtactcgatctggagcggcaggatttgttggtgtatcaaaatatctattctcaccatggatactgtatgccatctcatcaataacagttttcccaacacaaatagcaccaccatcgacaagagctgaaaccactgaagatgttagcacttctgcatcgtgtgtctttgcccattcaagactgccgaaacttgtaatataaccactgacatgcaatgcgtcagcgatggcgaagcagagtccggtgagcgggtggggcgcctgcggcggcggaggctggggcggcgggaggagctcgaggcgggcgacgaaggcgccgtgatcggggcgcgcagggcgcctcagtcgccgcgccgccaggagaacgcccgcgatgccgagaccaagcagtacccagaggttagcggcggcccctgaggacgccatggacgaggaggacgggctcaggctcgtctgctccgcgcgggcaggggaaggaattcgagggctagggttttagcacggcgccaggggttttgaggcaagcgtacaagcgctgaggacgacggacggcgaggggtggaagaggaaggcgaggcggcgtgagaagcagatgcagcgtggtggatggataataccgcgggcgattgctttctcgcagacctaggagatactgcgccgaagaaagaatttcccggccggcctcgaggtacccaa

SEQ ID NO: 61349 - DNA, 456 bp, Zea mays
  Clone ID: MRT4577_155946C.1
aaacaaactggggaacgaaaaccaatttttcccaacccagggcgggtccggggggcaagacgaggatctttacatttttttccccccgaaaaaagaagggaaatgaatgggccagggcaacgggccatttttctgggccatacatgcatacccaagctttaattgaacggggggcggggggcaaaagcaaacgacgacgggtttgaatcccttcatccaaagcggaaaccatgggggggcaaataaattaggggtagtcctgggccccgacctggtggggggggcccccaatgaaaacctccccgtaaacgaggccagggagggcccccccgacaagggggccgccccattaaacccagtttccgggaaaatcccccgcggggaccggggggccaaaggagcgggcggggtttatggagccgccgcttaagggccccgcggggaggatgttggccc

SEQ ID NO: 61350 - DNA, 262 bp, Zea mays
  Clone ID: MRT4577_155947C.1
caaacacgctcacacacaatcatatttatatttttttaccgattcaacaattacatatgctaagttttttttgttgaaaacggtatatttatagtagcttgattttcaaaaacgattgggcatttaaatctgttgatttcgcaaatcatttgcatcattttatgacctcaacaattcgctaattcaaattgacacaattatgttccttttagggtacatgttggtttcttgtattacttccattcaattcattttaaaaata

SEQ ID NO: 61351 - DNA, 694 bp, Zea mays
  Clone ID: MRT4577_155948C.1
attgggtacctcgaggccggccgggatgaagtctcacccataccaccgtcgcctagactgggtctgtatccctcatcgatcggttggatcgctgattcgctctgcaccacgatcgacgagtgctaggtcaccacgcacgacttgtcctcgggactgaaaatcttgactcgcgacgaagacggtgggagcccctgtgacatcacgtgtggcgccgcgctgcctggagagcatcaccatccgttgtcgcaagggcctctactgaatcgccttctcctaccgataccacagaggtgagctgcactccgcctcgccctgtggcggaaacggactctgagagggaactcagacaatccctctggaggcctcacagtatgcaaagcgagtgcactgctccctgcgacctctcacgtgcaataacgagtagtgctgcatcacctcctgctagggcgtgaccaaactacacagcgtacagccctttccgccacgtgatggacagaacgcatcacacagcttgtccgtggtccacgatggcgtcgtcagcctgatcaccctcgtatgagattttctcgaagcacttcgttttctacgatctcccatatgacctcccatgtctctacgaccgacaacggaccctgctgataaagaagaatgataaaaggactctggtcatgaacgcaatgtgaatgcctcatct

SEQ ID NO: 61352 - DNA, 753 bp, Zea mays
  Clone ID: MRT4577_155949C.1
ctggccggggcccccgcagtccggggaggagacgactcgcgagatccaggtggtcagggaggcgtactgccgcgagacggccgcgccggcctacgtcatacccgaggagccgcgggccgtggtcgacctcgtcggctcgtacatctacggcttctgctcctacttcatcacccacctgctgttgctggtcctcttcccggccatcatcacgcaggtcgccttcccgacgctggtgaagcacgcatgcgacgacgagcgcgtgcgtggccacttcgcgcgcatcgagtggttcgagacgcccgatgtggtgcgggcggggggcctgccggggcagtacctgtgggagagcggcgggccggagtacctcggcgagccgcggttcgcgaacgcggcggggccgtcgctgctcgtgttcgaggacgcctggcccatggacgagtcagcgtgggccgcgctgggcgttgtcctcgaccccgctcggcgacgggagcaagctcctgctcacgtgccgcgacgccgacctcgcccggctcggcacggcggaccccgtggtgctgcacaagctgcagcgggagtagtactggtactacttcaaagcgttcgccttcggtggcgcccgtggtggcgcggggagatctccgagcacctggagcgcacgttcctcgacgcgcgggtgctcggcacgctgctcagggccaacttcgacgcccggttctggcggaaggcgagcgccgccatcgtcagctgcgagcg

SEQ ID NO: 61353 - DNA, 2186 bp, Zea mays
  Clone ID: MRT4577_15594C.1
gcgagaaaaaaacaaaattttttttttttcacaggaccagggcaaatttttttgtttaactcacccgggccctgcaaattaaaaaaaaaaacggcacgagggattgtccacgaaagtgcctcccctgcctcacgcccccctcatcgcgttactcgtgtgagcgcgggaggcggaggaagcccggacggttgggatggccggcgaaggagcactttgtgcttgttcatggtgaagggcatggagcctggtgctggttcaagctcgccgggcccctgggggggccgggctccaaggttcatgcattcacctagccggccgggggcttggttgccctaatttggattgtccacgaaaatgcagctcccctgcctcatgcccatcaaatcgttaaacttgttagatcggtaggcagagagaggccagactgatgggaatggcagcgaaggagcactttgtgcttgttcatggtgaagggcatggagcctggtgctggttcaagctccgctggctccttgagggtgctggctaccatgttacatgcattgacctagccggaggcggcgtcgatcctactgaccccaacacaatccggtcgttccagcagtacgacaagccactcatagacctcatttcaaccttgccggagggggagaaggtgattctaatcggacatggtgctggagggctgagtgtgattcatgcaatgcacgaatttgttgacaggatcagccaagcattttttgtggcagctacaatgctaccatttggatttcaagctgatgaagataagaaagatgggttaccaactttgcccgagaacgagattgagttgacacttggtgcaggagcagatgatcctccaacaaccattgccttgaggccagaattccagcgtgatcgactatcacaacaaagccctgaagaggaatcagtacttgcttcaatgctgatgcgtccgtggcctgcaacagctatcagtacagcaagcttcgaaggagatgatgagagattgaaccgaatcaaacgaactttcataaagatggagcgcgaccacatgctggatcctcaacagcaagattccatgatcaaaaagtggccacccagcgaggttttggtcatagatacagatcacagtcccttcttctctgcaccagaacagctgtttaatttaatagtcaaatctctatgatgacaaatgcagaaagctactgactggggttgcccagattcttgtaacactacccacaaacaataatcaccacaagatttacgacctcagatttgtcaaacatgcttctcaatgaatcttcctggcatatccgcatatctacaaatatggtttaatggtgcaagattgcaagtaaaagatcgcttagcgcaaacacttaaattcagttttttgaacaactcactcaagtcagagcctttataatttccataccaaaagttcttacatgtcacgcataaaaaacataaaatatagatgctactttggaagcacttttaattgcaccggtgatggataacaatatatagtttggaccagtttttgttaacctgagttccctcttaatgaaaggcatgtcatcggaaatgttctaaaaaaagttaatgtgatgaggccttcagagttatcactttcctctttttagcaattcaagagttcttgttttcatcaaataactgatgagcaatagaattttcacttcaaatagtttcataatatacaatcacctcatgacaatatgaaccttccttttttttttttttttttggcatgaaaaaaacatttttttttagatccagaaaccaggacatattattgtgtcaaaatcacacgtgccttgcaatttacaaaatgaaccttctttttttttttttttttttcgcaaaaaaaaaacatttttttttagatccagagaccagtacatattattgtgtcaaactcacacgtgccttgcaatttacaaactgaactttcttttttttttttttttttgcatgaaaaaaacattattttttagatccagagaccagtacatattattgtgtcatactcacacgtgccttgcaatttacaaactgaaccttcctttttttttttttttttttttttttttttttttttttttttttttttttttttttttggacagcaataaaagattcttaatttataatgacaa

SEQ ID NO: 61354 - DNA, 264 bp, Zea mays
  Clone ID: MRT4577_155950C.1
ggttacttagtcgacccatcctacttcgagacacgtaatgctccgaatcttggcgtctctttgcggacagtaaagcctgtcttgcagtttccggatggagtggtgaaacctggtttcacaattggaactagaggaaacgccgtggataaggcacaatggcccgctgacttgaaaacacaggtaattgtatagcttatgcgaattgcagcaagaataaacaatagatcatgtagaaatgtttcgagatggtactatcacgtcaat

SEQ ID NO: 61355 - DNA, 397 bp, Zea mays
  Clone ID: MRT4577_155951C.1
gcagctcttttttacttgagtaatagcacacacaacggcggatcttcactgacaatggaactggccgtgttcccatattatggaagacctgtggtcatattcatgactgtacatctgattctccaagatgaatctttacatatgcttgtcttaagaatgggcttaacatttctgtgatgaggtcatgccccgtaaatataaacgctctgtcttttgtacccctgcggctccatttaggatgacgcatctaccccatgtgtaccaggctctcctataatgccatatgaagatgcaatgccctgattgtggctcagtgcctgatgaacacgcatctgagtttgctatgaggcacactatgttcgcctaggtggaaaccatgctgcaggactgggtaatg

SEQ ID NO: 61356 - DNA, 1680 bp, Zea mays
  Clone ID: MRT4577_155952C.1
atcttgtgccagctgactcgccttctcaagttctgaaacgcagcggagcgcgccggaggagagcaaagcggacagtggaggatagagagagcagaacaccagatcagatcagatggcgcctccgtctccccagccgccgctagtgcgcgtgctcgaccgcatccgcgtctcgccgccgccggctgattctgagcaagagcccgcgctccccctcactttcttcgacgttgcctggctcttcaccggccccgtcgagcgcctcttcttcttccgccacccggagccggcctccactctcccgctcctccgctcctcgctctccctcgcgctccgccgcttctacccactcgccggcaccatcaggccccacgcgcccttcctctgctcctacacccatggtaccgatgccctcaccatggtcgtcgccgagtcgaacagccccgacgatttcgacagcctcgtagccaggtcgcgcagggacctggacaggatccgccccctcgttccgcagttgccgccgccgggggaagacggagcgttcgcgctcgccgccgtgcaggccactgtcttccgaggccgtggcctctgcctcggcgtctccgtccaccacgctgcctgcgacgatgcctccaccatgcatttcgtccgcacctgggccgctacctgccgcctaggactcgagaacgacgacggatccgaggacgccgtgctaccgccacggccggtgctggaccgctccgtcgtcgccgaccccgacgacctgcgcgggaagacgctcgccgggatggcgcgcctcgcccctcctccttctccgccgccgccgcagcaggaggagaagacgccgatggtgatggcgtcgttcctgctggggcgcgagcagatcgaccggatcaaggagggcgcggcagcaaaggcatcgtctttcgtggcggcgtcggccttggcgtgggtgtgcctcctcaagtgcggttccgttggcgtcgcgggcgcccggcgcagccacatgctcttctccgccgagtgccggtccaggctgacgccaccgctgccggccgaatacttcggcaactgcctgcgcccctgcttcgtggaagccgccacggcggaccttctctctggggaaactgaggacggggtggctgcggcggcgtcggcgatcgggagcgcgatccaggagatggagcagggcgtgctggaaggcgcggaggggtggttgggcagggtgctgtcggtgcttcccgagcggcccatgtccgtgggcgggtcccccaggcacggcgtgtacgaaaccacggacttcgggtggggccggccggcgagggtggagatggtgtcggtggagaagacgcccgggacggtagcgctggcagacagcccggagggagacggaggcatcgagctcggggtggtgttgccgccggacgccatggatgcatttgcttcgtgctttgcgcatgccgtcggcgccaacgtctgattggcattccgatccgaggtgcagctgctgccttcaacaacacatgaccaaaagattcgattgaagcagcgtattatttgtgcttgattaattgatttactttactgtcttgagagtgagctcgttcttgctgctgatgtgcgaagtcaaggaataaacaaccggattgttccgaaatcaatcaagcgtcactatgatttatg

SEQ ID NO: 61357 - DNA, 143 bp, Zea mays
  Clone ID: MRT4577_155954C.1
tcgttgacgcgtgggacgagttgctccatacgagggtggtggtaatttggaagagatttcagacgatgcaggcagatccgaatggcatgcaatacaaaaagatgagagcttgccagatatctggacacaaatacttcacattg

SEQ ID NO: 61358 - DNA, 371 bp, Zea mays
  Clone ID: MRT4577_155955C.1
aaaccggggaaattcccacgatatgaaaaccatttgcttttttgaatgttccagccccagggctggggaaaaagggaaccctgtccccctgggggggggcaaaatttgaaaaagaaaaaaaaaggaaaaaaaaataacccccccccgggaaattcaaaccctgggggggaaaccccatgttcttagggggcccccccctaaaccactcggccaaagggtggttgttgttacggcccaaaaaaggttatcccagggggtacttgggcgcccatccccgggggggggacccaaccctgagggggggggtcttgcacatgggggcaaacccccgaacaagcgggctctccgggttggggtccgggaacagggac

SEQ ID NO: 61359 - DNA, 544 bp, Zea mays
  Clone ID: MRT4577_155956C.1
gggtgtggaagaattaataataccacacaaattataaatgtactgtgatgagtaaattaaagagttatagtggggaatgaagggagagagagatatatagcaatacgtatattaccttaccttattaatgagtgcaaaaaaaacacttgtgaaggtttctactgatgcatgagtgggaagtgaaaaaaaaaaaaaaaaaaaaaaaaaaaaaaaaaaaaaaaaaaaaaaaaaaaaaaaaaaaaaaaaaaaaaaaaacccccgcgaccacccccccgttcttttggttttttttttcgccttttcaatcgaagaattcgggggccatgggcgggggaaacggccaaaagtcaaaaatggcccccaaaaggaaccccgaaaaaaacaagggcggaaaaggcagccagttggaggccaacaaaaaggccatgaacatccagggaaaaatttgaatgcaaactttaatttgcaccacttccgaggccaagtgcaaaaaacatgcggaggcgaggaatccaaagaacaacctttacaagtgtttccccaa

SEQ ID NO: 61360 - DNA, 354 bp, Zea mays
  Clone ID: MRT4577_155957C.1
cgagcttttgcttggcggtcctggagttgaaagaacaaggagtcagtgaagatgatgtgatggctgtagcagatgtaattattctcttctataatcctattgttcatttttatcaaacgcccttaaacagaaaactcaattctgggcctcaaaaaaaaaaaaaaactcaaaaaggaaaaccagacaaaaaatagaactataaaccaatgaaacccaaagacaatcgaagccatggggtccaggaaactggtacaagacgatcatcaaaaaaaaaaagggccgcccgtttaaaagaatcacaattcacagccctgtggtggagaagcaaaagttttttaatagggccaccaaaat

SEQ ID NO: 61361 - DNA, 287 bp, Zea mays
  Clone ID: MRT4577_155958C.1
tgatgaagaataatatatatggatgggtaatttagactaacacatggcacaaaaaacagagcattaaaatgccaacacaccgttgtctcattgaaactacaaaatttgacatcttaacattacaataaccaaaagattccttaaaattgccactgcaagttgagcaaatgttctgaagccaagccaacctcaaagcctggaagcctttttaagtccccccacccagatttagtgacaacatttcacttgcccgggagatttaattgtggggccatttggatccccgc

SEQ ID NO: 61362 - DNA, 282 bp, Zea mays
  Clone ID: MRT4577_155959C.1
gtcacgcatccggccacccatgatcttctggcattcttcaccatcgggatcactgggttacttaacacctttagctagcttcctctatcattgcttctacagctgttgctgccttgccttctagaatactcaccgacaacaccgtccctctgcctgcagatatcattgatactaagacttcagacgatactatactaagctcttgccacctgcttgcatctagtcactgaccacaccatctggattctcgaacatgactccatctgcttaaaaccatactac

SEQ ID NO: 61363 - DNA, 2113 bp, Zea mays
  Clone ID: MRT4577_15595C.1
ctctccttttgctcggaacgcacacacagcccggtccccgatctccgatcccctcgtcgatccaagatgcagatcttcgtcaagaccctcactggaaagactatcaccctcgaggtggagtcttctgacaccattgacaacgtcaaggccaagatccaggacaaggagggcattcccccggaccagcagcggctcatcttcgctggcaagcagctcgaggacgggcgcacacttgccgactacaacatccagaaggagagcaccctccaccttgttctccgcctcaggggaggcatgcagatcttcgtcaagaccctcactggaaagactatcaccctcgaggtggagtcttctgacaccatcgacaacgtcaaggccaagatccaggacaaggagggcatccctccggaccagcagcggctcatttttgctggcaagcagctcgaggacgggcgcacgctggccgactacaacattcagaaggagagcaccctccacttggtgttgcgtctcaggggcggcatgcagatatttgtgaagactctgactggcaagactatcacccttgaggtcgagtcttctgataccatcgacaatgtcaaggccaagatccaggacaaggagggcatccctccggaccagcagcggctcatttttgccggcaagcagctcgaggacgggcgcacgctggccgactacaacattcagaaggagagcaccctccacttggtgctgcgtctcaggggtggcatgcagatcttcgtgaagacacttactggcaagacgatcacccttgaggtggagtcctcggacaccatcgacaatgtcaaggctaagatccaggacaaggaaggcattccaccagaccagcagcggctcatctttgctggcaagcagctggaggatggccgtacccttgcggattacaacatccagaaggagagcaccctccacttggtgctgcgtctcaggggcggcatgcagatcttcgtgaagacacttactggcaagacaatcacccttgaggtggagtcctcggacaccattgacaacgtcaaggccaagatccaggacaaggagggcatcccaccggaccaacagcgcctgatcttcgccggcaagcagctggaggatggtcgcactcttgcggattacaacatccagaaggagagcaccctccacctggtgctccgcctcaggggtggcatgcagatctttgtgaagacattgactggcaagaccatcaccttggaggtggagtcgtctgacacaatcgataatgtcaaagccaagatccaggacaaggagggcattccaccggaccagcagcgcctgatctttgctggcaagcagctggaggatggccgtaccctcgccgactacaacatccagaaggagagcaccctccacctggtgctccgcttgcgaggtggtatgcagatctttgtgaagaccttgactggcaagaccataaccctggaggttgagagctccgacaccatcgacaacgtgaaggcgaagatccaggacaaagagggcatccccccagaccagcagcgtctgatcttcgctggcaagcagctggaggatggccgcaccctagcagactacaacatccagaaggagagcactctccacctggtgctccgcctccgcggtggtcagtaagccatgggtcatttaagctgctgctgtacctgggtatctgcgtcgtctgggtgccctctgggtgtacctctatatggatgtcgtcgtctaataaacatctgtggtttgtgtgtcatgaatcgtggttgtggcttcgttggtttaatggacctgttgtgtcctctgtgtgttgtacccaaaactcttctgcagcagtatggctcgaatccttatgaagtttgatgtttgaacttaaaagtctgctcagtatgtttttttttcctggttatatctcctaataactgcctgggatcaaatttgattcgctggtgtttattggacccctccaggttcttgtttaaaaccgtttcttgctgaatgttaacttggttctgtcaggctcagttttccactatggcttacattaatgtgtttggtttgttgaatgttaacttggttctgtcaa

SEQ ID NO: 61364 - DNA, 110 bp, Zea mays
  Clone ID: MRT4577_155960C.1
ggatcatgtgacttcaaatgcagagtgtttactgcctacattaaataagtggatgacgagccatccagcacgccctggggcagcaatatgcgctttggtgcagctgatgt

SEQ ID NO: 61365 - DNA, 245 bp, Zea mays
  unsure (1)..(245): unsure at all n locations
  Clone ID: MRT4577_155961C.1
gccaatgccatagacagcgcccggatagactgcaccttnnnttcctgtaagtttgttctgtatgacatctacagagtacccagggccgtgacacaagcctccagcttacttgtttggacgacagaagtgtcaagaatgatacaattttctttaaacaaaattgacactgtgtattaacgaagttgggacaatttctggaacttcagaccgtcacttatattagcaggtgctttagaaaacgccct

SEQ ID NO: 61366 - DNA, 338 bp, Zea mays
  Clone ID: MRT4577_155962C.1
tggatttctgaggaagcgggcggtgcctgcctgggtgctcgtcgtcgtcaggggcggtcgcaatgccgcgccttctcctccctctggtcctcctcctccccatagccctcaccatcatcctcctcatcctgttcccatcttccccaagcccgcgctcgcccccgcctcagtcactcccctgcggtgccgcgctctccgatgcggcggacggcctgtgggttccgaccccatcgcccgcaccgtcgccactattttcttcttcctgcccctttcaccacaattcctgtaacttgctccgcactgtaggccccagctcgcgttgctcttcctgggctccc

SEQ ID NO: 61367 - DNA, 274 bp, Zea mays
  Clone ID: MRT4577_155963C.1
attgataaatcatatcattaaattattaaataagttttgaagttgatacttgtgtctatattgagtatgcttttagtcactgtgcgagcagaaggatttacaaaagtggtgttagtggacaacgttgtgatggaagtagcactgctcctccttgcacagggtgggttgaaatgatggctcctgttttctcaagagctgcttggcgttgcatttggtttatgatccagaatgacttgatccatgcatggggtctagatatgcagctaggctactg

SEQ ID NO: 61368 - DNA, 566 bp, Zea mays
  unsure (1)..(566): unsure at all n locations
  Clone ID: MRT4577_155964C.1
cccacgcgtccgctttngaaaaaaaaaaaaaaaaaaaaaaaaaaaaaaaaaaaaaaaaaaaaaaaaaaaaaaaacaaacaaacatacgacaagcatgacaacaataataaactcttctatgagagccacacaaaataaaataaaactggcggggggccctttcttcggggtgtccctgggttaatcccccggggggtgcccagccttatatcccctttgtttgcccgtccccttttttctccagcctggcggtccctggctttttacgcccgcccgcgttgggcactcccctgcggtcccccagcctgattggcttgtgggcacgccccctttttcgcctcgttctttacggccggtggggcggttccttgccccttcccgcttttcttgcccgcgtcctggcacccggcccccccctttgtgccttcctttctcgcggggttgggtgggtttccccccccggctccctttccgtggctccctccttggcccccgtttattgcttttttgtcccttcttttcgcccaactttctccggttttcccctcacgtttttaacggggggg

SEQ ID NO: 61369 - DNA, 269 bp, Zea mays
  Clone ID: MRT4577_155965C.1
agaaaaaacatatactacaaactagaatttgtaagctgtgtgccacaacatcaagtcctgcacacacaacaagtgcgaaaccacgctatccttttgtcatcttggcaaccacctgcacttaatcattgccttgagccacggacgaagcctccgcttgcttgatcaccgcgtctgacctcgtattgcgggtttctgcagatgctgacggtactggggctacaggcttgccttgcgtctcatcctgttccaaggtggagaccatggtcacc

SEQ ID NO: 61370 - DNA, 1249 bp, Zea mays
  Clone ID: MRT4577_155966C.1
cctcgaggccggccgggagagtgtactctccggcgcagccgggcccgatgttttcactccacaagacaatcacactggagtactggacggagtcgaggagcaggcgacaccttcaccgcttcggtaacggatcgacaggcgacagctcacagctggcggtggtttggctcggggacggggtgcggcggcctccgcgagcagttcggcagcgacacggcgcggggggtgggcgccttgctggctggtgtagcgtagtgcgggccacaacgaggaagcggtggcatccagcaggcaccatcagaaaaccacatggctcggcaaccttggagcaataatggccatagaaattccccttcaaattcattagatggaggagttcctggacccatgcctctggtccctttccaggaggaacttgcagttggttgtgaagagattcgtagaattgctgctgataatactcttgtgctagaggatattctgggccttaggcaagaattagctgtcattgaagacgagatccatatacttgccaaacaaaccattcccagacttcgtgttgataatgaaatggaatacagggatattatccagggaggcatgaagttagaggaacagatgcatgctcttaaacttatcaaggaagaagtgttggtcctaagttctgaaaagatggagttggaagccttgtgcaaagagctatctgtgaaggttcagtcattgtacagggagctggagcagatccaatccgagaacaagcagatacctgctataagagaagggttgcatgatatacaagaggagatttcgagggccaggatggcatacgagcatgagaaacgtgcaaaagttgagcttcttgaggagagtcaggccatagagagtgattttatcaacataaaaatggaagcacagagattgcggacagagctggagaagaggaggtctggtgtgttcaagcatcatgcatttggctcatactataaaagatagagcatggcattgcatcctccaactgataggtgggcgtcacaaagcgtagctaagggtttggtgtctattagagaaattaatcgaactcaggagtcaagaccaaatgcgtttgtctttcggatgagcagctgacagttatttgcgaacacgttgctattattatatctcattattaagtaggagtacaaattggacgattgaaagaagaatattatcaatttggtctttattgtactcctacttattttttctctcg

SEQ ID NO: 61371 - DNA, 524 bp, Zea mays
  Clone ID: MRT4577_155967C.1
cattgggtacctcgaggccggccgcgcgacatctctggtggaagatgagatgacacggttgccaagatgtgcggagtgtgggcgcccaccaccatcttcagcttcacgattcgctccacctcttccgctcgagataccactggttccgcttctcctcgactaaacctcgagcctgcccataagcgcgagcccagatacccatctcatacactcatagctgttgctactaaggctgcatgagtcccgctcgtgaatgacagagccgaaaagcagaacctgcaagatccgggacgtccgtacgaccacggataggagactgcacatgaacatgaacagacgttctttatttctcgtgtcactgctctgaactctgtgagaggcggctatgtgaatgcactcaccatggcccctgctggtgtcgctctactcctccgcacgactggaagatctgcaattcctgcaatgcgcacctacccggattggctgtagcatgttgtgacatgagaaggctattttgtcatgtg

SEQ ID NO: 61372 - DNA, 119 bp, Zea mays
  Clone ID: MRT4577_155968C.1
cattcggctcgagaggagtcaccttcgatgttaccaccgttgccaccagaaggcggaccgatacagtgcagaagctgtgcccaggggggaagctcgcattcctgctgtatggcacttaa

SEQ ID NO: 61373 - DNA, 424 bp, Zea mays
  Clone ID: MRT4577_155969C.1
agttgtgctcttatgcgcactgctacagatatcaagagcaaggcacttcatatcgggaagcttagaaatataatacagtgtgcaatttcattgcagattttttgtgaccctttttgtgcaaggacattgtccacagtgattgttatctgatgatttctcttcccctctcttctcaatcatctaggttgcagttcttctcttcagtgggaatccactctacattgaaagttttgcttgcatatagtccttcagatgcatgtatgttgtaaaaggatgctcagaagcgcaatgtatcatttctatttagttgtacacattatttagttcctgcagcatcgattatgtgtatcagttcttcaacagaacttgcttatgtttgtccaatgctttcgttcagaataagtggagttaaaaacgagtggtc

SEQ ID NO: 61374 - DNA, 269 bp, Zea mays
  Clone ID: MRT4577_15596C.1
cgcaggattaggcgcttgcaggatgctgttacgagttcgtgagagatctaggtcgtcgtgtcccattcaactttgggtggctggaccgttctcttcttataatgtaattatttattttgtataaaactcctgttatgttataaagatgtgacattcgatccaaagaatgattataccctaaaaaactacaccgaatgaaaagcatttatatgctcctgatgcttaaggataaaaaacctaatcaagtttctgcgtcctatactacacac

SEQ ID NO: 61375 - DNA, 849 bp, Zea mays
  unsure (1)..(849): unsure at all n locations
  Clone ID: MRT4577_155970C.1
ggccgggccgggctccgctccctatatagcgttccctccccgcgccgccactctccttcccgagccggaggcggacgaggtaagaagcagcagccgcagacgcagcgcgaccccgcaaggaaaccctaccgccgccgccgcagaagcagccatgggtatcgacctcgttgccggcgggaggaacaagaggaccaagcgcgtcgcgcccaagtccgacgatgtctacctcaagctcctcgtcaagctctaccgtttcctggtgaggaggaccaagagcaagttcaacgccgtcatcctcaagaggctcttcatgagcaagaccaaccgcccgccgctctccatgcgccgcctctccaacttcatgaagggaaaggaggagaagaacattgctgtggttgttggtacaatcacagatgacatgcggatccaagaggtcccagcaatgaaggttgccgctctgaggttcacagagacagcgagggcaaggattgtcaatgctggtggggagtgcctcacttttgaccagcttgcactccgtgctccaactggggagaacacgatcctgttgaggggacccaagaatgcccgtgaggcggtgaggcacttcggcaaggcgcctggtgtgccgcacagccacaccaagccctatgtgcgctccaagggtaggaagtttgagaaggctcgtggtaggaggaacagccgtggcttcaaggtttaagtcgccctttctgtgtagtcgctgtttgcggngagcgactggtgttctgtttgagcaattgacagtaattagtaaagtactttgtactgagagtagcacaatctatcgcccccgtgttcggatgatatttt

SEQ ID NO: 61376 - DNA, 552 bp, Zea mays
  unsure (1)..(552): unsure at all n locations
  Clone ID: MRT4577_155971C.1
ctcggaattcggctcgagcacaatcttcaatcccaacgtgactgactcncgtctcagcagaactcccgcacaacgtgcgggattatttacgccttcacacgtcagtacggcaccaagctgttccttgggcctaacatgctctaccacatggcctacgacagctccaaggccgacccttgaacatgtaggacaaaccaattagctctgctagctggccacgtacacaccaccacacaaacatttccgacatatgccggacagagccccgacggaaatacaccacatcacgatgggcatgctaatgcaagagcacaacatttagggcgcctgttcaacccctacccgctgacacacctctacatccctaaactagtacaccatccactacttaataactatgataacattgactcacaattcggttgacttctacaagctcaaccgaatctccaactttcataagcagccgatgacgcagacaacgattatcaaataaaaccaataaccccgcggcaggacatgcaagacctgtgaagagaaggacttcaccct

SEQ ID NO: 61377 - DNA, 1399 bp, Zea mays
  Clone ID: MRT4577_155972C.1
ccggccggagctcttgcattaaacatcccttgtggacggatttgatttgagggtagatataggttggaacccctcgaggccggccgggacggagccaatccctcctgctggttcgatccaaaccctaccaaatcgatggccgacggcggcaactgcgggccgggcggcggcaatgcatcggcgccggtgtgcagtttcgtgaggaaaccacccaagaacatccggaagcgccccgccgcgcccgcggggtctgatgacgacgacgacggcggcggcggcgccctcgccgccgcgcgctccaagaaggggccaccgtcctcaaccgctggcaagctcgttttctccaccgcaggtgcttcctccgaggcgccgcggttccagtacgaatcgtcccggacgatccagtccacggacacccgcgcaactgccacgctcgagacggagacggagtttgaccgcgacgcgcgctccatccgcgagagacagctcaagcaggccgaggagtccctcaagaagaacccctccgctgttgctgcttccgcctccgcctccaccgctggagaggtgtacaaggggatccacggctacacggactacaaggctgggttccgacgggagcacacggtatctagcgagaaggccggcggttcgcatggtccgctccgggcgtccgcgcacattcgcctctcccagcggtttgactaccagcccgacatctgcaaggactacaaggagacggggtactgtggttacggcgattcctgcaaattcatgcacgaccgaggggattacaaatccgggtggcagctcgagaaggaatatgaggaggctgagaaggcccgcaagcgacgaattgccatgggtggtggtggtgagagtgatgatgaggcagcagatgacgaggatgaggaggaggcgctgccctttgcctgcttcatttgtcgggagccattcgttgatccagtggtcaccaaatgcaagcactacttttgtgaacattgcgctttgaagcaccactcgaagaacaagaagtgctacgtctgcaacaaaccgacgctgggcatcttcaacgctgcacaggagatccgcaagaagatggcacaggacaagaagcagcagcagcaggagtaggagagctcaaaacacaccgttgctaatttagctgtgttgtacaacgatgattggtgcgataactagagtccggtatttttcgccatcagataaaagagaccaagttttgaacgatcacaatgaatgcattcagatccagtcactagatccccacccccagacaggccatggtgcctgttggttcctggcgatgggcaaagctccaaaggtacagtgctagactgccaatgtgtttgtttgttgcagggcacccgaagctctttttttg

SEQ ID NO: 61378 - DNA, 458 bp, Zea mays
  Clone ID: MRT4577_155973C.1
tcttctaccaatctaattcctctcttcagcttcttgtgttgtgacgcatactcgtcgcagtcttgagatatggccgccgcagtttccaccgtcggtgccatcaacagagctccgttgagcttgaacgggtcaggatcaggagctgtatcagccccagcttcaaccttcttgggaaagaaagttgtaactgtgtcgagattcgcacagagcaacaagaagagcaacggatcattcaaggtgttggctgtgaaagaagacaaacaaaccgatggagacagatggagaggtcttgcctacgacacttctgatgatcaacaagacatcaccagaggcaagggtatggttgactctgtcttccaagctcctatgggaaccggaactcaccacgctgtccttagctcatacgaatacgttagccaaggccttaggcagtacaacttggacaacatgatggatgg

SEQ ID NO: 61379 - DNA, 459 bp, Zea mays
  Clone ID: MRT4577_155974C.1
gggttcaacaacaacagaacatccattcaatttcccggggaaacaaagctaaattttggaacccggggacagactggcagcggggaacacaaacaaagcagacccccctttcgacccttgggggcctacaggtggaaacacatgaaacgagacagggcgaccccccatgggacactcacccgggcagggggtcaaataaaatgcgggcgagggaaaaaacactggaaagcaagggtactgagcaaagcaaacgggtaataaaaaacaacctaacgacaaggggggggggacacacaacggggacggggacatgaaaaaaagcccaacacaggccgcgaaatgggccaacaaccccatgtccgcattgaataaaacgggggggttacagaaaatgatcttaatttcctggaccttggggaaatccccgctgggcacctggggcacggagcaagggccctg

SEQ ID NO: 61380 - DNA, 345 bp, Zea mays
  unsure (1)..(345): unsure at all n locations
  Clone ID: MRT4577_155975C.1
aataaggttaccagcaggcaagcgaacaagagaggagggggaagaacaaacagggcgggcgagcaaaaaaagccgagccgcaagggcacgaagcggagaccggacgagggagaccgcccatgcgaagacaccggcagaatccgccggcgaaaccgccagaccacggaggggcgcaagcacccccacgcacccggacaggacccaacgcgccgggacgccacccgagacctcggccgaccgcgcgtgggccaaagcaccggaaggcaccggcacccaacgacgacgtnccggacgaggggcaccacacacacggagcccacgtcgcaaggggaagtaaaaaggaac

SEQ ID NO: 61381 - DNA, 323 bp, Zea mays
  Clone ID: MRT4577_155976C.1
cagccatggcgaccttttccgcgctctccaccgccgccaatgccacccagagtctaccggggccgcgcttcactgcgtaatccggggaacggccttggcccgagcatggggcgggagcgcccccagcggagaattgcgtgccagccggacagcagaatctccgccgaccgggtccccgacatggagaagcgggagctgatgaacctcctcctcctcgacgccatcgcggtgcccaccagcatcatgcacggcccccacgccgccttcttcatccctgccgccctccaaggcaacgccggaccgccggaacctacatccaagga

SEQ ID NO: 61382 - DNA, 502 bp, Zea mays
  Clone ID: MRT4577_155977C.1
ccaaacaccccttcccccaaaaaaaaacccccccccaaaaaaaggggcaaaacaggaaaaggcaaacacggccccccagggggagggggaacacccccaaaccaaacgccccaaaacgagggaacaaccaaaagggagcaagccagcggccccaaaacaaaaaaacaacaaacccggcccggccggccgcggaaaggggcaaatcccaacacacggggggccggaacaaggggacccaagccgggaaccaagcgggggggaaaaaggggcaaagcggggcccggggaaaaaaggtaagccgcaaaaaattccacaaaaaaaacgagccgaaagaaaaaagggaaaagccgggggggccaaaggggggagcaaaccaaaaaaaaggggggggcccccacggcccgcttcccaaaagaaaaacctgacgggccagcgggataaaaaaaacggccaacccccggggagaggcggttggcaaaaggggccctcttccccttccaag

SEQ ID NO: 61383 - DNA, 293 bp, Zea mays
  Clone ID: MRT4577_155979C.1
actttttatatggacagcggatgcagggtgaaaatggtatctgttctgttgagtgaacacggtgatatatacaggtgacccagctatttattgaaactactcaaggattgatttgtgcattatgagaaaggggaacactttggttatgctgtagacacagaggtgaagctgggatcgaatcattcatagcaaggatgaatgcgatgctgacagatgacatgtgtttctcaaatgatagggtagggatctatatgctccatgctagtgaagacatccaacaacttaattacctc

SEQ ID NO: 61384 - DNA, 657 bp, Zea mays
  Clone ID: MRT4577_15597C.1
tgggtacctcgaggccggccggtcgttttcggccggggagcacgtcatgcgcccccgcctgcaaccccagctctctctcccgcattccccgctctcccccgcccgcaatcccagctctctcttcctccttcccactctccccgcccgcaatctgcccgcaatcccacgctcgcgccgtcgatgactcgccccaggaaatctcgcctccgcaacctcctccacgcaccgtcaatggaaggtccacccccacgtcgtctatggaaggtcgcgccgtcaatggaaggtctgccacctcctcctgcgcctccctttcgctgtgagcatcccctgctgcgcctccctttcgctgtgagcatcccctgctgttatgtgtttcctggggcgaggcattgaaaacttctatttaagaaaccctaatcgagcccaccaaaaccatccccatcctcctcagatcttccccggcctctgattcgccctttctgttgtgtgtttcctggggcgaggcattgaaggtggcaggtgctcgccattgaaggtgctcgcgtcccgaacttgcatacgcagctagaaggcggttttgaatcagtttttgattttacggcaagggtacaagacttttcaccgtccctcttcagcagcagtacaaaaagtgatttt

SEQ ID NO: 61385 - DNA, 1388 bp, Zea mays
  Clone ID: MRT4577_155980C.1
tattttaattaatttgttcttaagatggggtattactttttttttttttttgtcagcaagcaaagatcttttgatcagccggccacccgtaggtacagtacagtactgtgctgtgacatgatttaaggccaggggatgccatgccatccatataatatacacagtttcatttacacgagcatcctacgtcctcctaataattagtaataaataaatccctttgagcaccaccaccacgattaattagaaagagaaagaaggacaggcaaggtgttgtgtgtttgaagattgcttaattagctgcacagatttggagtacatgcgccgtctggtgtctgctgctctttccagatccgtccggtgatcctgagcttgagctccttccggtccccgccggagaagaagagcgccatgttcctctggatgatgaggccgtcgtggctgtccctcaccttgcggtggctgtcgcggacgctccttggggtgccctcccacaccatcttcctcccgttggcgccgacctcgaggctgtagctgtagttcttggcctcgttctcgtcccccatgaagcggaggaaggccatgtacacgggcgccatcccgagctggaacgcctcgaagtgcaggcagaagtagtggccgaagcagtggaacaccgtcagcatccaggtggcgttctccacctcccgcgggttggatttcacgtatctgtggttgaaggtgcagccgctgtgcatgtccaccttgtggtcgtccctcaggtgggagacgagggaagggatgtcgccggccgcgccgcactcggagccggcgtaggggcagttgtacggtctcaggccgcactgcgcctcgtgctttatcttgctgtagtaaggcatgatctcggggcaccccagcgagtagtacctgcaggggagctccagcgactcggcgactttctccagcgccaggcacctgatgtcgcccagctcttgcctgcaggtagggcaacggttgtgtactctggccttgcatgtggaacacagcgtgtgtccattggggcactggtggatcggcgggaacatggagttggtgcacacggggcactccagcagctcgtggacgccgccgttggtcacggccttgggccacggccgggcggcgccgccatccacgtcgcccgccggggcgtcgggcagcgagacgcagtccacgtccatggccgcccgccggcccgcccgcctccgctccctgggctccgggacacggaggggatgaggggaggcgtgggtggttttttttttttttttttttttttttttttttttttttttttttttttttttttttttttttggtaattttttttttccggccggcctcgaagaacccaatcgccctaaggagtg

SEQ ID NO: 61386 - DNA, 362 bp, Zea mays
  Clone ID: MRT4577_155981C.1
cgcaggtttatgctagggggcagagtgaatgatgcgccccgaagcgatccacatggtcgattgattgaagaactagagatgtctttcagcgatgcagaagagccattggagcagcatgctatgggttcaaagagagttcatggaaatgtgcttgacaagcatccacagatcctgagtgataaaagtgcacatccatgtgaagaaagcctctcatcatttgagagtggacacctcaaatctgaacaaactcctcaccaggaaagcagggcaataggggcaataggcaatggcaatcaaggaaatgagcgtattggagataacaataatactggcgactctgttcatgggagtgagcatattgg

SEQ ID NO: 61387 - DNA, 282 bp, Zea mays
  Clone ID: MRT4577_155982C.1
agataccgccccccgagttgacggccatggcgtcacgtgcgaacaccatgccaggcaagtctgttgtcctctccctcgtcacgcttctcgtcgtcctcatctccgccgcggagagctacgacggccggtatgccgtctcgcactcggccatggcgcgccgctcccgcctggggacccggcacgcgcggcaccaccgcagccacaagaaccgggtgcgcaactggatcatcggcttcgtggtggggtccctcgccggcgtcatctccgggatggtgctgtcgg

SEQ ID NO: 61388 - DNA, 373 bp, Zea mays
  Clone ID: MRT4577_155983C.1
acgcatgcgtccaagagcccgactcacctgtggttatgcacctgggcgttcctcctgtggtcatgggcgacctacttggcgctatggctggccctacacctagcgctggccctggccgcgcagcgcctgcgcctgcgcctgacggttccgctgagcaccatgcccgcggcgcacgcgctgctgatggccagcgcgtcaaccgccatctttaccgggacgatgctgtcggcggtggccgatatacgggacacgccgtggacatggcgacgccgaagccgcagcagcccgctgcggacactgctgtgcttccctgcccggacacgctcctcaggccgcagctttttctgggcctacgcctactacctggcccgct

SEQ ID NO: 61389 - DNA, 441 bp, Zea mays
  Clone ID: MRT4577_155984C.1
cttacgagatctgcatgcctccctgaggcgcagcaccagtggagggtgctctccttctgatgttgagtcggcaagactataccctcatgtggagttctctagacaccattgacaacgtgatggccaagatcaatgaccatgattgcattccatccataccattaacgacttcatctgttgctgtgaagacatccttgtgtgacggtcgcacgcgttgccgactacaacattccagtaaggagacgcacccgtccacttgtgggcttgcgcctcaggggtaggcgtgcagattctttgtgaagaccctggccggcaagactatcactctggctgtggtgtcttcagacaccatcgactctgtgacggctttgatccagggcatggatggcatcgctccttccttttcgggttgtggtcttctctggcgggccgctggtggtt

SEQ ID NO: 61390 - DNA, 346 bp, Zea mays
  Clone ID: MRT4577_155985C.1
cttgggtgggtttttttttctgtttggtttttctttttgattttttttcaaacccaccataattgtatcatatatccaagaggagggcataaaaaatcctggcatatttaggcggaacaaaccaaccaatgcacccggccggaggtacaacaggagggaaaagtaaaatattgacccagtggcaaatcttgaacccagttccaaaattagcccgggacaacccactttacaccccccttgcccaaaccttctactggcgaaagcctttattcacctcaatgcggggctccacaccctcttcgtactgctggtaacgccaccccctttcccccccgtgttgtttcca

SEQ ID NO: 61391 - DNA, 301 bp, Zea mays
  Clone ID: MRT4577_155986C.1
ggtaccgcggcccttcctcgagttttttttttttttttttttttttttttttttttttttttttttttttttttttttatggggagaaaaaaggaccgccatcaaagggcaacctgttaaaacactgggagctgcattgtctgtacttgcccggccaaataccgtactttcaaaaaacaacagggggagttgcctttacttttaccccaataaaagggcactttgcaatacaaatatgatacatgggaaaaaagcactccacaccgccaaaaagctgcacgattttacctggggccgaatt

SEQ ID NO: 61392 - DNA, 944 bp, Zea mays
  Clone ID: MRT4577_155987C.1
ctcaactccatggtgctcgccaacaactcggagaacgtgctgctcccgctcaacgagccggtgcacggcaccaagcgccgcagccagatacaaacgttcctggaccaccacggcggccccggcgtgcagcacatggcgctggccagcgacgacgtgctcaggacgctgagggagatgcaggcgcgctcggccatgggcggcttcgagttcatggcgcctcccacatccgactactatgacggcgtgaggcggcgcgccggggacgtgctcacggaagcacagattaaggagtgccaggagctaggggtgctggtggacagggatgaccagggcgtgctgctccaaatcttcaccaagccagtgggggacaggccaacgctgttcttggaaatcatccaaaggatcgggtgcatggagaaggatgagaaggggcaagaataccagaagggtggctgcggcgggttcggcaagggaaacttctcgcagctgttcaagtccatcgaggattatgagaagtcccttgaagccaagcaagctgctgcagcagctgcagctcagggatcctaggacagagcttggagacgagcaactgctgtggcactttgtatcatggaacagaaataatgaagcgtgttctttgtgacacttgacatgcaaatgtttgtgttctgtaaccgttgaatatatgggacgatgctatctatgatggtgtaatagatggtagagagggtacaaccctgatactaatgatgcactattgcatctctgttgtacaagtttgcatgaaaataacgacgagggtcagtatgaggcataatgatctgctcctgggattcttgtactcacctggtgctttttttttatgagaagacagctgtcgttggctcctgtcgatgtgatcctgcggcaagaatacaacagattgcgcattgatctcagtaacc

SEQ ID NO: 61393 - DNA, 380 bp, Zea mays
  unsure (1)..(380): unsure at all n locations
  Clone ID: MRT4577_155988C.1
acaagggacacacaaaagagggcagcagcaaangacagcgacaccgacaacgaagcgcgaaagcccaaacacngggangcgggcgaaacnacaaggcccagcagccnacacgagcgaggccncgggcnncaggagaccannnaccacggagaggcccacgacgaccccgagcgccncggcgccggcgaccaccgcggccggcacnagcccggccccggcgagccccgcgccggccaccagcggcaggcccncgcgggcgaccaccnncaacgccgccggcaccgcccccggcacggccnccccgcccaccggcggggccnccnacaccgcccgcaccggcnggcccgggaaanccggaccggaaccggcaggcggaccag

SEQ ID NO: 61394 - DNA, 236 bp, Zea mays
  Clone ID: MRT4577_155989C.1
gcacgaggttagaccacctgcagggccagctgatcttctcccaaggggaaccccttcagtccagtggcggcggctggccgtcgtcgtctgcccgcgcttggctcgaccccctcgtcgcgatccaccagcaccagccgtcgacgatgtccgggcaggtcggcttcggtcatctggttggcggcgccggaagcgggtttatggggttcctcgcgccgccggcccagcggctgcagctg

SEQ ID NO: 61395 - DNA, 1216 bp, Zea mays
  Clone ID: MRT4577_15598C.1
aagttcaaacatcaaacttcataaggattcaagccatactgctgcagaagagttttgggtacaacacagaggacacaacaggtccattaaaccaacgaagccacaaccacgattcatgacacacaaaccacagatgtttattagacgacgacatccatatagaggtacaccagagggcaccagacgacgcagatacccaggtacagcagcagcttaaatgaaccatggcttactgaccaccacggaggcggagcaccaggtggagagtgctctccttctggatgttgtagtctgctagggtgcggccatcctccagctgcttgccagcgaagatcagacgctgctggtctggggggatgccctctttgtcctggatctttgccttcacgttgtcgatggtgtcggagctctcaacctccagggttatggtcttgccagtcaaggtcttcacaaagatctgcataccacctcgcaagcggagcaccaggtggagggtgctctccttctggatgttgtagtcggcgagggtacggccatcctccagctgcttgccagcaaagatcaggcgctgctggtccggtggaatgccctccttgtcctggatcttggctttgacattatcaatggtatcagaagactcgacctcaagggtgatagtcttgccggtcagagtcttcacgaagatctgcatgccgcccctgagacgcagcaccaagtggagggtgctctccttctgaatgttgtagtcggccagcgtgcgcccgtcctcgagctgcttgccggcaaaaatgagccgctgctggtctggagggatgccctccttgtcctggatcttggccttgacgttgtcgatggtgtcagaagactccacctcgagggtgatagtctttccagtgagggtcttgacgaagatctgcatgcctcccctgaggcggagaacaaggtggagggtgctctccttctggatgttgtagtcggcaagtgtgcgcccgtcctcgagctgcttgccagcaaagatgagccgctgctggtccggggggatgccctccttgtcctggatcttggccttgacgttgtcaatggtgtcagaagactccacctcgagggtgatagtctttccagtgagggtcttgacgaagatctgcatctttggatcgacgaggggatcggagatcggggacgggcggtgtgtgcgttccgagcaaaaggagagaag

SEQ ID NO: 61396 - DNA, 152 bp, Zea mays
  Clone ID: MRT4577_155990C.1
cataaccggattatggcggatgctccgcacatgctgcggctattgcacgtgctcacctgcctcgtcgtcttcgacctcgacaatactctccggttcttccattgcgagtgccgcttcaatagggattcgccgagccttttcaggcatgccaa

SEQ ID NO: 61397 - DNA, 394 bp, Zea mays
  unsure (1)..(394): unsure at all n locations
  Clone ID: MRT4577_155991C.1
atncacgtgtgggtttttttttacaagtgatttattattttttttttctcattttttttaaatttaatgttttctttttattgttttttttttttttccacacccccccaaaaagcttctttgttttcaaaaaattttttgggttaaaaaacaggatttataacattttgcccgtgggattaataaaaattcttacgcccaccaaaatttttatcaaaatatcccccctcgtgtgaactaaatattttttcaccctacagttgaaaaaaaaaacccctctggtttttaaaaaaaaaatgggggggaactcaattatcccaaaaataaatatttctttctttttaaataatgccccagatgacatttttaccatactctagatgcgaaaataaat

SEQ ID NO: 61398 - DNA, 679 bp, Zea mays
  Clone ID: MRT4577_155992C.1
gaaaacggaaaaggtggggaagtcgtcaagaactcctccgatcccacctgtccatcgatcgatcgactcccgttcccctcggaatcgaggcggccccgagaatcccaacgcacgagaagaggaacaagggaaccaggcggagcgaagagagcccggggtgatgaattgttacggtttatggacggagcaagcaaggagcctctccgcaaggactactacaaagttctggaggttgattatgacgcttctgatgacaccatcaagttgagttatagaagattagctttgatgtggcatccagacaagcataagggtgataatgatgtcacagctaaatttcaggagattaatgaagcatacaaggttttaagtgacccagctaagcgactagaatacgatgtttctggttgttatgagattgatcaatatactttgcgtgagtaccttgcaaaatttaagggtatgatacttacctgtaatggccttggcatagatcatccttctagtaaatgggcccgacatttgagggaactgaagccccattgatcgacgggtacggattgtaacattgttgatgctgatcggatttactgttccatgtaagacacaattgggttgtatcacagacaatgatcccttgccactttctgcgcaaaagatgcatgtatagtaagggtct

SEQ ID NO: 61399 - DNA, 257 bp, Zea mays
  unsure (1)..(257): unsure at all n locations
  Clone ID: MRT4577_155993C.1
ggcctgcagcgccaggcacgcctctctgctactgtgctggctgacgccggtggggtgtcagngaactacgagctgctgccacccctgctgccgcggtcgaccgccggccccggaccgagatcgacgctcggtcggcggtgctgctcgcgctgctggtcgccagcagccgcgtccgtgtctgncncgccgttggggccaaggcgcgcaactggctgggcgggctgagccgcgcgtcgttcccaaagggttcgtgttcg

SEQ ID NO: 61400 - DNA, 825 bp, Zea mays
  Clone ID: MRT4577_155994C.1
ctgagcaggtgacatcatgcaagctgtggcgtcaagtatgagagtcattcaaacctccagagacatgcacaactgtttcatggactttccgtaacttctatgagaaggcactccttgaatacgagaaacacaaaatcgaaacaggagagttccaagtagcttcatctgctctaccagaccggtttggttctgagagtcaggtgggtggaagccatgtatctggttctggaagagccagaagagaatctgcaactcgtgcaatgcaaggttggcattctcagcgcctactagggaatggtgaaatcgctgaccctataattaaggataaagggcctattgtcttaaagaaggataaaactcctaaaagcagtggttctgccaagaggaaaaggataccatcccttgaagatgacatggtgataccttataaatccgataagctacaaaatgactcaatggttattgacatgggccctcctgctgattgggtgaaaataaatgttaggaaaaccgtgagtatatgtatatcacctttatctgttgttaaatcttatagctctatgctgtttcttatttgtttgttgtttcctcatagttctcagttccgttaattcctgaagcaaaatttggagtgttgaatgccagtgaatgtgtgaactgctgattctttatgaaatgtatatatctcaggtcctgtggttattatggaattttcataaagaatataggctaacggctaaccaggaattagtgaaactacaatgacttgagggcattttgtgaaagagggtatgttttagttaattattttatttcattctattt

SEQ ID NO: 61401 - DNA, 227 bp, Zea mays
  Clone ID: MRT4577_155995C.1
attccctggtatgtttttttgggaaacccggcccttcccccccccgggagggatacaacgaaaatctctcatgaggacggaaagcttaacccccaattttttgggttgtaagactattaggcaacatcagatgtttacctgcccccggaccactgaccttcgtctctcgcccctgtatttcttggctgtccggataactatacctcttcccatgaatgcttcctctt

SEQ ID NO: 61402 - DNA, 403 bp, Zea mays
  Clone ID: MRT4577_155996C.1
tattatttttttttttttttttttttttttttttttttttgccttaaatttctttcctaaaaaaaacaagggttaccaaaaggtttttaaagggtcgtgccaaacttttcttatattaaaaggttaaatttgtatagggaacgccatcattcgataaagggtttgggggttacaaatttacacaaagatttctgacaccaaattgcccaaaaccaaatttttttatgtttaaaagaaacaatagccaaatcttgatccggctctttcttttttttgttggcatcatgctgctaaacaaaagtatcgggatgagcaccgtattatcccaccatttacaagattaactggtcccgtgtcccctaagaaacggggattttccgcatcaaggggggtaacttcttgg

SEQ ID NO: 61403 - DNA, 354 bp, Zea mays
  Clone ID: MRT4577_155997C.1
agccaacctcaatataggaggggagctattgtgtcgtcggccagacaaacagagcactagtcatcctccttcctgtggatagcattgcctagctaaacaaaagcctattgtacaccgggggaattcctggcagatgctttcaaaaatttcaagcccaaccgctgtgccaagactctggcttatgccgcatgaacctttctctcagagactaaatctgaacagttgcccacaagtacctgtagcacagagtcggggacacagccgtcgaataactgtacccatctatgaacgttggtgacagaatcagagcccgtcacgttataaacaatgatgacaccaccggcaccacgattg

SEQ ID NO: 61404 - DNA, 231 bp, Zea mays
  Clone ID: MRT4577_155998C.1
tttttacatgctacaattctggcccctctcaaaaacccaaggaaggctgtgaacaaaagagcttgcgaccagggagcttgttaggcgccattattaatcacccaacaccgttgtgttctccaacacaggccaccatctattacatatgtgcccactttcaaaaacacatatgctccgaaaagagatataaaaaatgcgctgcgctgtgtgcaacgctgagtcccccatgtg

SEQ ID NO: 61405 - DNA, 802 bp, Zea mays
  unsure (1)..(802): unsure at all n locations
  Clone ID: MRT4577_155999C.1
tggtacgcctgcagtttccggtccggaattcccgggtcgacccacgcgtccggacaagtatttaaatgcttctaaaccttcagtacatcagcaagatggttttagtaattggaattccagttgcaattcataaataatcaagtaaaattctatttattttcattttttttcaagttcccagattggagcttgtttaaagcttagtatttctgcctataaatttattctgttaatatttagcataaacttaatgtaggcattttatttatatattttgggagctgtgttacttaatgtcttctaagataagagttggcttgtccaagacaggacttgttctctctacagctactcacctatgttctttcaagtcttactacagttttattattgtaggatttatgcttggtattaaggatgctcttccacatgtgaaaagtcatttaaacatgagaagacggcattctgcatgggtgcagaaatggagtgggtctggtttagtatgcattatttcaaaactgtgaatgtgtgttagtaacactagcaatcacaaggtgactacattgcatctaatgcattacaaaaaagcagatagatttgctggggaagcactgaatggcttcataaaggacaatcttaaactatgagtttgttaaaaccttatattcttttttggtttactcatttgacacttgattganacagagtaaattactcctaaaaacagtgatccagtttctgaaggctgcagcctgtattcattgctaatgtttgaaggttaaaagtctgtggatttccccta

SEQ ID NO: 61406 - DNA, 240 bp, Zea mays
  unsure (1)..(240): unsure at all n locations
  Clone ID: MRT4577_15599C.1
gnggccgctacgacgcacctgaccgccgtttccttcccccccgcagccgccttctcgtcgggatcccagaagctgctgcctaggtcggccggggtcggccggcgtctggtggagcgggcagacgtcaaggacatatcgacgggcgaggcctgccgccgcgggctcgccgccggcattgacaagctcgccgacgccgacagcgtcaccctcggccccaaagatgttcattgcaggggagga

SEQ ID NO: 61407 - DNA, 186 bp, Zea mays
  Clone ID: MRT4577_1559C.1
cactcgttcgccgacgcgtgggtgggacctccctaaatttgcaaagatgggcgacaaggactggtacggagtgtaccataaagaccggaagtgcccgacagtgctgatggctaaccgggccactgacgcgggttattggaaggcgaccgctaaggacaatgatgtctacaacccctttgcagcgga

SEQ ID NO: 61408 - DNA, 2206 bp, Zea mays
  Clone ID: MRT4577_155C.1
cctcgaggccggccgggaaaaattcggcacggggccaaaaaaaggcccgctagggcgccgagacagcggaacgttctctgagtttgagcacgatctccccgggccccggcgccgccgtacgtcccccttcggcgtcgccagccgcctcctggctccggctccttcatcgcctgctccagcgtgcctgcgtgacataagcgtcgattgattggcgagaaaggggacgaatgcagccgccgttgcggggcgcagggagcaatggctaacgtcgccgctatcctcaccgtcccctgctccgcgggccgccgcccgaagcggagcagccagccccgcggatgcggctccgtctccgtctccgtccccgtgcgtcctccggcgcaaacacggtgactctgctggactacggcgcggggaacgtacgcagcgtgcgcaacgcaattcgctacctcggcttcgacatccgcgacgtgcagagcccggaggacatcgtcgccgcggaacggctcgtttttcccggtgtcggcgccttcggctccgccatggacgtcctcaacaggacgggcatggccgacgcactccgtgagtacatccaaagggaccgccccttcctaggcatctgcctcggtctccagctgctcttcgattccagcgaggagaacggcccggtgagcggcctcggtgtgataccaggcgtggtcaggcgattcgactcctcaaatggcctcatagttccacatattggctggaacgctctccagatcaccaaggacacaccactgttgcagggagctgatggccagcatgtgtactttgttcactcctaccgcgtactgccttcagatgctaatagaaactggatttcctccatatgcaactatggtgacagctttatatcctccatctcaatgggcaacattcaggcagttcaatttcacccagaaaagagtggagctaccggactttctattctaaaagaatttctcagacctaactctcttgggaccaaggtcccagcacgtaggaaagcatcaaaacttgcgaagagagtgatagcatgccttgatgttcgttcaaatgataaaggagatcttgtggtaacaaaaggcgatcaatatgatgtaagagatcatactagcagcaaagaggtaagaaaccttggcaagccagtcgatttagcaagccagtactacatagacggtgctgatgaggtcagcttcttgaatataactggtttccgtgactttccattgggtgatttgccaatgctagaggtactgcgttgtgcctctgaaaaggtttttgtgccacttacagttggtgggggcatacgagacttcacagatgcaaatggaagatactactcaagtttggaggtagcatcagaatatttcaggtccggtgctgacaaaatttcaattggaagtgatgctgtttatgctgctgaagcctttttacagactggtgtaaagacagggaaaagcagcttggagcaaatctctagagtatatggcaatcaggctgtagttgtcagtattgatcctcgacgggtatatgtcaaaagtcaagaagatgtgccatttaaaactgtaaaggtgtccactaaaggtccatcgggagaagaatatgcatggtaccagtgcacagtgaatggtggacgtgatagccgagctataggagcatatgaactagcgaaagctgtggaagaattgggcgcaggagaaatacttcttaactgcattgattgtgatggccaaggttgtggatttgacatagatttggttaaaatggtttctgatgctgtgacaatccctgtcattgcgagcagtggtgctggagctgttcaacatttttctgaaatttttgagaaaacaaatgcttctgctgcccttgctgctggcattttccaccggaaagaggttcctatactagcagtgaaagagcatctggtcaatgctggtgtggaggtcagggtgtaacagggagatccttcggtttattgaaatattcttgtttgatgtcacaactgctatcagttctgtttctctgatgtcgcaactgctatcagatctgttggtggcagctggcagtgcataggcccctgtcgagaactgcagtttggtaataaattaataatgtgatgcttaacagattaagcatccgcttcttttgcttgtgtaaaaaaaaaacggtgctaattgaccctctc

SEQ ID NO: 61409 - DNA, 604 bp, Zea mays
  Clone ID: MRT4577_156000C.1
ttttcttatgttctggggaagccacaacacatcaaacgaaaaaactttattttattgaactgctatactcatcaagtagaatcttataaagcaggagcacccgactacatgatgaggatttgttgcgtactaacgacttgactagggcttctgtacaaagtcaagcttggttgcaatggcaacaatagctgcagttgttagagggtgccagcgttaggcgcagcgtgctggtagaacggaaacaactgtggttgtgtcaagaaggcagtggtgctcacaccagctagctggctaaatggtactagttgcatgctgctgtaaataagcaggagagttcaatgctgccagttggttgaatggaagaaactgctgggggtaggcaacatctatctggatgaatggtagcagttgttgttgcaaataagaaacatagttcaatgcaaatagttggttgaatggaagaaactgatgttgctgagagtacgcagtaagggttgctaacacaaattgttgtatttgatgtgccctgatgttatgagccaataaatgcaccataggtaactgctgtaatacggctgatgattgttggatgaactagggtgat

SEQ ID NO: 61410 - DNA, 1219 bp, Zea mays
  Clone ID: MRT4577_156001C.1
actacttttgggggaccctcgaggctcggccgggaaaaaagaactcgctccattcagagattcagagaagacccgcctctcccgtgaggccgtgacgcgacgccggatcgtcctcgtctcctagctcgtggaatgaagggaggtggcgtcatcagggccgccggcggaggtgccggcggtgcgggtctgttgcgaacgcgactgcggcttcccgtggtgctcctctcctgctccctcttcttcctcgccggcttcttcggctcgctcctcttcacccaggatccggaggaggcggatatgccggtaccgagagagcggctgttggaggcggcgtggccggagatgccttacggcgagtccggcgaggctgcgccgtccttgatcccataccagattttgagctggcagcctcgtgctttgtactttccacaatttgcgacatcagaacagtgtgaaaatatagtaaaaacggcaaaggagagacttaagccatcaacattagccctgaggaaaggagaaaccgcagagagtacaaaaggaatcaggacaagttcgggaacattccttagtgctaatgaagacccaactgaaacccttgcggaaatcgagaagaagattgcaagggctaccatgttacccagaaatcatggggagccatttaatgtcctgcggtataatattggacaaaggtatgcttcacattatgacgcatttgacccagctcagtatggtccacaaaaaaatcaaagggtggcatctttcttgctttatctcacggatgtcgaagaagggggagaaactatgttcccatacgagaacagtgagaatatggatataggctatgactatgagaagtgcattggcctaaaggtaaaaccaaggaagggtgacggactcttgttttactcccttatggtaaatgggaccattgaccggacttcacttcatggtagctgccccgtcatcaaaggcgagaaatgggtcgccaccaaatggatcagagacaatatagtgtagaaatcgaaaggctcaggtgtcatgtgccctccaaaaaaatagatcatgcgcacatatactgaccatatacttcagtgtttgttcaattgccatggacagttggaccaacggaaggaaagtgtaaccaatctatttgcatcgtgtcaatatatagcctacaacttacatgtggccaagtggcaagtggacattccatgatctc

SEQ ID NO: 61411 - DNA, 1664 bp, Zea mays
  Clone ID: MRT4577_156002C.1
ctacactatattgtctctgatccatttggtggcgacccatttctcgcctttgatgacggggcagctaccatgaagtgaagtccggtcaatggtcccatttaccataagggagtaaaacaagagtccgtcacccttccttggttttacctttaggccaatgcacttctcatagtcatagcctatatccatattctcactgttctcgtatgggaacatagtttctcccccttcttcgacatccgtgagataaagcaagaaagatgccaccctttgatttttttgtggaccatactgagctgggtcaaatgcgtcataatgtgaagcatacctttgtccaatattataccgcaggacattaaatggctccccatgatttctgggtaacatggtagcccttgcaatcttcttctcgatttccgcaagggtttcagttgggtcttcattagcactaaggaatgttcccgaacttgtcctgattccttttgtactctctgcggtttctcctttcctcagggctaatgttgatggcttaagtctctcctttgccgtttttactatattttcacactgttctgatgtcgcaaattgtggaaagtacaaagcacgaggctgccagctcaaaatcaaaaaattatcctcaatgtagccaataatctgctgaactacattaggtaaatgatggcagaaacagatatacaactgtgattggtgaggttgactgaaagtcccacaacacccacacctcctgcatttccctctactgtcaggatgcctgctaattttgaaatgccaaacaaagttcccaacacgcaagaccaggagaccatgaaaattgtatgcactcaactgacccgcaaactcaatgcccgtcacgccgaatgtatgacgaaacaagcaaccgccccatgcagagatggaatcggaatgagacatcacctggtatgggatcaaggacggcgcagcctcgccggactcgccgtaaggcatctccggccacgccgcctccaacagccgctctctcggcaccggcatatccgcctcctccggatcctgcaccgcacctcccaccgcaccacagccagcccacccagatcaggagcggcgctacaaggaagctactaatcggaacgtggctcggggctcgccgtcgcgtacctgggtgaagaggagcgagccgaagaagccggcgaggaagaagagggagcaggagaggagcaccacgggaagccgcagtcgcgttcgcaacagacccgcaccgccggcacctccgccggcggccctgatgacgccacctcccttcattccacgagctaggagacgaggacgatccggcgtcgcgtcacggcctcacgggagaggcgggtcttctctgaatctctgaatggagcgagttcttttgttattagtcaggcgtccgagcactgacgggtgggaccgaatactcgatagacgggcccggtgcgcgacgtcacgtgtctgtaaagaacacgcagtcagttacggtgggcccaggcgcgcacacacaagtctatggtcatgtttggttcagcttttttctgaccagcttttctgaaaatctggctgtggagagaatctggctgtgaggagaatctgagtatcatttcgattacgtgtgaaggaagataagttatttatagggctca

SEQ ID NO: 61412 - DNA, 308 bp, Zea mays
  Clone ID: MRT4577_156003C.1
cacacacaaacacgaacgtgacatgacatttcatgagcaggattccttgtgctaaaactccgacgagcgagggacggaaatttacgacaggatcccccagccgacatcgagcccaaggcctatattgggtgcaccagacccgcatatggaaggaggtgggaagataggcaggtgccacggggtcgccgatttcccagagtgggtaccgcacccagttggcccagtgtgcacaatggtgaacaacatgacctagaagggcacggttgtgtacttgcggatatacggccgctaggtggccccggagaatt

SEQ ID NO: 61413 - DNA, 254 bp, Zea mays
  Clone ID: MRT4577_156004C.1
ggcccaaaaaccatgcaattcctgactcaatttattccggcccacccacgacaaaaatagactttttcttctggtcactctaacgggcctgagccatgcctagaaaaattgttttttcactggaaaggattattacatggggaaagaacccttttatggggccgctgcaacaactgctgctggagccttcttgggcttttccacaacgattgcctgggtagtcagcaccattccagccacgggggggtttttga

SEQ ID NO: 61414 - DNA, 1418 bp, Zea mays
  Clone ID: MRT4577_156005C.1
ggcatatggaaaaattactggagactatgctctacaagaaagggttgatgtgcagacaggcatcaggctaatactgaatttgtgcctgtctgatggatttgacatgtttcctacattgcttgtaactgatggatcatgtatgattgatcggcggatgggaatccatggtcatcctctggagatccaggctctgttctattctgctttacgctgtgcccgagaaatgattggggtaaccgatggatccaagaacttgatccgtgctattaacaacaggctcagtgctctgtcatttcacatcagggagtattattgggttgatatgaagaagataaatgagatttatcgctataagactgaggagtattcccatgatgctattaacaaattcaacatctacccagagcaaattccatcttggcttgcagactggattcctgtgaaaggcggttaccttataggcaatctgcagccagctcacatggatttcaggtttttctccctagggaatctgtgggcgattgtctcatctcttgctactcaaaggcaagcagagggtattctgaaccttattgaagccaaatgggatgacatagtagccaacatgcctcttaaaatatgttaccctgcactagagtatgaggaatggcgtatcatcactggcagtgatcccaaaaacacgccctggtcgtatcataatggtggatcttggcctacattgttatggcagttcaccttggcttgtatcaagatgggtaggcgtgacttggcacggagggcagttgaggtggcagaaaagaggctctcagatgacaagtggccagagtattatgacaccaggacaggaaggttcattgggaagcaatcacggctatatcaaacttggagcattgctggatatcttagctctaagatgttattggactgtccggagatggcatccatactagtatgcgatgaagacttcgagctgctggaaggttgtgcttgcagcttgaataagaatgctcgcaccaaatgctcacgtcgtgcggccaagtcgcaggttcttgtgtagttccatgcctgttcttgacccaaaagctgcaacgctccttcaacttgttgtaattgttcgtcacagaagctggcactagttactagttacttaagcagaatgatcacaaaccacctatgccgatttttttggcgagttcgtggttgatccatttatacaggagtatatgttgttgtctgtacattttatctaatggattttatgtatcctgctggtcaactcaagttgattggtagttttttttatgtaagcagacagcatgtaaatatcaccgctcgttacaagtgtactaaaaaaagtgtaaaaaagagaaaaagaggggaggagaggggaggaaaaggaaaagggggggcccggtacc

SEQ ID NO: 61415 - DNA, 682 bp, Zea mays
  Clone ID: MRT4577_156006C.1
ttttttttttttttttaaaacatattttacatttccaaagctcaagttttacaacataagaagaattgtatttattacaagtcctgatagtacccaaagtgcataacttattataataattggaagggtgaagcctttccataagagatacacataaacattctaagcttcaaggcctccacatgaagtaactaaccaaaagataagggaataaaacttctccactaggtagggactagggagtagggagcaccacacgacaatgcagtaggacaacaatttgccgaagctccaaaagaccaggacgttgtaacagcgaggtgaaactcgacgacgccgaatccgtaaaacgatggcgaggagacgagcgccaggaccgaagaagagtttgctgtgacacacggtacggacgaggaagagctagggatgactgagacgacacgacagcgtgggacactgagatccgaccgcgaggacagaaaggcatgcatccgccgccggtctaagctggagtggaggtcggcgcggcttggtcggaggaccctaaacccggtgaggtaaagctgtagtgctgcagcgccggcgtggtcgcggctacacaaggcaaggcgatctgctagagctcgaagacagcaggttgcactggaccaacacctaagcaaagggataaggaagcaagttt

SEQ ID NO: 61416 - DNA, 284 bp, Zea mays
  unsure (1)..(284): unsure at all n locations
  Clone ID: MRT4577_156007C.1
ggccgggcaaaaaaaaaaaaaaaaaaaaaaaaaaaaaaaaaaaaaaccaccggcaggccgcagcacaattggcctccgctcttcccttcccccaccaggcccggtctctctccttctctctggactctcctctctccgtaagccgcggtccacctccgcagcagcanagcaagcggcgaccaaatgggcgcctcctaggagacggcggaagctgctgccgcgggcggcgtccaacaacctggggggtgtcgttcggcgagatgctgatcgacttcgtccccgac

SEQ ID NO: 61417 - DNA, 735 bp, Zea mays
  Clone ID: MRT4577_156008C.1
ttataaatcagggatcaaggtatagtattcaaattccaaggaatggtaatgcatcaattgttcatcacacaactcctatcacctaatgcatcatttaaggtgataaagcatttaaaacacaaggaaagggcaaatgcaccggggcttgcctttgttgcagagaagaggttctagatacttctaacacgatgatcagttagatggctccatccatttgatgaacaggcactggagtagactcctcttcagcaaccacttcatcttaaatcttcactctttattttgggagctcactaggtagggagtagggagcaccacacgacaacgcagcaggacaataatttgccgaagctccaaaagaccaggacgttgtaacagcgaggtgaaactcgatgatgtcgaatccgtaaaacgatggtgaggagacgagcgccaggaccgaagacgagcttgctgtaacacacggtacggacgaggaagagctggggacgactgagacggcatgacagtgtgggacactgagcgacgtcgatccgaacgcgaggacaggaaggcacgcgtccgccatcggtctaagctggagtggaggtcagcgcggcttgggcggaggaccctaaacccggcgaggtaaagctgtagtgctgcagcgctggcgtggtcacggctacgcaaggcaaggcgatctgctagagctcgaagacagtaggttcccggccggcctcgaggtacccaatg

SEQ ID NO: 61418 - DNA, 335 bp, Zea mays
  Clone ID: MRT4577_156009C.1
gagaaaatgcagggtactttcatttttagtgccggctgttagcattaaatggaactgcaaaagattcaaactgacaacaactagcagagaaagggaaaatcaacgcatgatggccacatacatgcacgagctggatgaacattgcgagtataggatcaacgtccaaagctatcgatatcttatgttcacaacggtgcaatgcggacgcgcgcacaggtacacaaaacgggcatgtgatttcagggaagcattggcaccagtgaccttgtgctacttatgtctgcagagcaccttcctcaccttcgttgcaagctgtatgatcgaatcatcttagt

SEQ ID NO: 61419 - DNA, 2194 bp, Zea mays
  Clone ID: MRT4577_15600C.1
cccccccctcgagttttttttttttttttttttttttttttttttttaagttcaaacatcaaacttcataaggattcaagccatactgctgcagaagagttttgggtacaacacagaggacacaacaggtccattaaaccaacgaagccacaaccacgattcatgacacacaaaccacagatgtttattagacgacgacatccatatagaggtacaccagagggcaccagacgacgcagatacccaggtacagcagcagcttaaatgaaccatggcttactgaccaccacggaggcggagcaccaggtggagagtgctctccttctggatgttgtagtctgctagggtgcggccatcctccagctgcttgccagcgaagatcagacgctgctggtctggggggatgccctctttgtcctggatctttgccttcacgttgtcgatggtgtcggagctctcaacctccagggttatggtcttgccagtcaaggtcttcacaaagatctgcataccacctcgcaagcggagcaccaggtggagggtgctctccttctggatgttgtagtcggcgagggtacggccatcctccagctgcttgccagcaaagatcaggcgctgctggtccggtggaatgccctccttgtcctggatcttggctttgacattatcgattgtgtcagacgactccacctccaaggtgatggtcttgccagtcaatgtcttcacaaaaatctgcataccacccctgaggcggagcaccaggtggagggtgctctccttctggatgttgtagtcagccaaggtgcgaccatcctccagctgcttgccggcgaagatcagccgctgctggtccggtggaatgccctccttgtcctggatcttggccttgacgttgtcaatggtgtctgaggactccacctcaagggtgatcgtcttgccagtaagtgtcttcacgaagatctgcatgccacctctgagacgcagcaccaagtggagggtgctctccttctgaatgttgtagtcggccagcgtgcgcccgtcctcgagctgcttgccggcaaaaatgagccgctgctggtccggagggatgccctccttgtcctggatcttggccttgacattatcaatggtatcagaagactcgacctcaagggtgatagtcttgccggtcagagtcttcacgaagatctgcatgccgcccctgagacgcagcaccaagtggagggtgctctccttctgaatgttgtagtcggccagcgtgcgcccgtcctcgagctgcttgccggcaaaaatgagccgctgctggtctggagggatgccctccttgtcctggatcttggccttgacgttgtcgatggtgtcagaagactccacctcgagggtgatagtctttccagtgagggtcttgacgaagatctgcatgcctcccctgaggcggagaacaaggtggagggtgctctccttctggatgttgtagtcggcaagtgtgcgcccgtcctcgagctgcttgccagcaaagatgagccgctgctggtccggggggatgccctccttgtcctggatcttggccttgacgttgtcaatggtgtcagaagactccacctcgagggtgatagtctttccagtgagggtcttgacgaagatctgcatctgcagaagaatcaccaaactacagggtgactatcaacaaataagaacagtctcaaaggaaataaacagcatatgaactatgaaggcagggccatgcatgctcatcacactgagtattcaaaatctacacatagctgctgcataagcagccgtccaagtacatcaaaatcataacaattaaaaggcatactgatataatagaatatataggtattcacgaatgattaaaccgtagcagcatgtgcatgttatatgatgtatctaaacatgttagagcatgtatatacatctatctaagtaccagtaaaatcaaaataattaaaaacgtactgatttattagaatatataggtactcaagaatgattaaaccgtagtagcatgtaacttcatgtatctaagcatgttcgagcatgtatatatacatctatctaagtccagtaaaatcgaaataatttaaacatctgatttattagaatatataggtctcaagaatgattaaccgtagtagcatgtaacttcatgtatctaagcatgttcgagcat

SEQ ID NO: 61420 - DNA, 628 bp, Zea mays
  Clone ID: MRT4577_156010C.1
gccggccgggtcgggagacccgggcgggccccggcaattcacgcacctcgcgcgcacacagacacagtcacacaggcacacagcgcaatcaccgtctcgcctcgcagtcgtactcgcagtctcgcacacacccgtcccgccgtccgcatcctcttccggtgtcgccatcccctccgtcgcccgccgcgtccggccgcggcaacccgacctgtgtcaatctccatggtgagccctccctccctcggttctctgccgtcgcatatcggtcgggtttccccccatggccccatgtcgtgtcacttgaagagtcacagcggggagcttgttcggcctggctagaagaatcttttctcgcagatcagcttcgattcgatcctcgctcctgtctaaacgtcgagctatcgtattctgtcgctgatccgtccacggctcggcggcacctctggtgaatattgtaatgcgtacgtagaatctaggttctgtgatcctgtgtggtatgtatattttttttcgtgcgccagtagattttagaagacttgccccgacgaatctggtgtagatttttagaaggatacaccttctgcaatatattcatttctgggaaaaaaaaaaaaaaaaaaggccccta

SEQ ID NO: 61421 - DNA, 263 bp, Zea mays
  unsure (1)..(263): unsure at all n locations
  Clone ID: MRT4577_156011C.1
nagccggccgggaataattttccgctgggtctccatctctaccgtggttctctgggaagctacgctacgactaaccatggatgtcgtcacccgccgggtcccggaagcggccctgaacccaggcggagacgtctcaagccgtactaggaggaaagaggagcacttcgttgggcaggtatagatgttcttgtgcgcactggctacaccgtctgctaggactccgcacggctatgtgtcagaaggcaagggaagagcgtctcccg

SEQ ID NO: 61422 - DNA, 361 bp, Zea mays
  Clone ID: MRT4577_156012C.1
cccacgcttgacgccacgcgttcgtgcacgcatcctcattctgatcaccaaatgctggatggccccaataatggatacctagcaccgcaagtgctaaccgggagctactcatgaatgtagctatcactaaatactgacactgcactgtatccaggctcagatctaaacgacagatactacatcaaaacagcttgcatagagctactactgtgataaaacaccgaacaccggataaatcctgcacttataagtcctggacttgctggaccatggcagattactcatttgggacagcattatatgttactgcatctgcatcaaatctgtataaatggctacactatcctgctacgaatcagat

SEQ ID NO: 61423 - DNA, 529 bp, Zea mays
  Clone ID: MRT4577_156013C.1
tttctttttctttgttctgattaataagggggaacaagctgtgctcttgttcattatcgtaaaaaaaagggcaccggacgttccccccccttgttcacgccaccattctttttttcttcctacggccgcctcctggggggggggggggggcccaccgcaccggggcccaccatctacggcgccgggggcgggccaaccttggtggctactctgagcaacgtcagttccttccattcaaccaacttgctgcattgaactctgcttcttatttgccgcagcaacaactaccattcaaccagctagctgctgcctacccccagcagtttcttccattcgacccactggcagcattgaactctcctgcttatttactgccgggtctactactaccatttagccagctagctggtgggagccctgctgccttgttgacccatcctctgttggtgccgttctcccagcgcgctgcgcctaacgctggctccctcctacaactgcaactgttggtgcgcttcagccgacttgcttt

SEQ ID NO: 61424 - DNA, 224 bp, Zea mays
  Clone ID: MRT4577_156014C.1
gggaactccagattaacaattgtcatattaattaggacacacacgcagcagttgtttattaactagctagtagctagtatatactgtaatgtacgtagacaagtggtggctacgtactagctagtagctagctagtcgtcgtcaattattgactttttggggttcctgggcctttgaaagcttgaacttgggctttgcccttggcgccttggttcttgactaaa

SEQ ID NO: 61425 - DNA, 260 bp, Zea mays
  Clone ID: MRT4577_156015C.1
cggacgcgtggcgagacgcgtgggttattctggccactttccctctgcttgtgcttgccaactttgatcagcaactttacaatgaagggctttgctggtgacacggcaaaggcacatgccaggagcagtatggttgcaggtgaagcagtgagcaatatccgcaccgtagcggcgttcaacgctcaaagcaagatcctgtcactcttcagccatgaactgcgtgtgccagagcagcaaatcctccgccgcagccagacatc

SEQ ID NO: 61426 - DNA, 480 bp, Zea mays
  Clone ID: MRT4577_156016C.1
ggcccccaaaacctgggggggaaaactttgtccttttgcccccttttgaggattggaaagctttcccccttgctggaaaaaaaggggggttaaaaaaacattttttcatcctcgttcccacattcgggggtttttttcccccctttttaaaaaaaccctttatgaggccgggcccaaacctggggccgggggccaattccgggtcctcgggcccgctttttactcctgggccaggccggcctggccccccccaaggaccccaattttttggagggcctggccagggtctctccggggggggcggggggggccccggatcaggaggtcccattttttccccgtttaagggttaacaaaaccggggttcggggcccccctggaaaccagtttttccttaccgggcgcggggttaatgaaaaccgggcaattttcggaaatcccccccgggaaaaaatttttgaggggggggacccccctttt

SEQ ID NO: 61427 - DNA, 363 bp, Zea mays
  Clone ID: MRT4577_156017C.1
gaggtggtggcggcagtggtggccacgtgggggcccatgaccaacggcgcgcgcgtagagacggagctcaagctcgaacaatggcgcgttgacccgattcactgctacacctaccgcaagtcactccccttcctgatgtgacctgtaggaactaggagcatatcctgtagagagaaataacaagcaaacctgtgtcaagctctataaagagaatacaaattctctcaagaacggctactacaagggcaataaccttcctttatcgccaaacttattgtatgtgtcccagctaatcatcagaccatagtccacccagcaatttgtgacaaacatatgaaaaacaactgctttgcgaggacaatc

SEQ ID NO: 61428 - DNA, 498 bp, Zea mays
  unsure (1)..(498): unsure at all n locations
  Clone ID: MRT4577_156018C.1
ttgcgcaacttacaaaagaagtaaaccaaacatgggttgtgttgatcctggctaattaggatcagacaaccaaacacgcagctactgagtaattgcatcaactcatcctgcatatgctcaacctgcatattgtcttgaaccaggctgtactcgtcctaacaaccaaacaggcggatattgtgcccggccgtgcaaaaagtggaccaaaaagttcccggcggggaaattcgtgcggacgaacgaggatttgcaggataaggggttgaggaaaggaaacaccggtcaatcaagatgtggggttcatgggctcatggctactagcttccttttcttcattaagttgtctttcagcttgacaggcccaggtttgattacacttttttttttcggccaccaaaactgactgacacttacttgccggtggcgctggccaagattgttggattaacaataactntatttcccacacccccccccccctttttttttttttttttt

SEQ ID NO: 61429 - DNA, 304 bp, Zea mays
  Clone ID: MRT4577_156019C.1
aacaacaaaaaacctgggttttgtgtttccagaaacacacaatttttttgtttgcatagggggggcatgctttttaaaggggttttaaaaagattgggggaaaaaggggcctaaaaagggcctaaacatcaactataggtatgggggctttgtagggggcaatatccattgatccccgccttctttttgaagggaaaggtacctgggccccttatgggggccttgtactttaggaccccaggaggtacacgggctttctcaattgaacccgccccctgggaagggaaaaacaggggcccattat

SEQ ID NO: 61430 - DNA, 1697 bp, Zea mays
  Clone ID: MRT4577_15601C.1
ctcttcttttgctcggaacgcacacacagcccggtccccgatctccgatcccctcgtcgatccaagatgcagatcttcgtcaagaccctcactggaaagactatcaccctcgaggtggagtcttctgacaccattgacaacgtcaaggccaagatccaggacaaggagggcattcccccggaccagcagcggctcatcttcgctggcaagcagctcgaggacgggcgcacacttgccgactacaacatccagaaggagagcaccctccaccttgttctccgcctcaggggaggcatgcagatcttcgtcaagaccctcactggaaagactatcaccctcgaggtggagtcttctgacaccatcgacaacgtcaaggccaagatccaggacaaggagggcatccctccggaccagcagcggctcatttttgctggcaagcagctcgaggacgggcgcacgctggccgactacaacattcagaaggagagcaccctccacttggtgctgcgtctcaggggtggcatgcagatcttcgtgaagacacttactggcaagacgatcacccttgaggtggagtcctcggacaccatcgacaatgtcaaggctaagatccaggacaaggaaggcattccaccagaccagcagcggctcatctttgctggcaagcagctggaggatggccgtacccttgcggattacaacatccagaaggagagcaccctccacttggtgctgcgtctcaggggcggcatgcagatcttcgtgaagacacttactggcaagacaatcacccttgaggtggagtcctcggacaccattgacaacgtcaaggccaagatccaggacaaggagggcatcccaccggaccaacagcgcctgatcttcgccggcaagcagctggaggatggtcgcactcttgcggattacaacatccagaaggagagcaccctccacctggtgctccgcctcaggggtggcatgcagatctttgtgaagacattgactggcaagaccatcaccttggaggtggagtcgtctgacacaatcgataatgtcaaagccaagatccaggacaaggagggcattccaccggaccagcagcgcctgatctttgctggcaagcagctggaggatggccgtaccctcgccgactacaacatccagaaggagagcaccctccacctggtgctccgcttgcgaggtggtatgcagatctttgtgaagaccttgactggcaagaccataaccctggaggttgagagctccgacaccatcgacaacgtgaaggcgaagatccaggacaaagagggcatccccccagaccagcagcgtctgatcttcgctggcaagcagctggaggatggccgcaccctagcagactacaacatccagaaggagagcactctccacctggtgctccgcctccgcggtggtcagtaagccatgggtcatttaagctgctgctgtacctgggtatctgcgtcgtctggtgccctctggtgtacctctatatggatgtcgtcgtctaataaacatctgtggtttgtgtgtcatgaatcgtggttgtggcttcgttggtttaatggacctgttgtgtcctctgtgtgttgtacccaaaactcttctgcagcagtatggctcgaatccttatgaagtttgatgtttgaaccgaaaaaaaaaaaaaaaaaaggccccta

SEQ ID NO: 61431 - DNA, 238 bp, Zea mays
  Clone ID: MRT4577_156020C.1
ctcctcataacctggtactactgataggtgtatccaatttatcgatccacttgcttccagttcatgggatatgtttgctgatgagaagacttttattacccctgttcagtgcaaaattttgttgaggcaatttaaggctgatacttaatatacagtgactcatgccttatctgctcaggtagcaaataagatgaacaacaactggctaccacctccatgggcacttgctgcaatggct

SEQ ID NO: 61432 - DNA, 351 bp, Zea mays
  Clone ID: MRT4577_156021C.1
ctctggagtctgtggctattgtgcctgtgaaagatacatttggtgatcctgttgacggacaaactatcactgcgctcgccccctgcctgcgcctccactatgatttgctcaagcgcctagagcgcgtggcctaacttctatagcttagggtgggggggggggaaccatcttatttgttcatccgtgttaactgtggggttctttgttgctcgagccgccttgctgctgcctgtcatcaagaccccatccctagatcctcgggactctggtgctgtgctctgtgctgatcgctttatcatgcctcctacgatgaacgggtctcccctgcttctaatgatcttcaatcacctt

SEQ ID NO: 61433 - DNA, 513 bp, Zea mays
  Clone ID: MRT4577_156022C.1
cattcatgcatgacgtgcacatgttgtcactacctgtcatcacaaccaagaaaattattcaacaaaacatgcatgctactatacagttttttttgtcacacttaacacaacaaagaatatagatgcccaaaatataacaacccggttacatgacaattcactggaaatcaaggaaccactaaagaaactaaagatttataatcattacaaggacaggagagcttgttgtcacatacattcaatgttggcaatgtgccgaaccaagcccaggcaacttccttccagttcctccacgaaatctgcaggcatctttcgtgcatacaagtgctgaagagacctaaggtatacaaggccttcagggacacttttcagattccacagctcatgaagttccaggtatgttaaatttttaatggcgccatcacttatttgaattgacctcagtctctcaagcttgcctaggtagagttgcttgagctttggaaacccatcccaaagagaagatcaagcatt

SEQ ID NO: 61434 - DNA, 549 bp, Zea mays
  unsure (1)..(549): unsure at all n locations
  Clone ID: MRT4577_156023C.1
aattcggcacgaggcccgtccctcctccagctccctctcctccggctgctgcccctccaccgtccgcccctcctccccgctgccggccacttccggacttccccgccgcgttacctcctcctcctggcgcttcccgcttggcggttgcctgggatttacccccgctctgttcccctttcggggaacgccttcagaggcaggacggatacttggtccgggaggcgcggtgacggttacagtgtcgagtgattttcggtcgccagagggagatggcttcaaggtctgatatgtggcaacattttttnaagatcaaagatgacaaagggtctcttaaggttggtaggtgcaaatattgccnccgtggtatcatggtctgacccagtgggcatggaacatatgcgttgaagaaactctttgggtccatgcaaacacaattcctgtattgtttcaacaagggtcttcgaagccnattnaaccttgntaggcatggttttgggggaagcttcctgccccttgggaggtgtttatccagtaagtacttagtagatg

SEQ ID NO: 61435 - DNA, 115 bp, Zea mays
  Clone ID: MRT4577_156024C.1
acggcccgtaccggcagctccagctagagtgccactcacacacacgttacactgcgttgtgcgcaaggctccgactttgatgcgcgtacccgtcacggtccatggtcttcgtcgt

SEQ ID NO: 61436 - DNA, 772 bp, Zea mays
  Clone ID: MRT4577_156025C.1
aatccaaaaatatttcctgtactcttcacaatctcttctagaagttccctaactgagtccttcaatccacggatcagtccttactatctcacagctccaaaacctctcattaggctccacggctaatgtcaggcaggtttttggttcatctcagcgcaaccgtgagatgaagattgcttagtccagttccccttttgctgtgaaaagaccccagaaatgacagtttaaagccccgggcggctgagatccagagctcctgtccaagcaggaaagaagatctgaagacgaagaccaagaatggatctcaagtcaggttgtgcttttgaggcaggtttggagccacaagcccaagaaagacgggtgttatgagaccaggcgcttaaagaattgggaagataaaagctttttcgaccaaaacaaaaacaaaagaaattttcaaaggaggctcaaaaataattacaataatcctccaacaacaaaaactatttaattattatacaagaaaagcacaataataattaccaataaaattcccggccctggaaatcccaagagtaccataaaatacaaatacttctcataacgacaagaccccagccccaagactaattcacaaaaaccaaaagaaagctaacatgaaaaagcttctcaaaacgtacaaagggtttattagctacaaggtgttttgctttggcatacagaaaagttcaagacccagacccaagaaaccaaaagggacttctcaaattaccagttaccatgatgaccagtt

SEQ ID NO: 61437 - DNA, 1531 bp, Zea mays
  Clone ID: MRT4577_156026C.1
ccgcacctctcaatctttccgatcgtcttcccaggttctttggtgggctcttggttcaattgaaattttcttcagcaaccactgccctctctggtatgggtatggtggtggactaaagttcctggaaaggttctcgtacattaactccatcgtatacccttggacatctatcccgctcttggcctattgcacattgcctgccatctgcttgctgacagggaaatttatcacgccagaggtacccatttattcagtctctaattctgttgtattgtggtgttgaaccggtggaagatcatgacaccttacgattactatcattctctttaccgtgcagcttaacaatgttgccagcctctggttcatgtcacttttcatctgcatttttgctacgagcatcctggaaatgagatggagtggtgtaggcatcgatgactggtggagaaacgagcagttttgggtcattggaggcgtgtcttcacatctctttgctgtgttccagggactcctcaaggtcatagctggagtagacacgagcttcactgtgacatccaagggtggagacgacgaggagttctcagagctgtacacattcaaatggacgacccttctgatacctccgacaaccctgctcctactgaacttcattggagtggtagctggcatctccaatgcgatcaacaacggatatgaatcatggggccccctgttcgggaagctcttctttgcattttgggtgatcgtccatctttacccgttcctcaagggtctggttgggaggcagaacaggacgccaacgattgtcattgtctggtccatcctcctggcttcgatcttctcgctgctttgggtccggatcgaccctttccttgctaaggatgatggtcccctgttggaggagtgtggtctggattgcaactaggaggtcagcacgtggacttccccgtcagtgtgtggtcgaagaagtatttttgcagatgttttgtgcccatattttttttccaatttttgtccctctgtagatagaaacaaggggagaaggggaaaaaaaagtacttgtatttcttttgttccatggtggtggtggtggtgggcggctcagcctcgtgagtgcagtattgggcaaaccggaggctgcggcaaccttgtgcagttcggccacgaatatactagggaagatcgcgaccaatcaatcgatgaccgagttcaattgttcagcattctttattagttttggtgggtggatacttcaatcggtgagccgaacagacagttgttttgagtatgaattgctctgcatctgcaaagttgttgtttgtcatccgtcgtctcaataaggcgaggggaagagatgcgtgcgttccttcccttgctcctcgtcatggtgcatttctccttactaggacacaaactccattagtgagtgtctagtgatgtagcgtagcagcgtcgtcaggcaatgtaatatgtaaacgtgccattttgttgatcaactccatgcgcaaagaaccgaatgggatcgttggtgttg

SEQ ID NO: 61438 - DNA, 148 bp, Zea mays
  unsure (1)..(148): unsure at all n locations
  Clone ID: MRT4577_156027C.1
ctcgaggccggccgggccgggatccctgcctccgtggtagaagtcctggcagctccagctccaagagcggtagatcgacctaaatacttcttcaactgttggggtgacttgngtgggtgtgtctctcctctggcccgaagatgtgtct

SEQ ID NO: 61439 - DNA, 2628 bp, Zea mays
  Clone ID: MRT4577_156028C.1
tcagagagtatgaggacttcaaggtcagaatcaatgccttggttgctaaagcccaaaaggttcctgaggaaggatggacgatgcaggatggaactccatggcccggaaataatgtccgtgatcatcctggaatgattcaggttttccttggtcaaagtggtggccatgatgtggaaggaaatgagctgcctcgattggtttatgtttcaagagaaaaacggccaggctacaaccatcacaagaaggctggtgctatgaatgcattggtccgagtctctgctgtactaactaatgctccttatttgctgaacttggattgtgatcactatatcaataatagtaaggctataaaggaagcaatgtgttttatgatggatcctttgcttggaaagaaagtttgctatgtgcagtttcctcaaagatttgatgggattgatcgccatgatcgatatgctaacagaaatgttgtctttttcgatatcaacatgaaaggtttggatggtatccagggccccatttatgtgggtactggatgtgtcttcagaaggcaggcattatatggctacgatgctcccaaaacaaagaagccaccatcaagaacttgcaactgctggccaaagtggtgcatttgctgttgctgttttggtaacaggaagaccaagaagaagaccaagacctctaaacctaaatttgagaagataaaaaaactttttaagaaaaaggaaaatcaagcccctgcatatgctcttggtgaaattgatgaagccgctccaggagctgaaaatgaaaaggctagtattgtaaatcaacagaagttggaaaagaaatttggccagtcttcagtttttgttgcatccacacttcttgagaatggtggaaccctgaagagtgccagtccagcttctcttctgaaggaagttatacatgtcatcagttgtggatatgaagacaaaacaggctggggaaaagatattggttggatttatggatcagtcacagaagatattcttactgggtttaagatgcactgccatggttggcggtcaatttactgcatacctaaacgggccgccttcaaaggttctgcacctctcaatctttccgatcgtcttcaccaggttcttcggtgggctcttggttcaattgaaattttcttcagcaaccactgccctctctggtatgggtatggtggtggactaaagttcctggaaaggttttcgtacattaactccatcgtatacccttggacatctatcccgctcttggcctattgcacattgcctgccatctgcttgctgacagggaaatttatcacgccagagcttaacaatgttgccagcctgtggttcatgtcacttttcatctgcatttttgctacgagcatcctggaaatgagatggagtggtgtaggcatcgatgactggtggagaaacgagcagttttgggtcattggaggcgtgtcttcacatctctttgctgtgttccagggactcctcaaggtcatagctggtgtagacacgagcttcactgtgacatccaagggtggagacgacgaggagttctcagagctgtacacattcaaatggacgacccttctgatacctccgacaaccctgctcctactgaacttcattggagtggtagctggcatctccaatgcgatcaacaacggatatgaatcatggggccccctgttcgggaagctcttctttgcattttgggtgatcgtccatctttacccgttcctcaagggtctggttgggaggcagaacaggacgccaacgattgtcattgtctggtccatcctcctggcttcgatcttctcgctgctttgggtccggatcgaccctttccttgcgaaggatgatggtcccctgttggaggagtgtggtctggattgcaactaggaggtcagcacgtggacttccccgtcagtgtgtggtcgaagaagtatttttgcagatgttttgtgcccatatttcttttttcaatttttttgtccctctgtagatagaaacaaggggagaaggggaaaaaagtacttgtatttcttttgttccatggtggtggtggtggtggtgggcggctcagcctcgtgagtgcagtattgggcaaaccggaggctgcggcaaccttgtgcagttcggccacgaatatactagggaagatcgcgaccaatcaatcaatcgatgaccgagttcaattgttcagcattctttattagttttggtgggtggatacttcaatcggtgagccgaacagacagttgttttgagtatgaattgctctgcatctgcaaagttgttgtttgtcatccgtcgtctcaataaggcgagggtggaactggaatagatggtgctgtatggaacaggggaagagatgcatgcgcattgtttgtttgttttgtttatgtagtaagatgcgtgcgttccttcccttgctcctcgtcatggtgcatttctcctttactaggacacacaaactccattggtgagtgtctagtgatctagcgtagcagcgtcgtcaggcaatgtaatatgtaaacgtgccattttgttgatcaactccatgcgcaaagaaccgaatgggatcgttggtgtcgaaaaaaaaaaaaaaaaaaggccccta

SEQ ID NO: 61440 - DNA, 985 bp, Zea mays
  Clone ID: MRT4577_156029C.1
tttgggttttttttttttttttttttcaacaccaacgattccattcggttctttgcgcatgaagttgatcgacaaaatggcacgtttacatattacattgcctgacgacgctgctacgctagatcactagacactcaccaatggagtttgtgtgtcctagtaaaggagaaatgcaccaggacgaggagcaagggaaggaacgcacgcatcttactacataaacaaaacaaacaaacaatgcgcttcccctgttccagacagcaccatctattccagttccaccctcgcctcattgagacgacggatgacaaacaacaactttgcagatgcagagcaattcatactcaaaacaactgtctgttcggctcaccgattgaagtatccacccaccaaaactaataaagaatgctgaacaattgaactcggtcatcgattgattgattggtcgcgatcttccctagtatattcgtggccgaactgcacaaggttgccgcagcctccggtttgcccaatactgcactcacgaggctgagccgcccaccaccaccaccaccatggaacaaaagaaatacaagtactttttttccccttctccccttgtttctatctacagagggacaaaaattgaaaaaagaaatatgggcacaaaacatctgcaaaaatacttcttcgaccacacactgacggggaagtccacgtgctgacctcctagttgcaatccagaccacactcctccaacaggggaccatcatccttcgcaaggaacgggtcgatccggacccaaagcagcgagaagatcgaagccaggaggatggaccagacaatgacaatcgttggcgtcctgttctgcctcccaaccagacccttgaggaacgggtaaagatggacgatcacccaaaatgcaaagaagagcttcccgaacagggggccccatgattcatatccgttgttgatcgcattggagatcgccagctaccactccaat

SEQ ID NO: 61441 - DNA, 2200 bp, Zea mays
  Clone ID: MRT4577_15602C.1
gctttccgctgtcggcatccggaagttgcgtggcagagtggacggagacgaggccgggtcctccagctcctctcaaacgtcacggcaccggcatccggcagccagcgcggtccttcccaaccactcgttcccaacccatcccccttcctcgcccgccgtcataaatagccagccccatccccagcttctttccccaacctcatcttctctccttttgctcggaacgcacacaccgcccggtctccgatctccgatccccgatcccctcgtcgatccaagatgcagatcttcgtcaagactctcactggaaagactatcaccctcgaggtggagtcctctgacaccattgacaacgtcaaggccaagatccaggacaaggaaggcattcccccggaccagcagcggctcatcttcgctggcaagcagctcgaggacgggcgcacacttgccgactacaacatccagaaggagagcaccctccaccttgttctccgcctcaggggaggcatgcagatcttcgtcaagaccctcactggaaagactatcaccctcgaggtgggagtcttctgacaccatcgacaacgtcaaggccaagatccaggacaagggagggcatccctccggaccagcagcggctcatttttgctggcaagcagctcgaggacgggcgcaccgctggccgactacaacattcagaaggaggagcaccctccacttggtgttgcgtctcaggggcggcatgcagatcttcgtgaagactctgactggcaagactatcacccttgaggtcgagtcttctgataccattgacaatgtcaaggccaagatccaggacaaggagggcatccctccggaccagcagcggctcatttttgccggcaagcagctcgaggacgggcgcacgcttgccgactacaacattcagaaggagagcaccctccacttggtgctgcgtctcaggggtggcatgcagatcttcgtgaagacacttactggcaagacgatcacccttgaggtggagtcctcggacaccatcgacaatgtcaaggccaagatccaggacaaggagggcattccaccggaccagcagcggctcatctttgctggcaagcagctggaggatggccgtacccttgcagattacaacatccagaaggagagcaccctccacttggtgctgcgtctcaggggtggcatgcagatcttcgtgaagactcttactggcaagacgatcacccttgaggtggagtcctcagacaccattgacaacgtcaaggccaagatccaggacaaggagggcattccaccggaccagcagcggctgatcttcgccggcaagcagctggaggatggtcgcaccttggctgactacaacatccagaaggagagcaccctccacttggtgctccgcctcaggggtggcatgcagatctttgtgaagacattgactggcaagaccatcaccttggaggtggagtcgtctgacacaatcgataatgtcaaagccaagatccaggacaaggagggcattccaccggaccagcagcgcctgatctttgctggcaagcagctggaggatggccgtaccctcgccgactacaacatccagaaggagagcaccctccacctggtgcctccgcttgcgaggtggtatgcagatctttgtgaagaccttgactggcaagaccataaccctggaggttgagagctccgacaccatcgacaacgtgaaggcgaagatccaggacaaagagggcatccccccagaccagcagcgtctgatcttcgccggcaagcagctggaggatggccgcaccctagcagactacaacatccagaaggagagcactctccacctggtgctccgcctccgcggtggtcagtaagccatggttcatttaagctgctgctgtacctgggtatctgcgtcgtctggtgccctctggtgtacctctatatggatgtcgtcgtctaataaacatctgtggtttgtgtgtcatgaatcgtggttgtggcttcgttggtttaatggacctgttgtgtcctctatgttgtacccaaaactcttctgcagcagtatggcttgaatccttatgaagtttgatatttgaacttaaaaaaaaaaaaaaaaaaaaaaaaaaaaaaaaaaaaaaaaaaaaaaaaaaaaaaaaaaaaaaaaaaaaaaaaaaaaaaagcggcc

SEQ ID NO: 61442 - DNA, 245 bp, Zea mays
  Clone ID: MRT4577_156030C.1
gtaattgacgtagaacgtagttcgggcccacccgtgtgcgtatggtttcatggggtgggactagaataagccatgtcaatgaacatgagccgaatagaggctacgtactgttattgtatcagtactagtaccatatatatatatgggcgcactacagtctgtgatgtaatggattgtgctagtatttgactcttgcttttaaataataatattattatttcaaaaaaaaaaaaaaaaaagcggcc

SEQ ID NO: 61443 - DNA, 616 bp, Zea mays
  unsure (1)..(616): unsure at all n locations
  Clone ID: MRT4577_156031C.1
cacctccacccgtgcactgcagcagaaccaggcaacagcagcaggcagcagcagcagacaggagcgagcacgcgcttgctttcgcactgcgccgccgccttgtccgctccgctatatatgcagaagaggctgagccgtgagcccaccaccaccaccacacgaccaccaccggataaacccgtcgtcgtcttccttccccagaacagaaccccgttctgtggtcttgggtgggggacaaggccggagcagatcgagccaagagacgaaagaaaatggcggcgttgcgcgcggtgaaggcgctgtgcggcgcggagaaggagtgggtggtgggcacgcacaaagcgcccggggcgtgcccgcgctgcggcggcgccgtggtggccgtggacgtggagagcgagcggcgcatcctgggcctgccgctgtgcctcaagagcaagcgcaagtactcctgcaccaagtgccttcgncgcctcgtcaccctctacggctaggctcgatcggaaggcacacacacacacaggctgctactgctagcaagatccggccatctccgcgccggcggcgggccacgctgaggctccgtccggcgggggctggatctggtccgcgcgtt

SEQ ID NO: 61444 - DNA, 595 bp, Zea mays
  Clone ID: MRT4577_156032C.1
ctggcttgtcctccctctgtgaccaagctctccttgtgttagggagccttaggcgtttgaggacgggcgatggcccacgctgttgtggaggaccgctgcttacctggtggtcttgctctgtgccaacatcaaccagttgtgtggaaaatgccttcagctactacggagagatcctggtctgcaaggtgcatcatcgaccgagagactgctaggtcccgaacttaccgcttaggatactctatctcctctcagagctgcatgctcgaagctatttacaacatgaccatgaaggagctcgacggccgttacatgcacgcagtataccacctgcctagctgccgtgggctcctgcagttgaggcgaagaataaagagaacgtgcgagataacgaagaaagttatgacgacatggcgcttcagcctcttggactaaccctgtgcaatactaaagagtgttgtttctgagtcgcggaagcaggagcaaaaaaaatcgcagtcttctgaggactttaactgtgttttatgttcgaaagcacttgaaagacttttcctgtggtaattctacgcatacgttgctccgcttgttggggttcact

SEQ ID NO: 61445 - DNA, 329 bp, Zea mays
  unsure (1)..(329): unsure at all n locations
  Clone ID: MRT4577_156033C.1
cattattactaccaggaaagtcttatttatattgcctgaagttggcttagagacagtctcatgacgggatnggatgggctgcgcttctcaatgaactccggaaactggatatctggccttgaatctgtggatacttacacctgtgactaataatgtgcacaatgatatcactattgtataagggttaatgatagcttcaaacatctgtggtgtaatgatctatgttatacatatattctgtanagtgccatagtctgttactatgtgtagcatatgtcataatatatgtatcttatacatacacaagtgtgtgtgacagatgtgcatac

SEQ ID NO: 61446 - DNA, 552 bp, Zea mays
  unsure (1)..(552): unsure at all n locations
  Clone ID: MRT4577_156034C.1
taccctccggctcgtgccgggncacctaccgtgctcgttacttgtagccgccgggagctggccgccgcatctactacgcttcgtcgtcgcaggatttctccccaccatggatccatatcatttctcctttggctgccctcccttccctctgtttcttaatctagtacacggcccgggagaaattctgtttgccttgtaggatttgttcgtttgaaatttgattgtgtttctcggtatggagtggaatcaaatcagagagatccggctcgataatattgagtcaacagcaggcgccaattcaatggcgtcctgactgccgcatggagcccagagtgacgttctagccaggagaagattgtttggagatccatcttttagttccaagccacaatacctggccacacccccgatgcaaagctcacccaatattttggtttcttggattttgtgctcggacggtgggggcgtcaagcgtaatgtacgtttctgccctgtccaaatttcaagcggccacatcgtttgttgacccaaaaanaaaaaaaaaaagcggcc

SEQ ID NO: 61447 - DNA, 1655 bp, Zea mays
  Clone ID: MRT4577_156035C.1
cattgggtacctcgaggccggccggccgggctcgactctgactctacgcggcacgcgagcgcagaggcccgtccgcgaaaaagaccccacaccgcccactacaccggccaatcacccgccggcgagccatggccgccgccaccgctaccggggactccgtcaaggagccgctcctccaccgcgcgtacccgtcccaggtcgcgtcggcctcctcgcccgcgctcccgtccgcactcccggggtccgccggccgtcgcttcccgggggtgctcgacgtccccaacctcaagaagcgcggcggcggcacgcgcagctggatccgcgtcgaggccgtcacggcctccgtgcagacgttggagatcgacaaggccaccatgatgcggcgctgcgaactccccgcgcgggacctgcgcttgctcgacccgctcttcgtgtacccgtccacggtcctgggccgcgagcgcgccatcgtcgtcaacctcgagcagatccgatgcgtcatcacagccgacgaggtcctcctgctcaactccctcgacagctacgtcctccagtacgccgccgagctccagcgccgcctcctccagcgcgctgagggcgaccagctaccattcgaattccgggcgctcgagctcgccctcgaggccgcatgctccttcctcgatgcacaggcagcggaactggaaattgaagcatatccattattggatgagctgacatccaaaatcagtactctcaatttggaacgtgtccggcgattaaaaagtagactagttgcattgaccagaagagttcaaaaggtcagagatgaaatagaacaattaatggatgatgatggtgatatggctgagatgtatctcaccgaaaaaaagatgaggatggaatcatctgtctttggtgaccagtctttgttgggctacaattcagcaggtgctgctggggcatcagtttcagctcctgtatcgccagtctcatcacccacggaatcacgaaagctggagaaagctttcagtttgtgtagaagcaggcatgacagcacgaagagctccgataacacaacgacagatcatatccaagagttggagatgttactggaagcttatttcgttgttatcgacagcactctcaacaagctgacatcgcttaaagagtacattgatgacactgaagacttcatcaacattcagctggacaatgtgcggaaccagctgatccagtttgaattgctgctaacgaccgcaacatttgttgtggccattttcggagtggttgctgggatattcgggatgaactttgagacatcagttttcgaaatagagaatgcattccagtgggtccttgtaattacttcagtgaccggcgttttcatcttctgctcctttctttggttcttcaagtacaagaggttgatgcctttgtagagagtgtatatgccctcctcccataggaccgatgaatcaatttgaaccctgttaagaggcacttgatcagaagcctgaatctctgccgatgtaaattaccattcttttagaggtttacggcatgagtaccgagaatccgggtgaaaattgtaaccttcttgacatgatccctgtgctgtataagagaaaataatattacagtttatacaaataacaccgaccaattctacatcc

SEQ ID NO: 61448 - DNA, 118 bp, Zea mays
  Clone ID: MRT4577_156036C.1
ggcaaatttttgaaagccggggaaacccaaccctcaaggtggacctgggccttatcaaccgaaattacccaaggggggccctaccaaaggggccatcaaatggaaatattgaggcctt

SEQ ID NO: 61449 - DNA, 385 bp, Zea mays
  Clone ID: MRT4577_156037C.1
catgtcgaccaaagaggtggatgcgtccattttactggacgacccatacatcgatcgctcttataatagttacatcacatcatttaacgccccacggtagaagagtgattgatgtcgataggacaccctcctgtgcccgaagaggcagtttacctcctgccagagcccaccgttcatgacgaggaggagatgcacgaccgtcactactgcaagccgagacatgctagagtccgcggcgcacctggtcaagcacggtgtggcgctcccaccggaataacccttctaagaagcgtaattcccgtacgaccaccaccacttgcttgaccaggtgcgcgcggcactctaaccatgtcccgcgttccaaaatggacgccctgcatcacct

SEQ ID NO: 61450 - DNA, 545 bp, Zea mays
  Clone ID: MRT4577_156038C.1
ctgcgatcacctacttatcaacaattctaccaagaccacccattcgtccacgtttatgtcttcttccccaatgatgacaatgaagggatgaatcacatgatgaagtacgttcggatgattacgcacgagagcgtctctgcagctgcggtgtgtctagatcgtaacctaactccgctcattaattaccacctcatacatgtggtacatgtagatacatctacaactttcacaggcggtcgaagatgcttatacacatcactgaacgtgtccttgaccctgatcttcaggtgctaacaaaccacgagatttagactcttgtgcagcggtgcacattgaaggaaactggcttttcatgaatactgatcacggatcctattggtggtcttccgctgagcgatgccgatattaagatatgagcccaagagagtatgtctgatacattacataccgctaccatgtatgacagaacgtgtgacactgcaatcacataaccacataatgtgaaaaaaaaaattcaatctacacatacctgacttgcttgcata

SEQ ID NO: 61451 - DNA, 597 bp, Zea mays
  Clone ID: MRT4577_156039C.1
cgttcttttgggtcttagtggaatcgtcatgggtggaggtgctgtcgtttctttacatggaaggtttagagttgccactgataacacggtatatgctatagactgaaatcaagtgcaatttactaaggctgttactttttacttatcaattcaagatggactgtagttgggaagcacataaaactgtgtgttatgatgcagcttgggatcttctttcttaagtactgcttaatgttgtcccatgctgggaattctaggtgcactcttttttttaatatgtgctagtattgcatgacagtgcaaaaatgttgcatagttctagaagctagctttcttgtcgggtaaacatggcaggtgtactgcctttcaatatatttgtcaggacaagtcatatataaaacttgaaaatacagaagtaacaacatttgaacataacacacccatattgctgctttaggattgaacatcaatgcatccacatgctagatttgtgttattacctatcactttttactgcgatttgtgatggatattgcgcgagaaagtttttgagaataggttcagttatggacttatgtaggagctccctttatgagc

SEQ ID NO: 61452 - DNA, 147 bp, Zea mays
  unsure (1)..(147): unsure at all n locations
  Clone ID: MRT4577_15603C.1
nntttntttttttttttattttttataacacaaataaganntctttccttttttgttaagggcaacacacgtgtttatatgcactgaagatggcactgaggacccgtccatttaattattcaactgctcgctatgccggcccggaaa

SEQ ID NO: 61453 - DNA, 299 bp, Zea mays
  Clone ID: MRT4577_156040C.1
aacaaagactccagagaaggaagcaatccaaccgggaatcagccaggcgttcgagaagcagaaaggaggatcacttgaatgaactggaggcacaggtagcagaggtaagagtcgaaaactcttcgctgctaacgcggcttgctgctgttaaccacaagctcaatgaaactgctggtgacaatacggtgctaaaggcagacgtcgaaaacttactaccaaacgtgaacatgggagaggactcggcgaagaggccaacagggatgaaccccctgtaccctggcgagacggatatggcctcc

SEQ ID NO: 61454 - DNA, 658 bp, Zea mays
  Clone ID: MRT4577_156041C.1
tccgcattcccggtcgaccccgcgtccgctcttttgtttttctcttttcttttttttatataaaaagaatttatcgtggtcgcgaaaggaaccctcgttaatgttttccaagtgtctctcttgctgcctcttcgtgtgtcactctccattggcgttggcgagctgcctctgctccattggcacgacgagaaggaaagaaacccctgctggtttctgagcactcggaagcaaagcgagtgcaccacactctcggtgtcgttctgtgtaattttttctctctctctgccactgctcccttcccgtcccgtcccgtcccgtccctgaaaaatattccgtgaggtttaggctcgatcacaaatggagatcttgatccgcggcaaggaatccttgtcggtctctgttttttttttcagtgtactgtctgtattccctttttttggttacgtgatcgaatgttttattacggcgaatcggcgaattctcgtaccatggaaccattctttacacctcacgtcgtccaagaaccacacgcatcacttgcttgcctgacaagttaccgatctctctcgctgctctcaacggcgggcgcgcagcaccaaggagagctcggcggtgaacctggcgctgacggcggtgcacgtggcgttcatcctgttcg

SEQ ID NO: 61455 - DNA, 480 bp, Zea mays
  Clone ID: MRT4577_156042C.1
ttcgaaagcatgggcacctggctatctatctagcgagagaaagaaggtactgctaactggataacatgtagcgctgaagcaagaaaggagcaaggggagtgatgtggctgttgcttctccagctgatgttagctcggaggacgacgaggtcccggctcctagcgacgtctacctccaccgggactcggctggactcatcagtggggacattggccattcaacgagaagaatccgtctgaggtgaaacctgtggcttcctaccatgctatacggcacccatggcgacgctcatgcattgatcgaatctgcatgatgcgatatctggactagcgctatttggaactccagctgcgagaagctcaacgacggaatctgcggtggtcaacttattgcatgcgtatggtgatctaataagcttggcattctaaaatgggatatgctgtgtgcgactaaacttacaaaaaaagggccctagatcca

SEQ ID NO: 61456 - DNA, 318 bp, Zea mays
  Clone ID: MRT4577_156043C.1
aaaaaaaaaaggaaaagattaaccccggggggccccgtttaagaaaccccccccccatggggaatcccattcgggggggggggggggggcctaacccgggcgcccttagaaaaacttttggtgggggcgggccccgaaaagggggatttgattttcccatccatgtaaaagggcaccccaaagtttgaggggcattgactgttttggacgggggcattatttgtcttctgacccccggtggggggggggggaggaaccttttaataggttggtttgggctggggggccttttttttgccctggggtttgggggggggg

SEQ ID NO: 61457 - DNA, 208 bp, Zea mays
  Clone ID: MRT4577_156044C.1
ggacgtgacggacgcgtgggctgaaatgatatatagttttaacccgttggccattgcgactcaaatattcagagtaatggactaatgggttcttcgatgattcgatcaaatttgtctcctttggggtattactggtttgctacagcatctaaatggggctgcctgtcacggcagcatgacatggtgttttgttcatggcttgtttttc

SEQ ID NO: 61458 - DNA, 423 bp, Zea mays
  Clone ID: MRT4577_156045C.1
cccggcccggatttcccggttggcccacccttccgggaaagggcatgcctccataaaacatttaattcaatttggcaccatctacttcggacccattttaatttgtggtgggcctccttcaaggctcagtaaatggcaaacaggaccttccaacaggcagcggcatgggcctgtttatggggggaaccaggggcccggttgctaaggccaactcaccaaactccatgcattcaattgccccagcttcgtttcttttgccagcaccctcggcttaaattggcattttgttgcctgctcctaagccctcaagccaattgatttcaccaaccttgtcttaaaacctacctcctttgcaaacacctgcaagccgaccttaggaacccgagccatttgagtttaaaagctcggtccaaaggttttctg

SEQ ID NO: 61459 - DNA, 567 bp, Zea mays
  unsure (1)..(567): unsure at all n locations
  Clone ID: MRT4577_156046C.1
naaaaaaaattaaaaaaaaaaaaaaaaaaaaaaaaaaaaaaaaaaaaaaaaaaaaaaaaaaaaaaaaaaaaaaaaaaaaaaaaaaaaaaaaaaaaaaaaaaaaaaaaaaccttggggcaaaaacctcatctttcaaaggaatcccagggccaaaaaaagttgtgggggaaaaaccggaaccccgggaaaccttgggccaaattgggggaaccggggcttaaggtttgccccgggcccccccttgcaccggggaatcggccccccgggggaaaataatgggaggggaaaaactaaggggggcccaaacccccccccttgtaaaacccatatcccattcaaggcctgggcagggccattcctaattccaaccagggtttgggccccccccccttcccccccccggaaaaaagccccccaaaaaaaaaccccaaccaggggaaggggtttgttctccccaaaaacttctccccccaccgggggggtttttaagggaccggtccgtccttccgttgtgcccaaactggcacttggaaggaaacccccttgaattgggaaaaaaattggaaa

SEQ ID NO: 61460 - DNA, 552 bp, Zea mays
  Clone ID: MRT4577_156047C.1
atggcattaggtagacgtactcaaaataggacggtggcaggcctgtctccctttcctcctttcgtgctatttgacgatattcaagatgtcaataacttaccacaagtcaaaagtgtctttgcgagagtagttgttaagttccctaggcgtcgtaatagtcaacactacatcctacaggacatcactggatccaaaatcgaagcaatttctaacggcaataatgtccaacggttcgatgccttactcacacaaggatgcacatatacattgtatagagtggcattttgtctaaaccgggaggaacttcaatttcgcaatattggtcatgggctagagttgggattgataacacatactattgtggatccattcacgaagccaatccaatttcctccatttccaaagtatcttatgccatttcatgaggtttaccaacaaccgcataagacattcgtagatgttattggcatagttcttcatttggaaccattaaagcatatcggtggaagaccgtatagagaagctgtactaatggattctaggtggcactaa

SEQ ID NO: 61461 - DNA, 683 bp, Zea mays
  Clone ID: MRT4577_156048C.1
ggcccatcccaccctagcattccatgcaagcatcaacaagtcatttggcaaaggatctcttctctcagttttgaggcaatttgctcgtttgaagaatgacaaacaagctatttctgtcgggtttgttgggtaccccaatgttgggaagtcatcagttattaacacactacggtcgaagagtgtctgcaaggttgctccaatacctggagagacaaaagtgtggcagtacatcactctcactaaaaagatatttttgattgattgtcccggtgttgtatatcaaaacaatgattcagaaactgatatagttctgaagggtgtggtatgtatcttcagctgtgcaatttgcaaatgttttttttttacctgggtagtgctggaggatcccacatgagtgtggtttgggaaagagatgaaccgaggcaagcatcccccacaaatgtggagagtctgcttcgaaccctaaacctggtgactcaggaacagctctcacactgcaccatgcctgctcttgttcttttacttgtggctggcaaaaataattatttcaagcttgtagtgccccctccccctaccttgaatatatatcagaaagtattttagttcaagatgatgtttattcctgggatacatgtaaaacaatgtttagcttcatacactttttccaagtggagttgacgatg

SEQ ID NO: 61462 - DNA, 767 bp, Zea mays
  Clone ID: MRT4577_156049C.1
actcaaaataggacggtggcaggccggtctccctttcctccgtaagtttatataagtttatttactttttacatctatatgtatgaagaacttaaactaaagttcgtgttttatgtagtttcgtgctatttgatgatattcaagatgtcaataacttaccacaagtaaaaagtgtctttgcgagggtagttgttaagttccctaggcgtcgtaatagtcaacactacatcctataggacatcactgtgagtcacgtcaacatgcattgcaatagagccaatatattcatgttattataattaaattctttgactcatacaacttgtattcccaaatatctagggatccaaaatcgaagcaatttctaacggcaataatgtccaacggttcgatgccttactcacacaaggatgcacatatacattgtatagagtggcattctgtctaaaccgggaggaacttcaatttcgcaatattggtcatgggctagagttgggattgataacacatactattgtggatccattcacgaagccaatccaatttcctccatttccaaagtatcttatgccatttcatgaggtttaccaacaaccgcataagacattcataggtaataacccttctttccatatagtttaactaacgcttgaagtctaactgattcaaatgtaactaatgatatgtgaattgttcagatgttattggcatagttcttcatttggaaccattaaagcatatcggtggaagaccgtatagagaagctg

SEQ ID NO: 61463 - DNA, 2230 bp, Zea mays
  Clone ID: MRT4577_15604C.1
ggccggtcagtatggccttttaattattatgatgcttgatgtacttggatggtggcatatgcagcagctatgtgtagattttgaatacccagtgtgatgagcatgcatggccctgccttcatagttcatatgctgtttatttcctttgagactgttcttatttgttgatagtcaccctgtagtttggtgattcttctgcagatgcagatcttcgtcaagaccctcactggaaagactatcaccctcgaggtggagtcttctgacaccattgacaacgtcaaggccaagatccaggacaaggagggcatccccccggaccagcagcggctcatctttgctggcaagcagctcgaggacgggcgcacacttgccgactacaacatccagaaggagagcaccctccaccttgttctccgcctcaggggaggcatgcagatcttcgtcaagaccctcactggaaagactatcaccctcgaggtggagtcttctgacaccatcgacaacgtcaaggccaagatccaggacaaggagggcatccctccagaccagcagcggctcatttttgccggcaagcagctcgaggacgggcgcacgctggccgactacaacattcagaaggagagcaccctccacttggtgctgcgtctcaggggcggcatgcagatcttcgtgaagactctgaccggcaagactatcacccttgaggtcgagtcttctgataccattgataatgtcaaggccaagatccaggacaaggagggcatccctccggaccagcagcggctcattttgccggcaagcagctggaggatggtcgcaccttggctgactacaacattcagaaggagagcaccctccacttggtgctgcgcctcagggggtggctatgcagatttttgtgaagaccacttgactggcaagaccatcacctttgaggtggagtcgtctgacaccattgataatgtcaaggccaagatccaggacaaggagggcatccctccagaccagcagcggctcatttttgccggcaagcagctcgaggacgggcgcacgctggccgactacaacattcagaaggagagcaccctccacttggtgctgcgtctcaggggcggcatgcagatcttcgtgaagactctgaccggcaagactatcacccttgaggtcgagtcttctgataccattgataatgtcaaggccaagatccaggacaaggagggcatccctccggaccagcagcggctcatttttgccggcaagcagctcgaggacgggcgcacgctggccgactacaacattcagaaggagagcaccctccacttggtgctgcgtctcaggggtggcatgcagatcttcgtgaagacacttactggcaagacgatcacccttgaggtggagtcctcagacaccattgacaacgtcaaggccaagatccaggacaaggagggcattccaccggaccagcagcggctgatcttcgccggcaagcagctggaggatggtcgcaccttggctgactacaacatccagaaggagagcaccctccacctggtgctccgcctcaggggtggtatgcagatttttgtgaagacattgactggcaagaccatcaccttggaggtggagtcgtctgacacaatcgataatgtcaaagccaagatccaggacaaggagggcattccaccggaccagcagcgcctgatctttgctggcaagcagctggaggatggccgtaccctcgccgactacaacatccagaaggagagcaccctccacctggtgctccgcttgcgaggtggtatgcagatctttgtgaagaccttgactggcaagaccataaccctggaggttgagagctccgacaccatcgacaacgtgaaggcaaagatccaggacaaagagggcatccccccagaccagcagcgtctgatcttcgctggcaagcagctggaggatggtcgcaccctagcagactacaacatccagaaggagagcactctccacctggtgctccgcctccgtggtggtcagtaagccatggttcatttaagctgctgctgtacctgggtatctgcgtcgtcgtcgtctaataaacatctgtggtttgtgtgtcatgaatcgtggttgtggcttcgttggtttaatggacctgttgtgtcctctgtgttgtacccaaaactcttctgcagcagtatggcttgaatccttgtgaagtttgatgtttgaactt

SEQ ID NO: 61464 - DNA, 702 bp, Zea mays
  unsure (1)..(702): unsure at all n locations
  Clone ID: MRT4577_156050C.1
gctgtgtgagattaacgcacacccaaaatccnaatacattaattagggctaatttgggaaccacaattntctaagggatttttatttttctaaggggaattagtttatttttttcttgggaaaatagagttcccaaactagcccttaatgagtacagaacttacatcacttacttcattttcatacactacaagatctgggaaacttattcattacaataccatgattcagagtgcggaaattaaatagtgaaaattaaataaacatcaactcatcaaggatctgtctatgcccaccagaagctaaaatccttcacgcagtagctaactcctcaagctgcaccagcgttgttggagtgcaagatatgcttgagaagcagattgttctcttcctgttgcttcttaaactcctcaaactccctttgagtttttgccaacttcttgttgagttcatctacttcttggtggagagcagttgagccttgcttttcagcagtaagttcctgaagcgctctctctttcaatgtctttattttcgtggagcttgtgaggatacctacattattaaaaaatgtgtcgttggagctgttctgagagacaaagaccttggaagaaacagtctcaacactaggcattaatgattccccaataggttgcgctcgcaatgtagtttccatagtagacgaagatggtgtcttaccga

SEQ ID NO: 61465 - DNA, 440 bp, Zea mays
  Clone ID: MRT4577_156051C.1
gggtcgatacaagcgtctacagtgcatgtctcatcatcttcatcgtcctagcacagctagcgcttgctcaccttcgtctgtgatcatgtcttgcagcaacggcatgtgcaactgtcgctcgagctgctcctgctgcagctcatgcaactgcatatcgactgacgtggataccgccgccgccagcagcatcaagaccatggtcttcgctgtgctgaacatgaaggccagcgcctgcggcttcgatgcagccaacgagggcggcggctgcgactgcaatacctgcgactgcggcaccagctgcggctgctcctgctgcagctgcaactgatccagcccgctcggccaggcgatggcgcacgatagtctagatgacgacgacgacgacgcgtataaatatactaacatcgtctagataagatcctgtcaactgctaccgccat

SEQ ID NO: 61466 - DNA, 193 bp, Zea mays
  Clone ID: MRT4577_156052C.1
ggactaatcttaacaactcacccgacccaaacaagactttacaggagctaatttggggggataaatggacggacgggcccttgtaatgaataattggatccttccgcaccgcattaccccagaaaaaaacttccaattggcctttgtgaaatcggggcaaccggccaaactttccaaaaggaaactcaagttg

SEQ ID NO: 61467 - DNA, 299 bp, Zea mays
  Clone ID: MRT4577_156053C.1
tcggccaacaagcaagaccggttctgcttggggtccgaaacctttctttgaacgcaaaaagaaccccacccgacgtaccgcgagccggcgatggcgaccgtggccatggacatcttgaagcccacgccggcagcgttcggtgaccaggcaacggcggcggccaaagggaggagcggccgctggggccaggggcttccgcagttctacctgcaagacattcatgaccttgagcttcagatccggccgaagacccataaccttaaccggcttgagggccagggcaacgaccttaacttccg

SEQ ID NO: 61468 - DNA, 479 bp, Zea mays
  unsure (1)..(479): unsure at all n locations
  Clone ID: MRT4577_156054C.1
cgcgctggcgacactgtccggcgccaagaccgggcggtcgcccngggccccgcgcgtcgtcnnggccgnggtcgcggcgcgggccctgtggtggggcnngggctcgcccnncttcgngttggncgngcccccgttccttgccncngggngngggccgtggccttcctcnnctccctggncnnggtgttcgtgnnncgccngttcctcnnctgggnccccgngnnccggttcnnggtccgcttcttctccgccggggcgttcccctccctcttcttgcncnncntgtgcttcncggccccggncgnggngctggngngtttcggcccgccggccttcnccttcttcnncgccggccngttcccctgtnnccgtttcncgcncttcttgncgtngncncccngcgnngncttcnncctcgccnggngggngttggngttcctgggcncgcngnncgccggcgggntgnngnggggctgttc

SEQ ID NO: 61469 - DNA, 565 bp, Zea mays
  unsure (1)..(565): unsure at all n locations
  Clone ID: MRT4577_156055C.1
agctaggacaaaacctcttcagacttcaagggagattcgcaagatggaggggaagagcaggctgccggaggtgaccatcgtgccggcggcaaggccgttggctggcgacggcaccatcgacgcggcgaaggcagcggcagcgccgggcaaggagcccatcagccctggtactccgtcctcggcggacgccggccgccgcggcaaagagaggcgcgcggtggaggccgtcccgctccctgggtggaagctcgacgccctctgccaggagtcttgcccgtcgccgaccatgagggcgcgcttcccctacttctgaagcttcccgttgcagtcctgcatgagtttcgtttcgagcggcaacattgcatcttgtgctttggacgtctgactgatggcgttcttgggtgtttgcttgctcaggatttttctttcgtgcatcagtgtatccacatgcatgtattatgtatatatatgtattatgagtataaagatctgtgagctttgtgtcaaaaaaaaaaaaaaggggccgcttctccggaacttagaacgactagtntctagatcgcga

SEQ ID NO: 61470 - DNA, 1126 bp, Zea mays
  Clone ID: MRT4577_156056C.1
gtccaagaaggacttcgagcaccacatggccgtgctcggccgcctccggcaccccaacatcgtgcccctcaacgcctactactacgcccgcgacgagaagctgctggtgtacgagtacatgcccaacggcagcctcttctccgtcctccacggtaaccggggccccgggcgcacgccgctggagtgggcggcgcggcttcgcatcgcagccggcgccgcgcgcgggctggcctacatccaccactctgggcggcggggcagcggcacgccgaagctggcgcacggcaacatcaagagcaccaacatcctgctggacagattcggcgtggcgcgtctcgcggactgcgggctggcgcagctggggtcgtccccggccgcggcggcggctcggtcggcggggtaccgcgcgcccgaggcgcccccgccgcccaggccctgggcgtcgcacaggggcgacgtgtacgcgttcggcgtggtgctgctggagctcctgacggggcggttcccgggcagcgagctgccgaacggcggcgtcgtggtggagctgccccggtgggtgcagtccgtggtgcgggaggagtggacgtcggaggtgttcgacctggagctgatgaaggacaagggcatcgaggaggagatggtggcgatgctgcagctggcgctgagctgcacggccgcggcgcccgagcagcggcccaaggtcgggtacgtggtgaagatggtcgacgaggtccgcgcgtgcggggagacggcgtcgccgtcgcacgagtccatggacgagtcctccggcgtctcggactcgcccgccgtgtcggagggcggcgcgctcagccagtgagggcgcggcctggcgctgctggtccttcttcggaattgccttgtgatgcgtgcctatttgtttggtttaatctgctcttgttttttttgggggtgggctggattagcgagggccgttggatctggtgatcggcgtgtgcgtgtgtacattgttcacgttggctgcttggctctggattcttgttcctgtttttaactgactctagatccctagagtagctgcggctgcggcggcggcgggggttggtttggttgcgataaaagttgtgctaatttgcgtgagtggatc

SEQ ID NO: 61471 - DNA, 296 bp, Zea mays
  Clone ID: MRT4577_156057C.1
acgcctaaacgcgtggtggaatttcttggatctctttcaataaaaacgacaggattcaatatgtcttatgattattgagctgattcttaatagcgccactaaacaattccaccattgtactcacgttttttcttccgctattgaaggctcgccaaaatatgttccgcggcattccaccgattctaccccacccgacgcgagaaatgggactgcctaatagtaaaagggttttctgagacagcccttcagatgagagccccctgccaaatgacatgccccggacagcttcacgtgga

SEQ ID NO: 61472 - DNA, 349 bp, Zea mays
  Clone ID: MRT4577_156058C.1
cgtgcgatcctggtacctggaatctcaagtctcaggcaagttgtgcccttgaccacttttattatccaataatgttctttataatcatttattcatgcataggcctaattttgatgggacccaataggtcaccctagactgattatcttgttaccttgtttacccctgaactatttgggtaggtttgctattgctctatatagttttgggttttatattacattatgttcatgttccaattatactgctattttatttattgttcatgacaagatcattattttaattggaacatggagaaacacgtgccaccacaatggtggaatgggatgcccttggctgactaact

SEQ ID NO: 61473 - DNA, 1070 bp, Zea mays
  Clone ID: MRT4577_156059C.1
ccgcaattaatagagacccgcccccgtctatcgatcgagctttcgttatcctcctctcttaattacaggtcatagctaagcaggtctgacaggatgtcgtggcagacatacgtcgatgagcacctgatgtgcgagatcgagggccaccacctgacctccgctgccatagtcggccacgacggcgccgtttgggcccagagcaccgcattcccacagttcaagacagaggagatgaccaacatcatgaaggacttcgacgagcccgggttccttgccccgaccggcctcttcctcggccccaccaagtacatggtcatccaaggcgagcccggcgctgtcatccgcgggaagaagggatctggaggcataactgtgaagaagacagggcaagcgatggtggtcggcatctacgacgagcccatgacccccggccagtgcaacatggtggtcgagaggctcggcgactacctcgtagagcaaggcctgtgaatggattcatttaacctcgctcgcttgtccatggttcgcagcaacgataccaacacccgcattatttaattggtagcctcctctagctacgcacgcatttttagtctcctacacgcccttggattgtgcgtggctctgttaatcatctctcatccttcgtctgccatttctcccctgagatttttgttccttgttggtaccatgcattttggcaaataattttgtgattccactcccaaattaaagtttggttgtcgtatggtttgtaaacccagaacaatatatatatgtgtgtgattgaactgctcctgtctaaaaaaaaaaaaaaaaaaaaaaaaaaaaaaaaaaaaaaaaaaaaaaaaaaaaaaaaaaaaaaaaaaaaaaaaaaaaaaaaaaaaaaaaaaaaaaaaaaaaaaaaaaaaaaaaaaaaaaaaaaaaaaaaaaaaaaaaaaaaaaagggggggggcccttaaaaaagaaaaaattttttctcccggtcttgagaaaaaaaaattttttttttggggacccaaaaataaaatatatgggcggggttttaaaaaaccggaagggggaaaaac

SEQ ID NO: 61474 - DNA, 416 bp, Zea mays
  unsure (1)..(416): unsure at all n locations
  Clone ID: MRT4577_15605C.1
gttggggggtgtgcccncagggttaaaagcgggtgcatttttggggccccacattacagggctctcacagtatagggctcgggggggcccagggcctttttttttttttttaccagaaggtttgttgggggggggtgcagccagaacggggttctcgagacacggttggggggggggggcaactgaatcatgcgtttgggcttcagacttgacacctttccacaccactggcaagggctggttaggttaatgggtggggtccgccaggggggtccaaaggacaagggtgtgatgcgtggaccttgggcgcccatcccggaattacgtgctgcgggggtggcggggtggttggcaaaaggtgcccggctgtgaaagggcctgggggggggcatggtcattggggcggttgtctgggg

SEQ ID NO: 61475 - DNA, 265 bp, Zea mays
  unsure (1)..(265): unsure at all n locations
  Clone ID: MRT4577_156060C.1
ctttccaaccctagtcctccccctcctcctcaacccgccgccgcttctcctcctccggaagaaaaacagagagcttcaagttctccggagcgagagagatggcggcgaagggcgatgggncggcgatcggnatcgacctcggnacgacgtactcgtgcgtcggcgtgtggnagnacgacagggtcgaaatcattggcaatgaccagggnaaccgnaccacgncgncgtacgtggncttcaccgactccgagcgnntcatcggcga

SEQ ID NO: 61476 - DNA, 920 bp, Zea mays
  Clone ID: MRT4577_156061C.1
ccggccgaggtttatatgtgagtgttcctcgcaatagagagatctatcgatcgagctttcgttatcctcctcttacattacaggtcatagctaagcaggtctgacaggatgtcgtggcagacatacgtcgatgagcacctcatgtgcgagatcgagggccaccacctgacctccgctgccatagtcggccacgacggcgccgtttgggcccagagcaccgcattcccacagttcaagacagaggagatgaccaacatcatgaaggacttcgacgagcccgggttcctggccccgaccggcctcttcctcggccccaccaagtacatggtcatccaaggcgagcccggcgctgtcatccgcgggaagaagggatctggaggcataactgtgaagaagacagggcaagcgatggtggtcggcatctacgacgagcccatgacccccggccagtgcaacatggtggtcgagaggctcggcgactacctcgtagagcaaggcctgtgaatggattcatttaacctcgctcgctcgcttgtccatggttcgagcatccagcagcaacgataccaacatcagcattatttaattggtagcctcctctagctacgcacgcattttagtcccctacacgcccttgggattgtgcgtggctctgttaatcatctctcatccttcgtctgccatttctcccctgcccgtcgccgatcaccagagatttttgttccttgttggtaccatgcattttggcaaataattttgtaattccacccccaaattaaagtttggttgtcgtatggtttgtaaacccagaacaatatatatatgtgtgtgattgaactgttcctgcctattctttttgtaaacgggaatatatatgtagtgcattttgtgcaaaaaaaaaaaaaaaaaaaggggcggcc

SEQ ID NO: 61477 - DNA, 123 bp, Zea mays
  Clone ID: MRT4577_156062C.1
caaccaatatctgtaccccagacaatgcactccctaataatgcaggtggatgatgcagacctcctctgcaccactgcgacctttcccagactattttccgacaaattgctcaatacaaaggtg

SEQ ID NO: 61478 - DNA, 361 bp, Zea mays
  Clone ID: MRT4577_156063C.1
attccttccccaactctgcaggctgctcgtcggccttctttcaagccggacgcgccccgatccaaatccaggggccttacatggcattaaaaccttttcttaagggattaaagggcctggaaaagggcccttcaacctcatgccaggcttgtccttgttgtgagggttttgtccaattgccaggaaccattaagggttcctcctgatagccaatatctggaaggggttttttagagaaaattcattttcccccggacttcccttttaaggcttcaaaagttttttttaaaaacaaaggttttcattccaaccttaattggtattggaggcttatgtttggactttttaaaggagcagtgga

SEQ ID NO: 61479 - DNA, 290 bp, Zea mays
  unsure (1)..(290): unsure at all n locations
  Clone ID: MRT4577_156064C.1
nacgacacgccgggacaagggcgacgccgaaaacnncaggcnccgagncacgggncncncaggggcaaaccaaaacccaagggcacaagggcacgnagcaagacaaggccccaccagaaaggcggcnncgncagccccaaaacaaagcaagagaaccnccgcaaaaccgagaaggcagaangcnaagacgggcccggaaaaaaaggncacagcnggcnncngaccgncncaggcacagcgaaagaancaagaancagcccagncngangggnncaaggcgcagagcaaac

SEQ ID NO: 61480 - DNA, 417 bp, Zea mays
  unsure (1)..(417): unsure at all n locations
  Clone ID: MRT4577_156065C.1
cagtaccatgcttcacaggatgagctgcacgctgtgagggagctccgaccgagccgggcgccgatcggtggctaccaagagcggtacgaggggtagcgggnttattattatggctgtggtgctttatatctgtatattatcttctgatgcatatgttgcaaactggtttatgctgatgtcttttttttccctccatatccattgatagttctttaataatgttgaatttttttttcatgtagtacttatataatttcattttttggatgttcaaggtcttccactttttggggtcttgcgtttgtttctttttgtttgtcatttttttcattaataagttcatcttttatctttttcattgggtttttttatcaaatgattttttttttgtttttttttatgtggattctttttttt

SEQ ID NO: 61481 - DNA, 335 bp, Zea mays
  Clone ID: MRT4577_156066C.1
ctcacacgatctttgttccgacggacacaaattcttagtaatatacatacacacggacatacggagggggggggtatctagtcctaatcgtgcagcgcgcgccaccgtggacagggcactgctgctggcaaggtccgaccagcgctcgtgcaggcacaggaagcagccgaccagcgactactacaactgcacatgcactagcacctacgacatcgtgaagcaggtcgtgatcgaagcgcacacgaacgactaccgcatctactccagcctgacccgtcagcacttccacaaatggttcatgcagagctgcgatggctcgctgctactgcacgccg

SEQ ID NO: 61482 - DNA, 1512 bp, Zea mays
  unsure (1)..(1512): unsure at all n locations
  Clone ID: MRT4577_156067C.1
cattgggaccctcgaggccggccgggggagtcatcgcattcgttnctaatctctcttcttccttgacgaacaccctttccttcttcctcggcttcgtttcgtgctttcctcaacctccccacttccgtggcgcgcagtttgtccgctgcttcacgaaaattcctacgggacctgtatatattcgctgcgcaggcggccccgcctccggccgttgttgtctccgctcaccccgccagcctcccggcgtcccaattccaggaactttcgtcgcgtcaggtgatgcttttagcaactacaagcatagaacaatgttgatgcactatgatgtggatagaagtgaggaccggcaaagtgaggaggttcagtcagcatacagaagggacagtgacattggtgaggaaatgataataagtagcgaagagcaaaatgatgaaaatgaatggagctgggtgaaccaagatagagatggtggtcctcttgctgaatcggtttcttcacttcatatgacacagcaagtccttgaaaatgagatacaaaaattatcagaacttggcaaagaacttgaggcggaggaatccacttctggtaacaaagaccaagatgtgatcgttttgccgtatgcagaggtcgatatgttgaaattgaatgagaagatggagcatcttgaacaaaaagtgaaagaagtgtcaaacaccatcagagagaaagacttaatgctttccaagcttcaaatactgatcggtactgcagatagggcaacggtggaggaggcagcagctagcatcgaccagctggagacagagttggagcaccatctccaggagatactggaagctgaaatccagtatctggtgatgttgaaagcgaggcagaactggcaggtccgggcagaggaccagatggccttggaggagcacagggcgtttgctgccggggacaacaccaggatgctgctcaagctacgagagacggagagcaagatcgtgatgttgaaagagcaggtggacaagctggaggtccgggagaaggatctctaccggacgaccgaggtcctgaagatgcagagcaggaccttcaaagtgtccctctttggcctcgtccagctgataatgatgtgcctgtccctgaagatgttcttcgcgcaggtctcggcgccgtttgacgaggttgtgccgacatgatgatgccctgcctcgtttggatgcattcgtatccacatggattgacgtgctcagttggtgttctcttccgtctgtaacttcgttcgccgggtttgtgatgtcttaacgtgtatcttactgtagctgtaggcctgtagccagcacccagcaggtagtatagtttcttagtcgtacatgcacttgtgatgcattgcgtcagaagctacgcgtgttctgtaaaaactaataatgtaggtctgtgcataaattgggttcgattgacaactaggctagctgacggtctgcagctaccaaatcatggattaattaggcaaactaaattcgtctcttt

SEQ ID NO: 61483 - DNA, 354 bp, Zea mays
  Clone ID: MRT4577_156068C.1
ggcaagaccttttttaacattttgggacgactggcaatccaaggtaaagtttgaccaaaggggttttgttgctggtttccactaaacactggggaaggcggggggcctttttatgtggcgaaaaagggccttactgtacagttatgcaattgtttccaaccaattcattacccaaattcgaatgtttttacaagggggggcagggtttgcaagaaagaggattttttcccaattttgtcgaaaaattttgacagagctttgtacaaaggaaagggtgcgggcggttttccctttgatcctagaagggttttaaatgccttgccaggccctcctaaaaatcgagcgtttttattt

SEQ ID NO: 61484 - DNA, 191 bp, Zea mays
  Clone ID: MRT4577_156069C.1
agaagggggggggggttagaaaaaaaaagggttccccggtacacttattattcatccttgaacacaaaatctagacaccgccttttaccctatgttttaaaaccaaggagccagacattatcttataattccaactaaaaattacaatatcttgttacagttatgaatattatatttttttagcccatatt

SEQ ID NO: 61485 - DNA, 1220 bp, Zea mays
  Clone ID: MRT4577_15606C.1
ctcaaggtacagatctgccttataaaaccacatagtaacattaacatctagtggtgatgaactgctgatgcaattacttttttccgggtctagtacacacgtattaaccaaaaaaaaaaactgatgcattctgatgttctttcacaggctatttggccacacagcgggcactaccgcccaacggaagagaacttccaggaattccagagcttcctcaaagacaacaatgtcgacctcactgatgtcaaggtgaggactcttcggtgataccccgcgcttcaaaaaaaaaacttgttgcatgcagcattttaaactgttccgtcctcaatgctgcagatgagcccagatgaagacgacgaggagttttggagcaggctcagaagcatctcttccgactgctgcgccgtcgctgacaaacccgaagaagatcaacaggccgcagctcaagaaaccagcaacagttgccaggcacctcaagtcactgaatcgaccacacctgacgaagtctctccctccccgtcccagcaggaagaaaccagcaagagtctcagtcccactgcaactgtcacgaggcaagattcatcagaggaagcggtggaggacgccgagacctcaacgacaagccaccgtgccctgttcgaagatggtcaggaggaggaccacgctgccgcggccaccgccgccgacgacaatacagccgtgccgagggagaagatcctgcagaggatcagctccaagaaggagaccaagtcgtaccagctggggaagcaggtgtcgttcaagtggaccacgggcgcggggccccggatcgtgtgcgtccgtgactacccgtcggagctccagctccgggcactggagcaggtgcacctgtctccgcggagcggcggcgccgccgcagccgcaggggccggtagggcggcctcgtcccggttcgcctcgccgcagcggtgcggcagcccggttgcggcgagagggcgccgcgagcctctggcgtcggcggggtgcggcagggcggcctcgtcacggttcgcgtcgccgcagcggtccagcagcccgatggcgagagcgcgctgcgagcagctgacgccgagggaggcgttccggacgcacctgatggccagaggttaaccggatcggatcagccattcagcaaagcagccgatggatggagtcatggagagacactttctcttcttcctttatcccctcttgtgcatagg

SEQ ID NO: 61486 - DNA, 405 bp, Zea mays
  Clone ID: MRT4577_156070C.1
ctggaaacgtgccgttgaatgctgttcagttgctgtgggttaacctaattgtggatactttgggtgcccttgcattggcgacagaaccacctacaaaccatcttatggagagacccccagtagggagaagggagccattgattataaatatcatgtggagaaacttaattatcatggctttgtttcaagtttcagttctcctctcaacttcaagggaataagcctcctgcagttgaaaaatgatgatccagcacatgcagataaagtgaaaaataccttcatattcaacacatttgttttctgccagttgaatttaaggttcctcttcccttgtttggaagaggttatgatcattgtacgctcccggctcaatgttggacactcttgaagtacactgtgaagttg

SEQ ID NO: 61487 - DNA, 559 bp, Zea mays
  unsure (1)..(559): unsure at all n locations
  Clone ID: MRT4577_156071C.1
aattcggcacgaggcgactgcctacttccctcgatctacttccccactcttggtcctcccttttgctaaaaataacgaggcagaaggcatcttcgatttgacgtgcgcttcctcttcctcgctcgctctcggtcgcagtcgcaggtacctatgtcctgttcttcctcgcttatggatttctttccgcgtggaaggtagtagatctctctttgctcgatctattttcgttttgtaagaatcattcacgtctgcgctgtggctattcagatttggtcgtcatttctgggtttgaccagcgtaagcattggccccgatctggattctggagcttgactgtatctccttttgtttttttattttgtactatctaacatagattnttgcgtctaacaatcattaagttacacgcacgcatgattatatttgaagtttaaccttgccgtgtttgtggttaaagtgcgccttctgagcacattttatgtactaaattctgcanatcagtaaaggaaattataattgntagagtcaacttccgtttagggtacgctaataacatgct

SEQ ID NO: 61488 - DNA, 1730 bp, Zea mays
  Clone ID: MRT4577_156072C.1
cagaaattggcagggaattccaacacagatttgtaagtattcaaacagctggggatgatcttatgtctgatagataccacttgagttctgcacctggaaataatgtgtttgtgggatttggagtgcggccagcgggcgggcgggtgcagcatgcaaggagcggatgggtccaggatgcgtggagcacgattgagcatcgggtcggtgcacgttaaaacataatgcaaatgagctgcacctgcactactgtgtagtgactacaaactcgtgaatcaacaaaatctacaacttgaaggctgtgatagcgagcagggggtgagggagcgaacagagtggttgtcccctcattcgagatgtaaagtcggccctctccttacctcaatgtactgctcctctgataatcaatgtagttgctgctgtcagttctggaaacgtgccgttgaatgatgttcagttgctgtgggttaacctaattatggatactttgggtgcccttgcattggcgacagaaccacctacaaaccatcttatggagagaaccccagtagggagaagggagccattgattataaatatcatgtggagaaacttaattatcatggctttgtttcaagtttcagttctcctcactctcaacttcaagggaataagcctcctgcagttgaaaaatgatgatccagcacatgcagataaagtgaaaaataccttcatattcaacacatttgttttctgccaggtgttcaacaattcaattcgtgtaaaccagatgagctgaatgtattcaagggcatttcagagaaccatctgtttattggcatcatagctataacagttgtactccaggtagaatctctagaatgagtttcctttcttaactaagataaattgatttaggtctaagaaactgttttagatcacctggactttgccacgaataccttttatcagaaaatggggggaacgataaaggatgctggaaaatgaaatatattattatagctaataaattggctttcctggaggcactaggatttggacccagccaagtggccaagtgtatggaagaatcgtgtcgtggcacagacgaccagctgcttgactctccctcttctgtctgatcacatttgtacgcaagatatagatagtactactatacagtggagtcttcttgcagtttgtctattttacacaactgacatagtcttcaggtatcttattgtctgttcttatttagttatattaatgatgtttactattaattttgaccatcacaacttcgacttgtccagctctgcctctattagtcggttcagctctgcttctataatttttttttggtccactgtacaatgggctcctttattacctccttgagaatcgttttcagtttggtccactgtctcatcatccatcgaatcacggcccaggcacacaatctaaaaggcaaaagaattatagaggcagagctggacatagtcttcagttgaatttaaggttcctcttcccttgtttggaagaggttatgatcattgtacgctcccggctcaatgttgaacactcttgaagtacactgtgaagttgcagaggatggtcatcagaatctcaaagatgaagaattgccataaaggtgctgatgagttctttgatgatatatgtaatttcaattacatgaactataagaaagtgcaaattgaataagtagagatgatataatattacatatttatatc

SEQ ID NO: 61489 - DNA, 867 bp, Zea mays
  Clone ID: MRT4577_156073C.1
attagtcggttcagctctgcttctataatttttttggtccactgtacaatgggctcctttattacctccttgagaatccttttcagtttggtccactgtctcatcatccatcgaatcacgggcccaggcacacaatctaaaaggcaaaagaattatagaggcagagctggacatagtcttcaggtatctcattgtctgttctcagatagtactacaaatgatctaacctctataaaatttattttagtgattcattgcatcatattactcctatcttttgcaatatagtttggattcacattagccttgtaacaaaaaataaattctcaaaacattattatgatactcctaattagattggtacgctagacaatgtgccatacaactaattcgtttgaattttgcatgcagttgaatttaaggttcctcttcccttgtttggaagaggttatgatcattgtcccacgcgtccgcaatgttgaacactcttgaagtacactgtgaagttgcagaggatggtcatcagaatctcaaagatcaagaattgccataaaggtgctgatgagttctttgatgatatatgtaatttcaattacatgaactataagaaagtgcaaattgaataagtagagatgatataatattacatatttatatcatcaaaataatattaatattacgatgatattttatcacctaaaaaaaaagttaaaaaaatattaatctaaaggaacaaataatttgcgcatcttctgttgacagaaactggggggcgcttttagaggtccacccctaaatatccctgtatttcgaagacgtaggttttttattctggcacataactcaagaaaagcggccctggactaa

SEQ ID NO: 61490 - DNA, 181 bp, Zea mays
  Clone ID: MRT4577_156074C.1
gtttcacgagagcccgggagctgctgccctgcggccccgtctgtagctttcagcctctgggtctgagtcatggccgggtgggcggcacagccttctccactggccggagtcagtgccaggtccttgccctttgtggaaagtcacaggtcacacgagacgccccgtgtcctgcctgtctgga

SEQ ID NO: 61491 - DNA, 1958 bp, Zea mays
  Clone ID: MRT4577_156075C.1
tataatgcacaaatgttatctgctgatgtcacatcactgattgttgaaggaattgcacagaacacttctggaagcatatttgagcccgagcagggtggtcaagaaccagaggtgactggatcacctacagaaaaggctatcctgtcttggggactaaagctgggtatgaaattcagtgaaacaagatcgaagtcatctattcttcatgtatttcctttcaactcagaagaaaaagcgaggcggggttgcggtgtacctggctggctctgaggtccatatacactggtaaaggagcagctgaaattattttggattcatgcacaagctgggttgacactggtggttcgaagcattcaatgactcctgaaaaagctgccgaattcaagaaattcattgaagatatggctgctgctagcctccgctgtgttgcgtttgcctatagaactcatgagatggatgatgttccagacgaagatcggagagaagagtggcaacttcctgaagataacctgattatgcttggaattgtgggaataaaggatccctgccgtccaggagttcgagattctgttcgtttatgtcaggcagctggcattaaggtgcgcatggttactggtgataatcttcaaactgcaagagccattgccctggagtgcgggatacttgatgatcccaatgtgtcagagcctgtcatcattgaaggaaaaacattccgggcgctgtcagacttggaaagggaggatgctgctgaaaaaatctcagtggatggggaggtcttcaccaaatgataaacttttacttgttaaggcactgagggcaagaggtcatgttgttgctgttactggagatggcacaaatgatgccccagcactgcatgaggcagatattggtctatcaatgggcattcagggaactgaagttgctaaggagagttctgatattattatcttggatgacaatttcgcatcagtcgtgagggttgtcagatggggtcgttcggtgtatgcaaacatacagaagtttatacaattccaactaacggtcaacgtcgcagctctgataatcaatgtagttgctgccgtcagttccggaaacgtgccgttgaatgctgttcagttgctgtgggttaacctaattatggacactttgggtgcccttgcattggcgacagaaccacctacaaaccatcttatggagagacccccagtagggagaagggagccattggtaacaaatatcatgtggagaaacttgattatcatggctatgtttcaagtttcagtcctccttagtctcaacttcaagggaataagcctcctgcagttgaaaaatgatgatccagcacatgcagataaagtgaaaaataccttcatattcaacacatttgttctctgccaggtgttcaacgaattcaattcacgtaaaccagatgagctgaatatattcaagggcatttcagggaaccatctttttattggcatcatagtaataacagttatactccaggcgcttatcgttgagttcctcggcaagtttgcctcaacggtaaggctaagttggcagctgtggttggtatcgataggtcttgctttcttcagctggccactggcattcgtgggaaagcttattcctattcctaaacgtccattaggagaattctttgcgtgctgctgtaactgtaaggggagcaaacaaggccctgatgacgcaacctctaatggtaaggaagacaacaagcttgagccttgagatatcgcaaggtttggtggctggcaacgatggccttctgctgtttcttgccagggtttgacgtgttggatttgtaattgcccctgattgcgattgtatatatatatacacacaccgggttgttcctaggatctgttatacgggcaacatcaatttcataatcatagagattttcctcttagtcttcaaagaccgagttccttgcgaat

SEQ ID NO: 61492 - DNA, 841 bp, Zea mays
  Clone ID: MRT4577_156076C.1
agttcacaggtcacaacaacttttttgacagccacagcccaaccaaacaaactcttagactctatttggcattggcatggcactaactccttcctacaatacatcactcggagccggtcagaaaattcacctccttcacagcctccatgtccaaagcaacctggatggatctcgagtctcgagtcttattgccgtcgtcgtctactatgcatacgcgtaatcatgttcgagctgaactgagatgctgcatgacgaactctatctattccctatacatgcggtgctgttaacctgtctgtcatgcatatgggcgcgtgggctccattccatggcgctgctgcctgatcgaagcgtatgacgatccgctccttgggcttgagcagcggcggcacggccgcctgctggtggcccggcggcgtgacgtataagtggccgccaccgccgaaggagcgggcgtggtcgttgagggagcgcttgtgcttgaagtcggagccgcaggcgcagaaccagcgcttgccgcagttcttctcgtgcgtgcgccagtctcccttgacggcaaagggcttggcgcagcggcggcacccgaagcgcttgtcgccgccgtgcttgcgcctgtagtgcgtccgcagcgtgcggaagtccttgagcgggcgcgcgcgcgggtgccccacgctgttgcggcacccgggcgcgcagcagtagcacggcagcttcagcagcgccagcgtcgccgcctgcgtgcccttgagcgactccgggccctgcggtactcgcggccgtggccccacatgtgcatctgcacgcacgcgcaacacgacatgtccatcgtcatgcgtcggcg

SEQ ID NO: 61493 - DNA, 246 bp, Zea mays
  Clone ID: MRT4577_156077C.1
ctgccaagtgccaaaccaggacgggacaacggctgtgagaggtcaaagcgaccgcgagcagagtcagcgatcctccctgcagtgaggtcctggactgaaactgaggcgactaggcgagggctgcgtgcatgcagccgctccggaaaagcaggcctgcctgcctctgcctgcttccggccgcatggcaaccggaaccggcatgctgtcgtggaacgaagtcagctatccggtcagtgtggcacgcga

SEQ ID NO: 61494 - DNA, 555 bp, Zea mays
  Clone ID: MRT4577_156078C.1
ctatagtaagacatgccctttccacaggagtggaggagctcccacgtgatggtgtagtgtgaggctgtttggagacccctctggaacttgaccctagctccatttcttttcctcttaatagcaagattttctttgtcgtaagacggtcgatatgggtctttccattgcatccacacctcactggcataagcttattaaatggttaagggtgaagatcgggcatggcaaggactgggccgtatacataggttctttgagctgctgtaaagcttcttacgagttcttttgaaacagttcggtaagcgggcttgctgatctacccatacccaggcgcttctgaaccgataatatcttagcctgaactccttcatttagtagccgaacatttcacattgcctatatcttctgccgggtctggacaccctctgaggcgcgaagcggtgagctcagctctgagacttgcgcctttctagctaataaaacctcttcgaccaatccccacattagaactccgcgttgtggaactacgacatatgtccctcccgcgtattccct

SEQ ID NO: 61495 - DNA, 500 bp, Zea mays
  Clone ID: MRT4577_156079C.1
aaaaaaaaaaaaaaaaaaaaaaaaaaaaaaaaaaaaaaaaaaaaaaaaaaaaaaaaaaaaaaaaaaaaaaaaaaaaccacccccggcctgccaagggccaaaaccgaagcctgaagtttaatccgtggggctgttccgggttccatcgggcggggggaaattaaaaagggccggcccggaggggggggtcaacggggtcgttttcccgccgggggcccgcccgcggggttccgccggttcgaatttcttggggggggaaggcgtgcaaggcctcaaaatcggaggcaatttaataaagttaacggccatgggggtgaacctggaggacgcggccgtccccgccctggcaaaaaagggggggggaaaaacggccgaaaagctcgcttccgacgccgcttttttccggaaggtggtaaggggcgatttgaaaaagttcacgagggggacgatgatcctcccgttgacgggcaaccagtacgcggaaaaagtgacggaaaact

SEQ ID NO: 61496 - DNA, 338 bp, Zea mays
  unsure (1)..(338): unsure at all n locations
  Clone ID: MRT4577_15607C.1
agcacgngaaaaacaggcgaccaacncgcaaancggncaccgaacaaacaaacaaacaacaaacccccccgcagcacgcangcaacagaccaaaaccaacggccggggggcgacanncaaacncacnnnccccaancaggaccaaaaaccannganaaacangcanngcagcagcagcaacaggcggagaggacaacggacacgcaaggccggcgaccccacaccccnncagcnnanggaaggncnccaagaccacgggcgcgccgagggagccaaccgcaacaaggncccaccagcccangaggaagnngnccaccaccagcccgaaccagggggag

SEQ ID NO: 61497 - DNA, 284 bp, Zea mays
  Clone ID: MRT4577_156080C.1
ctgtgtgttcttttggtgctgtttttggggccggaatgccacgtaggcgcagcctcgacggccccgatccccgagacaaaatgcgacgagtaaatactacagccggaacataaggtgaacccgctgccgagtatcatcactcccctccgctgcccggcgatagtgcgggatctcaacttgccaggagcggtccgcagggacataaaactgggaatctggggcccactacccggactgagaggcgttgggtaagatacgccacaggctcttccagtcgtgaaaga

SEQ ID NO: 61498 - DNA, 389 bp, Zea mays
  Clone ID: MRT4577_156081C.1
gcaggtcgaatccagagatccccctgaacggtgcgtacactggccgtcgtttacgaacgttgcctggggtacatcgctatcagcagacactttaatggagtggagtacatctctactaaatcatgaccaccgcgtatggaagagtgccacaccgtaggctgtcttgaggatatgcgcacgagctgaagtgatgaggcaactaatattttaatttgtccgagggaatcgtggccggccgtccgaccggatatggaaactgaagtgtgcacacacatcagacacaacatggggagtgcaggacattccaatgacttccctgcgtgtgacccactcaacggtacgcgagaagctggaatccggttacagacacagtctcagcagatccttac

SEQ ID NO: 61499 - DNA, 327 bp, Zea mays
  Clone ID: MRT4577_156082C.1
acagagctacctgactggcgatttactctgcgactacagctgtgacaccgcggggctgtcggcggaccactagacgttcagccaagaaccgtgatctggatgtgatccactatggctgggccatgctgggcgcgctcggctgcgtcttccacgagctgatcggccgcaacggcgtcaagttcggcgaggccacgtggttcaagggcggatctcagatcttcaacgagggccgactggactaccttgggaactccagcctcatacacgcgcagagcatccttgctatctgggcctgacaggtcgcgctcatgggctgatgactagggc

SEQ ID NO: 61500 - DNA, 270 bp, Zea mays
  Clone ID: MRT4577_156083C.1
gtaacggactgacacatcgaaaataccctgaatcaattctggctgtagagacctattgggttagaaatggctgactgggaagatcacaactgacacccattacatgtgccatctggagggtatacttgtatcggttgcttgggcaataatggtagcaaatgttggcggagttggactgtcaacattgtcgtttgacatgcccaatcaaggcagatgatgtaccaggcacaagttttttgtgatacacgtaaacatgatctgattctgcaa

SEQ ID NO: 61501 - DNA, 308 bp, Zea mays
  unsure (1)..(308): unsure at all n locations
  Clone ID: MRT4577_156084C.1
gcccgncctttttttttttttttttttttttttttttttttttttacgtgcccttcacatttgaggataattccattgcaatctatcgaggactaaacggccttttcatctttaagtcggctcccttttctgcgaacatgccgaaacttttctgcttaacagattcggcactgggccaaccttcggatctttggagggtctccctctttgatataagaccgaaggtacctgctcaccccattgactttttaaacactggtaaactttgtattaagaggaccttttgaagccccaggcccccaacaatg

SEQ ID NO: 61502 - DNA, 1807 bp, Zea mays
  Clone ID: MRT4577_156085C.1
cctcgaggccggccgggaccatctgcctctgctcgctcgctcgccgcgggtcgtccgccagacgcccaaaccgccgcctccaaaagtcccagcaccgtgccaccgtctgctcgcgcgctcctcctccgtgcgcaaccgcatcacgcggcggcatggttgactgcccgcggctgcttctgccgccccctcgcgtcgctgccgctcaatacacgcgctgcgccgctggatgttggtcgaacccgggacgcgctcccttctccgtttctttcagccacatccgccgctggtggagctacgcttctgacttgggtcaacacagtgcgatcctcgtcctctggggccggaagccagtcaagcgttgcggatgaaccagaggctgcagaatgggccttgcaggatttctacattttgcggaaggatgttgagttggctcttgagcgtgtcaatgaagtcaggcagtctgccggtttgcaacagctcgaggaggatatcgcttcgcttgagaacaagtccagtgatagttccttatgggatgatccttccaaggcacaggggatacttgtttctctgacagaggtcaaagacaaagtgaagcttctcaacgatttcaagttacagattgaagaagcagagactattgtgaagcttacagaagaattagattctatagatactggtcttcttgaggaggcctcaaagattataaaggcattaaataaggcattagacaactttgagatgacacagcttctttctggaccatatgataaggaaggtgctgtaattaatatttctgctggcgctggtggcactgacgctcaggattgggctgacatgttactaaggatgtatgtaagatggggagagaagcagcgttataagacacgagtagttgagaaatcacctggtgaagaggccggtataaaatcagcaactgttgaactagagggaagatatgcttatggctatctctctggcgagaaagggacacacaggattgtccgtcaatcaccatttaatgctaaagggcttcggcagacaagctttgctggtgttgaggttatgcctcttctaccagaggaatccatggctgtggacatacctgaagaggacctggagataagcttcacaagagctggaggtaaaggaggccagaacgtgaacaaggtggaaacggctgttcgcatggttcatattccaactggaattgcagttcgttgctcagaggagaggagccagctggccaacaaaataaaggccctcagccggctcaaagcgaagctgctggtgatcgccctggagcagcgtgcatcagaaatcaagcagatccgtggagacattgtgaaggcagagtgggggcagcagatacgcaactacgtcttccacccctacaagctcgtcaaggatgtcaggacagggtgtgagacgtcggacatcactggcgtaatggatggagagctagatccctttatcagagcataccttaagtacaagctaactgcggcagctaccagctgattttgttggggagcatagcgatgagtgatacttacatccattgtattatgttgtagtatgagtttttcatctctctctctctcttgatttagtataatttcatagcactagcaatctagcattgtatttattgatctaggaatcgaagtggaaacatgggttttgcttcgagttctacaataagagtttgatcgaattgcatgacttgataaagacctcttgctagtccataaattgtattgaaatgaatatacgggttcttgttggtatgagatgtttgttatgttcc

SEQ ID NO: 61503 - DNA, 259 bp, Zea mays
  unsure (1)..(259): unsure at all n locations
  Clone ID: MRT4577_156086C.1
ctctcgggtagcaagagacctccttcggggctggggggtgccggaagctcgcacgtcatcgtgcgggcggtcgccgcgccctcgtgttcgggcccccaagcagctccccgngaatnncggccgcagtcctcggcaagaacccgtcaagaagncttccattttattctttttttttgtannnttcgaaagnntgaactgaagtaaaggagccgtgggggaaggtaggcagaatcaagcccccccacctgcnannaccccc

SEQ ID NO: 61504 - DNA, 390 bp, Zea mays
  Clone ID: MRT4577_156087C.1
gaaatccgcttcaaccctaatcccctctctgctcacctatacactcgcgttctgttaccatgtttgtggggaaaaaacgcccgcgtcctcctcacgcattcggtctggacgctgatcttcgcttgatcgattccgctcggctctaggacccaggctctctacgccactggagtggctgctctacaagagggtgaagcgtatacacaccgacgcgagggtggggatagcccccgccacgatggacggcaccggcaccgctgcgtccgccgaccggaggtacacgacacatcaacagcaacaacagcagctgcagcaccaccagccgcagctcgggacacgaccccatcttctcgccggcggcgtcgctggcgcagtcagcaagacctgcac

SEQ ID NO: 61505 - DNA, 284 bp, Zea mays
  Clone ID: MRT4577_156088C.1
tccatgcgtatggccacacgctttatcctctttaacaccagatcatatccacaggaacatcgggaatctcccaaagtgccatgatgcgttcatcgtcagtggcttacactgtgctcctatgctctgattcataacccaactccatgtgcttcatgctatagcagctgagctctggcatcttgattccgtgtacttacagtcttgaatagctctcggactatctaccatcctcatgcccccgttaaacgctgtctcgggcggtccttcgccttgcagcttgatca

SEQ ID NO: 61506 - DNA, 633 bp, Zea mays
  Clone ID: MRT4577_156089C.1
tcgagcggccgcccgggcaggtacttgtaaaaaaaaaaaaaaaaaaaaaaaaaaaaaaaaaaaaaaaaaaaaaaaaaaaaaaaaaaaaaaaaaaaaaaaaaaaaaacccacccaaaaaaaaaaaaaaaaaaaaaaaagccccttgggcccggacccccctttaggggcgattttttggaattttccttccccttgggggccgtttgggccttctttttaggggccccatttccccttttggggggtgttttaaaatttactggcccgggtttttacaccttggggttgggaaaacccttgggttccccaattttattccctttgaaaaaattccctttttccccgtttgggtttttaccaaaaggccccccccgtttcccttttccaaaattttcccccccttaattggaaatggccccccccttttaccgcccttttaaccccgggggtgtgggggtttccccccaggtgcccctttacttttgcaggccccttacccccggttcttttgtttttttccctttcttttttccccgtttcgcggtttttccccttaaatttttaattgggggctcccttttggggttccgttttagggtttttcgggcccttggccccaaaaaaatttgtttg

SEQ ID NO: 61507 - DNA, 129 bp, Zea mays
  unsure (1)..(129): unsure at all n locations
  Clone ID: MRT4577_15608C.1
atcattgtgttgggcaagcattttcgtagacattacgtgganttaggaagattctgattatgcttctacatctactatgatcttcancttaataattgtagatgtagaagataatcagatcttccgaat

SEQ ID NO: 61508 - DNA, 247 bp, Zea mays
  Clone ID: MRT4577_156090C.1
attgagaccaactagcaacatagaaagcacaatagtgtaccaacaatggcagccaaaatattttgcctccttatgctcttggtcttcctgcagtgctgtaacgggacaattttccgaaatgttgcaagttctatagcttcccttcttcccccgtactctcacaacggtgtcttcggtatgtgaaacccatttttaaacctacgggtcaacgggcatcacagtggctcttactttatcaccttgttct

SEQ ID NO: 61509 - DNA, 435 bp, Zea mays
  Clone ID: MRT4577_156091C.1
ggcacccccgcccgcacgggacagggatattcacaattccgggccgacgagggaacccaaggacctggcacacgggtcaacctggatcgcattggctggaggggggccaaacaccaaaggtgggttccatacctttggacagggggacactacacgttcactttgggccacatttacagaccccaagggggggggcgggcaaaccccgggatcgggatgcacaagtttttgagccaaaacttgggcgcgggtgaaccccctggactggactggactggcgggctggaccaaaaaaaccgccgggccgggcatttttagggtcctttctttcaaatccacctccacccaagggggaccgggatactaggagcaaaaggggggcaaataaagcattggttcaaggccctgggcggttgggccccctttaagcttacc

SEQ ID NO: 61510 - DNA, 455 bp, Zea mays
  Clone ID: MRT4577_156092C.1
aaaacccacccccaaccttaaaggggaatttattatttaacagttttttccaaaaaaaaaaaacccacgagggcttaaaaaaagcatccaacgttttgggctaaaacccagggccatcaataaatcccgaaggcccccccccctttttaattaataaaataatacccccaagccacgcagggcccccacccacaaacatatttgtatgaaaaaatatatgtatagcccaggggcaatttcagggataaacttgaaaggcaacacgagctcaaaattccttaaggattttgaattccctaacccctgtttgggaaaaaagctcgcccaatttttttaaatctttttgccgccttttgtgaagggccataagcccaatgcccataaggaggggattttccagaataggcccaaaggggcaaataataatatccccgataataatttccccgccatcc

SEQ ID NO: 61511 - DNA, 304 bp, Zea mays
  Clone ID: MRT4577_156093C.1
atgggatcacacctgagcatatgctaaaaggtgggatgactcagagctggggctggtcaccagacagactgaccatgtgattagaggctggaggctttgaggcagcctgacctacggggcgggggactggaggctgagtttaatcatctggccagtgctatactcagtacccccggagagcctaataaaaactctggacactaaagctcagcatagcctcctgggtggtgaagctgtggctatgccggcagggcagtgtgcgctaattccacgaagagggggcatgggagcactgtgctcaaga

SEQ ID NO: 61512 - DNA, 315 bp, Zea mays
  Clone ID: MRT4577_156094C.1
aaaaaagggcccctaacttttatttatgacaaaattgatcccggaatttttcccccaacaaactaaacttggaaactaaattaccgaccgacagacagggggccctcccggggctttttttttggaatttttaattagagaccaaagcaaatgaaagggccaattttaaaccttccccggttgctaaagccttaaagggtccacccccccgccatcaagtcctatgggggtgaactttgcaaaaaaattttgggccctgaccctcctttacaaagggggctttctggggttttgaatggggcccaaaaacctttt

SEQ ID NO: 61513 - DNA, 440 bp, Zea mays
  unsure (1)..(440): unsure at all n locations
  Clone ID: MRT4577_156095C.1
aaggacgccctcttccncttccaccaacttctttttcttcncctcctttttcttccaaaacaccaanccctcgaagggctatttttccaagagtaagaagaacaataatanatcccctcatccttatcctcctcacactccctccattatatatcatctccttcccgacatcaccacccacactctcatctacctttactacaccaacctcttccgtctctccataaccaactcctccattccccattcatccaactactacatctcctatataacactttaccacaattattttactattcaacacattactatatattctcctaattgattcaatgcatactattcatctacaaaacccatcattaatcttaactttcatttctacaatattatcatccaatggttctttccatcaattattcccttttaccttaatt

SEQ ID NO: 61514 - DNA, 540 bp, Zea mays
  Clone ID: MRT4577_156096C.1
gtggcctcggcggcggccctgatctcgccggcggctgtggtgcggtcgtggctgctgctggcgtgggtgagcacggtggcgggcaacctgtcgctgctgggatcggcggcgaacctgatcgtgtgcgagcaggctcgacgggcgcagcgcaacgcctacgacctcaccttctggaaccacatcgtcttcggcgtgccctccaccctcatcgtcaccgccatcggcatccccctcatcggaagatcaacatctgatcgtagctcatatatactacactacatgcataattgtatgcctcgatcgtatatgcacgtacttcttagcttaatttgttatataattgctcctgctcctgatcgatcggacacgtattaattgtggttttggagcgaggtgtgcatgcaatgcattcagtgtacctaattcataagcagtgcgctgtctgctgctccaacaatatatctctactactattcatgcatgtggaaaaggaaaacaaatgctatcttaattctctctaaaaaaaaacggacgcgtggg

SEQ ID NO: 61515 - DNA, 2691 bp, Zea mays
  unsure (1)..(2691): unsure at all n locations
  Clone ID: MRT4577_156097C.1
ggccggccgggccgggggtactcggctccctcggcgggactcgggagcgcgcttccaaacgccgccgcgattcggcatcctgctcgcgtgagaagcgctcatccggcattccggctccaaccgtccattctccgccccgcttcgccttttttcccgtcgcttccttctccgctgctcccgccgcccttctccggcaggattcgacggcggcggcggtctctgcgagcctcctcttacttcacggctgcctggagggcttcccgagccgcggcgatctctcacagctcgccttcctcgtcatcctgcaccgctgcggcctcccgcgccgtcgagagtgagcgagttcgggagcgctaccgctaccaaacatggagcttagctggagcgggagcccgtgtgagctggttgggagtcctaccaaacaggcattctaaccctaatcgagtggtgccttccctagccgtcggctatggacaagttcctcgtgccggcgccgcctcattgtggcgaggagcccgcgccgcctcctaggagacaccggtggaggcgcatcatcgcggagctggacggccgcatagactccaggttccagcacagagattcgcgcctccttcttgattccttcaccgaggttggggccttcgatcacaagtattacattcatggcgaggaaaggtgtcggacatacgtggatcgaataattagtgcttcaactataaattttcatccagtaagggagggtgtttcagcaatagaattcgatagaaagggaatatacattgcatcagtgacactctcagggtgtctgacggtgcatgactttgagactttgtactgctctaaatatggcccaccatgcagtatgccagatgaatcatcaaattatgtgctccatatatctaaccgaattcccctaaatgctgtccgatggaatccaggaaaccaagacgagattgcttgcacatcaaatcaaagtgataacgttttcctctttgatattggctatgtctcatctacaccaactgaagttttgcataaaggaaaatcgaaattcccctcgctctactctgaatcctgcaagagtttgactgatataacttttacttcagatgataagtcacggatatttgcatctggccttgatggggcagtgtacatgtgggacaggcgatcaagtaagacacactgtcttgagcttgtggcatctccagaagctcagttcaacactgtcaagttaactgtggataatcggactgtgtttggtgcaactaaaaatggcacaattcatgtttgggatctccgtggagggagggcatcagctgcttttcaaagccacaacgaggttcagcaattgatgtcagtgaaattatcaacgttattgggcaaaattgcatcgctaaaggaacaatcaaacattgtttcaagtccgattctgtcgatagacttcaaccctagttgttcatatcaattggccttccatcttgatgatggctggtctggagtcctgaatgttaacaatctcaatgtgactcatcttcactgccctcctcctgcttggttggagggcacagacttggtgctgcaaaagcaattaagaaagccaacctggctgctgacatcttcaatctatgcagttggatcttcctcatatgatggaatctatctactagactttcatccagataccagctctgcatgccatgtggactacaaagaggaaacaagagtctccggggaaaatcaacctgcaggaaacaagtttgttcctttatcccaaagggtgctttcctgtgcagcccatccactcagtcacaccataattgctggtacacagttctcatcgttgctcatgttatcacaaaagtacaagagtatcagaaatacagagccttgatgacatgccgtttcctccacgcagcatctacaatcgtgcatctgcagaatcacaatggtgtttgttcatctccatcgtgcagtaaagaattatgtgcagcatgtaaaccttgctttgctggtgcattggacgctcactaggttcgaagtgctgccagcaataaccgtctttcaagaactgatgaatacgcagccattcacaaaaatgcacccatagagaagaaatctcttgctatatataaaaaagaatggcaagagatttcctcccccatagatctcttataatcctcgtcaccaaatcagctctaaagagttggatcaccaccactgtacacatcggctctgtttttcttggacatgattcttgtaatcgtcgttttctagtatcgcagttcagttttcgattttggacgatggcgcgattgggagaagcaagtttattgcagggtgtttattgggattatacgattctcacccctgctgctgtcaaataagcgaaaacgggtcgaattctagcctgggaacactttggtgcgcagatgatacagttcacgcaaggctctcttcacttgagcacttggtgggaggagattgcatccaaggtcgcaaagaagggtaggagtttctatgacggttctagtttctatcactggtatgcaatggcctgatgtttaggagagacgaataacttatgtggagaactccatggtcaagatatcgtgtatagagaacgaaagacaagcacactttagacccgttcgttttttttnccagattgaggcatggaacattttttag

SEQ ID NO: 61516 - DNA, 191 bp, Zea mays
  Clone ID: MRT4577_156098C.1
cagatatcggccgccaccttcacctccaccgccccggcgcacgtgcgcgtcttgggcgtcggtcgcctgttctacttcggacacgactgacctgccactggcgcctacgaagaagacacatatgaagaagctcatcgtcaaacctcaaccagattcagtcgctacccttcgattgcctgatacggaacgtc

SEQ ID NO: 61517 - DNA, 159 bp, Zea mays
  Clone ID: MRT4577_156099C.1
ttaaccaaattctttttgcttttttaactgggcaaggcacgagggttttgggaaccgggttccttaaagccccacagaccatgttaatataagaggacccattcgaccctgacgcgggaaaaaagttaaaacaacattgaaaccataattaggggacat

SEQ ID NO: 61518 - DNA, 359 bp, Zea mays
  unsure (1)..(359): unsure at all n locations
  Clone ID: MRT4577_15609C.1
ggaccngggancattaaactttaaggtggtagacggggagcccgctaccaaacttccaacatcgggaaacaaacggaaacctgccagttccactggccgagggcgaacccgctaacttgcaaagcctccagccttaaagaaaaaaaccgggactgcccggtgggcctggccacccccgggaacaccaccgacaggcgggaaggcgcccaccaccgcctgaggacctcctgctcccctttcaaggaggcaactttgaagcgtttaaactctttacagagggggaaaaaaactccccatttcatatggaattggtttaaaaagcaaaaaaactgctcagtggggaacaccgaccggcaatc

SEQ ID NO: 61519 - DNA, 2370 bp, Zea mays
  Clone ID: MRT4577_1560C.1
atggctcgccgccgacttggcaaggagaaggtcgacgaaggtgatgtggccgcgggagaacgggacctcgggtatcagtcacctgagggggtcctcaaggacgtcttcactggagactccgactccagtgacgacaacgaccgccggaagaagctgtatgtgatgtacgacgggagctgggagcttacctcccgtaggaacatcaagtccctgcgccgagagatgccgtccccggctggcgtccttaccatgtggggtgaccgcgccgctgtgcttgcggctgtcgagaagctgcacgccctggcggcagaaactgctcgcctagacgacggagggagggacccctcgacctccggtaccaaggcacctaccaaggtgccaaaggtgcagccatccggagaagacggcggtcctgtcaaggccatccagatgcctgggatccccagggaggtgattgagcaccatctgaagatccaccctaacgccaaaccggttcatcacccagtgtggctggccaacctagtcattgttccaaaggcgaacgggaagcttcggatgtgcatcgactacaccagccttaataaggcttgtcccaaggacccgtatccacttccacgcatagatcaaatcgtggattctacctccggtatgagaaacgccttatcgacatttgtacgggtaatgagtaagaccttcggggacctgattagggacaggatagagatatatgtcgatgacatcatggtcaagactaagagggggttgactctggtggaagacctaaccctggtctttgacaagctgcgggcgacgcgcacaaagctaaacccggataagaagttgcgccactatttccaggcacacagggtcatggtggtgacctcctttccgttaagggccatcctccacaactctaacaccacaggcaacatcgccaagtgggccgtggaacttgcagagttccagcttgacttccagcctcaccatgctgtcaagagccaggtcctggctaacttcatcatggagtggacccctcccccgagcgctcctgggggtccggatcccgattcagaccccacacctgcggagcccagggtcccggtcttcaccgagccccactggacactcttcttcgacgggtccgcccgccagcaaggtggcggtgctggggtggtcctcgtcgacccaagcggagatcaagtgaagtacatggtgcacctcgagtttaaagccactaacaacatggcggagtacgaagcgctgatcttcggcttgtctgtggccctatccctagagatccatcagctcctcgtgaagggggactcccagctgatcatcaagcaagtccgcggggaatgtagctgcaacaagcctaggctcgcagcttacctcctccacgtgaggaagctggaaaaggacttcatggccctggaactgcaacatgttcctcgggctgacaactcagcggcaaatgaactctccatgagggcattgacttgggcacccgtgcccgagggcgtcttcaaaagacggctgctgagacctaccgcccagcctgccgagccgggcgaaggggagcgcatagtgcggttggctaaacgatacgcggtggtggaaggggatctctaccgctgtggcgccaacggcattctcatgcggtgcatcacccaggaggagggccatgagttgctcacggagatccatggaggtgagtgcggaagtcattcctcatcccgcacgctggtcggtaaggccttccggcatggcttctactggccaaccgccctccaggatgcagctgagatggtaaagtcctccaagccattcgccgtatggggggtggatatcctgggaccattccccagggctgtcggcgggtaccatttcctcttcgtcgccatcgacaagttcacaaagtggccagaggccacccctatggtcaatatcacccagggtgctgctgttgctttcctaaggttgattgtctgtagatttggggtccaaagctgtatcattacggacaacgagacccagtttacaagtcggctcttccaggagtattgcgagggcatcagcacccagctctgctttgcgtctgtggctcatcccaagagcaacggccaggtggagagggcaaacatagaaatcctcaggggactcaagacacgcacctatgactgcttgaaaaagcatggtgcaaattgggtcaatgagcttttgtccgtgctatgggggaaccggactacacccagccgagctatcgaagagaccccgttcttcctggtctacggggccgaagcttgccttcccccggaaatcattatgggctccccacgagtccaagctttcgatgagtctatgccggaatag

SEQ ID NO: 61520 - DNA, 116 bp, Zea mays
  Clone ID: MRT4577_156100C.1
ctcgagacgaatcggctcgtgcatcgatctacaaacatacatagattctactactacacaatgacaaacatggggaagcatgcgaagatcggagagtagggtggatacgccggcga

SEQ ID NO: 61521 - DNA, 452 bp, Zea mays
  Clone ID: MRT4577_156101C.1
ggccgtgccgcggacgcacacgccgctcgtctactactacccggcaccggcgcagggcggcgccgccctgggcacgggctccttcgcgccggaccggctgagggccgcgctggccgtcgctctggtgccattctacccactcgccggccggctcggtgttggcccggacggcaggttgcagatcgagtgcaacagcaacggcgcgctcttcgtcgtcgccaacgcggacctcaccggcgcggacgtctttgacgactacgagccgtcggcggaggtcaggaacacttttgtgccggtagcggactccggcgatgcgaccagcagccccatggccatgttccaggtgacgttcctcaagtgcggcggcgtggtgctcggcacggccatccaccacgcggccatggacggcgtcggcgcgttccagttcatgcagacgtggtccggggtggcac

SEQ ID NO: 61522 - DNA, 429 bp, Zea mays
  unsure (1)..(429): unsure at all n locations
  Clone ID: MRT4577_156102C.1
gttctttttttttgacattcacaagcggaccgccccagnnttattgagatccacaaaaatttctcgcttagactgcgggtaaacccatgcactgcttacattcgccatggctaaatggacacgattataacccgactactcgaaaggagagggcagttgagtcaccatgagcccgtaatagggacacgggcttaaaatatacatcaaatggctcgtatgccgccagatgagggtactgtatcagatccccagcggatcttttaactaaagaaagacagatcgcaattagtgatgcagcaccacctcctcctatacactcttaatcatccgcacgcgcggggggtggcgcgcattgacaccatgatactaccccaggccttgcgcggtccacggtgggactctaggggaaaccaaacattcttcccccac

SEQ ID NO: 61523 - DNA, 675 bp, Zea mays
  unsure (1)..(675): unsure at all n locations
  Clone ID: MRT4577_156103C.1
gnattctcttttttttcgaaaaaacgcagaggactgcgttttagatatatattaagaagagagagacaaaggtctaagagacccaaaaacacacaacatactccctatggaggccagtaacactcgtacatgaaaggatccataaaaaacacccacactctccctacaacaacctatacagggggcagccaagaaggagagccctttggctccagcaatttctcagtctcttctttcctcatctgcatgctccataatcagaggaaggctaggagaccctcctccataaaaaataactctattacgatgcttccaaatcatccacgactgttggcaattatctccttttcctccccacatgcacatttcttaatttgcagagctgggaggaatgttgcagctggaatgactggtggtcttgcctacattctagatgaggatgatacacttgtcccaaaggtcaacaaggaaatcgtcaaaatgcagagagtgaatgctccagctgggcagatgcagctaaagggcttgattgaggcctatgttgataaaacgggcagcgagaaaggtattgcgattntgagggaatgggaggcctatttgccgctcttctggcactggtaccgnccagtgaagaagactcgcctgagcttgtgcagagtttgagagagtacttgc

SEQ ID NO: 61524 - DNA, 352 bp, Zea mays
  Clone ID: MRT4577_156104C.1
aagacgcgtgggtccccattccaatacacagatctcgcacccgtaagtggacgacgaatctggcggtgcaaaagggccgaccgatgtcgaggttcaatgctaccgactgcgtgcctccgacggagacgctctaccatcgcgctacttaaacgcaaataactgaccgtcttgatacaactaattaactgtgaacacactggatttaccaagctgaatctcgcagcatcaaatgcctcattagtccagatgagcacttgttctaagacgccttgacgacatgtctttcataagaattgaacagatcactatgctgaatggcaaaacccctttaaactggcataaagcacactta

SEQ ID NO: 61525 - DNA, 602 bp, Zea mays
  unsure (1)..(602): unsure at all n locations
  Clone ID: MRT4577_156105C.1
aggggaatggggggggccttttttgttataaaccccccgggccaaagggggtataggggaaattgattaaaatggggaaaccggagggttcttccgtttttccccttctctaaattttaaaacacggcccggtaattttattttggcccaaaaaaaaaaaaaattttttttttcccacccggggtttaaaaatttggtcctttaaaaaagggcccccccnttttttttttttttttttttttttttttttttttttttttttttttttttttttttttttttttttttttttttttttttttttttttttttttttttttttttttttttttttttttttttttttttttttttttttnacaatccagcgtgaacagtacgagggtactattcatctatttataggcaaccgtaaggtttcatacgctattacatttatgccctcaataattacatataaagtttacaagatgtcgcaagggcaacatcgccatttgtatttaataacttgagaaacaccttctccttgcatcgtctcattatttcgtcatgacgaagcctgcttgatgaagcgtgttcgttgtacttccttttcattatgc

SEQ ID NO: 61526 - DNA, 1992 bp, Zea mays
  Clone ID: MRT4577_156106C.1
ctcgaggccggccgggatgtcacgatgtaggttgttcatctccgtcccccaaatggcgccgcgacgggaaaactatataaacaaacaaatcatcaggatccatctcctccctatatatacgccactctccgtcttcgcctttggtctccatcactgattctgattctgattccagccaccctgaccggcgaagcgcggctgacatttcccccccaccataccgccaccacctgagaagagatcgatccaatcagattaaccaattagcagggagggaggagaggggcaaaggcaatggccgggacggaggtggaggacccgccggcggcggcgttggaggtgcccgcgaaacgcggccttctgcggtacaactcgccgctggcgcaggtgtccctgctgggcctcatctgcttctgctgccccggcatgttcaacgcgctgtcgggcctcggcggcggaggccaggtcgaccccaccatcgccgacaacgccaacaccgcgctctacgcctgcttcgcggtgttcggcgtgctgggcggcgccgcgcacaacctgctgggcccgcgcgcgacgctgctggccggcgcgctcacgtacccgctctacgccggctccttcctctactacaaccaccgcccgggctcgcaggtgttccccgtcacggcgggcgccctgctcggcgccggcgcgggcttcctctgggcggcgcagggcgccgtcatgacgtcgtacccgccgcccaaccgccggggcacctacatctccctcttctggtgcctcttcaacctgggcggcgtcctcggcggcctcctccctttcgccctcaactacaaccgcggggacaagaaagggagcgtcagcgacggcacgtacatcgccttcatggcattcatgctcgtcggcgccgcgctcaccgtgctcgtgctgccgcccgccaggatcgtccgcgacgacggcaccagggccaccagggtcaccttctcctccccggccaccgagggcgccgagatcctcaagctcttcgccaactggaagatgctgctcgcgctgccggccgcctgggccagcaacttcttctacacctaccagttcaacaacgtcaacagcggcctcttcacgctccgcaccaggggcctcaacaacgtcttctactggggcgcgcagatgatcggctccgccggcatcggctacttcctcgacttcggcttcgccagccgccgaaagagggggctgttcggggtcgccgccgtcgccgccgtcggaacggccatctggggaggcggtctggccaaccagctcagctacaatgccgtgccggtgcccgaccccatcgatttcaaggacggccaccgctacgccgggcccttcctgctctacttcagctacggactgctagatgccatgttccagagccttatctactggatcatcggcgcactcgccaacgactcccaaatcctcagcaggtacgtcgggttctacaagggggtgcagagtgcgggagcggcggtggcatggcaggtggacaggcgccacacgcccctcatgtcccagctgatcgtcaactgggggctcatgaccatcagctaccccttgcttgcgctgctggtgttcctggccgtgaaggacgagagctactcggtttcgtcggtggaggacggccgggagaaggacagcaagctgtccgcgccgaccagcttccactgatgaagaagaagaaggatagaccaagatgcacgtcactgtaattgtaacacggtgtttccatccaagtaagttttagtagtagaaatcaagaaacaactggagcatactcagggtgtggcgttcgtttttaagtaagttgtagtagtattcgttttggtgattgttatttattatagcacctctgggttagcttgagcatcatgcttccttgtcagtggtgtgaccaagaaattggatagaatctatatgaaggaattcttttgctatttaaaattgttctctctc

SEQ ID NO: 61527 - DNA, 197 bp, Zea mays
  Clone ID: MRT4577_156107C.1
agggaataataaatagtgccaaactcaaagatcaaaggtttgcccatatttcttctataaatgcctagaacccctcggaaatggggtacatataaagaacaaatttggtggtttttcctttaacgtgcttgtggcctaacactttggacatgactaatggaagggtgttcaaagctatccccattctcaaaaactac

SEQ ID NO: 61528 - DNA, 280 bp, Zea mays
  unsure (1)..(280): unsure at all n locations
  Clone ID: MRT4577_156108C.1
aaacaactcccggccatggcgaccgcagaccgggtcgncgacaccttactatcctctttccccactcaccatccccgtcccttttcctccgtttccctcgggacaaaccctgtactacccgtctaccttcgggcccgctgtagaggtggcccacggattgcctcccgtctacgggtccaccgagtcagggccgccgccgaccaactttccaccaccaatccggaggtagcctctggggagaagaagatcacatggtcctccagggccgcgccgccccttc

SEQ ID NO: 61529 - DNA, 269 bp, Zea mays
  Clone ID: MRT4577_156109C.1
ccggccgggatgaattaatggagtggagttggtcgagtagcgcagtcccaaacaccctttctcttgtctctctttctctctatctatctatctcttgcagctatttatactagagatggcaatgggtatgtgatggattctttactcgtgggtaccttaatgggcacaatattgtaccgatcgggtagacgggtgcgggtatgtaatatccatacccgcatacctatgaataatttatacctgtcaaaaaaaaaaaaaaaaaagcggcc

SEQ ID NO: 61530 - DNA, 305 bp, Zea mays
  Clone ID: MRT4577_15610C.1
cggacgcgtgggcggacgcgtgggaaaaataagtcgcataggaaactagcacgaaaaaggtattctctggtgtttatggcatgctagtttaaaaatctaaggttatatgaagatatggataatcactgtaacataacccctttacagtccatctgaagtaaacactagtcaaagccatgataataagtggacatggccatctggatcaccacagaaatgggttctatgctgttcagccctttctgccgcagaaaagggtattgtatcagaactcgcaaaaatagctggtgtgccaatctcaacaa

SEQ ID NO: 61531 - DNA, 281 bp, Zea mays
  Clone ID: MRT4577_156110C.1
cgcggacgagctagccgggtggaagctcgtggccggcgacgtgttccgggagcccagccacccggtgctcctctgcgttctcgtcggcgatggcgtgcgcatcctgggtatgggcgtggtcacatcgtcttcgccgcgtcgggttcatgtcgccgcgtgccgcgcgcgctggtcacgcatgctgtgcttgtacctcgcctagcgtggcgcggtaacgtccgggcgtctgaaaggtcggcaggcgacgccggtggagtcgtgcgtgcgcctcgtcgcttccg

SEQ ID NO: 61532 - DNA, 365 bp, Zea mays
  unsure (1)..(365): unsure at all n locations
  Clone ID: MRT4577_156111C.1
gtccgaaaaaaaaaaaaaaaaaaaaaaaaaaggggaaaaggaaaaaaaaaaaaaaaaagggaaaaaagaggggggggaaaaaaggaggaaaaaagaaagggggacgacggcaaaggggggccaagggngacaacgaaacgcaagccacgggacggcgaagggcagagggaaagccagggaaaacaccgggggggggggaaccaaaacgccaggaaggacaaaccccgggcgccagcaaacgcaagggggaagaggcccaaaccggccgggccagcagacacaagacgcaaaggggccggcaaagggggggcgcccggaaggggcccaanaaggaagggggaaggggggggnacgggcaggggaac

SEQ ID NO: 61533 - DNA, 409 bp, Zea mays
  Clone ID: MRT4577_156112C.1
acctttgggctgatttatgtgcttgagtcgggtcgctaaggaagttatcatccataactaaaataagcatacattaccctcgtgagacgctatcggcgaagctcctccccatatacgttatcgaactcggactcagtagtctagtcagcgatgcgaattatagacagcgttaatcgagaacgtagaacgttacggcgcaaatttcataacaggtttttaagaatacgactaacgtatcattctcaacgggtacaacacgtcggtaaccgtcggctaagaacttctctaggccgagtcccgggataccctaagcgtcagatagactgcaattccgttttaaatacgcagcgttaacgtgatagactacgtcatcaagaataatggatcacgtacggtcgcgtaagtccct

SEQ ID NO: 61534 - DNA, 765 bp, Zea mays
  Clone ID: MRT4577_156113C.1
gagcactcgcacaagcagggacaaggaagtgcaccggcggcgtcgccatcgatcgagtagatactagatagtgtgtcaggttgctgtcagctagagccatggcgtccatgcagaagagccgcgagcagcgcgcccaggccgcggcgcagaaggcggccgacgagctccacgcgtcgaggcaggacagagtccccgaggaggcgcccgtcagcccccgcggcggcggcggcatcctgggcagcctgcaggaggggaaggcgaacgccaggggcgtggcggacgccgccatgggcaaggccagcgagacgaaggacgcggcggcggacaaggcgggtggcgtcagggacgcggcggcggacaggacgggaaataataaggcgggggccgccgagtcggaggaggacgtgatgctaagggtgaaggcggcggaccagatgacggggcaggcgttcaacgacgtcggtacgatgggggaggagggcaccggcgttccgcggagacgacgttctggctgatggccgctggatcggaactggcctggctggcgctgtgcttctcatgtaaaattagcatgcaacgacaaatgaatgttacataagaaactacaataaataaaagggtgtttggtttgagaattcgggttgatcggatccagatacagggaacgcctagggggtgggggtaatggatgcggtgatatggataggatgataatgaatcgtgatgtaaatatttctccataatttcttaagaccttaagataat

SEQ ID NO: 61535 - DNA, 795 bp, Zea mays
  unsure (1)..(795): unsure at all n locations
  Clone ID: MRT4577_156114C.1
ggcgattgggattctcgaggccggccgggccgctttcacgttgcttggttgaaggtgaataggaatttattatgtcccaaacttttgcattcagttcctcggatcggacaccaaactgtttccaaagcacgttcaattgcatccagatgagccaatttctccgaaagtaatttacccagcgcctgatgaacaactgtgttcgatcttttcatccctccaatctgcaccagacttctttccgcctctgacagttgcatctgctgcaagagcccttccaccgccttcacacttctcacgtccatcacagcacccaaaccaacgaactaaaggccagagccaagaacaaaggttagcagactggatcaagaaagaatcgaaacagaagtattattgattgtcttcttaaggagacttttatcgcagcgttgttctactgaagttatacctataaaaaactgtctttcggaaaattgcgagacgattcgacatgttctatatggtgaatgatagtgacacggcttcagggcttcagggtgtgcttggctcattggctgaacaaagagcatgccttcccaattcccaacagaagggcaaacaaataggcttgttcagggctttaggaggttcttgggctcttggctgaacaacagcctacctttccaacggaagggcaaacaaataggttggtcgtttttttagcaatgtgatttgaggtggcaatggatcaccatttaataattcctcaagattagtaaatcaattatacccnntcaaaaaaaaaaaaaatttgcgggc

SEQ ID NO: 61536 - DNA, 680 bp, Zea mays
  Clone ID: MRT4577_156115C.1
ctcgaacacgcaggagagctgcgtatcattatattaaaggaagaaatcacaaggtctaaaatagaccggggtacaactgacgccttacggcggcctgaacgaaactagcatagactgactcatctataaaaactctaggctacatgagatagggaggcaacaagggatgtcaaccccttggccccggcagtctcccacagacggcgctcatcccccacatggattaggaaattagcaacattaggggaaaggccatcaaagatgcatctgttccggtgattccacaaaatccaagcgcccagcataatgagggagtttaggccatctctgaaggacccctgaatagcttcatttgcttgatgccaccactccataaaattaatattcgttggttggggggccaaaccctgcagcccgaattgccttagaaggaggaaccaacactctcttgagaaaacgcaattcacaagcagatggtcaattgtctccctttcctgctcacataaaggacatttttccggatgatccagcccccgcttctcaagtctatctgctgtccaacatttcttgtgagccaccagccacaagaagaatcgacatttgggcggagcccaagttttccaaatctgctcaaaaggttcaaactccacagatccaatgaagagtccctcataagcagc

SEQ ID NO: 61537 - DNA, 1259 bp, Zea mays
  Clone ID: MRT4577_156116C.1
attgggtacctcgaggccggccgggctcacaggcacacctcacactcacacgagcagcagcggaagataagagatgtgctgaagctgaacggtggccatgtccaccggacgcacagaggaggccgccgggagcgcggagacggcgtgcgtgacgggcgccggcgggtacatcgcctcgtggctcgtcaagctcctcctctcccgtggctacaccgtccacggcaccgtccgcgacctcagtgacaataaaaccgctcatctgaagcggttagagaatgcttccgaaaacctcaagcttttcaaggctgatgtccttgactacgacgctatggcagctgcagtcgcagggtgccagggagtctttcatgtcgccactcctgttccttcagggaagatcaccgatccagagcgagagatgctgggtcctgctgttaccggcaccataaacgcactcaaggctgcgtctgctgcaaatgctcgtcgagtggtcgtcgtttcatccatggttgccgttgagatcaacccgaaagactggcccaaagacaagatcaaagatgagaactgctggtcagataaagagttctgcaggaacgaagagaactggtattctgtcgccaagatctcgtcagaagaggccgcacttgaatacgcgaagcagaccggggctggagccgacgctcaacacgagccagttcccttcctgaaaggaggactgaatgagggacaagctttggagcagcggccacgtcaggtcttctgccgatgacgctctgctcgagccgagattcctcatgcctccggcaggcacatttgctgacctaatttcatcagcgcgcgtgacctgctggagctgctgaagacgatggagagcattttcgacatggagcccccagctccaatgacgtccgacaagctcaagaaactgggatggaaggtcaggcccctgaaggaaacaattgcggaaaccgttgagttttgccagcatgctgggtttttcgaggacgtggagggattccgttttcctcccctgtacaacataatttagttttcaataacgtcagtagggtaagagcaactcccacggaatccgtaaaatttacccaaaaactttgatttggaggctctttaaaataaaaagctcgctggaaaacaagctttgatagatccgtcctttatcgccgtttttttttttaaaaaaaaaaaaaaaaaaaaaaaaaaaaaaaaaaaaaaaaaaaaaaaaccgagaaggggcccggtac

SEQ ID NO: 61538 - DNA, 1723 bp, Zea mays
  Clone ID: MRT4577_156117C.1
ctcgagccggccggggtaatccattactacgacctcctcacagtcacacctcacaccagcagcagcggacgataagagatgtgctgaagctgaacggcgcccatgtccaccggaccgacaaagaaggtcatgggatgaccgcgctggcgctgctgaagcagcattgcgctcctcgaggccggccggggtttactagatttttctatggctgggaaccgtaatccattaccacgcctcctcacaggcacacctcacacgagcagcagcggacgataagagatgtgctgaagctgaacggtggccatgtccaccggacgcacagaggaggccgccgggagcgcggagacggcgtgcgtgacgggcgccggcgggtacatcgcctcgtggctcgtcaagctcctcctctcccgtggctacaccgtccacggcaccgtccgcgacctcagtgacaataaaaccgctcatctgaagcggttagagaatgcttccgaaaacctcaagcttttcaaggctgatgtccttgactacgacgctatggcgggtgcagtcgcagggtgccagggagtctttcatgtcgccactcctgtgccttcagggaagatcaccgatccagagcgagagatgctgggtcctgctgttaccggcaccataaacgcactcaaggctgcgtctgctgcaaatgctcgtcgagtggtcgtcgtttcatccatggttgccgttgagatcaacccgaaagactggcccagagacaagatcaaagatgagaactgctggtcagataaagagttctgcaggaacgaagagaactggtattctgtcgccaagatctcgtcagaagaggccgcacttgaatacgcgaagcagaccgggctggatgttgtgacggtcaatccagctgtggtctttggccctcttctgcagccgacgctcaacacgagctgccagttcctcgtctacttcctgaaaggaggacctgatcgaatgagggacaagctttggcacatcgtcgacgtcagggacactgccgatgctctcctgcttgtgtacgagacaccacaagcctccggcaggcacatctgcgctcctcatttcatcagcgcgcgtgacctgctggagctgctgaagacgatgtaccctgatgattaccctttcattagcaaggagagcatctacgacatggagcacccagctccaatgacgtccgacaagctcaagaaactgggatggaaggtcaggccgctgaaggaaacaattgcggaaaccgttgagttctgccagcatgctgggtttctcgaggacgtggagggattccgttttcctcccctgtacaacataatctagtttacaataacgtcagtagtgtaagagcaactccaacggaatccgtaaaatttacacaaaaactttgatttggaggctctctaaaataaatagctcgctggaaagcaagctctgatagatccgtcatttatcgctgttttttttttaatcccgcggcaaggaagatgcaggttctgtttgattgccctagaccagctaggtatggctaggccaggatcctgttcgtttcccaataaagctttatttaggtaatctagtattaacccaatccacttgttgagctggattaggtgtaaattagcttaagcacctcaatacgtacctatgtattgagctcaatactccaatttcagcaaaaaaaagaaaataaaaaaaaaaaaaa

SEQ ID NO: 61539 - DNA, 479 bp, Zea mays
  Clone ID: MRT4577_156118C.1
gtagggggctgattgtagccgccggcgttggtcatatcacattgctagcagaaacgcctgatacaggaccagcgataatatggctcggttctaatgcgcatctgcagactatggattgactgaagaacgtctaggctgactctgacctgataaacctatacggctggggactgcattactatatgatgagattaaggttttagcctcaactccaactgaagcctggagcgtgcattcacctaatgccagcgaataggactagacgatctgtgcggctagtgtacataaaaaactacgtgacaagggtgttggtgcatacatggctgtggaatcaagtgatgtggcctgtgcagcggggggtgacgataactataagacatacattgcacattgctggagactagaaactgaagaagaccatgaagaataatcgtgaaactggtgccagtgtcgatgactatgatgatgtgaatgaaagt

SEQ ID NO: 61540 - DNA, 713 bp, Zea mays
  Clone ID: MRT4577_156119C.1
gaaacgtagaaacatatattgacttgcagagaacatttgaagaacaagctctccactgaatgacagacttatatagatacatagattgggtgaccccaagccaagccatgtggagctatgaacagccttcatactgacaagctcaaaaatgaaaaacggagaaaaaaacgagcaagtgcgggtggggaaaaaacctgctattcacatggatcgcattatcaaaattcagaacctgactgactgtacttctagtaacataagttactttctatggctcaaataacactactgtgcagttagcatctaataccatcatcgatcgcttcttcaaacgtttcgtttcgctcgtcatcatcaaacacaagacgacggtggatcctgccgtcagtccgtcagtgcagcctctgtcgcttggcgatgaagcccggcgagcagctggcggcgggcagcacgggcaaggccgcggccatcggccgcttcgtgcagccgctggcggccagcgtgaccgcgtcgtcggcgtacccggcggcgcgggaggcgccgagcggcagcgtgtccggtgcgcgcaccgtgggcgggttgcgccagcgcgggagctgcccggcgacgagcaggttctgcagcaggggcccggcctccatgacggcggccagcaggcggcccctgtgcggcaggggcctcttggcggcgagcatctcgagcgcggcgtcggc

SEQ ID NO: 61541 - DNA, 154 bp, Zea mays
  Clone ID: MRT4577_15611C.1
tttgtttgggaacataaagatgcgcatgacacaccaataattgttaagggacgcaagctctattctggttaggcacaagctcatctcagcacaacagcacgactcgcacacaaggtacatcaatgtccgacaaggggggggggaagacacacat

SEQ ID NO: 61542 - DNA, 176 bp, Zea mays
  Clone ID: MRT4577_156120C.1
cgtaaatgtcacttacactactgcgaacaatgggatgacaagtctgaaaatatggaccttgacgatctctacctacgtcctatgtgccagcatgcgtccaactgctactgactgggttcaagaaaatgactaaagagtaaaaatcaacacatattaaactgatgatgatgctgaca

SEQ ID NO: 61543 - DNA, 309 bp, Zea mays
  unsure (1)..(309): unsure at all n locations
  Clone ID: MRT4577_156121C.1
cgccggccgtcttgcgccagccgccattaccctcgtntctgtcgcgcagccacgacctccacttccgcatcttccccggcggcggcgcggtcagttgaaccatggcggactccaaggccacctcggcggtcaccctccgcacccgcaagttcatgaccaaccgcctcctggcccgcaagcaattcgtgcttgaggtgatccaccccggccgcgccaacgtctcctaggcggagatgaaggagaggattgtcaaggcgtacgatgtgaaggacccctacaacttttttgacttcacgtttctgtcccact

SEQ ID NO: 61544 - DNA, 341 bp, Zea mays
  Clone ID: MRT4577_156122C.1
cagcaggccacggggagcactacggcctcaacgtttccagccttttgacccttgcgagagaggcggctgcgcgtcgaggcgaagtggactgcgcgcggcctgcagccatcaggagcaggagcacgcagagagagagagagacagcatacagcggggcgcagaaacatgccatgccgcgacggcagccaggctgcatgctgatgcctcccctctcagtttttgattcgacggaacgagacacatggcgaaaagcggcagagcagcagggggattggacgtcgtccaagcatgcttcgagagtcgtgagcacgggcaaaccaacggcggagatcaatctcact

SEQ ID NO: 61545 - DNA, 407 bp, Zea mays
  Clone ID: MRT4577_156123C.1
caggctatcaagaaggcttgtggcctaagtcaatggcccacattgcacttggtgggtgcgttggcttaccatctccccaattgggagagtggacgtcataatttgtggtagagggggtacgtgttcgcgcggcctgcgcggcctctgccaattcatatggttttgaagtttttttgcagtttagatctcggtttgctgcttcttgatccagatctgtgtttctctgcttcttgatccagatctgtgtttctcatccatgaagaaactatgatataaaattcatgtaattttgaagtttttttccagtttgtttcttgctcttcgctccatatctaggtttaaacttttcatggtccggcttctcggcccctagcccctgccaattcgtgtaataatggagttaattt

SEQ ID NO: 61546 - DNA, 168 bp, Zea mays
  unsure (1)..(168): unsure at all n locations
  Clone ID: MRT4577_156124C.1
cccactcgttcgaccgcttcaacaggtcataaccttaactcnaattatcnctgcaacttcaaatcaaacgtgatagtcccaaaatatttcaggtctatcaccttcaagctattcaacttcaatccacacttcaatactcaatcacctttcacattcccataacttttc

SEQ ID NO: 61547 - DNA, 249 bp, Zea mays
  Clone ID: MRT4577_156125C.1
tgacgcgtggtagttctagatcgctagctgccgccctttttttttttttttttttagtatttttttttttttttttttttttttttttttttttttttttttttttttttgagaacggcaatagccttgttttgttggtctgaaaatccctctgcctgagatacaattaactaaagtgtgtgtgtgctctactacggaaacggaaaccctcctgatggggctgtcgctcggtccggtcggactgaatgt

SEQ ID NO: 61548 - DNA, 342 bp, Zea mays
  Clone ID: MRT4577_156126C.1
tttttttttttggtttttttttttggttttgggttttttttttttggggttttttttttttttttttttttttttttttttttaaaacccccattttttttttacttttaaaaactgggaatttaaaaaaaaagggctgggttaaacataactacatttacaacggggggccaacccaaaaaaacattgttttatttgttccccctttaaattctgcacccttcttttttgggaaaaaaaatccttggcccgcccatttgtgggggattaaattccagcccgagatcattacccccccttgtttcgggagcgagtaacattttatcctttatcccgccctgg

SEQ ID NO: 61549 - DNA, 458 bp, Zea mays
  Clone ID: MRT4577_156127C.1
gggaaaccgaaacctacagcgcccaggctcgcagacgccgggacaggcagcgattctcctgatgggaagggtgcggccccgtccccggccccggccccggctctgaccccttccacctcgcccgccgatggcaggagcaaatcgaagagcggtggcatgctccgcaagaccatggaggcgaagcccgagggcctagtcaaagggcagcgccggcaacaggtgctggaggtccaggccgtgaccgggccgaacccacggattgcgaggtggtcagctcaaccctggagccgccgcggcattggggctgcacagccgcacgggcttgtgtgggtgcccaaggcagcggtggctggaccatcctccagcggcgaggacaaataatcggattgccactccactcgggtagtaacttgactatgcttttgctttagcggactcacgcttgactagtgcatgta

SEQ ID NO: 61550 - DNA, 651 bp, Zea mays
  Clone ID: MRT4577_156128C.1
ccggccggggaaccgaagaaacgctgccgtcctcgagcaggtcagccgtcgcctccctccgttccctcagcctcctcctccctcttttcttgatccatggaaaggtagtggaggggcacggctggccacattggaaagaacaggaaaacaacggatttgttttgcccaaggtatgaaagaagtcttcaaccatgcacatgccaaagttagaaatgtgatagaaagaagttttggagtgttgaagatgaagtttaggattttgttgaacatgcaaagattttcagaggacaagcaaactagaattattgttgcatgtatggctcttcacaattttattcgagagagtagaattgcggatcgagaattcgaagcatgtgatgccgatgaaaattataacccaatgcctagttctgcagcatcaacatggccagaagacgaacctcttgttgaagatgtcaacatgaatgccttccgtgatgacttagctcatgctttgtttcatggagtgtaatttttttttaatattaattaaggacttgtatgttcatatgggacatcgcatttgtatgcagaaattaaacttattgtgatttgaatgtttgatttgtgaaaataaatttatttgagaaaaaaaaaaaaaaaaaagcggcc

SEQ ID NO: 61551 - DNA, 1056 bp, Zea mays
  Clone ID: MRT4577_156129C.1
ggctccccttgctaccttgccttcacagatctcccactccccaacagaactgtcacgtctcggcgcccgggggccgtggtattacggctcatcgcggctcggcagtggtggcgcgcagctgaccggatcgagcagcggatggacggcggcggcgggctgggcggcctgcggtggaccgcggaagaggcgtcgacgatcggaggcatcgccacggtgtcgctgctgcactccttcatccccacgcactggctccccttctccatcgtcgcgcgcgcgcagcgctggccgctctcccgcacccttctcgtcagtcagtacccacctcccttccgcgtgcctcgttccccccatttgctgcggttgccgctcgttactgttcaccgcctcggcgcctccagatctggttatctcctaattctaagaggttgggtgaaggctagctcccaattgatggtgcaagagtgtgccattagggttttactctggttgggctgctctcggtggttggttcccttggatggatccggttttgcatggtgtcattaacaaacgatggcagtttttgtgtcatggtagtgtggtggtgcctggctgctgcctattgcgtgtagcatatgctgagtattgcctgaacatctgaatgagattgcatgggcatcatgttcagatgcgcatgctcctatgatctgattttctgtgtgggatggattcgtaagactgcatttgtgcttctgttaccttcctttctcggtggaatgttgttccatggttcagggaacgcaaatttctaggggaagtgtgtccttgtcttcttccgacttctgctgctttcatgtgtacatccgtctgcggtgactgtgacaaatggctattgttgtagtgttttttagtaatgcaagtgatgtaatgtgttctatcaacgagccaagtttgggcaaacaagttatcaaagctttgtttagttaaaccagttgccaacaaatgcctataagttggttgtgatctaatttggcaatgaaataattgcatcatatttgcatgatctttaagattaat

SEQ ID NO: 61552 - DNA, 320 bp, Zea mays
  Clone ID: MRT4577_15612C.1
atggagatagctgctgtttttttagcaacacaaaaccaaacgcctttgcggatcgaacagaaaaaacctctgggcttttaacagtttgcacaaacagggtgcgtcgattctcccccacctaagtacaaaggctaatacactttgtcctggacagggttccttattatggcccattgcagaaacgcctgggcacacacatggtctttttccgagggtccgaacccggcctagaagggtcccaacggaatgaatcgatacattggtcgcaggctattctccatcaatacctgctgcgtctatgagtacgaccggttgggtac

SEQ ID NO: 61553 - DNA, 294 bp, Zea mays
  Clone ID: MRT4577_156130C.1
ttcgttctaaccctccctgcgactcttcgacccattactcgctatggactcggctggggtgctccagctaatcctgggcgtgacgctcgacgcgcttgtgctgctgcaggactccgtggagttacgcgctcatcgagcgcgcccatcattcgctgaacgagctagtctacgctcctgtcgtcacctcttgaaaacatttgctcgtggaattctgcacacgtgtggcaatagcccccatctcaaacgctgtacataagtctaagccacaatatgtaccagtcttcactaaagatc

SEQ ID NO: 61554 - DNA, 526 bp, Zea mays
  Clone ID: MRT4577_156131C.1
ccacccgtccgcccacgcgtccggcgcttgagcaggaaatccctggcgccggccgcgagctgctggtccgggctggccggggcgatctccgccgccgccgtcagcggctgcggtaccgggtggaagaagagcaggtcgtccaggctgggccgcgtccgccgcgccgccctttgcggcggcgatggtacgggcggcggcagcgccacggcggcgcggcagagtgggcaggacgcgtgcgcgcggagccacacgtcgatgcagtcggcgtggaacgcgtgcgcgcacagcggcagcgtgcgcagctcgtcgccgtccgcgaactccagcaggcacaccgcgcactccctggacgccccggagccccgcgacgacgcgccggcgccggcgccggccaggtactgcgccgacggcagcgacttgatacggcgttcgtcggccgtagtaggtgagaagtgtggtagtagttgtcgtacgtggtgaaagacgcgaaggagtcgtccccgctgcggcgcgccgagggggagcc

SEQ ID NO: 61555 - DNA, 410 bp, Zea mays
  Clone ID: MRT4577_156132C.1
acctggacgtatatcggaatagcccctactttctcacatgcttatgcaccctccaggtagaggctatcccatatcaggacagacaagaagaccgctacaataagagtcctcaacttcttgaatacaacccagtatacaagaaaactccactgcttgtccataatggaaaacccttatgtcagtccatgcttattgttgaatacattgatgacatttggtcacataattcattacttcctgctgatccctactagagaactctggcaaagttttaggttaaatatgctgatgatgacatgttttctgcaagtattgcattcttccttaacaataatgaataagagcgagaaaagagcatacagaagatatggcagcatctcaaggttgttgagaatcaacgatttggtgat

SEQ ID NO: 61556 - DNA, 512 bp, Zea mays
  Clone ID: MRT4577_156133C.1
gcccaacaaatttacatctatttaataaagggaaaactgtacattattcggactacaaaaccacatgcagacatgcaaaacataataactggaaaaaaaaaaaaaacaatggccgccaaaactttcaactgtttatctatcgtcaaaatataaaagggctttctttccttgataagcccggttgtatctgtttcttagacaactacaagaagagtatttgctgtgaacaattcacaggatatactgacgacaacctaaaacatgcttccgtttatgcttttatgccgcaacaggctgaacgagccctgccccggagggagtgatgtcccctgcagcattctgatcataccttgataagtacttgtctaccgctgcagcagcctgccgcccctccgtgatggcccaaaccaccagtgattgtccacgtttacagtccccggctgcaaacacaccatcaacactggtcgcaaagtctccaaactgcgctttgaagtttgatctgttgtccttct

SEQ ID NO: 61557 - DNA, 331 bp, Zea mays
  Clone ID: MRT4577_156134C.1
tttgagcatccctggctttaaagtgttttaacgagcggggcgattctattatatacatgggcaacaccaaatcattcttacaacaaggttgaacacatttacaacaccagctgtaatgggcattgctgctcacttgcaatcctagaggataagctcatcaaggagatgtgaaaaggcgtctgataccgctaatgaaccaataggggctgatgaagagttaaaaagcccgatcccaaattattgtttttatgtcccaaagtcaaaagtgctaatactaatagaaactatcgttacatatggaagaggaacactacactatcccgaattttac

SEQ ID NO: 61558 - DNA, 1388 bp, Zea mays
  unsure (1)..(1388): unsure at all n locations
  Clone ID: MRT4577_156135C.1
ccgggaaagacgcacaccggcacacggctcctccaagatcgagagcacgagctgcaacctgcagcagacgcatatgtccgtcgccgccgccttgggccgcgccgatgagctccgcgcgctggacgacaccctcgccggcgtccgcggccttgtagcgtctggtgcgaagcaagttcctcgcatctttcgcgtcccctacccggaggagctactccaccatgaacaaccgccagcggcggcgaccgtcccgatgatcgatctcagcggcgaccgcgcagccgtgatcgacgccgtccgtggggcggcggcggggtgggggttcttccaggtcacgggccacgcggtgcccgagcaggtgatgtcagcagccgtggcggcgatgcgggcgttccacgaagccgacggcggggagggcagcgacaaggcgcggctctactcgcgagggcccgggagggcggtcaagtaccactgcaacttcgacctgtaccagtctcccgtggccaactggcgcgacacggtctacctgcggatggcacctgaccctcccgccgccgacgatctgccggagatctgccgagatgcactgtttgaatacgccaaacaagtgaaagatttggggcagaggttgtttgggctgctctccgaatccctcgggctcaaaccgagctacttgacagatattgagtgcgaccagggacagattatacttgggcactactaccctccatgcccccagcctgaactcgccattgggacaagccggcattcagactccggcttcctgaccatactactgcaggacaaagttggcggcctccagatcctccatgatggtcagtgggtcgacgttgcaccgacgcctggagcattcatcgtcaacataggcgatctcttgcagctggtctctaacgacaagttcagcagcgtcgagcacagggtggtagccaagaatgctgaaccaagagtttcgatcgcgtgcnnnnncagcacccatttccatcccgcttcgacaagaacgtnnnccccaatcaaggagctgctgtccgaggagaaccctcctttgtatagggaaacactcgtgagagagtatgttgcacgttactactctgttggcttggatggaaaacagaagactgctctagctgatttcaggttgtgaattctgaacgacatcttatttaacagcaagatgcaaatgttggggcggtatgtatcgtgtgataataccaaggggaagattagctgcttgtaacattccctaattaatgtaaatttatgctcgatcgccacaacagaagtacacatgtttgtatgagcctgaatttgaattgagtttggagtttgggctctggacgtatattactgaaacacataataagatgtttctt

SEQ ID NO: 61559 - DNA, 617 bp, Zea mays
  unsure (1)..(617): unsure at all n locations
  Clone ID: MRT4577_156136C.1
ccggccgggactccactccatttttacatcctcttctctcacccccccttccaccaccaccacaaccacccggtcgcaagtcctacactacgttctcgacaaggcacacctcctcgcaacaatgactcagaccaacggcgccgctgctcctgggcctaagctcaacggcaacaccttcctcttcacctccgagtcggttggtgagggtcaccccgacaagattgccgaccaggtctccgatgccattctcgatgcctgtctgcgcgaggacccgctctccaaggttgcttgcgagactgccaccaagaccggtatgatcatggtcttcggcgagatcaccacaaaggcccgtctcgactaccagaagaccatccgtgacgccatcaaggacattggctacgatgactctgccaagggcttcgactacaagacttgcaacgtgctcgtcgccattgagcagcagtcgcccgacattgcccagggtcttcactacgacgaggctcttgagaacctcggtgccggtgaccagggtatcatgttcggatatgccaccgacgagacccctgagctcctggccttgacccttctnctctnccacaagctcaacagcgccatga

SEQ ID NO: 61560 - DNA, 266 bp, Zea mays
  Clone ID: MRT4577_156137C.1
cccacgcgtccgggagcgctggtgccggcggtgcgtgccctggtgcaccgcatggcactggaccacgttcacgcatcatggcccgctgcccgccgctagtgccacactttcactagcacccgtacccgcagctcttggcctcttgccgtcgcaccatgcctgcgcgtccgactcctgctgcgcactgaccctgcccgtcccgcccatctagaggacgacagcgccgccatgcgcccgttacgcagcctgatcgcgcctgctccttc

SEQ ID NO: 61561 - DNA, 1515 bp, Zea mays
  Clone ID: MRT4577_156138C.1
caccggcacacggccaccggcacacggctcctccaggatcgagagctgtagctgcaacctgcagcagacgcatatgtccgtcgccgccgccttgggccgcgccgatgagctccgcgcgctggacgacaccctcgccggcgtccgcggccttgtagcgtctggtgcgaagcaagttcctcgcatctttcgcgtcccctacccggaggagctactccaccatgaacaaccgccagcggcggcgaccgtcccggtgatcgatctcagcggcgaccgcgcagccgtgatcgacgccgtccgtggggcggcggcggggtgggggttcttccaggtcacgggccacgcggtgcccgagcaggtgatgtcagcagccgtggcggcgatgcgggcgttccacgaagccgacggcggggagggcagcgacaaggcgcggctctactcgcgagagcccgggagggcggtcaagtaccactgcaacttcgacctgtaccagtctcccgtggccaactggcgcgacacggtctacctgcggatggcacctgaccctcccgccgccgacgagctgccggagatctgccgcttaacaaacaaggtcgcgtcatctacatacatcgagatccttatagtgggcgagcgactcccaatttgctcgagatgcactgtttgaatacgccaaacaagtgaaagatttggggcacaggttgtttgggctgctctccgaatccctcgggctcaacccgagctacttgacagatattgagtgcgaccagggacagattatacttgggcactactaccctccatgcccccagcctgaactcgccattgggacaagccggcattcagactccggcttcctgaccatactactgcaggacaaagttggcggcctccagatcctccatgatggtcagtgggtcgacgttgcaccgacgcctggagcattcatcgtcaacataggcgatctcttgcagctggtctctaacgacaagttcagcagcgtcgagcacagggtggtagccaagaatgctgaaccaagagtttcgatcgcgtgctttttcagcacccatttccatcccgcttcgacaagaacgtatggcccaatcaaggagctgctgtccgaggagaaccctcctttgtatagggaaacactcgtgagagagtatgttgcacgttactactctgttggcttggatggaaaacagaagactgctctagctgatttcaggttgtgaattctgaacgacatcttatttaacagcaagatgcaaatgttggggcggtatgtatcgtgtgataataccaaggggaagattagctgcttgtaacattccctaattaatgtaaatttatgctcgatcgccacaacagaagtacacatgtttgtatgagcctgaatttgaattgagtttggagtttggactctggacgtatattactgaaacacataataagatgtttcttctatgccaaaaaaaaaagaaaaaaaaaaaaaaaaaaaaaaagtcgacgcggccg

SEQ ID NO: 61562 - DNA, 453 bp, Zea mays
  Clone ID: MRT4577_156139C.1
cgtgctatgacatactcgactcagtcgtctggcgatgtactattaactgagacgctgtcacgcgtcacgagtccaactgtttgagcagagaggcgcatatgggcagcggcacgttcttgaggtacacgagcgggttggcggggcgcatgttgtcactgatgccgaccatcctggggagcatgacgacggcgcggatcgtgtacgactgcacctgtgaccagtccttgcacaggatcttgaccaagaccacctcagacatgtactcctcttggctgtacttgagctacatcgtgtacgtgccgctcccgatcggcacccgatttattgagcgctacaacttgccactgcccaagcgcttgcactctagacttagcttggcgcatgagatgcacttggtgacattgctgacgaacgccccgcggatgtgaatgaatatacgctgccctggatgac

SEQ ID NO: 61563 - DNA, 348 bp, Zea mays
  Clone ID: MRT4577_15613C.1
acgagcgccttgtgatccttgactgcgtggaggggtaaccgcggtcacagcctagttttgttcttgctcttgatttttgccttcactggagagtagtggcaatctaaaaaatgtggagttactggagtaggtttggtcattgatgatgttttcagccatgttccatgggaactttttacatacaaagaaagtataggttgttataattgatgtaaaaaaaaaaaaaaaaaaaaaaaaaaaaaaaaaaaaaggaaaaaaaaataaaaaaaaagaaagaaaaaaaaaaaaagagaagaaaaacaagaagatcaaaaaaaagaaaggggcggccccccaaagggttcaaag

SEQ ID NO: 61564 - DNA, 264 bp, Zea mays
  Clone ID: MRT4577_156140C.1
agctcggaattcggctcgaggagaaatgtagctgcccatgctctgaagtacatgtcatggaagatcataagaccatgcaatactgactcggctcactcaggtccatgagtgctagcgttaaccaaggtgctatgtcttgtgaatggctaagaccgtatggacgaggcgtcgagagaacacatgcaggtagactttgacgtatgatgcctcgacagatacggaggcttgaaccgatctcaagtgacgatgctatagtaagaaatc

SEQ ID NO: 61565 - DNA, 239 bp, Zea mays
  Clone ID: MRT4577_156141C.1
cgtccgcccacgcgtccgcccagcgtccgcgggcgggtgggtggacccgtaaatataggaccgggtcctggaggtgtaatagatgttggtagccaatgtctactctgctccaattactacttcttgtctgttgaatactgggtgttcactttctctattgattctttttacatccttgttgtgggggggggctgtttcatgctttagttgcgcccgaggggcatggtatgatattttaa

SEQ ID NO: 61566 - DNA, 115 bp, Zea mays
  Clone ID: MRT4577_156142C.1
acgcgcaactcgtgtgctaataactacagatggttgggcttcaagacctgaccttcaaccgtgttgacctggtcttaaataataacctcccaattaatcttaaccttaacttcca

SEQ ID NO: 61567 - DNA, 320 bp, Zea mays
  Clone ID: MRT4577_156143C.1
aaccacaaaaaacatgtattttggtgctccatatatactggggggaaacgatggttgaacttgatgcaaacatctttgctaaagttgaggaagtccaaaacattttgtttctcggaaaacttgctcatattgaccgaaggaaaccaaaaaggtttatttgcttgtaaagggtgggcattgccaacaaatgcccctctgtccggtacttcccagggggggggttatggtggtgaaaaaaacaattgggggattttagccccaattttattcgtgggtccatttaaaatgaacaagggcctcatttaaaaacaattttgggc

SEQ ID NO: 61568 - DNA, 279 bp, Zea mays
  Clone ID: MRT4577_156144C.1
gacccgcttttcttttcaccggccaagccgaccgaccaggggcgggatcattcgaggtcttctgtagccaccaccaaacaaaacaaaagggtccgccacaaacagccggtcgacgggaacaacggaatcgcgtccctacctcaggaagcaggatgagcgacgcgtcctccatggggaggacgcagagggacaagaacgcgccggacgagagcccggaacagtagcgcaaggcggaggaattatgggagaaggagacttagtgtgggaaaaacaccgcca

SEQ ID NO: 61569 - DNA, 318 bp, Zea mays
  Clone ID: MRT4577_156145C.1
ttcagtgcatcgttgtacgctcggtattctgctcgttgctctctcggcattgacacgctctactacttcagctgcaatcgccttgtgtctcaggtgatctcatcgctgactgcttctctgaggttcgatggtgccctcaatgtggatgtgaacgagttccagaccaacctggttccttacccgaggatccacttcatgctctcctcctacgcaccggtgatctcttcttcgattgtcgtccacgatcagctgtctgtggtggagattgccagcggcgcgttcgagccggcttccatgatggtcaagtgcgacccacgg

SEQ ID NO: 61570 - DNA, 452 bp, Zea mays
  Clone ID: MRT4577_156146C.1
ggccgctttttttttttttttttctttgttttttttttttttaatttttttgattatttttaggttttcacacttttttttgaggtctccattatcgtgttcattttatatgtaatttaaaagatggacctacaacgatggagttagctgtctcgacaaagacaggaaaaacaaaagagaactggggggggggcagcaaacaggagccagaagaaggaaggcggcgaccaaagggttagccactaccaaaggaggaaccaacagcagtcgctgttgtagggacgcagcagagggcgacagaaaaagaggggggaaaggaaacagctgaggcaaggaggcaacaggggggggcacagctagctgaaccagagctggaacaagctgaaacaacaattgtggaaaaaagaaaggaggggcattgcccacagcgagcggactagatgaaagcagtt

SEQ ID NO: 61571 - DNA, 349 bp, Zea mays
  Clone ID: MRT4577_156147C.1
ttttttttttttttttttttttttggtttttttttttttgggtttttttttttttttttttttaaagcaaaagatttttccccttttatatgggcccttataaattgggttttacagggaggaaacactgttgacacttcctacgggagaagccgttgttttaaaaccgaaaaccattggtccggactccttttgcaagaaaacattttatggtcgacaggcccacttttgttcctccatgccccgactagggcttcattttaagaatttttcatgaatccctgccggggttttcccctttaagggggcccccccacgcttgccttaccccggggaaattcccaccatt

SEQ ID NO: 61572 - DNA, 282 bp, Zea mays
  Clone ID: MRT4577_156148C.1
ccggccggtgaacctttggcacctgtagaactcataatctatggcaaactagttagtccaattatttgtgttgggcaattcaaccaccaaaatcaattaggaaaaaggtgtaagcctatttccctttcaatctccccctttttggtgattgatgccaacacaaaccaaaacaaatatagaagtgcataattgaactagtttgcataatgtaagtgcaaaggatactaagttgaaccaataaattctcataagatgcgcaaaaaaaaaaaaaaaaaggcggcc

SEQ ID NO: 61573 - DNA, 494 bp, Zea mays
  Clone ID: MRT4577_156149C.1
attgtaaaagttttttttccttttttatgggaactgatttttttccataaagaccaactcccttttggtatctttgataaccaacttacactcggatcctggataaaaaaaatgtcccctgaatttgattcaccaacctttttcatgacccttatgggccaaccatagtttttccccttttgcaacagggaatacttggaacctttctacaaatgggaatacgaggccgcccacaactaatgtttaaacaggcctggaacattttggatgtaaccaaattggcaaaactctagaggggacactatttgcatgtcgctagcggggtaactaattatgttctagaaactaattggggggatatctttatactagaaaattaagggattctataatgctgcctaaacaaggtggactccatggctgcctgccctatcaggactacattgctggcgaccttttgcgattaacccttgtaggcaacctaagcctttgcc

SEQ ID NO: 61574 - DNA, 657 bp, Zea mays
  Clone ID: MRT4577_15614C.1
gttcttttctagggctggaaaggtccgggatgttcgcctgattatggatcgaaattcacgacgttctaaaggtgtcgggtatattgaattctatgatgctatgtctgttccaatggcgatagctctttctggtcagttgcttcttggtcaacaagtgatggttaagccttcagaggctgaaaagaatttagttcagtcaaatgcttcaagtggagctgcttcaggtggagcaaggaagttgtatgttggaaatcttcactcaaacattaatgaagaccagttgcgacaggtctttgaaccatttggacaagtggagcttgttcagttgccattagatccgctcagtgggctatgcaaaggttttggttttgtgcagtttgcacgtcttgaagatgcaaaagcggcccagagtttgaatgggcaacttgagattgctggaagagtaatcaaggtttcagctgtgacagaccaagcaggcatgcaagttagtggagctacgggagatttggatgatgaagaagctggaggcttggcactgaatgccagttccagagctcttctaatgcagaaattggaccgcagcggcattacgaccaggattcaaccaccactacagcaacactgtttccatatatatctagcttatcaagtttgact

SEQ ID NO: 61575 - DNA, 1364 bp, Zea mays
  unsure (1)..(1364): unsure at all n locations
  Clone ID: MRT4577_156150C.1
gtgcagctcaccaggcagtaccaccaggcgctggacgcctccgtcgccaagaacttcccggagaacggcatcatcgcctgcatgagccacaacaccgacgccctttactgctccaagcagacggcggtggtgagggcgtcggatgatttctacccaagggaccccgcgtcgcacacgatccatatcgcctcggtggcgtacaacagcgtgttcctcggcgagttcatgctcccggactgggacatgttccactcgctccaccaggccggcgactaccacggctccgcccgcgccatcagcggaggccctgtctacgtcagtgacgcacccggcaagcacaacttcgagctgctgaagaagattgtcttgcccgacggttccattctccgcgcgcgtctgcctggccggccgaccaaggattgcctgttcacggacccggcacgggacggcgtaagcctgctcaagatctggaacatgaacaagttcaccggcgtgctgggcgtgtacaactgccagggcgcggcgtggaactccgtggagaagaagaacaccttccaccagaccggcaccgaggccctgacctgcggcgtcaagggcggcgacgtccacctcatctccgaggccgcgacggacgccgaatgggacggcgactgcgccgtgtaccggcatgccgacggcgacctcgtcgtcctcccgcacgacgcggcgttgcccgtctccctcaaggtcctggaacatgacatcctcaccgtgtcacccatcaaggagttggcgcctggtttcaggttcgccccgatcgggctggtggacatgttcaatagcggcggggcggtggaaggcctgacctatcacctcctcggcggcgacggttccaccttgggctccgaggctgtcgcattggcgtgcatggaggtgaagggctgtggaaggttcggtgcctactcttcggtcaggccaaggaagtccacgctcggttcagctcagattgagctcaagtatgattcttcctcagggctgctgattctgcagctggatgcgatgcccaaggagagggttcacaagattgttattgagttgtagggtggtacaaagatttagtttcattggtaatcagagtaccctctgatgacgagtatgtagggactggagtggcgtatggtttgattgctaggcaaatctgattcatgattcaagcttgtctggactctgaacagctggccttcagtatttgattacattcattcaaaccgccgtttccaaatgttcagtattgttaccgtatatcaaaaaaaacacccanagtaatgggcggccgccctcgcgagtctagtntaccggacnggcgtggggtacgacccaaggga

SEQ ID NO: 61576 - DNA, 529 bp, Zea mays
  Clone ID: MRT4577_156151C.1
ctgcgacgctgcttgacatatattcacaatcactcagcatgtccaccgctgacgaagacatccccaacagcgtcgtcgccgcctcgacggcaggcccgtcgcctccggcgccagtggcgaaggccgtgcgtctcttcggcgtcgacctgctgacggcaccggccaccgccgcggcgccggcggaggccgtggccgtggccgggtgcaagagagccagggacttgggttcgcccccgcaggcggcgttcaagaagcagctcgtggagctggcactagtgtagattaatgctacggagcgatcgatctttccctagctagctaatcttttttttttttttgctcgatcgctcaactcagatggtagcatcaccgagctgaatttagttcccctctcggcatctcacttagttggttcgtttgttaatttccagtttcaccatccttttttgctttgctttgatgtaaatcttctcatcaactgtatactgctaatggaaagaaaaaaaaccaagaaggctagatgatggtc

SEQ ID NO: 61577 - DNA, 593 bp, Zea mays
  unsure (1)..(593): unsure at all n locations
  Clone ID: MRT4577_156152C.1
cccacgccgtccgggnaacagnaacaagttcaccggcgtgctgggcgtgtacaactgccagggcgccgcgtggaactccgtggagaagaagaacaccttccaccagaccggcaccgaggccctaacctgcggcgtcaagggcggcgacgtccacctcatctccgaggccgcgacggacgccgaatgggacggcgactgcgccgtgtaccggcatgccgacggcgacctcgtcgtcctcccgcacggcgcggcgttgcccgtctccctcaaggtcctggaacatgacatcctcaccgtgtcacccatcaaggtcagtcagtcagtgcccgtttagtttagcaacaaatgctgcgaaactgtacgtgcttatgttccctgcaggagttggcgcctggtttcaggttcgccccgatcgggctggtggacatgttcaatagcggcggggcggtggaaggcctgacctatcacctcctcggcggcgacggttccaccttgggctccgaggctgtcgcattggcgtgcatggaggtgaagggctgtggaaggttcggtgcctactcttcggtcaggccaaggaagtccacgctcggttc

SEQ ID NO: 61578 - DNA, 242 bp, Zea mays
  unsure (1)..(242): unsure at all n locations
  Clone ID: MRT4577_156153C.1
caccggggtaaattcttgcataaatagcctgtttcagacatctttatatgtacatcagannaatacaatgggagccactttccaagggtacactgtgacatttgcaaacaaaggctaaccaacattttgtaatctggatccatgataaacaggcctcttttactctaagtgggaccaaaaccgtagtcggacctagaaaatctataacttccttttgcctcaaaggcagatactgatttctt

SEQ ID NO: 61579 - DNA, 114 bp, Zea mays
  Clone ID: MRT4577_156154C.1
ggggggcgtgcggctatagatcactcactgagataccctgcggttcgactaaggtgagagatagagcgttggaggtgctgatggggactgctatccgccttaagagtcgcgcaa

SEQ ID NO: 61580 - DNA, 329 bp, Zea mays
  Clone ID: MRT4577_156155C.1
tgattcgcagcatgatggagggtcaggagactcaatgatgctctgaagcccatgacccaatgctttgaagagccgaaacacttggtcactattatgccgctattcatggagaacatcaaggctcttgatggcattcataacgatgtttacataggtgacaaagaattcgagaatcatcccactcatctttaaatgcttgcggaggattgtaaccactctgattatataaagctggtgaaggctctttgctctgagcacaacgttgacctgcgttctgtggcatacacttaaactcttggtgaatgggacgggctttgcatgatttattg

SEQ ID NO: 61581 - DNA, 344 bp, Zea mays
  Clone ID: MRT4577_156156C.1
aaccactgcacccaggaatcctgccgtgtgcatttcgccggcgggcaagaacgagggactccgtgtcgcacctgagcccggccggacaatcacagcggacggacacggcccgcgaccaccccgcgacgccaagactttcacacttaagaccggccgtgtcgggccgcgcctcttcggcccgcagtcgcggtcacgttccctggccaaaaccccgccgtcgcggcttcacgcgcagcgcgtcacaacggagctactcaaggttcagaccaaaacaacacacggagagtgacagacagaacactcgcgcacgcactaacgcgcccatacagtgggaacagaggatc

SEQ ID NO: 61582 - DNA, 230 bp, Zea mays
  Clone ID: MRT4577_156157C.1
ggggaacaacagcatataccttttttttaacaaaactttgtttggaaaaaaagttccctggtgaagtacacaaggggcaaaaatggggttcacaaaaaaaatggttcgaccaccaaaactacatttttaagcacccccttaggcatttatttttttgcaaaagtcacttgggaagggctaccctaaaatgcctcattttaaatcccccaaggattaactactctggaaag

SEQ ID NO: 61583 - DNA, 548 bp, Zea mays
  Clone ID: MRT4577_156158C.1
ggtggtcactggccagttgaacggaggagatgccggctctctgattagtgcgtaataaaggtacgtacgttaactaggcaattaagcgcgtgtgttactgttgaacttgaacggggccgctattaaagctgtgtgtgtgtgtggtactagtagttgtcattggcttcgttgccatgtgttcggccggcagtgccaagtgaatagttgcgtccatccaggagaatgtatgtttttgagttgcgacaaaaaaaataaaaaaaaaaaaaaaaaaaaaaaaaaaaaagtttagtcctaagactaattgaaaaaaaaaaaaaaaaaagaggttttctcctaccacttattgaaaaaaaaaaaaaaaaaaaagttgcgccctctgcctctttgtgaacataaaaaaaaaataatgttgactcctatgcctcttcgtgaaaaaaaaaaaatccgagccggaactctaattcgttctgcttttcctgccaattgagtgcccggcctctcttggattaaatttggctaactgtccgctttgcgggccttttgtttgt

SEQ ID NO: 61584 - DNA, 552 bp, Zea mays
  Clone ID: MRT4577_156159C.1
ctactcgtgggccgggactgagggacctctttctttatacccaccaacaacgtagaaatgattgatagcttgtctattgggaatcgtgttgtgcctatcttactattactctggctgcgattattcgagactgcgtatttgcaatacaggcgcggagatcaggtgcatctttgattgagtagtattgctcttcattgattgactctcctctctggtactgccatgacggtgcacaattggcagttagcagattctactctgttctcttttaaagtattttagcttcgacataagatatatggaatcacgctctgtaggatttgaacctacgacatcgggttttggagacccgcgttctaccaaactgaactaagagcgctttcataacaaaaaaaaaaaagaaaatccttctctattcctaacgtgtctcacgtccgtatagtatccacaaattcaaggtatacccactttaatcgatctccccactactgcccataacgaagagagaattaataggtagggatgacaggatttgaacctgtgacattttgt

SEQ ID NO: 61585 - DNA, 143 bp, Zea mays
  unsure (1)..(143): unsure at all n locations
  Clone ID: MRT4577_15615C.1
actgcacaccctttattgaatatnatttacggccaaagtttcccatcgctcgtgctcactgcacgcacacggcttcaacgaatcccttgcgatcacttggatcacacactgattgagaaataaaaaaaaaggggggggggggg

SEQ ID NO: 61586 - DNA, 303 bp, Zea mays
  Clone ID: MRT4577_156160C.1
cctgcggggggctttagatcacggcgacatatcgtttcctgccctcccacccacgagcattataccaggaacgctagcttcaacacagaacaacacaaatttgatacaatggaatgtccaattcttaacgtaaacaagatacttgacaacacacaggtgacatactgacacgtgcaacatataaatacgaatcaacctaatgcaatatatagtttcctcgagccatgctaacccttaaatgaacggatctacttgattagatgagaggaggatacttgcgaatgcgctagccatattttcaat

SEQ ID NO: 61587 - DNA, 633 bp, Zea mays
  Clone ID: MRT4577_156161C.1
taggggccttttttttttttttttttatttttttttttttttttttttttttttttttttttttttttttttttttttttttttttttttttttttttttttttttttaaaaaaccccgcaaaaaaatttggtattggaacaccgggcccaaaaattcaagggggagggggaaaaaaaaggagaacaacgaccagaaaatggggcccttggtcccaagggcctattagggaaggggccccccagggactttaacccccacggggaaaaaacccaccgattctaaaaaaaggggttcccccccgggacaagggcgaaagaaaaaacttttggggggaaaaaaaagaattccccccccccaaattccgggggccaaaaaccttccccggggggggggggccccccaccccgggggcccccccgggaaaaacccccccccccagggatcgggttccactggggaacccagggggccccttcttccggaaaggggggcccccccttgggggccgggccccccaaaggaaggaagggacccggggcttctggggcgaacttctgggaaaacttcttcgggggcccggaaaacccctctcccttcccggccgccaaaaaggggggggggcccgggggcc

SEQ ID NO: 61588 - DNA, 186 bp, Zea mays
  Clone ID: MRT4577_156162C.1
ccccgtcatcgatctcgtttcaaatacatccatcctcgtttcctccgtcccgcagcatctcaaccccatggccaagatcaagatcgggatcaatgggttcggcaggatccgaaggctggtggccaaggtggcccttcaaaatgacgatgtcgagctcatcaccatgaacgaccccttcatcaacac

SEQ ID NO: 61589 - DNA, 281 bp, Zea mays
  Clone ID: MRT4577_156163C.1
aaaaaaaaaaaaaaaaaaaaaaaaaaaaaaaattcaaaaacaaaaaaaaaaaaaaaaaagaaaaaaagaaaaaaaaaaaaaaaagagggggcggccgttttagaggttcccacctctcgcccgcgggaatgcgacgccttagttgtcctttcgggccccctagagtagattgtatgcccgccgtttttcaacgcgcgtattgggaaagccttggcgttccccaacttaatccccttggaggcaatccccttttctccggttggctgtaaaagcaacaaggc

SEQ ID NO: 61590 - DNA, 274 bp, Zea mays
  Clone ID: MRT4577_156164C.1
acgcgccgccccgggggatccgccaccgcctcctcctcttcctcagccgtggcggtgagcgcagcgccgcccccagtttagatcttgaggcggcgacgaagcttcaagcccacgcgcccctcgagatggggccgatgcggacgcggatccgaaactggaccatggggccgacggggtcgccgcgtggtgggtgtgggtcgcgctcaccgtctgcgttgatgtcgtcggcgtcggtctcgcgctcgtcgggttcctctactgaacaaggtttcta

SEQ ID NO: 61591 - DNA, 1767 bp, Zea mays
  Clone ID: MRT4577_156165C.1
gtcgccgccctgcccaaggcggcctgcctctgcgtcgacgaggacgcctgcgcgcacgtcggctgccgccccgccgtcgccttcatggcgcaggtcctcttcgccgcgtccaccttcgacgtcgccgagctcaccaatctcttccagcggcggctccttgatgtccttgataaggttgaagtggacaacctcccattggtcttatctgttgccaacttatgcagcaaatcttgtgtgaaactgcttgagaggtgccttgatgtagtagttcggtcaaaccttgatatgatttctcttgaaaaaaagttgcctccagatgttgagaaagaaattgttgatgcaagggtaagccttggattagtttcaccggaagacaagggcttccctaacatacatgtaagaagaatacacagagcactggattctgatgacgtggagctagtccggatgctactcaaggaaggaaaaactaatctcgatgatgcatatgcattacactatgccgtcgaacattgcgactcaaagatcacaacagaacttctggatctcgcgcttgcagatgtcaatcataggaacccaagaggttatacggtccttcacattgctgctatgaggagggaacctaaaatcattgtctctcttttgaccaagggagctcggccatcagacctcacatttgatgacagaaaagcagtgcagatctccaaacgacttacaaagcatggggattactttgggcctactgaggacggaaagccttctcctaaagatagattatgtattgaggtactagagcaagctgaaagaagggacccgcaacttggagaagcatcagtttctcttgcgatagaaggagactctgcgcgtgggaggctactctaccttgaaaaccgagttgctctagcaagaatactgtttcctatggaggcaagggtagcaatggacattgctcaagtcgatggaacactggaattcacccttgtttctagtgtgaatctgcctgccgagatacaacggacagttgacctgaacgatactcctttcacaatgaaggaagaacacctggctcggatgagagccctatccaagacagtggaagtcgggaagcgtttcttcccgcggtgttcgaaggtacttgacacgatcatggacgacgaagccgagatggcttccctcgggcgagacacatccgcggagaagaagaggaggttccatgacctgcaagacctggtccagaaggcattcagcgaggacaaggaggagaacgacaggtccgcggcgcggtcaccttcctcctcgtcgacgacgacgacgtcgatcggggccgtccggcctcggaggtgaaagggaaaacatgcatgggttctgtttccgtcccgccattttggtagccgatgcggtggccacatagagaccgtaatcatgctcacttttgctggcgtatagcattaatgcagaacacgtatactaactaactatataatatacgagtaggtgtagatcggtactggaggttgtaatggcagtagcgaaacatagtgcattctggcgggcgtgtgtgtcgagcaggtagctggctgctcttgattgtaatggcgttttgagcagctaactaggatccctcttcacttcactcgaaaagggtctggcatggcttgtggaattgtggtgtgctggatagtgtcaggttcagtgtcgcaaaccctgaagaaatgcaaacatgtagtgttgccctatctaccaaaagccaaggggaagtgtttgtcc

SEQ ID NO: 61592 - DNA, 251 bp, Zea mays
  Clone ID: MRT4577_156166C.1
tctcatttagtgagccgtcctctgcctgtcgccctgtaggccgaggaagagacgaagcgtgagagagagtgacatggctgcgcgcattcctatgcgtgtgcatgtttttgattcgacacaccttttgtcctctttttcttttgttccctctttcttcttaatttaacgaatcgatgcatgcctgtgatgttcttccccctgagagagggtttaacactttgttcatcgcttgccattttgtttgattccat

SEQ ID NO: 61593 - DNA, 218 bp, Zea mays
  Clone ID: MRT4577_156167C.1
ctagctttgtcttggcggcgagggcttcatgggcacatacaacagaggtcgggcatgaaatcacaggtctgcgccccagggtctcacttcacagcaacgcgctacagggagggatatgtgcagaccacaaccaggagatcgcgacacatgtcatttagtgccaatacacacaagacaccggctggcggctcccagacatgtagtgacacctgaactcg

SEQ ID NO: 61594 - DNA, 268 bp, Zea mays
  unsure (1)..(268): unsure at all n locations
  Clone ID: MRT4577_156168C.1
cctcaccctccttcaccacacaaaccnccactcctggggtagcttgagaggggggcgtccacaagatcactggtcgggtggcggacgacgacacatggggaagggaccggtttctgcaccaaatgggtcaaggcatactcctctctcggaaagctggatggacgtaacacccacggccaatgcggaagacggagtggtcgaacgggaccgcaaggaggacctgcggtggcgcaagcaagcgtgctagtggcaatacgggaaggacacc

SEQ ID NO: 61595 - DNA, 378 bp, Zea mays
  Clone ID: MRT4577_156169C.1
cttcttcgcccacgctatacgcccaggcaaatggactctatagcacgagcacgggtgcggcctcctagacactgcgagccacaccactatccatttatgcgatcaactccactgctcgcctgattgaaactactcaactccaagttcttgcacatcatcctgtacaacttatagagcatgcacttcctcgacgtgcacgtgtccgtgcgcgtcatctttgcgaacacgtccgtcatgcacgtctacagcttgtccaagactagcatcctctactggaccatcgtcacacgtgacatctgcgtctccttcgtgtccgtctacagcatgctctcatcttactgcatttcctcttgcttccatcacgtgctcaccgtgctg

SEQ ID NO: 61596 - DNA, 403 bp, Zea mays
  unsure (1)..(403): unsure at all n locations
  Clone ID: MRT4577_15616C.1
caagccttccgtttttttgtttttaaacccttttttgaattttttcttgggcctctggttcctgnnncccgaatggctttttttgaatccagcactgagaaaccctggaccaccccaaaaaaatccattaaggctgttccatttaaccatccaaaaaccttggccccaaaaggttaaaaccaacacaaggttgttttaattggtaccaccatcggtaatcccttaaagaccacttaaggcccttcgttaaacatcctaataaacctaatggttgtcaagtcccttgtttttgttccctttttcgcaaccaatggaggcatccttttaaaatgcctttaaagaaaaaatggaaaatgaatggttagtttatttttcccggggaagagccctaaatttttttaat

SEQ ID NO: 61597 - DNA, 403 bp, Zea mays
  Clone ID: MRT4577_156170C.1
gcccccgtacgtacgctcggaattcgtctagagccatcacaagctggcttttgaccggtcctccccgacactgaaggcgcgggacgagttcaagcagctgagcgctgccagcctcaccgtcggggggttaaagctgcctgcgagtacttcgacggctctggccaaggtgacaaaagtggaggaagcgatggccgaggagccggataaagaatgatcccagagcaacgaggacgctacagcggaagatcccaaggaccatggggctgcggatgccgccattgaggagggcaagacggaagagcctcaagccgatgtggccacagctgagacactggataaggaaggcaaaaattcatagcccgagactcaggagaagaccgtagcggacactgaggaggagact

SEQ ID NO: 61598 - DNA, 1147 bp, Zea mays
  Clone ID: MRT4577_156171C.1
gaaaaaaaatcatgaaatgcaacaatgaatatgttacggagttttgtcacagatttgctaaacagagctatatgttacactagagttcagaaagaagtaatctaggtaggatacccaggggaaaaaaacatgaaatgcaacaacgaatatgttacggagtatagttttgggacgatactcaatttgcaaacaggaccaggtttaaaaacagcttgtgtttttgatgcagtacaattacaatatctcaaacaatcatctacatcacagcggatgacatggtatagaaaatgaggtgccctcaactggacatgttctctactatggagaaaatagaagacatgcctctctaaacttcagcatcttgtctagactgaaccattagcttgtcctgtaactctggttgcctggggagaacaatcttagcccctcgacctgaagacgtgaaatatctcttcaaaatcatcacagcagcatatgcatcagatttggtgtcacgagcagacttcttgacacccctggagatcatgtaatctagggcgtccgtggacgttccatattcatcctgcagataaaccctcaagcccctttgggcagcttggacggcgagcctcccgacgacgctccgcactttgttggactgcggtgtctccgacccatcagcggacacgggaagcccgatgatgagctcgtccgcctcctgctgccgagccacgtcgagcagcgcaagctctagcttctgcccgcggagcctcagaacagtgaggggtcgagggaaggtgatccccctcccgatggcgaggccggtgcgggcgtcaccgaggtcgacgccgaggctgaacccgccgccgtgccagagcgggtcgcgtccccgccgccgcgcgtttggctggagcggggcggggagctcggcggcggcttccgtccggcctggtacgggagatgccctgatagctccagcagctcttcgacggcgcgggggcgggaaggaagcggaggccgcgcacgcgcgggcccgcacgagcggcgccggctccactgccgctgcggttgtcatggcaaggcgattcggcggccgtgcagccggctcgttgcgtggataggggaaggagttacgggccgtataaaggcccatcccggccggcccagg

SEQ ID NO: 61599 - DNA, 344 bp, Zea mays
  Clone ID: MRT4577_156172C.1
ctcaacttgtttttagaatttaagaacaagtggttgtcttgttttgactggactaatccctcattttagtatctttctttgtatactatatcatggcttcgagtggtaccctataaataaagatgaactgtgcctatctctagtgatctagtttagtgcatcttaaatgctgcgtgtttgctggtgcactagttttgtggtcactgagcacggcaggcacacatcttgaccttttttttcagtatgacctcctgatggcacatgtcagaagatcatatcgtgcgtctctccttcatctcctctagtccttttgtgctaaacttgtagctcatcaaatttgcaat

SEQ ID NO: 61600 - DNA, 485 bp, Zea mays
  Clone ID: MRT4577_156173C.1
cgtatgctgacctctagttggctgggcaaccccaggtgatttttttcaggaagatgtacgccgctccatcttggttcatgtcaaagggtggcgcatataagatcctgtagccatgcaatccatatccatggtacgctgttatccaccccatgtcactatgccagcgctcaaccgttcatacatgaggccactctttcataaggtgatcaccaatcgtagcagtttggcatgccattgtacacttgtacagagaggacatttttgcatgaatcgagcatggagcctattgtacgatgtcgagtgtccgagacataatgtttgcttagacgttcctctgctgcgtgtggactctacttaagagtgcatccgagctggaagtactcttacagggtagacgactgcctgacccgttttgcagatcagattacacgatcaggccttaaccctttttttgattattatatatacatattattaattcattt

SEQ ID NO: 61601 - DNA, 653 bp, Zea mays
  Clone ID: MRT4577_156174C.1
cgcagcggcagtggagccggcgccgctcgtgcgggcccgcacgtgcgcggcctccgcttccttcccgcccccgcgccgtcgaagagctgctggagcgatcagggcatctcccgtaccaggccggacggaagccgccgccgagctccccgccccgctccagccaaacgcgcggcggcggggacgcgacccgctctggcacggcggcgggttcagcctcggcgtcgacctcggcgacgcccgcaccggcctcgccatcgggagggggatcaccttccctcgacccctcactgtacgcacctctcgcactcagctccaccgcccaaagtaaacctcactaaattgaggtagagttggaatggcaccaggttctgaggctccgcgggcagaagctagagcttgcgctgctcgacgtggctcggcagcaggaggcggacgagctcatcatcgggcttcccgtgtccgctgatgggagggagacaccgcaatccaacaaagtgcggagcgtcgtcgggaggctcgccgtccaagctgcccaaaggggcttgagggtttatctgcaggatgaatatggaacgtccacggacgccctagattacatgatctccaggggtgtcaagaagtctgctcgtgacaccaaatctgatgcatatgct

SEQ ID NO: 61602 - DNA, 185 bp, Zea mays
  Clone ID: MRT4577_156175C.1
cccagcgtgcggccaacgtgcggccaattgctttgtagcgtactcgtgcatgcgagctctccgcacacgagtgtcgccagtctttagttcaccggcaaagctaggttgcttcttatacgaggctgaacgactgcttgacaagtctgaactgaccgtgcacgcatgtttgacctggagtggatgga

SEQ ID NO: 61603 - DNA, 535 bp, Zea mays
  Clone ID: MRT4577_156176C.1
acacatgtcttgacgtatctggtggcatgtgatagcctagaccgaacttatgaagttattcgacatacagcgagcgactttaatggatctgttggagcccatctttaagggacaaatgtgttcaaaggatcttgcgggtgtgcatggtttggggaactgctctgcagcttggtgttagatcttgtgcggagcggaccagagcattacctgaaccaggaggcgtatgatatctgcatgctgcccacaccgtagatgctatatggtgcactgaacctatgatgccctcttgagcctaaaggacagactacattctttactatctttattatggactgagctcacaaaaagcatgaccttgaaagttgttacgctgcacgatcgactgcttgatctgaatgcacatacttaccacttgactggcgtatgactgtagtatgaaatgcagcattatgaaccattccaatatcatatagttaaagtagttcattttcctcaacatggacttcttcttttagaggggcaaggaatataccga

SEQ ID NO: 61604 - DNA, 742 bp, Zea mays
  Clone ID: MRT4577_156177C.1
tcgactcagcgtccgcccacgcgtccgctacccgaagggcaagacagagcatgaagataaattgcaagaggaacagctattaagtgatcaaaagcaatgtgctgaacacattatgcttgtagacttgggaaggaatgatgtaggcaaggtatccatatctgggtctgtaaaggtggagaagttgatgaacatcgagcggtactcccatgtcatgcacatcagctccacggtcagtggagagttagatgatcgtctcgaaagctgggatgcactgcgagcagcattgcctgttggaacagtcagtggggcaccaaaggtaaaagccatggaactaatagatcagttggaagtcacaagacgaggaccatacagtggtggcttaggagggatatcatttgatggtgacatgcttatcgctcttgctctccgcaccattgtgttctcaacagctccaagccacaatacgatgtactcatacaaaagctcagataggcgccgagagtgggttgctcatcttcaggctggtgcgggcattgttgctgatagtatcccagacgatgagcaaaaagaatgtgagaataaggcggctgccctagctcgggcaattgatcttgcagagtcggcttttgtagacaaagaatagagtgtctattaaattattttttgtagttgttcatcattttttacccagttcatgttggaaaagttgttcatcgtttcttcaccgagttcatatttgggg

SEQ ID NO: 61605 - DNA, 377 bp, Zea mays
  Clone ID: MRT4577_156178C.1
aggaacaaagttttattgcagttcgacagatatgcatgattaattacacaatatgaatgagccgtagcacacaacgattgatatatcaaaagaaatggatggaaacaaaaaagcgcaaccttatggctttgtgatctccgatggttgatatatatgtgttgcgctggcacgacctctttcttcgattccacgggatcctgaaggcttagggtaaacggtggttaacgacgctggacttattactgatctctcccttgatttctttaagcatgggcagcttgctgagcttgagcagcgatttcgagaagtactcgtaccatagcaaagcgttctcgtggtacttcacgatgtggccgaacacctccttgtgcgtgagc

SEQ ID NO: 61606 - DNA, 142 bp, Zea mays
  Clone ID: MRT4577_156179C.1
gcgcttgacggagctggcgaaccttgggggggtcttctgtgaccgggggaaggagttcaatgacagggcggatcatcgcggtgttcaagaagatgtacagcctaatcgatgaggacaagcagaagggccgaatatttgggat

SEQ ID NO: 61607 - DNA, 314 bp, Zea mays
  Clone ID: MRT4577_15617C.1
gttctctttcatctcatcccttcttatctatccaaaatggtgaaagaaaaaaaaagcatggggactgtttggtactttgtctgagggcttatttggtttctcacccaggtttgctattgagcaaagaagtcgtaatttaatttgggcagagtgaaagacaactatttttttttcttgagatggtcaaagttggttctctaatagaaaggatcatttttccagtaaaaatctggcaagggtagactaggcaacaaaccatggctatattccacaactaaatggccacatgatcaacaaatttcatattttaacca

SEQ ID NO: 61608 - DNA, 344 bp, Zea mays
  Clone ID: MRT4577_156180C.1
ggccgcttttttttttttttttttcgggggggggggaggctttgaagtacacatatcaaggggcggacggattcgggccatactgctgccaagaagtgctggtgtcggcctgctggacacaacacgtccattgtaccatcgaacctcacatccacgattgatgccacacaggccacacatgggggggggggggggtcatccatattgaggcccaccacagggcaccaggcgacgcagatacccaggtgctgcggcagctcagttgagccatggcttactgaccaccggggagccggagcaccatgtgaagagtagttcccttctgcctgatgcaggctgctggg

SEQ ID NO: 61609 - DNA, 314 bp, Zea mays
  Clone ID: MRT4577_156181C.1
agaaacaaataaatcattttattgataaccagaaaacgcgcaggggagtacatgatccccggggggggggggggggcgttaaaacacgtaccaccaccaccacgcgcacacctttttcggcggcgggggcgacttcatacatacacacgcccggcggcaccttacacagagacacacacgacacgagctggacttacgcacgccaaaccaaacaaattatattttggggcaggaaccacgtatccagcgcggatttaacaaaaaaggtagcccaaggcggcggcggcaaaggaggccccggcaaggggtaccgg

SEQ ID NO: 61610 - DNA, 889 bp, Zea mays
  unsure (1)..(889): unsure at all n locations
  Clone ID: MRT4577_156182C.1
ttgggaccctcgaggccggccggggcacgagcccattttccttttgcttgattggtgtatctccacagttattcagggctagtttaggctagtttgggaaccccgttttcatttttcaaaggaaaattagttcatttttctctgagaaaataggaatctcggaaaatgtacttcccaaactagctctaattgaatttatctccgctggttttccctatagaacaggctgacggagcagacgggttcgaggacaacgaccttgccgcaccgccggagcccttgtcccgcgacaatggagcgagtttccggaggaatccaagctctgcagattcgtcgtcgggcgtgttcgggagcctgaaggccgtgctgctcaaatccaagctcaatttgcttataccgtgtgggttcttggcggtcctggtggactgtctcagccagaacaaggcctgggtgtttcctctgagcctgctgggcatcattcctctggccgagcgcctgggtttcgctaccgagcagctagggctctacactggccgaacagctgggggcctgctgaacgccacgttcggcaacgccacggagctggtcatctccatccacgcgctgcggagcgggaagctgcgggtggtgcagcagtcgctgctcggctcgatcctgtccaacacgctgctggtcctcggctgcgcgttcttcggcggcgggctcacctgcggcaggaccgagcaggtggtcagaaaggaagacgcggtgctcaactccgggctgctcctgatggccgtgatggggctggtctcccccgccatgctgtactacacgcacaccgaggccaacctgngcgagtcggcgctggcgctgtcgaggtcagcagctgcgtcatgctcttcgccta

SEQ ID NO: 61611 - DNA, 115 bp, Zea mays
  Clone ID: MRT4577_156183C.1
acgcctcgcgggccggtccgaggtcaacacatttatcaatgggctactccaggtaatgagaaagtcagcatgtgttgatccaggttgaagggagaatatcctctaaagggagtcg

SEQ ID NO: 61612 - DNA, 795 bp, Zea mays
  unsure (1)..(795): unsure at all n locations
  Clone ID: MRT4577_156184C.1
gtttattccgcaccattctctcttcctcgccgcaaagcccctaaacctccacctccaacggcggcgcttccccctctccgccgtctcctggccctccgcggccaccgacgcctcctctccacacccgccgcctcatccaacaaccgcctttccccagaggccgtgctctacaacatccacagcctctccaaggacccctcccaagcgctcgccgtcttccgccgctccgtcgccgccggccagccagttggctccgcggcatacaacctcatgctccgcaccctcgcctcccacccctctgcgcagcgccatttctggcccttcctccgcgagatgcaggaggctggccactccgtcgaccagggcacctacctcgctgctctcgcctccttcaagaaggccagtctcaccgccgactatgcctccctcaccgcgcattacgacaagttccggaaaggtgccaagtccgccaccgcggcggcggaggcggtccgggaccacgacgccgcgggcctcgatagcaggctctccgccatcggtctccttccgcttacggagacctccgtcaccacggtgctccgagagctgagggagcatccgattaaggctctcgccttcttcagatgggctgggcggcagcaggggtacacgcacagctccgtggnctacaatgccatggcaagggtgctcggcagggaggagtcagtgccggagttttgggacttgatccgggaaacaaaggctgctgggatgcacgtcgatatcgacacttaccctcagctgntcaggaacttc

SEQ ID NO: 61613 - DNA, 407 bp, Zea mays
  Clone ID: MRT4577_156185C.1
cacctctcttcatctccctgtgccttcgcctacttcttgatccagccaatgcagggatcttcatgtcatagggggatgaacaccacttctaatcgaaggccgactccggagcgtccaagacctacccacatcatgctgccaccgctcgtaagaacggtttcatcgccatcaataaccgaccctgcatggttgtgaaggtttctacctcaaagactgctaatcatgctcataccaaatgccactttgtggccatatacatatccatcggtaataatcttgaagataatgattctttatcacacatctgtgatattccgcatgtgaacctttctgcataccatcttattgatatatcttaagattgatttatgagccttcttacttcaaatggcaacactaatgatgat

SEQ ID NO: 61614 - DNA, 181 bp, Zea mays
  Clone ID: MRT4577_156186C.1
gcaaacaagtgcaagcaaaatatgtaactatcagctcttacaggttaaaccgatcaagccaaggatgcttaacaactatatttgacaaaccaggtttttggacacaacatgcgtacacatggatgcctcgaagtaccaaggcgctgcaaatgctccacacatacacatagcaattgaaggg

SEQ ID NO: 61615 - DNA, 218 bp, Zea mays
  Clone ID: MRT4577_156187C.1
cttctacgcacggcctcgctcacgctgcatacgggtgccccgtccgaccgtacggccgctgatcacagatccagaccaaacgaactccacaactacccactggccaaacacgagcaacgcatgaaaacccctagagaccccgaccagatctacggagccacggatcacccgtgcggcagacgacatggatgcccccacgcgctggactactatcaccg

SEQ ID NO: 61616 - DNA, 158 bp, Zea mays
  unsure (1)..(158): unsure at all n locations
  Clone ID: MRT4577_156188C.1
cattcacctgnagnaatccccaaatcacacgtctgccagtaaccccgtccgcttctcccagcccgcatctctagcccgagnntctatctcctncnnctccgccgnnccgcaactatcnnnctaatggcnntcgcttcnngccgtggtcnnngccgcca

SEQ ID NO: 61617 - DNA, 463 bp, Zea mays
  Clone ID: MRT4577_156189C.1
ccggccgggccggggtttccaccataacagctccgcagcgtgctcataaggatcactcggaggacgagatgtgccaagccacaatgggtatctcgctggactccatgcacatccgccgagactccgaggaatatagcaaaaggactggcacgacatacatcgaaaggatgagcttgctcgccagccaatcaacacctggttgtcaagcaatcatgacagcgtacgtagagaccgcagatcctggaggtagatgtgcaatggagagatcttctccttgatactgacaactactcatgtccaagtgaatctgttacccgcaagaccctcattctcgacgtgaacaacaatgcatccatatgtgttgttgttcttacacaaaaccgtgtgcctgctgtcactgtctctaatgatgctgtcccatatctgctcccgtgatcactgctcctatgccagatgaccctct

SEQ ID NO: 61618 - DNA, 251 bp, Zea mays
  unsure (1)..(251): unsure at all n locations
  Clone ID: MRT4577_15618C.1
gtcagtctcaagagcgacaggttcatcgataagttctgccttgacacgagacatctccatctgattctgaaataaatgacggtatcatattcatcgttcaccatatttgatctcagaaagagatgcgtacaagnttgttgtgttgtgtagtttaagtacctgactagaatacggatatgacatgccagatccacgtttgtctcagtcagcttgacaagaggttgaagtgaagtgttccacagcagcagcta

SEQ ID NO: 61619 - DNA, 658 bp, Zea mays
  Clone ID: MRT4577_156190C.1
tgggtacctcgaggccggccgggccgggagtccacatatccttcatacaatctctgtctctctctctctatctttctttctgtattcctatgtctaaacgtcttgtcttcttatactgaccggcgggagatcttcgtggggacggatctcgatggatgtgaaaacgaccccttcgtcctcgaccgcgaagaagttccgcaatctgtggatcggatagaatggcgtgatcaagtatgggaggacgatacgatacgagggctactcctatgaccgcagcgtccctgaatgcctgagacatggggaggtatttccgccaggtgcacacggaccgtcggcaacgccatctgcagctagaagacctgcgacgagaagtcatagccaaccatatgatcatgggagtgctctcacagcacaacgctgggatgatgattttggttcccaatcctttatctgcatattagaggacccacatgtatttacaagaatcacatcttgttcacgcaaggcggccattgcatgtgagttcacttggatcgacgaggaaagggagcaccttgaaggtttcatatctgacgtggcttttgtacactgactgcaggcggctctcctacatctctctgatgtgatttgatcgggcagccatgctccgaggttgaaa

SEQ ID NO: 61620 - DNA, 1335 bp, Zea mays
  Clone ID: MRT4577_156191C.1
cccacgcgtccggtcctctcctctgtctctctctctttgagcctcctttttcaacctaacctttgacgctgtagctcgagagcaagcatagtgcctagtgcctaccagattctctccctgagcggctgagctctgccgatccgcgataggctcgcgccatgcagatgctctgcgacgtctgcgccgccgcgccggccgccgtgatctgctgcgccgacgaggccgcgctctgctccgcctgcgaccgccgcgtccaccgcgccaacaagctcgcccacaagcaccgccgcatccccctcgcccagccctctggcgacgaatccgacgccgacgccaagccgctctgcgacgtgtgtaaggagcggaggggcctcgtgttctgcgtggaggaccgcgccatcctgtgccccgactgcgacgaccccatccacagcgccaacgacctcaccgccaagcacacccgcttcctcctcgtcggggccaagctctcagccgcgctcgtcgacgcccaggcgccccactcccctgacgacgacgacaacgactgcggccgcggcaacggcgccgccgccgagcccgacgctgtccccgccgtctgcgcgcagggctcctgcgcggccaaggcctcgtctcttgagtccggtggcggcggcggcggcggcagcggcagcggcagcagcatctccgagtacctcaccaacatctgcccaggctggcgcgtcgacgacctcctctttgacgactcggcgttctcagcggcatcgaaggccgacagctgcgacgacgggcacgagcaggtgccgtccctggacgccgacctcttcgacgtggtggctggcgccggctggccggggaagcgcggcagcgcgtggtcaggagtcggagctctgggcttcgacaaggtgccggcctccgttgttgtcgtcccgacggcggccaagcaacagcaggggtgcgtgagggagaggacctgggactcggacagcgacagcgacgtgttcgcggtgccggagctcccgcaaccaccgcaggccaagaaggcgcggccggcgccggctccggcgccgactttctggtgcttctgagctgcactgtcccagtccggtccggccggcctgtgtgcactgtgtacttgccgtgacttctgtaaccagtgtgtgtgagcgagcttgctcgtgctttttacccatgtactgttgttactgcatacacacacacactccactactattagtagctagcagtgctcaaacccaagttaattaagtttggcgcagtttatattatgacttaatcataaggtgatattgctgttgccggtcgagatcttgaact

SEQ ID NO: 61621 - DNA, 751 bp, Zea mays
  Clone ID: MRT4577_156192C.1
gccggccgggcctggatacccaggagcctcacatttcgcaactcactctgatcttcctaatatccaaccactcgacatcctagtcgctccctctcacacccaatggtgtctttcatcaccctcctcagcctcgctgccggcgctctccctgcccctgcccctggcgatacgcagtccccgccacatcacgtactgcccgaaggctatcccagcccttggttctgacaccgccaagagttcgaacacggttgtgtgcgcacgggatgctactaccgagtccacctctcattccccgaaaccgaaccctacccactaggtgaccagcactcctgcaccggaaccgacaatggcgagtctgacaatgataacactttccaagactgcaggattgttggacatgacaatgccgctaccgctgccgcccagctgcgtaggatgatcaactccgacgtgctcccaaagaactatatgttagcttcttgaagccaccatccataatccaccagacgaagccatactactttatccgctatcacgatgtgattggacctacaacgcgttcgtcgacgtctatgatgagcttgacgtctaccctactatctggatactggaccctcttccccacatcaagtcagcttgatttcgttgaatgatctgtgaaggaacggatatctgtcgcctgacctgactatgctgtggagcgggtccatggaaacttcaaggctttgaggtttctcaacttctctccatg

SEQ ID NO: 61622 - DNA, 229 bp, Zea mays
  Clone ID: MRT4577_156193C.1
ctagattacttgtatggaagttattttattgtctttgagggaacgaccattttatatatttggttcttatatcaattcacctgagatattaggagctgtaatatgctgaacatttggttcctagacttttacagtttctgctaatggagaggcagttgtgctgctgtagtttcatgtagtgttccacccattagctatttcttaggagacaggccaatcacatggtttc

SEQ ID NO: 61623 - DNA, 409 bp, Zea mays
  Clone ID: MRT4577_156194C.1
ctcaagaaaaaaataattcattttccatgtaacctgggccgagtcacctacctaaacgcaaaaatacagtgcttgcggactaacagccgacgtttacctttgatacagctgccatttcgatcacctgccacagtttaatctaacattacactgcgttacatgatataaacagcttacatttgctgacccaaatatccaacaccacaaaaaaaatgtttaatggcgcacactagttttcattaaaaacagcagatactgcagcctgagctggtttactctaactccagtgctgcacagtgccgccggcctttcaggatagctcaaatatgaccctcgcgcacttttctttcaaaaattttacggtttttgtgaacagcaccttcgggggcatgctttcggtggactcgat

SEQ ID NO: 61624 - DNA, 280 bp, Zea mays
  Clone ID: MRT4577_156195C.1
ggggaagcgggtgcagcgtgccggtacggaatcagatatcaggttccgggaggatcaacgtctcactagtcgcgggccgcccttttttttttttttttttacagattccatttctttatgaatgatttctttaggagaggtggagactgcacctggacaacaaacctgttctgtcttgggcgaaaatctccaaccttcatggaggcagatggaacggggggacccggctatataacactcaacccactaacacttttcattaaaaagaggaagggaccaa

SEQ ID NO: 61625 - DNA, 833 bp, Zea mays
  Clone ID: MRT4577_156196C.1
cattgggtacctcgaggccggccgggacccggaggaagtcacttccttgtagctgacttcaaccacatggtaccatcttagcagagtagcaatggctatcaaacagagcatcagcttcacgctgcgtgttcttgctgatctatccctcctactcttttgcgtcctgcttgcacctgtatgttcagccacaccagccacagctcctgctgttctcctgcaagtgaagtccggcctcactgaccccggaggcgtcctctctggctggtcactggaggccgacgtgtgctcatggcatggtattacgtgcctacccggggaggtctcaccgggcattgtgacaggcctcaacctgtccgggcacggcctgtcaggcgtgataccgccggcgatgagtggcctcgtctccatcgagtccattgacttgtcctccaattccctcaccgggccgatcccgccagagcttggcgcgctggagaacctgaggacgctgctcctcttctccaactccctcaccggcaccatcccgccggagctcggccttctcaagaacctcaaggtgctcaggatcggcgacaacgggctgcacggcgagatcccgccgcacctgggcaactgctcggagctggagacgctcggcctggcctactgccatctgaatggcaccattcctgctgagctcggcaacttgaagctgttgcagaagctggcccttgacaacaacgccctcaccggtggcatcccggagcagatcgcgggctgcgtaactatgcgctttctgtcagtgtctgataacatgctgcaaggcaacattccttcgtttgttggaagcttca

SEQ ID NO: 61626 - DNA, 379 bp, Zea mays
  unsure (1)..(379): unsure at all n locations
  Clone ID: MRT4577_156197C.1
cgcgcgtgtccgtctgggccggccttgctggcgcccntccctggcgnctngggtttggctcaccgccctcctgcttggtttcctcgtcgccgcctcccccttctccggccgngttgctngtgctttttttttttttgntgctgctgctgctggggttgctgtttgtgctttttttggtcttgtgggtgctgttgcgcgggtttccagtgctggacctttccctcctgctcctggtgttgtgactgttgttgtcttccctccttntgctggtctctttgttctcgccggtgctgttgctgcctttctcgtctggttgctctttgtcggtgccttcttttggcctgttgctgctgtgccttcttctctccctcttcctttt

SEQ ID NO: 61627 - DNA, 789 bp, Zea mays
  Clone ID: MRT4577_156198C.1
ccggccggggcgccgcgcggttctcgactccaccaaccaagcatcccagcttcaaaggggagacaagccgagaagcgctccctcatctcccccccacaacaggaactacgtacgatctcgtaaattgccttggagtttacctgcgcccgtgcgccgcaaaggccattcactcccttggcctcctcgcgacacacgcgcgcagagcagagcagagcagtttctctgtttctccagcagccatgacgtcgtgcgcgggagacgccacggtggcgtgccgggacgatgcgcgacggctcggggacgcggcctgcgtcatcgtctacccattgctcgacaaggctgcggaggtccacatcccggtggctggagacgaggcgccggccgtgcccgtgcccgtgctcacgagcaagtcgcccgggcggctcgccaccgcggtgagggaggctctgtccgtatccctgggcgtggcgttcccgacgacgccgttggtgtcgtccagcgaggcgcgtggagaggcgcggtcgattctgggcctcgcgctcccgatgatcctgacgggcctcctgctgtacctccgctccatgatctcgatgctcttcctcggtcgcctcggcgggctggccctcgctggcgggtcgctcgccatcggctttgccaacatcacggggtactccgtgctctccggcctcgccatgggcatggagcccatatgcggccaggcattcggcgcgggcaacttcccgctcctcggagtcaccacgcagaggacggtgctgctgctcgtcgcgg

SEQ ID NO: 61628 - DNA, 115 bp, Zea mays
  Clone ID: MRT4577_156199C.1
gtcaggattcagcagctagcctcgtacctgctcatggcaatctgcggctcattgccatgcgcatcagcagcggagcactagatggtcatggcagcagacgtcgctctcgctcact

SEQ ID NO: 61629 - DNA, 187 bp, Zea mays
  unsure (1)..(187): unsure at all n locations
  Clone ID: MRT4577_15619C.1
acgacagcatggcatcaagaaaaactgaccaaaaaccgaatgtgnngaagataataaaaaggcggaaagaaaataacgttcaagcagcatatagtcaataataagtaatctgatcacacaatatattataatacacacgcgataggatcatataagcaaatgctcgacagggaacaacaccatgagc

SEQ ID NO: 61630 - DNA, 6182 bp, Zea mays
  Clone ID: MRT4577_1561C.1
atggcgcattctggctcagccaggcctgggcctcggtcattccggcgtcaacatgaggcatcggcatcggtgcgctcaccttcagtgaaggccgcaccgactgaggacccgcgggcggagctcaaccgccggtgtgcgggtgaggatgccccaatttctctggagagacctgatgacctgcggacagaactcaaccgcaggcgtgtgggcgaggacgcacgagtttttctggagagggcacatgagcgccggctaaactttgagggtcgcaacctcgaccaggactttgctccgcttgcgccacaaactccaaggggtgcccgaacccatacgggtgtcccattggttggcgtgggctgtgccgcgctagcggatcacctccgcgcggcaacttggccgcccatgtttcggccacacctgccagagaagtacgacggggtgcgtgatgagaagatgttagagaagctggcgacgcatgacgtggagactgtcaccatgctcttcgctctggccgacaaatgtgctagagctgccgagggccgtgcatggcactcggcaccacagaccggagttacccagatgggtggctcaggtcccgctacccagagcggtagcaagaagaagaagaaccgcggccatgagaggccgcagtctgctgctccagtcgtcgcggctacgactgggggcccagaacgagcgcaacaagcgcccacgaccacagggaggcaacagtggctcatgccctgtccatcccaacagtcgcaacagcgcatcggagtgccgcgagatcatcaagctcgcgaagcacgaccctcttgtccattctccggagtgggcccacaaccaatgtatccccttgggagcatcacactcccggtaacattcgggaccgaggaaaacttccgcacagagaacgtccagtttaacgtcgcggaggttaacctccccttcaatgccatcattggcaggctggccctgtaccggttcatggccattgcccattacgggtatctggtcctcaagatgtcgtccccggctggggtccttaccgtgcggggtgactgcgctgctgcagtggcggctgtcgagaagctgcacgccctggcggcagagtctgctcgcccggacgatggagggagggacccctcggcttccggaaccaaggcgccttccaaggtgccaaagatgcctgggatccccagggaggtgattgagcaccatctgaagatccaccctgacaccaaaccgatccagatgtctagggaagataggaagcataccgcttttgtaacagtggatgggccttactattatgttgtaatgccctacggtctgagaaacgccttgccgacatttgtactggcgatgagtaagaccttcggggacctgattagggacaagatagagatatatgttgatgacatagtaatcaagactaagagagggtcgactctggtggaaggcttgaccctggtctttgacaacctacgggcgacgcgcacgaagctgaacccagacaaccgcttcatctcacggctggctgagagggcgctacccttcttcaagctcctacggaagtccgacccattctcttggaccgaggaggcagagcaagccttccaagagttgaagcaacaccttgtgtccctgccagtactggtagctccggagccaggggagctgttgtacttgtacattgcagcggttgcagaggcgatgagcatggtgctggtcgtcgaaaggacggagcgacactccaaggggagtcaggaggttcccctaggagaaggtggtggtccgactgccacggaccctgagggcctggggccaaccgtaggggtccggaccatacagaggctggtctactacgtcagcgaggtcctccatgaggcgaaggccaggtaccttgagacgcacaagctgctccatgctgtgcttgttgcatccaggaagttgcgtcactatttccaggcacacagggttgtggtggtgacctccttcccgttaagggccatcctccacaactctaacaccacaggcaacatcgccaagtgggccgcagaacttgcagagttccagcttgacttccagccttgccacgctgtcaagagccaggtcctggctgacttcatcgtggagtggacccctcccccgagtgctccagggggtccggatcccgattcggatcccacaccaacggagcccagggtcccggtcttcaccgagccccactggatgctcttcttcgacgggtccgcccaccagcaaggtggcggtgtgggagtggtcctcgttgatccaagcggagatcaagtcaagtacatggtgcacctcgagttcaaggctaccaacaacatggtagagtacgaggcgctgatcttcggcttgtctgcagccctatccctagggatctgccagctcctcgtgaagggggactcccagctgatcatcaagcagatccgtggggaatgtagctgcaacgagcccaggctcgcagcttacctcctccatgtaaggaagctagaaaaagacttcacggccctggaactgcaacatgttcctcaggctaacaactcagtggcagatgaactctccacgagggcatcaacttgggcacccatgctcgagggcgtcttcgaaagacggttgctgagacctaccgcccaacctgccgagccgggcgaagggggtgagactagcacctcgacgctagcggtcccggtggcgttacatctacagaacccaccaaggattgtgtgtgctacaggaggtcctgcctaccccttagcgccacagccagtatctcagagtggtcccgatgcatggatctccgagatccaggattacctgaaggaaaatattcttcctgaagatcatgtgtccgcagagcgcatagtgcggttggctaagcgatacgcagtggtagaaggggatctctaccgttgtggcgccaacgacattctcatgcggtgcattacccaggaggagggccgtgagttgctcacagagatccatggaggtgagtgcggaagtcattcctcatcccgcacgctggtcggtaaggccttccggcatggcttctactggctaatcgctctccaggatgcaactgagatggtaaagtcctgcaaggcgtgtcagctccatgcaaagcagatacacacacacacaccagctcaagctctgcagatgattccaccctcctggccattcgccgtatggggggtggatatcctgggaccattccccagggccgtcggcgggtaccgttttctcttcgtcgccatcgacaagttcacaaagtggccagaggccaccccagtggtcaatatcacccaaggtgctgttgttgctttcctcaggagcaacggccaggcggagagggcaaacgcagaaatcctcaggagactcaagacacacacctatgactgcttgaaaaagcatggtgcgaattgggtcaacgagcttccgtctgtactttgggggaaccggaccacacccagccgagctaccggggagaccccgttcttcctgctacggcgtgaggacgtgaacttcatcgacgagcgcagatggcgagcggcgatccgaaatgcacggtacaaccaagcgctcaggcgctaccaccaacggttcatgcatagtagggagctcagggtcggggacctagtcctaaagcgagtactgaaccgagaagggctctacaagctctccctcggctgggagggacccttcaaggtgacggaaatatgccgacccgggtgtgtccgccttgccacgactgaaggagtgcctcttcccaatccctggaacatagagcatctccccaaagtcgtgtacaggtccaagtcccagtcgagactacctcctgggggccaggtcaccaattctttcttaggtatactggtatccagcctcgacacgtcgagcctacatcccagggggccaagtactagggagaagttggtaacgctacacacagcgaggacaaataacatacagataagtgatgttaaattaacggttctcagaagtatcttacaaaaccaaaagattattacatccgccttcaagcggaaccctagccttatctctgcaggtacgagctactcggcatcggcagggtcgcgctggaagcgcgcggccaccgtctccacggcgtcttggacgctctcccgggcggcgtcttctgtggcggccaccggaccatcgagcaccggcgccaaggacatggccgggtcatggctccggaagcacgtcagcacgtaatccaccaccgcccggtagagcttgctgccctctgcctccaggcgggcatcgaggatctggtctaggcgacgaaggcattcgacggcggagtccaacaccggtagggcattggagatcgacgctggtagctccgacactgggataggacttatccccagtggcaccagcgccgtgctcgcctcaccggcccactcagctatccgctggaccccagcgtggtgttctgcctggagatcttctagggccttcttggtggcctccgtcacctggggacccggcgccgcctgcgccgcttcggaccggcggatccgctcctccagcttccgctccttctcctccgcctccagctcgtgctcggccagcaacatgccccgcctttcaagcatttcctccctgaaggcgagatccttctcccgcctggcgaggtccgtctcccgcctgtccagggacgtacccttctccttgaggttctcctcggcgagggcaatgtcgttggccttgtcctccagctcttgctgccatttcttcatcctttctatggcctccacttgctggaccccctgggcctccagggtctggtccagggcattcagcttggcccggagctctgttgtgagggcctccctctggctcagggcctcctccctcttggccaccctcttctcccgtcgggacgcctccagctccctggcgaacaccttctggaggtccctcctgtactctttacggccccgcgcgagttcgggtcgctcagaggcgaactccaccgccgctgcagcaccgcctgacgctagcgccgccacagccggacccccagttgggatgtgggaggtcggtggcgctgtcccggcggcggctgggtgcgctccgccaacgccactctcaacagactcctgctgctgagaaccagacccgccgacgggcctagtatctggcggagtagatgcgaccttgggagcaaaaggggaggaagccttggggccttggaccttccagcgaccctggaagcggggcgacctctgctgttgttgttgttgctgctggtgttgttgttgctgctgctgttgcccccccccggagctacctggggcgggggtaccggcagaggcgctgcttgcagcccctttacccttgtccaaggggtggggggccacaacgggggcgctaggagccacgccagtaggctgggggccagtaatccccttcaccaggagttctagctcctcccaggacaggtcggtacccggcccgcgctggatccggccgatgtcattcgggccggtgaacgagcaacacaggcatgccctcctcttcagcggtgcgatccggcgcttcaggaagtcgccgaccacgtgcatcgatgttagaccaccgtttgccaaggtcttgatcctgtccagtacgggcaggaattccggcgccagggacggcttggtcctccagtgcttgcggtcgagggctggtccgttgctcggcagcacgaggcggtcgttggccttggcgctagcgatcacccagttgtcgctccagttttcccaccttgcgccgtcgaaggtggagatgtaggctacagccgaatccggcctcgtctgaaaatagtaggcaccaagatggtccctagccttcccagacttgaccagcacgaagaaatgcggaagatggaagtacacgggaccacccctacgaacatctcgcagaggtggactaagatggccgcttggaggatggagtggggtgtaaggtgctgaagctggagcccgaactcctccaacagcagcaagaagaaaggcgagatcggcagcgcgagcccacaggagaggtaggagacgaataacacgaactccccggtggcgagattgccgaggggagtggcgccggcgcgaatccttccggcgagcaccggcgcgctccat

SEQ ID NO: 61631 - DNA, 137 bp, Zea mays
  Clone ID: MRT4577_156200C.1
ctctctactcgagctccctcatcgctgaatctgggcatacgccgctgctcgccggtctacctggtgtgcgagtttgccggcatccagtactcctcaccacgtcagagacctagtctcaccatcaagacatcgtcgtc

SEQ ID NO: 61632 - DNA, 291 bp, Zea mays
  Clone ID: MRT4577_156201C.1
atcattgtgtcccccaaattaatttcactgtcatccgttggacatatgacttgtaagtataggaagttgaattacacctctgactaaacatcataatagatctatactgattctaattttaatgtgatcacaatcgcacacaacataccatcaggcatcatatagtgcaacatttgaaaccgataactacagagctaactctcattaattccgttacactcactgattattttgaagtgaagaaatctgtttcgcaacctgctttaatgaatttcacatcgcccgccgata

SEQ ID NO: 61633 - DNA, 123 bp, Zea mays
  Clone ID: MRT4577_156202C.1
tcggtccgtgggcatggccaaggccatgctcttcgatgcgaccacggcgctcgagtatagctgagggcagaccttctactgcaggcatccttgaatagagacacgtatggcctagtttgagtg

SEQ ID NO: 61634 - DNA, 606 bp, Zea mays
  unsure (1)..(606): unsure at all n locations
  Clone ID: MRT4577_156203C.1
ggggggtaagaggatttgttatctttgggaacagaacttcctgaacctgagacatagagatacaaaataaacttcatttgtttgcctgtttgtttcagtgaaaagaatggaaacacatctgctgaatgttaaaccgtggaacaaataaaaatgaattaaagcgtacatgtaaaccaatttgccgggttgggccctgaatttcaaggagtttaaaatagtcttctaaagagtcaaagagtctaacaaaatgtcatgctaaatcattctattcatctagaccaaaccttggagatgaaaagaattctcttgaacagctcctttggtgacaagggaattgagggggattggaggggtttccttgtcaccaaacaagtccggaggaaactcaagttcacatgcaacacttgaatcaatacttgctaaccttgcatatagaatattaactaaatataaaagattggataaaatttttgccacatttagtaacaattagaagtttctgttagatgaacaataaactacaagtcagaatgaaaagaatgaaatactatactatactaatgaaagacanaccacttctccacgagggaaagaaacaagatctca

SEQ ID NO: 61635 - DNA, 298 bp, Zea mays
  Clone ID: MRT4577_156204C.1
gcagcttctgcttgctctggggggaaggatagagagagagagcgagagagagatctaagagagatgtctataggtggtcctcgatcaaatatgttggcgagtttcaccagtcaggcagtggaggtgccggtagagctagtagcagcaggcagtcggacgccatctcccaagacgaatgcatcgcacctggtatggcgcttactgaccacttccaacctcgacgcatccgtgcagatcgagcgaccacagtcaccttgtctactcacacaccaaccaggctctactacgacccaggtct

SEQ ID NO: 61636 - DNA, 1218 bp, Zea mays
  Clone ID: MRT4577_156205C.1
caagcactgcgctggtagagcgaacgacggcgagcaaggtgctggcggagcgaagcggacgacggcaacggactacctacgggctggtggcgtagcacggtgcgacggctccccttctaggcaagctcgacgggggcaggtccggctctcccccatcgatggcgcgacggtgtttgggcgatgcggccagtggatggcgcgggccccaagcgaactctgggctgagccagcttccctctccccaagtgacagtgcggtggactctccccctgaccctctccctaggtgctcatggtcagcagtgccaccctcatcccactcctggccacctccatttgttgtgtagtggcgccctcatccccctcccagcctcatgttccccaattgatgtatgtgtgtcaatttagtgatgatgtcgctggcctcatcatctaccggtctcactcggcgttcaaccgcagctaggaatgccctgcatccaaacatcttgatgttgttgttgtaggcactctgcccactggtgtcgatctggaggcgacgatcgatatagacactgggttgtcgttgataatctgcccagattgtagggacgtgagggtgtttgctgccactaccaagtttgggtctaatgagggaaagaaatatttcaagtgtcctaggaagacttatggacatggaacatgtactaggtattggttcgaggaagaatatgtggtgttctttcattataacggatatctaccattgacttcctcaatcgttgcagcagcttcgacaatagaaattcctaagattgtgggaagaattgttagcttagagcaaaatctgaatgaggtgaaggacaaagttggcaacaacagggaaggaatgggaagctgcatttgtcttgtgtgcggatgtgtgaatgtaacactattcctgttgttggccatcgttttgcttgtagttgtagtgctcaagtaggcaaggctgatgaagtatgggcatttctgttgaagttgtgtgttgaaaaacacaatgtattgaatctgttgtatttgcatttgctatgaagtatgggcctttgtgggcattccatgacatttgtcagtggtcataagaaacatccagtatgtaacccagaactatatatatcatgtccatgaattatgggcatcagtatggtactcaaattgcaatagcataattcaaatgtaatagattcactgatacaagttc

SEQ ID NO: 61637 - DNA, 1440 bp, Zea mays
  Clone ID: MRT4577_156206C.1
ggggacacgacctctcggcaagcgtgatatgctcggcctctcgtatcgatgaagtaacgtagcaaaatgcgatacctggtgtgaattgcagaatcccgtgaaccatcgagtttttgaacgcaagttgcgcccgaagccttctggcggagggcacgtctgcctgggcgtgacgcgcgcacacgccgacgcgaaccaaccaggcaaccagatggtagtaggttagctaagctcgtgatcggaggagaggtgccccgcgaccctgacgatgacgatgcctcgccgtgcccttctattcgccgtgtgattgggtacctcgaggccggccgggatacacacacgccgtcggccgctgctagcgaacacgcacagcacacgccatctacgcacaggcacagcaaccgcaaccgcctgccgctcagtgcgtgccatgaagctggatgtcccggcgaggcagcagagcagccaggacgcagagcagagcggcaagacagtggccgcggccgtcctcggcactgaggcgtggagccaaccgaaactccctctcctcctccgcgacgccaacaccgacgacgccctggtgccgccgctcaacttcgccatggtcgacgacggcatcttccgctcgggcctcccggacgccgccaacttccgcttcctgctctccctcaacctgcgctccatcgtgtacctgtgcccggagccgtacccggaggagaacgcgcggttcctgcgcacgaacgggatccgccttcaccagttcgccgtcgaagggagcaagagtggtccgacagtgctggataccatgtcggcgcaggaaccattcgtccacatccccgaagaaacgatccgggaggcgctcaaagttgtccttgacgtgagaaaccagccggtcctcatccactgcaagagaggcaagcaccggactggctgcgtcgtcggatgcctgaggaagctgcagaagtggtgcctgtcctccgtgttcgacgagtacctgcacttcgcggcggcgaaggcgaggaccaccgaccagaggttcatggagctgttcgacgcgtcgagcctgatgcacctgacggcggcctcgcagtactgaccactgaccagagcggggcgagtggttcccgagcggtcccgatcctgccaccatgccgcatcaagcaagccgtttccccctgctgtttccgaagcaactcggcagagaataatgctggaaccatgagtgtgctgtgttgcgtgagtgctgtggttgcttcgtgttcaactggtttcagattctgaactggcacggcctgcattcacttgaatcactgaaaaccgaacatgtctgaactctgaactgaagctgttgctcagttcagacgttcccgccaatcttccgatccgaccagatggcacgaagtcatataccgaccatcatttttcgaaaaaaaaaaaaaaaaa

SEQ ID NO: 61638 - DNA, 400 bp, Zea mays
  Clone ID: MRT4577_156207C.1
gggggaccttgccggaccatttttaattaaaaaaaaggggggcatttggctttggggcaaatccctccaaataccacggggggccgggaaccccatgaccccaagtttaacccgggatcccttgccggcaaggggcgtaataatattccgggaccagcggggggaggccccttgtccaaaggtccccaaccacgggggctaggcggggccccacggcaaaatccccttctccgggaaaaagctcttgggaaagggggcaaaattgaccccccaaatggggggccccgggggggtcctcccccctcagggcctggggggcccagttaaacgagggggaaatccccccagagtattacttactttaaaaatcgccaccccgggcccgcccccggggcccccc

SEQ ID NO: 61639 - DNA, 486 bp, Zea mays
  unsure (1)..(486): unsure at all n locations
  Clone ID: MRT4577_156208C.1
actgtataacttaggaataaagnatttgtagctatctttttaaaaaaaaaaaaaaaaaaaaaaaaaaaaaaaaaaaaaaaaaaaaaaagaaaaaaaaaaaaaaaaaaaaaagggctggacctacgtggggcggtccgactcttacggccccttgcttgcgtccccttacttccatttactggccgcctttttacaaccccctgaccggagttacccggccgtggccctgctaaatcccttgggggaaccccctgatttccccagctggacttccctctttgcgccccccccttttccccgttgcggcccgaaccgaaggccctttcgaaaaggggctccccctctgtggccaacgttaagcgccctgtggggggccctttcgcgcggcgggtcaggtgcgttcgccaagggggtcacccccacttgtcccggtcctttcgccagcttcttagccccggttcctttcttttctcgccatgctttacg

SEQ ID NO: 61640 - DNA, 1013 bp, Zea mays
  Clone ID: MRT4577_156209C.1
gcaggtcggggcgcccaagatcccccctcccactcaacgacttgctgcaaagaggaatacgattcagcttagctcagctccaccaccaccaagaacaagatctcgacgaagcagccagacgacaggcaggtagcaccggggtcaacgcggcagacaaacaggctctcccgctcgtcagctagcagccatgagtaccatgaagttttgccgtgaatgcaacaacatcctgtaccccaaggaggaccgggagcagaaggtgctcctctacgcctgccggaactgcgaccaccaggaggtcgcggacaacaactgcgtgtaccggaacgtggtgcaccacagcgccggggagttcacccaggtgctccaggacgtggccggcgaccccacgctgccccgcaccaagtccgtgcgctgctcctcctgcggccacggcgaggccgtcttcttccaggccactgcgagaggggaggaagggatgacgctcttcttcgtctgctgcaacccgagctgcggcaaccgttggagagaataatggacggttcctctggcgcaacagccaggacgacatgattttttttgcaagattttcatccgacagacctgctgctcccccccatatgagcatgtcaactgattggattggattggattggattgtactactatgttcccagtgcgttcagacatttcaataacttgccggcagggtaaacttccctgtggcctgtgcttcattcatttgcatcaaagaaaggatgagatgaggaaaactttttccatgttcgaatgattccctctgcacctaaaggatgagatgaagaaaggatgagatgaggaaaattaccgtcaggtgaggtggagaaactgtcctcacttcacatgacacagggttatgcaagttctctctctatatttctgttttctttttaccaatttctgcagctcatggttatgcaagtacaaattcttgaacagccacgtgcttaattaaaaaaaaaaaaaaaaaaaaaaaa

SEQ ID NO: 61641 - DNA, 576 bp, Zea mays
  Clone ID: MRT4577_15620C.1
gcggggggcggccggcaaggtacgatacggcccaacgccaccacctccaccacctcgtcctcgatcgacacctcccccgtcgccgtcccgtgactccccgtccagccgtccaggcccagctgcccccgcgacccagacgaccacgtccgcctcggcctgcgcctccccgctacaagagtccgtccgcccgccagcgctgcggtgccagcgagcccctccctcctccactctctgcggcgcggagatcccgtcctttctctgtgcccccggtaccgcgaggagccactgccaggcgccggcgtttttggaactgggcatggaggcggcggcggcgtcggcggcggcggtcgggggttcgggcgctggactgaccaggtggcaggcggcggcgcttgcggcgctggccggctgggtgtgggcggcctccttctacgacctcacgcgccgggcgcgcgcgctcgtccagccgtgggtcacgcgccgggtgcacgccgagacgccggccatcctcaggttccagaagttggagcacaagttgctggacaatttcttctctgtgctgtcatgtgttgtctc

SEQ ID NO: 61642 - DNA, 211 bp, Zea mays
  Clone ID: MRT4577_156210C.1
caccgccatcatgatctgcctggtgctgaccatcttcgctaacctcttccccgcggcctgcaccggcgcacacgaacgcaccttcctggccgtgaagccggacggcgtgcagcggcggctggtgggcgagattgtgcggcgcttcgagaggaagggcttcaagttggtggcgctgaagctggtgccagcctccgagagtgcccgccgcgag

SEQ ID NO: 61643 - DNA, 352 bp, Zea mays
  Clone ID: MRT4577_156211C.1
tgtggatctctgaatgtgtcgctcagaaccagaagtcccgggtccatgacagtgtggtgttcatcttctgagaacccccaccgctatatatgtacaaaatgcctgctttgatgctggcacaattgcttgcctattataaacctgggacttattattatgcccattccctcttgttagatgccgacgaaaaaaaagggcagacctggagtcgatgtattatttgttttgtagtcaaataaaggtgtgattgtctggtacacagaataaaatcttgtctattctttagaataagtgaaattttgtgtattttgggacagaccttcattgtcaatgtgcagtatgctgttaatct

SEQ ID NO: 61644 - DNA, 454 bp, Zea mays
  unsure (1)..(454): unsure at all n locations
  Clone ID: MRT4577_156212C.1
caaactaataaaaatatgtttatcacatgagtgtgtttttaacatcagataatcataactaatgtttacactgttttactcatggcaagaaataattgcactcaacagtcttgacaatgaaaaatccttgctatctcatgtttcatatgtgatactcaactcatggcaacaaaaaactgtaccaagtctaatatttgaatcgcttgttgagagctgatcgctaaacgcgatgtcaaacgcgaataaaaaggtctgtaaaactgatcgaaggccttcgcgctcttcgggagtatagtttgttgtggttggtgntggnttngttgngattggntgggngngggtngggatttgttttaaaatattttgacacccgccgagcgcaaatgctttgcaattgaatcgatcgatgaaggcgcggaaaaagaccgttttgtaatgattcgggaagttgagt

SEQ ID NO: 61645 - DNA, 331 bp, Zea mays
  unsure (1)..(331): unsure at all n locations
  Clone ID: MRT4577_156213C.1
ctcanaattcggttcaaggttttttaataaattttttctacagaacatgctctctcnagcgcttttcagatttaccagggcacnnactannaaatacttcattttctcatttacccattcccaatacccttaaaccattcccccacattcaccacattctgattctcccccaaataatataaatcgaatatgaatggtttcaaacattacaacactttccatatctgcttccataatatcttcatctattgtctacctttaccagaaatggatttcacttttaaatctcccaatctcatcatttccccaaatttcttcatattattcattc

SEQ ID NO: 61646 - DNA, 7256 bp, Zea mays
  unsure (1)..(7256): unsure at all n locations
  Clone ID: MRT4577_156214C.1
gcacagccagtctgttcgtcaaggtcttgctggcattatcgacctcccaagtgaggcaccttccgaagtggatatttcacatggatctgaggatcctannnnnccaacagattcttatcaaatgaatgggattatcaatgaaacacataatggaagacatgcctcagtgtccaaggttgttgaattttgtgcggcactaggtggcaaaacaccaattcacagtatattagtggccaacaatggaatggcagcagcaaaatttatgaggagtgtccggacatgggctaatgatacttttggatctgagaaggcaattcaactcatagctatggcaactccggaagacatgaggataaatgcagaacacattagaattgctgaccaattcgtagaggtgcctggtggaacaaacaataataactacgccaatgttcaactcatagtggggatggcacnnnnnctaggtgtttctgctgtttggcctggttggggtcatgcttctgagaatcctgaactgccagatgcattgaccgcaaaagggatcgnnnnncttggcccacctgcatcatcaatgaatgctttgggagataaggtcggctcagctctcattgctcaagcagccggggtcccaactcttgcttggagtggatcacatgttgaagttccattagagtgctgcttagacgcgatacctgaggagatgtatagaaaagcttgcgttactaccacagaggaagcagttgcaagttgtcaagtggttggttatcctgccatgattaaggcatccnnnnnnnnnnnnnnnnnnnnnnnaagaaaggttcataatgatgatgaggttagagcgctgtttaagcaagtacaaggtgaagtccctggctccccaatatttgtcatgaggcttgcatcccagagtcggcatcttgaagttcagttgctttgtgatcaatatggtaatgtagcagcacttcacagtcgtgattgcagtgtgcaacggcgacaccagaagattattgaagaaggtccagttactgttgctcctcgtgagacagttaaagcacttgagcaggcagcaaggaggcttgctaaggctgtgggttatgttggtgctgctactgttgagtatctttacagcatggaaactggagactactattttctggaacttaatccccgactacaggttgagcatccagtcactgagtggatagctgaagtgaatctgcctgcagctcaagttgctgttggaatgggcatacctctttggcagattccagaaatcagacgtttctatggaatggactatggaggagggtatgacatttggaggaaaacagcagctcttgctacaccatttaattttgatgaagtagattctcaatggccaaagggccattgtgtagcagttagaattactagtgaggacccagatgatggtttcaaacctactggtgggaaagtgaaggagataagttttaaaagcaagcctaatgtttgggcctacttctcagtaaagtctggtggaggcattcatgaatttgctgattctcagtttggacatgcttttgcatatggactctctagaccagcagctataacaaacatgtctcttgcattaaaagagattcagattcgtggagaaattcattcaaatgttgattacacagttgacctcttaaacgcttcagacttcagagaaaacaagatccacactggttggctggatacaagaatagctatgcgtgttcaagctgagaggcccccatggtatatctcagtggttggaggtgctttatataaaacagtaaccaccaatgcagccactgtttctgaatatgttagttatctcaccaagggccagattccaccaaagcatatatcccttgtcaattctacagttaatttgaatatagaagggagcaaatacacaattgaaactgtaaggactggacatggtagctacaggttgagaatgaatgattcaacagttgaggcgaatgtacaatctttatgtgatggtggcctcttaatgcagttggatggaaacagccatgtaatttatgcagaagaagaagctggtggtacacggcttcagattgatggaaagacatgtttattgcagaatgaccatgatccatcaaagttattagctgagacaccctgcaaacttcttcgtttcttggttgctgatggtgctcatgttgatgcggatgtaccatacgcggaagttgaggttatgaagatgtgcatgcctctcttgtcacctgcttctggtgtcattcattgtatgatgtctgagggccaggcattgcaggctggtgatcttatagcaaggttggatcttgatgacccttctgctgtgaaaagagctgagccatttgatggaatatttccacaaatggagctccctgttgctgtctctagtcaagtacacaaaagatatgctgcaagtttgaatgctgctcgaatggtccttgcaggatatgagcacaatattaatgaagtcgttcaagatttggtatgctgcctggacaaccctgagcttcctttcctacagtgggatgaacttatgtctgttctagcaacgaggcttccaagaaatctcaagagtgagttagaggataaatacaaggaatacaagttgaatttttaccatgggaaaaacgaggactttccatccaagttgctaagagacatcattgaggaaaatctttcttatggttcagagaaggaaaaggctacaaatgagaggcttgttgagcctcttatgaacctactgaagtcatatgagggtgggagagagagccatgcacattttgttgtcaagtctcttttcgaggagtatcttacagtggaagaacttttcagtgatggcattcagtctgacgtgattgaaacattgcggcatcagcacagtaaagacctgcagaaggttgtagacattgtgttgtctcaccagggtgtgaggaacaaagctaagcttgtaacggcacttatggaaaagctggtttatccaaatcctggtggttacagggatctgttagttcgcttttcttccctcaatcataaaagatattataagttggcccttaaagcaagtgaacttcttgaacaaaccaaactaagtgaactccgtgcaagcgttgcaagaagcctttcggatctggggatgcataagggagaaatgagtattaaggataacatggaagatttagtctctgccccattacctgttgaagatgctctgatttctttgtttgattacagtgatcgaactgttcagcagaaagtgattgagacatacatatcacgattgtaccagcctcatcttgtaaaggatagcatccaaatgaaattcaaggaatctggtgctattactttttgggaattttatgaagggcatgttgatactagaaatggacatggggctattattggtgggaagcgatggggtgccatggtcgttctcaaatcacttgaatctgcgtcaacagccattgtggctgcattaaaggattcggcacagttcaacagctctgagggcaacatgatgcacattgcattattgagtgctgaaaatgaaagtaatataagtggaataagtgatgatcaagctcaacataagatggaaaagcttagcaagatactgaaggatactagcgttgcaagtgatctccaagctgctggtttgaaggttataagttgcattgttcaaagagatgaagctcgcatgccaatgcgccacacattcctctggttggatgacaagagttgttatgaagaagagcagattctccggcatgtggagcctcccctctctacacttcttgaattggataagttgaaggtgaaaggatacaatgaaatgaagtatactccttcgcgtgaccgccaatggcatatctacacactaagaaatactgaaaaccccaaaatgttgcatagggtgtttttccgaactattgtcaggcaacccaatgcaggcaacaagtttacatcggctcagatcagcgacgctgaagtaggatgtcccgaagaatctctttcatttacatcaaatagcatcttaagatcattgatgactgctattgaagaattagagcttcatgcaattaggacaggtcattctcacatgtatttgtgcatactgaaagagcaaaagcttcttgacctcattccattttcagggagtacaattgttgatgttggccaagatgaagctaccgcttgttcacttttaaaatcaatggctttgaagatacatgagcttgttggtgcaaggatgcatcatctgtctgtatgccagtgggaggtgaaactcaagttggactgtgatggccctgcaagtggtacctggagagttgtaactacaaatgttactggtcacacctgcaccattgatatataccgagaagtggaggaaatagaatcgcagaagttagtgtaccattcagccacttcgtcagctggaccattgcatggtgttgcactgaataatccatatcaacctttgagtgtgattgatctaaagcgctgctctgctaggaacaacagaacaacatattgctatgattttccgctggcctttgaaactgcactgcagaagtcatggcagtccaatggctctactgtttctgaaggcaatgaaaatagtaaatcctacgtgaaggcaactgagctagtgtttgctgaaaaacatgggtcctggggcactcctataattccgatggaacgccctgctgggctcaacgacattggtatggtcgcttggatcatggagatgtcaacacctgaatttcccaatggcaggcagattattgttgtagcaaatgatatcactttcagagctggatcatttggcccaagggaagatgcattttttgaaactgtcactaacctggcttgcgaaaggaaacttcctcttatatacttggcagcaaactctggtgctaggattggcatagctgatgaagtaaaatcttgcttccgtgttggatggtctgacgaaggcagtcctgaacgagggtttcagtacatctatctgactgaagaagactatgctcgcattagctcttctgttatagcacataagctggagctagatagtggtgaaattaggtggattattgactctgttgtgggcaaggaggatgggcttggtgtcgagaacatacatggaagtgctgctattgccagtgcttattctagggcatatgaggagacatttacacttacatttgtgactgggcggactgtaggaataggagcttatcttgctcgacttggtatacggtgcatacagcgtcttgaccagcctattattttaacagggttttctgccctgaacaagctccttgggcgggaagtgtacagctcccacatgcagctgggtggtcctaagatcatggcgaccaatggtgttgtccacttgaccgtttcagatgatcttgaaggtgtttccaatatattgaggtggctcagctatgttcctgcaaacattggtggacctcttcctattaccaaacctttggaccctccagatagacctgtcgcatacatccctgagaacacatgcgatccgcgtgcagccatccgtggtgtagatgacagccaagggaaatggttgggtggtatgtttgacaaagacagctttgtggagacatttgaaggatgggcaaaaacagtggttactggcagagcaaagcttggaggaattcctgtgggtgttatagctgtggagacacagaccatgatgcagctcatccctgctgatccaggtcaacttgattcccatgagcgatctgttcctcgggctggacaagtgtggttcccagattctgcaaccaagacagctcaggcattattagacttcaaccgtgaaggattgcctctgttcatcctggctaactggagaggcttttctgggggacagagagatctctttgaaggtattcttcaggctgggtcagcaattgttgagaaccttaggacatataatcagcctgcgtttgtctacattcctatggctggagagcttcgtggaggagcttgggttgtgatcgatagcaaaataaatccagaccgcattgagtgttatgctgagaggactgccaaaggtaatgtgctcgaacctcaagggttaattgaaattaagttcaggtcagaggaactccaagactgtatgggcaggcttgacccagagttgataaatctgaaagcaaaacttcaagatgcaaagcatggaaatggaagtctaccagacatagaatcgcttcagaagagtatagaagcgcgtacaaaacagttgttacctttatatacccagattgcagtacgctttgctgaattgcatgatacttccctgagaatggcagctaaaggcgtgattaagaaagttgtagactgggaagaatcacgctctttcttctataaaaggctacggaggaggatctctgaagatcttcttgcaaaagaaataagacgaataattggtgacaacttcacgcaccaatcggcgatggagcttatcaatgaatggtacctggcttctcaggccacaacaggaagcactgctggatgggatgacgatgatgcttttgttgcctggaaggacagtcctgaaaactacaaggggcatatccaaaagcttagggctcaaaaagtatctcagtcgctctctgatcttgctgactccagttcagatctacaagcattctcgcagggtctttctacactattagataagatggatccttctcagagagtgaagtttgttcaggaagtcaagaaggttcttggatgatgatatgaacacatccaacacaatgtgtcgcatgtcacatcttattgttctagtacatacatagaaggatattgcttggccttgattgatcatgtctgatttaagtcgatcattattttcttgaaacttcctttcggacgtggtgctatggttgatgaatttggatgtgtgcgttctgccaggtgtaagcccaaaggtttagacagaccgagttaaggttagcaagagcacgagtgaacctgttctggttttgcagtggttcagtaaggcagaaagttgtttcaccgtagttctgagatgtattaccagcggcgccatgctgtacttttagggtgtataatgcggatacaaataaacaatttagcggttcattaaagtttgaactcaaataatatgttctttgtaagcatatgtaccgtacctctacgtgaaataaagttgttgaattagcattcga

SEQ ID NO: 61647 - DNA, 8518 bp, Zea mays
  Clone ID: MRT4577_156215C.1
aattcggcacgaggctcgtcagatccgcgcgccgcacgccgatctgcgccacctccggaattttgctctctttttatggcactgtgcttttgagaaggccttcaattgtgctgtctgggccacggaacgacaatgtcacagcttggattagccgcagctgcctcaaaggccttgccactactccctaatcgccagagaagttcagctgggactacattctcatcatcttcattatcgaggcccttaaacagaaggaaaagccatactcgttcactccgtgatggcggagatggggtatcagatgccaaaaagcacagccagtctgttcgtcaaggtcttgctggcattatcgacctcccaagtgaggcaccttccgaagtggatatttcacatggatctgaggatcctagggggccaacagattcttatcaaatgaatgggattatcaatgaaacacataatggaagacatgcctcagtgtccaaggttgttgaattttgtgcggcactaggtggcaaaacaccaattcacagtatattagtggccaacaatggaatggcagcagcaaaatttatgaggagtgtccggacatgggctaatgatacttttggatctgagaaggcaattcaactcatagctatggcaactccggaagacatgaggataaatgcagaacacattagaattgctgaccaattcgtagaggtgcctggtggaacaaacaataataactacgccaatgttcaactcatagtggggatggcacaaaaactaggtgtttctgctgtttggcctggttggggtcatgcttctgagaatcctgaactgccagatgcattgaccgcaaaagggatcgtttttcttggcccacctgcatcatcaatgaatgctttgggagataaggtcggctcagctctcattgctcaagcagccggggtcccaactcttgcttggagtggatcacatgttgaagttccattagagtgctgcttagacgcgatacctgaggagatgtatagaaaagcttgcgttactaccacagaggaagcagttgcaagttgtcaagtggttggttatcctgccatgattaaggcatcctggggaggtggtggtaaaggaataagaaaggttcataatgatgatgaggttagagcgctgtttaagcaagtacaaggtgaagtccctggctccccaatatttgtcatgaggcttgcatcccagagtcggcatcttgaagttcagttgctttgtgatcaatatggtaatgtagcagcacttcacagtcgtgattgcagtgtgcaacggcgacaccagaagattattgaagaaggtccagttactgttgctcctcgtgagacagttaaagcacttgagcaggcagcaaggaggcttgctaaggctgtgggttatgttggtgctgctactgttgagtatctttacagcatggaaactggagactactattttctggaacttaatccccgactacaggttgagcatccagtcactgagtggatagctgaagtgaatctgcctgcagctcaagttgctgttggaatgggcatacctctttggcagattccagaaatcagacgtttctatggaatggactatggaggagggtatgacatttggaggaaaacagcagctcttgctacaccatttaattttgatgaagtagattctcaatggccaaagggccattgtgtagcagttagaattactagtgaggacccagatgatggtttcaaacctactggtgggaaagtgaaggagataagttttaaaagcaagcctaatgtttgggcctacttctcagtaaagtctggtggaggcattcatgaatttgctgattctcagtttggacatgcttttgcatatggactctctagaccagcagctataacaaacatgtctcttgcattaaaagagattcagattcgtggagaaattcattcaaatgttgattacacagttgacctcttaaacgcttcagacttcagagaaaacaagatccacactggttggctggatacaagaatagctatgcgtgttcaagctgagaggcccccatggtatatctcagtggttggaggtgctttatataaaacagtaaccaccaatgcagccactgtttctgaatatgttagttatctcaccaagggccatattccaccaaagcatatatcccttgtcaattctacagttaatttgaatatagaagggagcaaatacacaattgaaactgtaaggactggacatggtagctacaggttgagaatgaatgattcaacagttgaagcgaatgtacaatctttatgtgatggtggcctcttaatgcagttggatggaaacagccatgtaatttatgcagaagaagaagctggtggtacacggcttcagattaatggaaagacatgcttgttgcagaatgaccatgatccatcaaagttattagctgagactccctgcaaacttcttcgctttttggttgctgatggtgctcatgttggtgcggatgtgccatatgcggaagttgaggttatgaagatgtgcatgcctctcttgtcacctgcttctggtgtcattcattgtatgatgtctgagggccaggcgttgcaggctggtgatcttatagcaaggctggatcttgatgacccttctgctgtgaaaagagctgaaccatttgatggaatgtttccactaatggacctccctgttgctgcctctagtcaagtacacaaaagatatgccgcaagtttgaatgctgctcgaatggtccttgcaggatatgagcacaatattaatgaagtcgttcaagatttggtatgctgcctggacaaccctgagcttcctttcctacagtgggatgaacttatgtctgttctagcaacgaggcttccaagaaatctcaagagtgagttagaggataaatacaaggaatacaagttgaatttttaccatggaaaaaacgaggactttccatccaagttgctaagagacatcattgaggaaaatctttcttatggttcagagaaggaaaaggctacaaatgagaggcttgttgagcctcttatgaacctactgaagtcatatgagggtgggagagagagccatgcacattttgttgtcaagtctcttttcgaggagtatcttacagtggaagaactttttagtgatggcattcagtctgacgtgattgaaacattgcggcatcagcacagtaaagacctgcagaaggttgtagacattgtgttgtctcaccagggtgtgaggaacaaagctaagcttgtaacggcacttatggaaaagctggtttatccaaatcctggtggttacagggatctgttagttcgcttttcttccctcaatcataaaagatattataagttggcccttaaagcaagtgaacttcttgaacaaaccaaactaagtgaactccgtgcaagcgttgcaagaagcctttcggatctggggatgcataagggagaaatgagtattaaggataacatggaagatttagtctctgccccattacctgttgaagatgctctgatttctttgtttgattacagtcggcacgctgttcagcagaaagtgattgtgacatacatatcacgattgtaccagcctcatcttgtgaaggatagcatccaaatgaaattcaaggaatctggtgctattgttttttgggaattttctgaagggcatgttgatactagaaatggacatggggctattcttggtgggaagcgatggggtgccatggtcgttctcaaatcacttgaatctgcgtcaacagccattatggctgcattaaaagattctgtacagtacaacaactctgagggcaacacaatgcacattgtgttattgaatgctgaaactgaaagtaatataagtgggacaagtgatgatcaagctcaacataagatggaaaagcttagcaagatactgaaggatactagcgttgcaagtgatctccaagctgctggtttgaaggttataagttgcattgttcaaagagatgaagctcgcatgccaatgcgccacacattcctctggttggatgacaagagttgttatgaagaagagcagattctccggcatgtggagcctcccctctctacacttcttgaattggataagttgaaggtgaaaggatacaatgaaatgaagtatactccttcgcgtgaccgccaatggcatatctacacactaagaaatactgaaaaccccaaaatgttgcatagggtgtttttccgaactattgtcaggcaacccaatgcaggcaacaagtttacatcggctcagatcagcgacgctgaagtaggatgtcccgaagaatctctttcatttacatcaaatagcatcttaagatcattgatgactgctattgaagaattagagcttcatgcaattaggacaggtcattctcacatgtatttgtgcatactgaaagagcaaaagcttcttgacctcattccattttcagggagtacaattgttgatgttggccaagatgaagctaccgcttgttcacttttaaaatcaatggctttgaagatacatgagcttgttggtgcaaggatgcatcatctgtctgtatgccagtgggaggtgaaactcaagttggactgtgatggccctgcaagtggtacctggagagtcgtaactacaaatgtcactagtcacacctgcaccattgatatctaccgagaagtggaagatacagaatcgcagaagttactataccattcagctacttcgtcagctggtccaatgcatggtgttgcactgaataatccttatcaacctttgagtgtgattgatctaaagcgctgctctgctaggaacaacagaacaacatattgctacgattttccgctggcatttgaaactgcactgcagaagtcatggcaatccaactgttctagtgttcctgaaggcagtgaaaatagtaaatcctacgtgaaatcaactgagctggtgtttgctgaaaaacatgggtcctggggcactcctataattcccatggaacgtcctgctgggctcaatgacattggtatggtcgcttggatcttggaaatgtcaacacctgaatttcccaatggcaggcagattattgttgtagcaaatgatattactttcagagctggatcattcggcccaagggaagatgcattttttgaagctgtcaccaacctggcttgcgaaaggaagcttccccttatatacttggcagcaaactctggtgctaggattggcatagctgatgaagtgaaatcttgcttccgtgttgggtggtctgatgaacgcagccctgaacgagggtttcagtacatctatctgactgaagaagactatgctcgtattagctcttctgttatagcacataagctgcagctagataatggtgaaattaggtggattattgactctgttgtgggcaaggaggatgggcttggtgttgagaacatacatggaagtgctgctattgccagtgcttattctagggcatatgaggagacatttacacttacatttgtgactgggcggactgtaggaataggagcctatcttgctcgacttggtatacggtgcatacagcgccttgaccagcctattattttaacagggttttctgccctgaacaagctccttgggcgagaagtgtacctgcccgggcggccgctcgagattaagaaagttgtagactgggaagaatcacgctctttcttctataaaaggctacggaggaggatctctgaagatcttcttgcaaaagaaataagacgaataattggtgacaacttcacgcaccaatcggcgatggagcttatcaatgaatggtacctggcttctcaggccacaacaggaagcactgctggatgggatgatgatgatgcttttgttgcctggaaggacagtcctgaaaactacaagggatatatccaagagctaagggctcaaaaagtatctcagtcgctctctgatcttgctgactccagttcagatctacaagcattctcgcagggtctttctacactattagataagatggatccttctcagagagtgaagtttgttcaggaagtcaagaaggttcttggatgatgatatgataccaacacatccaacacaatatgcgcatgctacatgttatttttcaagtacatacatagaaggatattgcttggccttgattgatcatgtctgatctaagtcgatcattattttcttgaaacttcctttcggacgtggtgctatggttgatgaatttggatgtgtgcgttctgccaggtgtaagcccaaaggtttatacagaccgagttaaggttaggaagagcacgagtgaacttgttctggttttgcagtggttaaggcagaaagttgtttcactgtagttctgagatgtattaccagcggcgctgtaattttagggtgtataatgcggatgctagtaaacaattgagtggttcattaaattttgaactcgaataatatgtttctgtaggcacatgtgacgtaccactacatgaaataaatgtcgctgaactagggcacctccttgggcgggaagtgtacagctcccacatgcagcttggtggtcctaagatcatggcgaccaatggtgttgtccacctcactgttccagatgaccttgaaggtgtttccaatatattgaggtggctcagctatgttcctgcaaacattggtggacctcttcctattaccaaacctctggaccctccagacagacctgttgcttacatccctgagaacacatgcgatccacgtgcagctatctgtggtgtagatgacagccaagggaaatggttgggtggtatgtttgacaaagacagctttgtggagacatttgaaggatgggcaaaaacagtggttactggcagagcaaagcttggaggaattcctgtgggcgtcatagctgtggagacacagaccatgatgcagatcatccctgctgatccaggtcagcttgattcccatgagcgatctgtccctcgtgctggacaagtgtggttcccagattctgcaaccaagaccgctcaggcattattagacttcaaccgtgaaggattgcctctgttcatcctggctaattggagaggcttctctggtggacaaagagatctctttgaaggaattcttcaggctgggtcaacaattgtcgagaaccttaggacatataatcagcctgcttttgtgtacattcctatggctggagagcttcgtggaggagcttgggttgtggtcgatagcaaaataaatccagaccgcattgagtgttatgctgaaaggactgccaaaggtaatgttctcgaacctcaagggttaattgaaatcaagttcaggtcagaggaactccaagactgtatgggtaggcttgacccagagttgataaatctgaaagcaaaactccaagatgtaaatcatggaaatggaagtctaccagacatagaagggattcggaagagtatagaagcacgtacgaaacagttgctgcctttatatacccagattgcaatacggtttgctgaattgcatgatacttccctaagaatggcagctaaaggtgtgattaagaaagttgtagactgggaagaatcacgctcgttcttctataaaaggctacggaggaggatcgcagaagatgttcttgcaaaagaaataaggcagatagtcggtgataaatttacgcaccaattagcaatggagctcatcaaggaatggtaccttgcttctcaggccacaacaggaagcactggatgggatgacgatgatgcttttgttgcctggaaggacagtcctgaaaactacaaggggcatatccaaaagcttagggctcaaaaagtgtctcattcgctctctgatcttgctgactccagttcagatctgcaagcattctcgcagggtctttctacgctattagataagatggatccctctcagagagcgaagtttgttcaggaagtcaagaaggtccttgattgatgataccaacacatccaacacaatgtgtgcatgtcacatctttttgttctagtacatacatagaaggatattgcttggtcttgattgatcatgtctgatttaagtcgactattatttcttggaattttcttttggacctggtgctatggttgatggatgtatattggatatgtgcgttctgccaggtgtaagcacaaaggtttagacagaccgagagcaagagcgagtgaacctgttctggttttgcagtggttcagtaaggcagaaagttgttaaaccgtagttctgagatgtattaccagtggcgccatgctgtacttttagggtgtataatgcggatacaaataaacaatttagcggttcattaaagtttgaactcaaataacatgttctttgtaagcatatgtaccgtacctctacgtgaaataaagttgttgaattagcattcgaaaaaaaaaaaaaaaaaaaaaaaaaaaaaaaaaaaaaaaaaaaaaaaaaaaac

SEQ ID NO: 61648 - DNA, 274 bp, Zea mays
  Clone ID: MRT4577_156216C.1
ggcaagttcaagcacggtcacggcaagttcaagcatggcaagcacgggcacggcatgttcggcggcaagttcaagaagtggaagtgatgcgctctccatggttgatcataactgaacttgtatgcaagcttccagcacatctgttgcctggaacgcctttgcattgtatctagtagggtgatcacttactcatccttggtctatattgccgtgagcttgtggcgagtgacatgactgctaataagtgacataataaccatttactgtcttgctg

SEQ ID NO: 61649 - DNA, 270 bp, Zea mays
  Clone ID: MRT4577_156217C.1
actaatttgtgcgtcatcgacgtggtgacgtctggatgatacacgtcagcggccatggcaaaggggatgctggcggagctgatgaaccaccccgagacgctgcgcaaggtggtcgaggagatcgacgctacggtcggaacgcagaaggatcgcaagcgaggcagacctgacgcagctgtcgtacctacatggcggtatacacggggacgctgtgtctgcacccggcggaggccatcgcgcacctacagtcgacggaggagatgttggtgc

SEQ ID NO: 61650 - DNA, 720 bp, Zea mays
  unsure (1)..(720): unsure at all n locations
  Clone ID: MRT4577_156218C.1
aaaaaaaaaaatctttgcgcttggggcaatgacgcagctagtgaggaataccgaggcgcgtcaattgctggttgaaaactatttccaaaccccctctttggctctccctccgtggagggccactgagaatttctgaaagggctccctctccttcgggcgagggtaaagccctacagagtacaccagactgccgctgctacctgccttccttccttcctcttcntccttccgccgcccgcctcctccccctcgcccacccgccatggcccatcaccacctcctccctttactcctcctcctcctcctgcccctcttcgcctccgccgcggccaccggcgacgaggcgcacctctccgcggtgatcggcgacacaggcctggccttcgccaaggacgtgctgatcggcgaggcggtgcggtcgctcaccccgctccgcctccccggggcggagaaggccttccgcgtgcccttcctcggcggcatccgcgccgccgtctccaacatcacgctcttccacctcgacgtgggggataactccgtcgtccgcctcggcgactcggccctcgtcgtcgtcgcctccggcattaccgccaacatcagcatggcctggagctactcctactactcctggtacttccccgtggagatctccgacagaggcaccgcttcgatcctggttcaggaatggaagttgggataaccatggaaatcaagaattat

SEQ ID NO: 61651 - DNA, 285 bp, Zea mays
  unsure (1)..(285): unsure at all n locations
  Clone ID: MRT4577_156219C.1
agaaagcccgcgcgcaggcaccaacccttaattcctttccccgtttcacccaaactcttggtttccaaccacaatccttcacctcgggcggtctttaataaatcagggccggtcctgctactnactcaccctctttaattcgatctccatcatctataactatcatttcccttctaagaccaaatatctcttttattacaccattactaaagataactaattcccgcctcttctaatataaaacactatacattctatatctccattacaatataactacctctt

SEQ ID NO: 61652 - DNA, 660 bp, Zea mays
  unsure (1)..(660): unsure at all n locations
  Clone ID: MRT4577_15621C.1
aaaaaaaaaaaaaaaaaaaaaaaaaatagctcacaagctttcaaccgtgaagaatgccgatcaaatcgcggtagtcgatgggggtagcatagctgaaattgggacacatgatgagctgatcaacaagggtggcccatactcacgacttgtgaaattgcagaagatggtgagctacatagatcaagaaactgaccaatttagggcctcctcagcagcaaggaccagtgccagccgtctcagcatgtccagagcaagtcccatgccactcacaccaggtgtttcaaaggaaaccgagtcatatgtttccccacctgcaccgtctttctccaggcttcttgcaatgaatgcaccagagtggaagcaagcactcataggcagtatctctgcattggtgtatggttccttgcagcccatctatgctctaaccatcggaggaatgattgctgcattctttgttcaggaccacaatgagatgaatgcaatcatcagccgctatgcattgatcttttgctcactgtccctggtatccattgctgttaatctattgcaacactacaattttgcctacatgggggagcatcttgttaggcgtatccgagtccaagtggctggagaagatcttaacctttgaggcagcatggntttgatgaggacacaaat

SEQ ID NO: 61653 - DNA, 635 bp, Zea mays
  Clone ID: MRT4577_156220C.1
gataccgggttcttgtatccactagtaactggtgcgcgcttcgcgcgcattggaaaaaaatattatataagttagcagacacggttacagtgaaatggcagaagaactgaatctaaaaaaataggcttcaacttgggttcataaatagaacaaaacttggacgatgcaatacttgtcttgtcaggaaattcaaaaggactctcagggtggtacatgtagaatgccacaagcctctgcttaatattcctttttgacgctaggtatgccgtttcaccctcttgcttgaagacattgtcagcagcaccgagtagcaggctcacctctccggcagtttgacctccgccttgtgcagttgtgcttgacggggctccgtgcagccccgacgccaatgctgagctcccgctcgacagactcgaggtcatccgctatcagtgttgtcgcctcagtctgtgccgccgcaacccaagcgcggctcgacagatgcccttaacggagagcgccatgctgcagccgcgcgctcttagcgcctccggtttctccggcgtcaagatctgctctgcggccgacgccggctccttcgcgtcttgctccggcatgcggacctcatccaccaggacggcggcctccctcggcca

SEQ ID NO: 61654 - DNA, 653 bp, Zea mays
  Clone ID: MRT4577_156221C.1
ggtctctccctttccgcctccacttcctcgcgagcctctctcttctcctgctcctcacagcggtggcgtcggcgatgcagatggcggccgcgacaaccgatgctccggtggcagctgcgccgcacccacatccccatgcccatggcccacgagtaccgcacggtcacgggcacccgcaccctcaccaccacatgccgcagccgcggtgggtggtacttccttacccgccgccgccgccgctatggtggccgcgccgccccctcccacaccgcagtatgtgaagcatttcgcgccgcaggcatcggtgacgccgcctccgccatcggctggatccggcgggaacggaggtgacgagaaccggacgatctgggtcggcgacctccagtactggatggacgagaactatctccacagctgcttcggccccagcggcgaggtggtgacgattaaagttatccgcaatagacattccggagtttctgagggttatggttttgtagagttctgttcccatgcatcagcagagaaagcacttcagaattttgctggtcatgtaatgcctaatactgaccgagcttttaagttaaattgggcatcgtatagtgttggagaaaaacgctctgaacttgcttctgatcactcaatttttgttg

SEQ ID NO: 61655 - DNA, 125 bp, Zea mays
  Clone ID: MRT4577_156222C.1
tcgagacgctctactaatgattagcaacacacatataatagagaattgttcaggatttaaaactgtaatcaaaatggtatcattttttcgacacaacatacgagcatgcgaaagggggatctgct

SEQ ID NO: 61656 - DNA, 418 bp, Zea mays
  Clone ID: MRT4577_156223C.1
cacttgctttttttttttttttgtttgcttgattgttttttttttttatctgtttttttttgtttgttgttgttgttttgtttttactttttgtcattatcttgtgtttttgtatgcaagcatctgctcttgcaagtagcggcaggattcaccatggctaggtggctcagcgcagaaaagaactgttgttgctgaagcgccgcgaaggcaagaaaagaaagacgcccaaaggaggtgggggcaaaagagcaagggggggggggaagacacacggcgggggggggaggagaggctggggggggggacagggagggggggcgaagcccacgggggaacgggggggggggaacggaggagggggggactaagagcaagcgagcaccgcccaataatgaacgcatgggggagcagctcacaa

SEQ ID NO: 61657 - DNA, 579 bp, Zea mays
  Clone ID: MRT4577_156224C.1
gcgacggcgctcggttcttggcgggttacttctagatttgatggacgagggggctgtgcctcggcccgcatatatagtctgtcgatcgagttcttcggactttggacaggaagtccatggcggactcaaggagaactgaccggagccccacaggacagagatgctaactgatcggctgggcaagttgggccggcaggtgccccacacgctcgaggagatggggagagaagctgggccgcagccagggaaacggccctttcttcttttccatttttcagttttaggtttcaaatcccaatcaaatttcaaattcaaacaatcgaatgattggaggatttatttactctggggctgtttggaatgtaatgaagctcctttgttgtcattagactggtagactttgtccaactgagcccagcctgtttagtatttggattttatcttgtggttgatttaacttaatttgatttatcttctagtttatttactccaatgctctagactgttattggcattatgtagcataataaacattgccatgtttgtccgggcacttgacacaataaagaaatctgcatc

SEQ ID NO: 61658 - DNA, 1380 bp, Zea mays
  Clone ID: MRT4577_156225C.1
gcaaatgctcttgctgaaaaatgggataaaattcccatcgtgcttgccggtgatttcaacagcacacctgatgtatagctttgttgcttcttgacacatgattttttatattacaagaaaactatgtgtagcaagttttttgttacacaactgcaatacaaacacagcaatattcagaagtgatatactataaattagttgtatgtccatggtagtgtggtgcgaataggccatcttgagtttcttatgatatctaatttgaagaaagtgggtgccttttgatatgttactcacgttttttatttcttctgttattttgttttcttattttatgagagcagagtgctatctacaagttcttgtcgacaatgaagctgaacatttctttgcacgatagaaggcatttatctggacttgatagcactgaatttgggtatgagctttgtacccacgcgtccgcccacgcgtccgctgatgaagaagtgagaaatgccacagggtattcaaatgtcatggtggctgaacatccactgaagctcagtagttcatatgccatgttaaagggaaattcaaacaataggggtcttcatggtgaacccttggcaacttcctaccacaagaagtttcttggaactgttgattacctgtggcacactcatggaattgaatgctccagagttttggacacgttacctattagtgttttgaagagaacgaggggtcttccaaccagggaaattggcagtgatcatttgcccattgttgctgaatttgctttcacggaatcagttgaagatgattccgatgaagatgatgaatctgagcaagatgacgaatctgagtaagaaatgagcgaagcgcaatacttatttttctcctcagacagtgagtcccgttgaagtgactggagtgaatagtgattcagcatttcagttggttaaaaaggtttgaggtaagttattcaagaacagggagtatggtgcaccagagactacattgcatctttcatggtccataaacagaatatctccggcttcattgcacaatgaatttctcggtatctttgcccgtgtactgtatgggatcctgctgttcacagaatcaagtatcacattgagcagaatcaagtaccacattgagcagaatcaagtacgtgcttctgtgtgaaaggcaagattgcaacgaagtgctctctgcaagtttgtacgaactaattagtacttacgaagaacggtcaatttagtggacatatttattccgtatcagatggttaactacaattttaaaaaaactggcaaacggccctgtcccattttccattaaaaaatatagaaaacaccatgacaaactcataaagggttacaacctaaaaaaaaaaaa

SEQ ID NO: 61659 - DNA, 517 bp, Zea mays
  Clone ID: MRT4577_156226C.1
ggataggtaaataaagtatgcataatagagttaagctttcagaggcaatattatccctgactagcaaaggactcgctcagaacgggtgccaataggccatcctgctattagaaggtataacacatgcatcatactagatacgcatgtcagactttgcatctgaggcaaagtagcaagcttatggagcacatatggaagtcctagaagcgcctcacaaaagtcaaatgcttcattcggtccaagtgacttgttaacgcactcatgcctacaggactgacgcggatctctataggaaagcctactgagagtgcaccctggagatcagagattttgacacgcacgaagaataactctttatccaccttaaaagtatcctttccccaagtcaccaccttcttccgcatctttgacatacggggatcatcaagatcctgaacctcagattccagtacccaaaccttgaagagcttgacacaaatttcactacatccggaacgcctaccaaagcacatccgga

SEQ ID NO: 61660 - DNA, 306 bp, Zea mays
  Clone ID: MRT4577_156227C.1
ccggccgggatccctctccgtctccctaccgctcccgtcccgaccgcagaagcatctacataccccgccagccgattagcgccaacagaccccacacaccgggggagcatttccgcgcccacaaggagagagaggagcagcccccacaagcacaagccaggcaagccgaatacaaacacccccaccaaccaccccgccggcatggcaatcaccgccgacaaggacaacccaactgactgctggaaggacggcaaccaccacgcagacctgcgcaacaaaaccaaatacctcccactccacaacaag

SEQ ID NO: 61661 - DNA, 711 bp, Zea mays
  unsure (1)..(711): unsure at all n locations
  Clone ID: MRT4577_156228C.1
tttggattgaagggagctctgagtccccgttgaggaggcacaaaggccgggtctattccaaccctttccctctctaatcggtacacagaccggtcgaggcttctccttaatcacttgggtcactaagagcccgcaaggatcaccacacacttaggtgtctcttgtcagctttacaaagcacttagaagaatgagaatagggaggagaaagcaatccaagcaacaagagcaacaaaagaacacaaaacatcctctctcaagtcattaagcgattgagttgattttgaggcttggagatgatttgatctttggaatgtgtcttggagtgaatgctattgctcttgtattgaatgtgaagttcagaaaacttggatggcttgaatggaggtgcttgggggtatttatagccccaaccactattctagtcgttggttgtcgatgacacatcagatagtcncggtggtgcacctgacatggcactgttcagtatccggtgcgtgccacgtcagctcccgttagggtttgggaagtggttgacaatttgaagtcctttgtcttctagctgcaccagacatgtccnggtgcgttctgacttttctgctctgacttctgactgtgcactgttcacttttgcagtcgaccattgctctgttggctcaccggacactgtccggtgcacaccggacagtctggtgaattatagcggagcgcc

SEQ ID NO: 61662 - DNA, 507 bp, Zea mays
  Clone ID: MRT4577_156229C.1
aagaagatcagtactgatcgatcagcaactcgatcgttctcagagggagatgggcggcaagggcggcgggggtggtggcaagggcggcggcgggggtggtggcaagggcggaggaggttttggtggcaagagcggcggcgggggtggtggcaagggcggaggaggtgttggtggcaagagcggcggcggcaagtcaggcggcggcggcggtgggggctatggtggtggagggaagtcaggctccggcggcagtggcggcgacggaatgatgaaggcgcccggcggcagtggcgagtacatctcccgctctgtcttcgaggccagcccgcaggtgttcttccatggcctccaccagggaggaggcaacaacaagtagatccatctagctagactgctgctgctacttcacaagcttgggacgatgtgtgatcatgcatgcttggactggcatcagtctctatgtagcttctgaataaaataaaatgtaacgatgctcgattgtgtttc

SEQ ID NO: 61663 - DNA, 464 bp, Zea mays
  Clone ID: MRT4577_15622C.1
gcggaaatttttgatattctggcatccgagaaagaagaagaaagtaaaacaaaacctgtaaatgttggagtggatgatgataacacaaaggctactgtagaaagcccgcaacaggaatattgtgtaatttctagccaaaaacggttctgggttctgtatgctttcctaagaaagaagccgtataagaacacaatgggggcctcctgatcatgtaatacaaaaaagggccacgctcaacttctaaatttccttggtatagagcgttctggaaatccaaggaaaacagaagcatcacacgcaaactactacatactttacgcttttgcaaggcacaaaaggccattttattgtgcactaatgtgagagcccaggcacttgattttcctgcacacgattatatcatgcaatatgacccttcacaggaaccaaaggatcaccacccacagaactcggtcgtacccgca

SEQ ID NO: 61664 - DNA, 303 bp, Zea mays
  unsure (1)..(303): unsure at all n locations
  Clone ID: MRT4577_156230C.1
atatataaaatttctacaacatctctttttaaaattgcataaatnnnnnaaccccgcgantataaataaatagcatggtccnaaaacatataaaacattaataatctnctaccaatgggaaaacaaccataacaacattaacttaattaatcagttcccacgactatttaaaaacaaacatcctttaacaagaagtttctaattaaatcatttctgcttctgtgcaccattattatcagaataaacattcattttctactacttcccactccccttcaataacaacattcaccttttatcaac

SEQ ID NO: 61665 - DNA, 394 bp, Zea mays
  unsure (1)..(394): unsure at all n locations
  Clone ID: MRT4577_156231C.1
agcggatatcgtgcgggaaaatctctgacccaataagattaacatgagctgagctcttctcttacagagaaagcgaaggcaccggaggtttctctttcgctccccactgacattgaaacatccaacacgtttgcaacagaggcagaaagcaagattgtgcctaccactgctatatctgaagacaggatgggtcttgatgctaggcctaataccaccacagcattcaacgaatcattggacaccaccactactgtaataagtaactgccgcatttcagtaatatattgcaagaagagtgcagcatgcactagaggcacaatgacaaaaactcactgatattacaaccaccagaggcttctgtaccatgatcagcggnagctactctggtgctgct

SEQ ID NO: 61666 - DNA, 496 bp, Zea mays
  unsure (1)..(496): unsure at all n locations
  Clone ID: MRT4577_156232C.1
aaaaaaaaaaaaaaaaaaaaaaaaaaaaaaaaaaaaaaaaaaaaaaaaaaaaaaaaaaaaaaaaaaaaaaaaaaaaattaaaaaaaaaaaaagtttgtcctttggccgacctgggccgggacccccctaggggggggttttgttgttttccttccccttgggggggggtggggcttgcttttatggggcccatttccccctttcggggggggggttccatttcattgggcgggggttttacaacgctcggggctgggaaaaccttggcgttccccaccttaatcgcttgggggggcatccccttttcgccaggtggggggttagaaaaggggcccggcccgttcgcctttcctttcatttgggcagcctgattgggaaaggggcgccccctgtattggggctttaatcggggggggggggggggttccgcccagggggaccgttccctttgctgggcccctacccccccgcccctttcnttttttttcctttcctt

SEQ ID NO: 61667 - DNA, 364 bp, Zea mays
  unsure (1)..(364): unsure at all n locations
  Clone ID: MRT4577_156233C.1
tctagatcgcgagcgggcgcccttttttttttttttttggggaacgacaatatcatctcaggggggataagcacgacaagtttactttcacggacagaaagccctatggtaaaacacacaccaactttattgcacgcaatcaggtaacaataagagctatgcacggaggattacacaccctcacctaggaagactatatggcccactttctcgtagccttgatcggtcgggactttgtaggacgtcttatcttcgtggagcctgtagcaactggtggcggacatggacacgccttgtanctctacacctttcaaccgcgaggtcttctcataagtggtgacaggaatatgcacaaatggtgcag

SEQ ID NO: 61668 - DNA, 190 bp, Zea mays
  Clone ID: MRT4577_156234C.1
gtggagactaaagaaaattcactgggatagataaagggaacatcagatctgctcctcaaaacactaaacacctacatcatcaggtgagtgtgccacgtgaacacttatatacaaatgactattaactcgaattgcactttctcaattgcccgcttgaaacgcatcatgcaactctatgcaaaatagctta

SEQ ID NO: 61669 - DNA, 1222 bp, Zea mays
  Clone ID: MRT4577_156235C.1
ttttttttttttttttgaccaaaattatagcagacatgatttccaattcatagatcacaatacgtcttgcaagaagcaacaatgttcaacaaaacttggaggtaccagtaacaaaaatcaataaacttggacctactaagtcatacttgtaaacaactagcaaccaattattgataaaacaattagacatagttcaaccaacaaccaaatttcaaaacagaaacgtcctgcaatagttcactgttgggggcttaggaactttatggccctggattgtgctgatcctgattgaagcttagcagctagtgaaggagggcatgtatttcttatggtgtcttctttaaatcctctatttcctcagaatgttttaccaaagtttctgattccatcttcatgttatccaactcttgtcgaagttctgccgtttattgcttctcattctcaaggtaatctaaagatcttggacctgtgacgatattgtgcctctagaggtactcttggaggccgaacaaacacctgcaacacgaagaaaagtagttgattttgacaacctgagaaacagcttcatttgctaactttggttcatgtccatcttgtactggttcactcatgatgccttccatatcatcaattgctttctgtacaaactcggtaaatccattgtttttgctataatggaagttcttgaatagatcaactgaggtgggctctgtgtctcgcacggtggcgcggacggtgtagccacggtcgaggaggagcctgacgatccaggacgcgatgtacgctgatgcgtcggtgacgcacaccaccttccacatccccattgtcgtggtcgcagcagcagagtggcacgggcgacggcggcgacacgggctaggcggcgaggtcgggaggaggaggaagggtcacggcgggagggacggcgtgggagggcgaggctgggagggagtggtacacgggctgggcggcgtggtcgggaggaggagggcgggtcgcggcgggagggacggcgagggtcgggaggaacaacagaagacaccgtaagaaatacatgccttccttcactagctgctaagcttcaatcaggatcagcacaatccagggccataaagttcctaagcccccaacagtgaactattgcaggacgtttctgttttgaaatttggttgttggttgaactatgtctaattgttttatcaataattggttgctagttgtttag

SEQ ID NO: 61670 - DNA, 102 bp, Zea mays
  Clone ID: MRT4577_156236C.1
gtagattgctcctcctacgacaaccctttcccactccagctgtacaactacatgacgcagcagacatctctgcctcagggatacgttggtcccagaaagaca

SEQ ID NO: 61671 - DNA, 311 bp, Zea mays
  Clone ID: MRT4577_156237C.1
cttaaaatgcgcatggttcactctctcacagtatatttaataacaaaaaagagccattttttccttatataacacccaccccgaaacacgagggatccactccacaaagggcctacccccaaaaagagttggccactagcccaaagccacccacccccccagggggtgtctggtacccactccccggtgggggtggccgccgctacaggggccacgcctgggacccatcccgaggctggttctggaggtccccccacaaatgcgtcccccacaccgtcagcaggaggacctggagcaggagccccggctgc

SEQ ID NO: 61672 - DNA, 291 bp, Zea mays
  Clone ID: MRT4577_156238C.1
atggcttacccggttcacgtgctccggcgggcggacggattccggcgaggccgatccggtgcttctggtgtggttgcgtttggtctggggctcgggaaactttatgggactctggggaggctggtcgagcagttggcgcgggcgagggatggctggggcgagttggctgcggtggccggcactcgggtggctcgggcgggtggtgtagagctcgccggagttggggacttgctcgaggaagtgaggcagggtgcggagtgggtcgatgcgcacttgggtagggatttatag

SEQ ID NO: 61673 - DNA, 379 bp, Zea mays
  Clone ID: MRT4577_156239C.1
agcggcaggttaccacaaccaccgactcaaagaaattccgggcgtcaaccagctagatcacgtcaagcgacctctagcacaacagcagcgatgatgccctgtgctgtaggatctgcatcatctccaagaccgattgcgcctctgaatcttcatcctggccattcccatcgagatccaactcaacgagcgccctagcctcaacttcatatctcaagaaatgcgagacgacttgcgcagactacttttcttggcccaagaaagatagtgaaaccttgtgatctccatctctggagtctatttacgagcatgccccacccttgcaatattagccaacaacgttgtagtttcaaattacttcgctataccatcaaccaattta

SEQ ID NO: 61674 - DNA, 2224 bp, Zea mays
  unsure (1)..(2224): unsure at all n locations
  Clone ID: MRT4577_15623C.1
ggttcggcccgggcccccaacctcatcttctctccttttgctcggaacgacacacagcccggtccccgatctccgatccccgatcccctcgtcgatccaaagatgcagatcttcgtcaagactctcactggaaagactatcaccctcgaggcggagtcctctgacaccattgacaacgtcaaggccaagatccaggacaaggaaggcattcccccggaccagcagcggctcatcttcgctggcaagcagctcgaggacgggcgcacacttgccgactacaacatccagaaggagagcaccctccaccttgttctccgcctcaggggaggcatgcagatcttcgtcaagaccctcactggaaagactatcaccctcgaggtggagtcttctgacaccatcgacaacgtcaaggccaagatccaggacaaggagggcatccctccggaccagcagcggctcatttttgctggcaagcagctcgaggacgggcgcacgctggccgactacaacattcagaaggagagcaccctccacttggtgttgcgtctcaggggcggcatgcagatcttcgtgaagactctgactggcaagactatcacccttgaggtcgagtcttctgataccattgacaatgtcaaggccaagatccaggacaaggagggcatccctccagaccagcagcggctcatttttgccggcaagcagctcgaggacgggcgcacgcttgccgactacaacattcagaaggagagcaccctccacttggtgctgcgtctcaggggtggcatgcagatcttcgtgaagacacttactggcaagacgatcacccttgaggtggagtcctcggacaccatcgacaatgtcaaggccaagatccaggacaaggagggcattccaccggaccagcagcggctcatctttgctggcaagcagctggaggatggccgtacccttgcagattacaacatccagaaggagagcaccctccacttggtgctgcgtctcaggggtggcatgcagatctttgtgaagacattgactggcaagaccatcaccttggaggtggagtcgtctgacacaatcgataatgtcaaagccaagatccaggacaaggagggcattccaccggaccagcagcgcctgatctttgctggcaagcagctggaggatggccgtaccctcgccgactacaacatccagaaggagagcaccctccacctggtgctccgcttgcgaggtggtatgcagatctttgtgaagaccttgactggcaagaccataaccctggaggttgagagctccgacaccatcgacaacgtgaaggcgaagatccaggacaaagagggcatccccccagaccagcagcgtctgatcttcgccggcaagcagctggaggatggccgcaccctagcagactacaacatccagaaggagagcactctccacctggtgctccgcctccgcggtggtcagtaagccatggttcatttaagctgctgctgtacctgggtatctgcgtcgtctggtgccctctgcgtgccctctattgggattgcctgcagctgtatcggtccccctacctcccgatgagcgatcacgtctttttccgaaaaaaataagtgtcttttcttattttggttaggtggatgtctgtcccacccacctgcacaggcctctcccccgggtttggttccggtcgttctcacatgggctcccatgccgctaggtatctttgcggtagtttcgagggggttgagctcgcaaccgggtttctgttgcaaaggataaaatgcttggaggtatgcacgcgtcgataacaagggccagcatccagcctctaatgaatccgatgataaagccaccgacgaaggttgtcaaaagctgtatgtacttccctaccttaacatgagaagtcaagttttttagtgttgtacataaggtttttttcttaagttggttaggtggtcgtctgtcccacgctaaagcacaggcctaaggcccggcatcagtcgcggtcgttctcacatgggcttcgatgccgctgtgtatgggtagggtagaggttggggggttttgtgggggggtgaggggagtatttttgttgatacggtgctcggggggttgtcttacccctgcagntcgagtttttatgnttgaagacatgaaaagaccctttaatggaaactaggcatactttttgttttcttttgtcaaaacaataatg

SEQ ID NO: 61675 - DNA, 289 bp, Zea mays
  Clone ID: MRT4577_156240C.1
gaatcatcaagtactatgaggaataaaagggttatgggaatcctccacaaaataaacaatatcaccaagaaaatatacaaacaaggctatatacgaagccaatattagatgctctaacaataaccactcaagcctttgaacccgttgacgctcaaactaacaaggttgccacctcccccacctgagggccacatatgaatatccccatatattcttcaacgtgatgaatgacagcatatttactcatcgataggattttgcttgtccatctaccaaccaactatcactg

SEQ ID NO: 61676 - DNA, 325 bp, Zea mays
  Clone ID: MRT4577_156241C.1
cgcagcaacaacccgatcgaaacgggaagaagatgttcgccgtccttatgctcctggctcttgctacgagcgccaccaacacgcatacaagcggctaaatgctgacaggatccaatggcgtcggtttatccaccatacccggcataaatgatagcttcagtatacgagaaaccagctgtgcaaccataaacgctggaacaagtgacggcagcaagcaacataccatcatcggcccaggtgcgcgaacaagtgcaagtgctatcttcggcgtagcaataggctaaaaacatgagggggcaacagccgcatcaacaggcgcaaccat

SEQ ID NO: 61677 - DNA, 409 bp, Zea mays
  Clone ID: MRT4577_156242C.1
aaaaaaaaaaaaaaaaaaaaaaaaaaaaaaaaaaaaaaaaaaaaaagaggaaaaagaaataaaggaaaaaaaaataaaatacaacaagaatacgaaaataaaaaaaaataaaaataaagggggcggggcctttttttgaggtgtccaggtttttttacaccggggctggctggggaaaaccctgtttttttccggggcccttaaatttttttaccttggtgccgcctttttccagcgtggggttttgggtaaaccggtgcggttccccccgcttttattccttttgttgcccatccctctttggccagtggggcgctctctgtaaggggcccttaccctcggcttttccgaagttttccccccccttaatggctatggtgcccccccttttagcgccctcttaatccgg

SEQ ID NO: 61678 - DNA, 785 bp, Zea mays
  Clone ID: MRT4577_156243C.1
ccggccgggaaaatcaaggagaaccttctccattggtgtaagccgccggctatatatagccatgtatggtggcactagggaatcaatcaagaattacctatcaagtctcttcctctcttctctaaaccggcgaccaggagaactcctgtcgacgggtagctcggcgtgggggcataaccctgccggcaaccacgggtcaaggctacgatctacgtagccgaggtcctcctaccttgggcaataccgcccttgacagtagcactcctcaggtcctgggttcgactccccgtgggagcgaatttcaggctgtggttaaaaaaatcccctcgtttgtcccacgccaaagcacaggtctaaggctcagccccggtcatgatcgttctcacgtgggcttcgatgccgctgtgtatgggtggggcaggggtttcgggggttttctcgacctgcgtgagaaggtcttcttcttaatacaatggctcggggctgtcttaatacaatggctcggggctgtcttacccccgcaggtcgagtttttttttagaatatggaaaacttgggctccaccaaacactaagttttttatgtggctggttgcacacaggaaggtttggacaatagataggctgcaaaaaagaggtatggaccattcggagaggtatccattatgtgatcaggatcatgaaactttggaccataagttaaattggatgtgtttttgctcgagaattttggttcaagctgctctttcaagtgaaccttcagcattagccccccaatatgatgat

SEQ ID NO: 61679 - DNA, 364 bp, Zea mays
  Clone ID: MRT4577_156244C.1
aattctctatactgagtcgtattaatgcgtccgccattcgcgagtctccagccaacggcatccagtccactcccatccccctcgaacccgacaaacccgacccgattgcgcccaatggcgataagaagccagcgcgagaagaagccggcggccgaagataatgcggagaagacgaccgcaggttataagcccaagtctgagaagcgcctgccggcctctaagtcctccggcaaggatggcggcgagaagaatgggaagaagaaagccaagaagagcgtgtagacctacaaaatctacatcttcaaggtcctgaagcatgtgcaccccgacattcggatctcctccaagggcatttcaatcatga

SEQ ID NO: 61680 - DNA, 148 bp, Zea mays
  Clone ID: MRT4577_156245C.1
tagtggacccacgcgtgcggatttttttcttctataccgttcaaaaggctcagcaccagctctttagtgggggccgcggcggcagagatctctgtctttctcatagacaaagaggatcctcagaatatagaggggtggcgagaactag

SEQ ID NO: 61681 - DNA, 241 bp, Zea mays
  Clone ID: MRT4577_156246C.1
ctaggtttggttttttttaaacaatctattcttccgtctgaaggacccgatgctatctctaaactaaataaaccgccgagtattcgtctcgatcgagacgaaaaattgtgatcacgtatgccatataccgtacctgagggcattgccccttttttgtggggggggggggtgccagacaggggcccttttgaaaaaaaactcaaatatttgggtgaacccacgaagacgaaaaggccgcaca

SEQ ID NO: 61682 - DNA, 469 bp, Zea mays
  Clone ID: MRT4577_156247C.1
ggggggggcaaaatttttttattgtttaatgtcaaatgtttttttttcttggttccccaagaacaagggtgggggttaaatacccaattgcgcgagcccacatcctttaaaaattttttccttcttccgtgtttgggggggggcaaaccccgaacaaaaaagcttccttccgtaaaaaaaaacgggggataaaaaaacatggcactgagtccccaacaggggggggtttttcctttgggagttggggcacagttttaggagggggggcctgcaaacaagtcccaagggggttttcccaatcccaggggggggggacccaaggggggcaattgggaaaaaaggcccccaaaccaagaatgctagctgggtgtttactttgacgggggcgatttagggtctccgtttttttccttttaaagaacgatttcacatcccccaatcagttcctatttgaaaaaaagctggggga

SEQ ID NO: 61683 - DNA, 343 bp, Zea mays
  Clone ID: MRT4577_156248C.1
tttccgtttttttggggcgaactttacaaaaactttaaattttttttcccaaaaaaaccgtttccgcccttaactagatttcccccttaacggggcgggacaggaccggaacggaaagttcacccccacaaagggttttacaaattttattcagcttcgcaaggggaactttagcagggggggttttatttttattcctgggggcgaacgaagtccaaaccggtggggctcgggcaccgtaaagaaaaaaaaagggtgtttgtccattggggaagaaaccccaaaacagtcaatttgggaaaaccccctcggtaaaagcgggccatacccattatttggggga

SEQ ID NO: 61684 - DNA, 253 bp, Zea mays
  Clone ID: MRT4577_156249C.1
gggcccaattaaataaaacattgactgggcgggagaaaaaccgggcccaaaaaagtgacccacggggcaaagttccctttctttggcagagagggggggagaatctccaaattgggacgtaatgggaacagcagtgaaacaaattataagttcattcaaacataccggaaagataaaaaaacgactgtcaccacacgggggcatacaaccccaggggggggggtgggggaaaaacctggggggggggacgggg

SEQ ID NO: 61685 - DNA, 404 bp, Zea mays
  Clone ID: MRT4577_15624C.1
tttttttttttttttttttttttttttggtttaattaatttttatgggttttttaatatttttatttggtcatcactttctatacaacaactataacaacaattgcaacaccttgggagaaaaaaaaaacagttaacacaaaaccaaaaggaggaggcaacaaacgaagcaatggaccaagggaaaacgacacaacacaacacaacacaaaaacagcgcaagaccagcggaacaaaaaaaaaccaaacccaccgccctttcttgccaaccctactaactaaagcccggggcaaaggaacaacaacacggaccccaccctcccccgggacctcaaggtcaccttccactcctccacgaagacaaaattaagccttccgaagccccagactacaaacgccaccccg

SEQ ID NO: 61686 - DNA, 293 bp, Zea mays
  Clone ID: MRT4577_156250C.1
acacaaaatatggcctcatttttatcaggaaccatttgtttcatacctagcaaatggggggctaaaacattttttgatcaagcaaccaactgcaacatgggggaacacaaaacacaaaagggccccctgttacaatcacccgtattgaagcccaacacaaatagacagctgccttatcatcctttaggaaatggaaacgggtgaccactttaatttttttccactttttttaaaacccaaccctcaaatcgcccctttttttgcgaacccttgggcggacccttgggtcaccc

SEQ ID NO: 61687 - DNA, 206 bp, Zea mays
  Clone ID: MRT4577_156251C.1
cccacgcgtccggtcgccatgggtctgcaggtacggctcctctcgccgctctgtatttgtatctctacctgcatcttcgaacaagtgccgtgttcagaggccgattcgggaccgccgggcttcgctggcgaagtagctcaagtgccacctgtgtgtgtggtttaatttgtgacctcgccgtcgccggccggatcggttgttgcttg

SEQ ID NO: 61688 - DNA, 828 bp, Zea mays
  Clone ID: MRT4577_156252C.1
gcctgccgaattctcctcgtcctaaaaaaccctaaccccaactccccacactcgtctcgccgggggcggcgcgatgagggctatcaccggcggcgtcgtctcctcccagccctgtcccctccacaaggccgccctcttcctcaaacgcttcaccgagtctgccgcctcccacctaccctcctccgactgctgtaactacctccgcaacgccgccgacgccacaacacagctcagccgcttccgcaaggaactcggcggcagccacaagcagggtgccgccaactccgatgcccactactatgatgatccggtgaagggcaatagaaatcacgaagatcaggagagcaaaggggacatggcgattgccgctgatgattccaaccgcgattctgccgctgaggcgaagctagatgttgcctccggtaagaagggcaataagaagaagaaaaagaagcataaacaagaggaatgcactgaggttgtgaaggagaagaaaatcactgatggtgatctagaccgagagaagaagaggaaaaagaagagggatagaggtgacaattatgacaatgctccagagcaggtagaacatataaataagaagcaaaagaagcatctggggattagttaggagaatccttactcattggagatgtatgggagtttgtgactggtgaggttcctgatgttgtattttgggcttgaatttgattactactatggctgtgttcttttggctactacgccagactccacagttttgttctgtaaaacatccaatttatatgttatggccatgaggcccaagcaatgatattgaattgttacttc

SEQ ID NO: 61689 - DNA, 554 bp, Zea mays
  Clone ID: MRT4577_156253C.1
tcgacccacgcattcgttttttttttttctggaaaaagaataaaattcaaaaaaaaatcgtactcttacacaggccactgactaatcaatacatgatacacattgttagtttctaacactgatacccacgtacaatgtttatttatttcaccatccattcattcatacgtacagcatagatggccccctaacatccatttctactcttcataatcagaccgcagcagtctaattgctgtgcggaccattaacggcacggctcgctccaaggtcagcccctaggcctcctccatgtccagcttgtcctccttcataccatcggccatgtcccagtccaggacgtgcaccatcgtggccatcatgagcttgaccatcctcagaccccatctaaggcccaatcatattctccagccggcgcctaacgggatgagctcgaattctctccctttgacatatactcccgcattcaaaccgtccagtaagaaacggtcgggccggaactctagagctctggccacgccttctggtctcggacgatcgcccacacattcacc

SEQ ID NO: 61690 - DNA, 1511 bp, Zea mays
  Clone ID: MRT4577_156254C.1
tgcattgggtactctccgggccggccggaggcgcggcctgccgaattctcctcgtcctaaaaaaccctaaccccaactccccacactcgtctcgccgggggcggcgcgatgagggctatcaccggcggcgtcgtctcctcccagccctgtcccctccacaaggccgccctcttcctcaaacgcttcaccgagtctgccgcctcccacctaccctcctccgactgctgtaactacctccgcaacgccgccgacgccacaacacagctcagccgcttccgcaaggaactcggcggcagccacaagcagggtgccgccaactccgatgcccactactatgatgatccggtgaagggcaatagaaatcacgaagatcaggagagcaaaggggacatggcgattgccgctgatgattccaaccgcgattctgccgctgaggcgaagctagatgttgcctccggtaagaagggcaataagaagaagaatggggatccactggaggatagagcggttgcccgtgctaactcgcacatccccccttcaccagaaattgccactgagaagaggaagaagaatcatccgaataaggaaatcatcgtcgatgtgaagcaggagcctaactcccacattctcccttcaccagaaattgccactgagaagaggaagaagaagagtcgtccgaataaggaaatcatcgtcgatgtgaagcaggagcctagttttgtggtcgaagaagagctggtgagtgaaaagaagagcaagaagaaaaaagagaaggatcatgtgaaactggaggagaatgtgaatgaggtggaagagaaaattgtcaatgacagtgcagcagaacaaagagttgccataactgagagggaaaggaagaaaaagaagcataaacaagaggaatgcactgaggttgtgaaggagaagaaaatcactgatggtgatctagaccgagagaagaagaggaaaaagaagagggatagaggtgacaattatgacaatgctccagagcaggtagaacatataaataagaagcaaaagaagcatctggggattagttaggagaatccttactcattggagatgtatgggagtttgtgactggtgaggttcctgatgttgtattttgggcttgaatttgattactactatggctgtgttcttttggctactacgccagactccacagttttgttctgtaaaacatccaatttatatgttatggccatgaggcccaagcaatgatattgaattgttacttcaaaaaaaaaaaaaaaaaaaaaaaaaaaaaaaaaaaaaaaaaaaaaaaaaaaaaaaaaaaaaaaaaaaaaaaaaaaaaaaaaaaaaaaaaaaaaaaagggggccgttccgaaattaaaaaccgaccccggggggggaccctgggtccccccctttaacccagttagttgatgggacccctgtgccctttttaacaaaaaaccagtgggggcggttttacctgcccgttgggctaaacgtgggcccctttttaa

SEQ ID NO: 61691 - DNA, 377 bp, Zea mays
  Clone ID: MRT4577_156255C.1
ggttggggtttagaacaaaatctacattatatagtgatttgaagattaaatttatgagttacaattgaccatgtgaggggtgcgcgtgcgcctaacccaattagagcacattctgaagacagatttctataccattcattgttatttcaggggagcatttactatttgccaaattattcacaatttggcaccaattgaagggcatggtttttcgccccacccaaccatccacccaaaagttgggtttgacaccaaccttccttgtttgctattgatagggagcaaggactttcggcttttctgaccgattgttaactgatccttcatcttcaacaaggaggaaaccggggtgtgatgacaatttctccacctaaact

SEQ ID NO: 61692 - DNA, 421 bp, Zea mays
  Clone ID: MRT4577_156256C.1
ccccctcgaggtattttttttttttttttttttttttttttttttttttttttttttttttttttttttttttttttttttttttttttttaaaaaaacaaccttattcatgattggaaaatgttctggttagcccgcacacccaacacacccggcccattattaacccaaccctgcaacgaacagaggttccttcgacaccctccttttggaaagggccccagagaaagcaggcccatcggaggtttaaacgacccaggccttcctgaccacaggggaaacggacaacaagggggggggggccttcctttcggatcttagaagtcggctagggggcggccatcctcacaattggaggcgggcaaaaatcaaacgcttctagccacgggggaagcccttctgggccgggagcttcccctta

SEQ ID NO: 61693 - DNA, 719 bp, Zea mays
  Clone ID: MRT4577_156257C.1
cccacgcgtccgcgaactcaaaaccaccgtagccatgcaagcaacgcacaccggggagggagctcagtgtcgccgtgggtatttcatgcttgtgcgtccgaccgaggtgattggagggtcgaggaggtgcatccgcgctcgcagaagcatacactacagaatcggggcacacagagttgagtcggtatggagatttttcaccagtggacggatcgtcgccgcgtttcgccctaccttggatcggagctgctatgcttcaatagctgaaatggaagaggaagaagaagagttgcagttggcgaggtacatggtcaataggaggcgacgtgcactcaatgagcgtcgtcatggaggttcgattcccgggcgtgttaggattcatcgtgatcacatgagcggcgatgcaagaatccgagcggactactttggagcatacccggtgtacacggatgctcaatttcgttcgctggtccgaccatggatccggagttgcataggacgcaatgaaccaaggtctgtcatggctgttcttaaatctactgtcgaactgtcttagtttacttgtcattgttccactgtctgtgtcagtgtcatgtctgttctacttcatgtgtcaagtgtgtgtaatgtgtgtctcagtgtcctagtgtagtagtgtcatgtctgttcgacttgatgaactgtcttcaaatcaataagagcgcgcactaccgtcatgc

SEQ ID NO: 61694 - DNA, 165 bp, Zea mays
  Clone ID: MRT4577_156258C.1
acaagactctatactcagtcgtgctatggttttgcccgtggtgctccacacagtgcccctcattctatcagtagaacacgatgctcaagtgggcgctctcatccgcgctcctcctcgtctttctcatgactacagtccacgttgtagctatctaagctgggggtc

SEQ ID NO: 61695 - DNA, 120 bp, Zea mays
  Clone ID: MRT4577_156259C.1
ttttctttcttcaaaggccaatataaaatatggagggttaattactcataacttgtgggctataaatatttcatattatccacaaaatgtatttcattttactaactttctcaacttcta

SEQ ID NO: 61696 - DNA, 696 bp, Zea mays
  Clone ID: MRT4577_15625C.1
acttccattcattcggtccaattcgctctctccttccccgttctgaggaccgcaacgtgaacgctgctccccgatctcctccagactctatctccagcctgattaccttttctctctcccgattatggtggtgtcggatgcggcgacatcttgcttcactcccatatttgcatacgagtcatatctgaaaagccacctctgcaactgttcagctaagttcctccgatcgacggtgaagcacgacttgacgactgtgaaggttcttcttgtaggagactgatttgcccaaccgcttgaggacatctgccatgatctactaccgcctaatgcgcgcaatcactgtggtctccgacatgaccgagctcaacatctctaatttggtaaaatactgccgactaccgatggacaagcttacttgaggagatgatgtgcacatccttgtggtcaacaatgatctgctaagtgctttgtactatgcttgcaccgaaactattacctttgatgatgatcatcttctcatcccattcatgattactactgtcttaaaatgcatcattgttctacagatcttcttggctacgtctgcatacatcatacgaagttggtgcattcaaccatctgtctatatcaccatgccagtgaccaggcggatccgctctcaaaccgtctacctgactacgtcttgctgctcatcct

SEQ ID NO: 61697 - DNA, 349 bp, Zea mays
  Clone ID: MRT4577_156260C.1
atacctaccagggtgcaggcaggctcatgtacacgtggcggccaacaaggacgagcgatggcgaccaaggtcatctgcttccttgtgctcgcatccctgctcctcgccgtcgcctttcccgtgtctgctctgcggcaggaggagaagaagggcggcggcggaggcggaggcggaggcagtgttagagaaagctgaggcggtaacctgaatccctgatagtgctcgcccaagtgagtgccgcgagactccatgacgttacacgtggaagctgtatgacattgtgtctcattgcggctacaggagcaccctcccgtggaccaaaaattgtttttttcttgccccccagagt

SEQ ID NO: 61698 - DNA, 451 bp, Zea mays
  Clone ID: MRT4577_156261C.1
ggccgcgaaccctcctcctgctactctcgggggtcctggtcctgaccgagacccgggcaggtgagttccgggtcgggagggaacgacctctgcggtgagaggcgaggggatctcccgggagtctggggacaggaccccagggaacgagcgaccccgacgcccctgcccagacccgccccctccccctggtcccgtcctgtccctcccttgcatctcgacccctcttttcttccccctccggagttcgggccggtcttcgacctcttccatctcacgtgcccctagccccctccggcctcccggccccatcacctcggacccgggacccgatcccgcgccgagaggaggtcgggccaagtctcacccctccccgcccccaggctcccactccctgaagtatttcagcaccgccgtgtcccggcccgggcttgaggaaccccgtttatcatcg

SEQ ID NO: 61699 - DNA, 262 bp, Zea mays
  unsure (1)..(262): unsure at all n locations
  Clone ID: MRT4577_156262C.1
gatatcaagcttatcgataccgtcgacctcgancgggcggccgncgctcacccgcgacaccatgcatggcgacgtgttctgggccatccgcggcgggncggcggcactggggcgtggtgtacgctggaattccgcctcgtcccggtccccgacagcgtcaccgtgttcagcgtggtccggaccgggccgacggagctcgtcgccgggctggtgcacaggtggcagtacgtggggccgagcctccccgacgagttctacctct

SEQ ID NO: 61700 - DNA, 572 bp, Zea mays
  Clone ID: MRT4577_156263C.1
tctgtaaaaaaaaaaaaaaaaaaaaaaaaaaaaaaaaaaaaaaaaaaaaaaaaaaaaaaaaaaaaaaaaaaaaaaaaaaaaaaaaaaaaaaaaaaaaaaaaaaaaaaaaaaaaaaaaaaaggggcgggcctttttagaaggacccaagtttccttccccgtgcttgcaactttttagtttttttttgggggggggggaggggaattcacggcccgtttttttacaccgtcgggcctggaaaacccctggctttccccaatttattccctttgcagcccttccccttttccccagttggcgtattaccgaaaaggccccccccgttcccctttcccaacatttgcccaccctgattggcaattgggcccccccctttagcggccctttaaccccggggggtgggggggttccccccagggtgcccgttccatttgccagccccttagcccccgttcttttggtttttttcctttcttttttccccactttcgccggttttccccgtcaagctttaaatgggggcctccttttggggttccgttttagggttttacggcccctcgcccccaaaa

SEQ ID NO: 61701 - DNA, 198 bp, Zea mays
  Clone ID: MRT4577_156264C.1
ggattcgtagcctctcctcactcacgtcaccgccgcttcccctgcgccccgagccaccatgaatgcggtatagctcaggaagatgggagtgtcatgtgcgcactggggggaaggagaccatgagcaggaagaagaaggcagtccactagactgcaaccacagatgataaaagggttcacagagccctgaaaagaatag

SEQ ID NO: 61702 - DNA, 1468 bp, Zea mays
  unsure (1)..(1468): unsure at all n locations
  Clone ID: MRT4577_156265C.1
tcgaggccggccgggactgccgtgcagcttctcctgcgccgctcggccctgccatctccatggctgcgtcctgttcggtcgccctatttgcagctcgccggcgcccaagccctctgctcgctctccatcgcgaccttcccagcctcctctgccgagcccagctgaagctccctacgcgcggtcttctccaatcgagctgcgtcccgtccgctcggtcctgctcttctccaaccgtgcccctgatctggagtctagccgagctctccactgcccagctccatctcacggcgctctgtcctgctcgctcatggccgaagccacctggtcccaggtccggtcggccggctcagtttttcccagtgccgcgcgtcgtgcttccccttccagccgaacgaagctcccagctccaggcatggcgtgtccgctccctagagcttgctgcagcagcttctctctctcctggagtttctctgcgttcagcccagccgcgcccctgtccatctcgtcgcggctgctgtttgtgtttttcctgcgtgccgtgctctcttccatggatgccgcggctgctgctctggagttctccctgcacgcgctcagcttcaattcagttgccgtgcccaccgtcggtttgtgtgtgcacgcgctggacacggtaaaacgttgcgtgggcttctgtccgagagcccgcccgaccgtgacctcgctttgcttctcgcgtcgctactcgccaagtccttctccagtccgtgccataaaatttacttggcttacgtgcggtcctctgttcctgcgtgcctgcgcgcagctcgctccttggctcaactctgcccagttcgcgtcctgctcgccggtcgaattctttgcgtcgcgcgcatagcgttttgttattcctgcgcgtgctgccgcaaagctccatgttcagttcgcctccgtcgcgttgtcgtgcgcgcgaaactgtttgcagtcgatatcaagtccgtgacacgcgcgccggacacggtaaagcgttgcgtgggcttgtatccgagtccgcccgaccgtgacctcgctttgcttctcgtgtcgctactcgccaagtcctttccccagtccgcgccataaaattcactcggacacgatctcgtcgtcgttccgtgcgtcatcaagaaatcccgagaatcgggtgaagacgaagctagcagcatggtatttaccaagtgctcgacacaagagctaaaccagaatccttgccgtgttcgcggatagcgcgtcagatttagaatggtaagccgatttaaaattttcgttagcttaattattgaaggtttgatgaatatattgtgtacataagtataaagtggtcgtgtcacgcgaaactcaagtttaaaatgattattgtgtaagaagaattaatagcgtgaagaattgatttagtaatccaaacgattatcgataaacanatcagtcgctacggtcgcggacgcgtggg

SEQ ID NO: 61703 - DNA, 423 bp, Zea mays
  Clone ID: MRT4577_156266C.1
gggtcatcgtacaggttctcgacgattccacgggtccgacggttaaggatttggtggagcttgaatgcaagttttgggctaacaatggaaagaacgtaaaatatgaggtgaggaacaatcggacaggctacatggcgggtgcgctgaaacaagggatgctctaccagtattttcaacacagggggattttgccgctgtgtttgatgctgatttccaaccagaacctgacttcctcgtgaggaccgtcccatatcttattcatactccacgaattgctcttgttcaagcacggtgggaatttggaacttgctgactggcatttcgggacggttttgcagttaatcccaaagaattcctgatgacaaggatacaaaagatgacattagattatcacttcaaagtagagcaggaagcaggttcatc

SEQ ID NO: 61704 - DNA, 305 bp, Zea mays
  Clone ID: MRT4577_156267C.1
ttctgagccacagcactcagtcagtgggttcaggtgactttattccccacgcgctgttccattcaaccctagtcactgtcggttcctttgcggcatgctctcgtttggcttctgacctgctccttctcctccgatgcctggcgattctcattgcttgtatcgtgatgacgctctttcacttgtatccgaactaccttccttatttggacttgttcaatcgcttacatcctttatgctttcttgtctagcgcttgtttatgttctcgattatgtcttcggctagtcttatgttcaatgaatacata

SEQ ID NO: 61705 - DNA, 725 bp, Zea mays
  Clone ID: MRT4577_156268C.1
tgtgtccttgataactaatgataaccaaaaccacaaattatcatggactaaacgatcttttactctttaagtcggtgctgcccttcgtctcaaggcgtcgtcataccgaagctccctggattgtagctttggcttataccttcgtattgtgtttgctcgcatatcaccctgccgaaggtgtttctgcttggaggatcttcggcgaagaaggcccgcaacaacaacatatataataacagagtgtatagagataaatgtcacaataacatcagagtatttattacatagtagaagtcttattacaaaataaaagataaatataaaacgaactaaggatcatccttggcgcaagtcatctgagaaacgccacctagatccgatcaaactcctcgctttgtggctcctcctaaaccacccgttcttctccccgaattggtgctcgggcgatgctgtccatggagttatgcggagtcgcggcggcgcggcaactacgatgagcaattcgcagcgccctggttgaggattctccgaagcaaggctccaggtctccacggcgtgcgatggcggatacccgcagtacttcttcggcggcccgcctcaacagttgacgacggtcaagtgcgacgcggcggtggatttgcccagcaagggtgcatggcgtggatgggaagaaggggaaaggaaagaggggttgaccgagctatataaggtgaagccccggccgg

SEQ ID NO: 61706 - DNA, 188 bp, Zea mays
  Clone ID: MRT4577_156269C.1
tttcattcctccttccagatgtttttctattctttgcacacatccttctactttgtcccggaagagagcttattctaacatctacatctactctcctcattatcattatgttaatccccttcattacttttataccatttattcgaacacaccttataattaatcatcactacccttcattcccatta

SEQ ID NO: 61707 - DNA, 615 bp, Zea mays
  Clone ID: MRT4577_15626C.1
attgggtccctcgaggccggccggggatagcgtatacctcccatcctcctcccatatcgaaagatctatcagagcgagaacgtacgtagcggaattgctacaatgattggagcgtcagagagcgtacaggttaggagtgtctagccactactctcgctcggctgaacttcaaacccgcatgaacccctatgtctacccggtggcccatggtcgatgatcggcatagacctggcgggagagatagctcatccatatcgagaccgtcgaaatcatccgtgaacatctcctgtggtgataccgcatccagggcatctaccaccaccagaatggtcaccatctcgttgaaccatacctacaggttacccgtgcagtgccttgacgaaagcgcatgcccgcccgactgaactccacgatgcccaataataccgtcaaagtccagcagcacgcgctgctgcctattattctcctgctgctgttcctgcattggacaagagatatgacccttccattgagcaagaatgaacgtagcctgccaactgcgctagctccacttttacatcttaagctgctgatagacttcaaataacatcttgtccaataaaacattctgagagc

SEQ ID NO: 61708 - DNA, 355 bp, Zea mays
  unsure (1)..(355): unsure at all n locations
  Clone ID: MRT4577_156270C.1
tacactatctatgacctctgcatgcacgcgtccgcatcttgggtctctgttcctctggcgcgcccgtccttttttttttttttttcaaaaagggcaaggggttgcagcttcacccaaaaacagctagggggcttccttatttgagtaccctgattattaagnnnnnaaaaatggcagcaagaaatggttggcttgctaaaccagtggcatgtactggagccaacgttacttagcacccccttattgctcacttgtaaaccaaaacccctgtgccttcctttaccgagagaaccttatcaggggggacactaaccccccacatcttgttaccccacatgcaagcatttctaccttc

SEQ ID NO: 61709 - DNA, 1242 bp, Zea mays
  Clone ID: MRT4577_156271C.1
atgaagtcacgcatggcaccgggatcacggagtccggagaaatcccaactgacgtcggggtcgtcctcttcctcggaacccgtgggtccggaggttgagacggtcgtcagtcggtcccaagttgaccacatatggtaccccggaaggtcaggatatgccctagagaaagcgctcaccgaagcggggtcgcttggtggatcgaagctgaatctaaagggaacagggtacaaggctaacgtccaacaagtccttcgtgagggtgctggtgtcatcagcccgcttggagttggtacgttgttgggaagcgacacccgccgttgtctcaggtgcaaggacaacacccgacatgttccccgtagaggtgccggcgtcgtcgactcgctctggtccgacagccgacaaggtgccgccttctgcctagccacggttgccccgtctcctcctccggtgaggagggtagcggggcaaacccgggtgttccacttccgccgcgggaggaagtcgtcgccgagttcgccttcgccgggcaagccgacgaccgtcgttgttgccgtgctgcgaggggaggagcaccatgtcgtagctgccgtcgagggacatgaactcgagactcccaaagcagagcaccgtcccgggctgaagaggctactgaaagctacccatctggaactcaacgggaaagtgtttgtcaacacgcagcaggacccctacctggcgcgccaactgtcggcgtttcggacccacggggatcgtcaaccgaccagtgaatttgtcgctgcgtgtccctacctagatgggttgatgcaagatggaacacaagagggaaatgaggcttatgttatcttgcaccggggtgctcgtagtaggggttacaagcgttgcgagagagcgagagagagttcagccttgaggtatccaaaggggtctacctttgacttaattggatattcagactctgattatgctggatgcaaggttgataggaagagtacatcagggacgtgccaattcctaggaaggtccctggtgtcttggagttcaaagaaacaaacctctgttgccctatccaccgctgaggccgagtatgttgccgcaggacagtgttgcgcgcaactactttggatgaggcaaatgctccgagactttggctacaatctgagcaaagtcccactcctatggacaatgagagtgcaatccgcatggcggataatcctgttgaacacagccgcactaagcacatag

SEQ ID NO: 61710 - DNA, 312 bp, Zea mays
  Clone ID: MRT4577_156272C.1
gggcaccggcccgagaaaaaccccgggggacgaggcgtctaccaggcggaggacgcccaaacagggggggtttagaagggatgtcgggggtaaacccccaaggggagcaaagaagaagaagacaccagcgagcaacaagaagggggaggcaccaacaaacgaaaacgagaacacgaaacagaaaaaggcgccgggagaaagccaaccagaaagaaccaaaaaaaaagaagacatgccaaaaaagacaggcagagcggaaaaagagacacgaaagaaacccgagggaggcccacaccaaagaggaacggagac

SEQ ID NO: 61711 - DNA, 564 bp, Zea mays
  Clone ID: MRT4577_156273C.1
atgggaaccaacgggcatgtcgacctcaacaaaggagttgctacaccgtgcttcgggaattggtatccaaaggggtctacatttgacttaattggatacgcagactccgattatgtcgggtgcaaggttgataggaagagtacatcagggacatgccaatttctaggaatgtccctagtgtcctggagttccaagaaacagacatccgttgcccaatccaccgctgaggccgagtatgttgccgcaggacaatgttgcgcgcaactactttggatgaggcaaaccctccgggactttggctacaatctgagcaaagtcccactcctatgtgacaatgagagtgtaatccgcttggcggataatcctgttgaacacagccgcactaagcacatagacatccggcatcacttcctgagggaccaccaacaaaagggagatatcgaagtgttctatattagcaccgagaaccagctagccgatatctttaccaagcctttagatgagaaaaccttttgtaggctgcgtagtgagctaaatatcttagattcacgtaacttagattga

SEQ ID NO: 61712 - DNA, 308 bp, Zea mays
  Clone ID: MRT4577_156274C.1
caacaagcaacatataaagtgcaatccagttctgacaatagagcaacaatggcgaccaagacatgtgcccctccggacgctccttgctctttctgcatgtgttgctaacgcgacaagtttccctgaatgcttacaagctactatagcttgccttctttccccataccttacatcaatgatagcttcaggatgtgaaaacccagctgtataaccctattggctacaacaagcaatcgcagcacgcaacatacctctatcacccttgtgtcaacaatcgtcagccctatgtttggtgcagtcattggtac

SEQ ID NO: 61713 - DNA, 282 bp, Zea mays
  Clone ID: MRT4577_156275C.1
tccaagcgtccagctgggcacgttcgggcactataattcagctgttttgtgctgacggataaccacgacataaatggggatcacacggtcatacaccttaaagtgtgctgatgtggcatctacagacttgaagattgtggatgactcagttgatcagacatatccaggccggctattcatggtagcattcagatgaggaggtgtcaccagcttgtggggaaatttgaattagggtcaaaggtcggatgccataggatctgtagagaatcaggttttcaccag

SEQ ID NO: 61714 - DNA, 194 bp, Zea mays
  Clone ID: MRT4577_156276C.1
tccgccgactccttcagtcacactttgcacgtttactgacaccaacttccttacggtaacttggtgcacattaaaataaggcctatccttgcgaagaaaattatccatgatacttattaagatattccccatcagaattgcgccacatacggtcgccattattacacacgctattactatcataatatctattc

SEQ ID NO: 61715 - DNA, 321 bp, Zea mays
  Clone ID: MRT4577_156277C.1
tcggcaacaatgagcagccaggaatcccttttggaacaagggctacacgggttgatggtgatagccaacgtcgaatatctgttgtttctccatcttacttcagcaatgggtaaattatactcatccctcgggagttatgttatgactatgctacgaaaatatgagattttgaattcatgcattgtactctgagaagatggaaccatttttttagtaaaatgaatctaaacaaacagtgaacacctgagtctcttagcagatgtgagatatcatctgtgaacactgttaaaaaaattctttaccatatttcttgatgttaca

SEQ ID NO: 61716 - DNA, 1315 bp, Zea mays
  Clone ID: MRT4577_156278C.1
gccggccggtccgggccaccaccaggccgccaccaccacgcagcacctctgccatccccgcttccctccctcactcgcagccacccgaaccccaccaccaaccagccggatcaagtcgagtgaagcgatgctggaggaggcgatacccgcgctgctgagcgccgtccacgggtggttcacccccgccgtgctcttcgtcgtcctaaacatcgtcatcggcaccatcgcggtcacctccaaggccgccgcctcggcgaccggcggcgacgaggaggaagtcgccgcttctggcgcgggatgggagccgcaccggcggctggcccgcgtgccgtccatggcgttcgagcgtctcaagtcgttcaacggccgcttcgccacggccgagcccgtgcccgccgagacaggagtggtggatctggggtacaacaagcagccccacacggcggagatggagaaagagggccctgtcgtcgtcgagggcgctgtagatcctgagcccgagcccgagccccaacacgcggcgcacatggagcggagcaggtcggaggcggatgcagaggcgaagctgccgttgctcccgtcgcgtctgcacaagtccgccagcgacaagtcggcgttcgcgcacttcggcgccgaggaggtggaggagaccgtgcgcgcggtggaggcgcggcgccccgcgacgacgagggagaaccgcggtcggcggctccccgtggcggagccggagccggcatctgagtcgtcggagtccgagtccgagtcagaggaggaggaggccagcggcggcgaggtggacgcgcgcgcggacgacttcatcaaccagttccgtcaccagctgaagctgcagcgcatcgactccttcatccgccacagggagacggtccgccgcggccaggcggcggcccagggcgtgtaggcgcgccccagcggagggagcgagatgctgcaagagtcggtgacaccgtgaggagaggttgaaatggacgaagagaagctgcagtgaagggagattgggtgggggaggaggagatggtaattcctgcctgcactacctcctcctccgccgtctgctttggtttttcccgtttgttttagctgccgttcctggtgcgagcatgtcgtagctccacactatgcgtttttttgggggggataggagaaccttgccttgcgcaatgtggtatgccacattgcatcgcatcatatatattcataatatatgcgaatcgatagtacaaggaaacccgtagctgtaaatctatggctctcttctctttgctagcattgctgcttcacggttcaaaaccgcttt

SEQ ID NO: 61717 - DNA, 452 bp, Zea mays
  Clone ID: MRT4577_156279C.1
tattttaattgtacgcttactgttgcatgtgcattgctggtgggtggtgagtacttgaataactggtcttgtaaagaacattcttgtctaactgggaacatactttcaagtgcaggattgattattaacattgtgtctgtggtcctgaattcatacggcaagatcggcactgacattgaaggactacaagtgtttctggctagtcatgcatgctctagaacaccctgatgagatgcactagaacattctgttggactgttatgggcagtctgattcagcgtgtgttgcactggtgatggactagtgcacagagcttaaactggatgaggtttttcatgcgtgctacacggagagttacaacatgctgattgtctacatcgaggcccactccaacaaggaagtccagagtgttaacaagtccttgcttgacaacatctacactagggacaagt

SEQ ID NO: 61718 - DNA, 125 bp, Zea mays
  Clone ID: MRT4577_15627C.1
agactctatgccaccgcttctccggactccggcgatcttatcttggcgggcccggcgacccccgtatctccctctagccgtggtgctcctcatcaggtcttcgttcgtcactgcgcttgacaagc

SEQ ID NO: 61719 - DNA, 460 bp, Zea mays
  unsure (1)..(460): unsure at all n locations
  Clone ID: MRT4577_156280C.1
cacgccgntaccgcggacgccccgtggcagcnntagcaaagctagcatgtctgagccacctnnccaccanntccagctgtgcgcgattccgcaatgttctccgagtcgagcccgaacccagcccccgcggcggtgccccaaaagggccgangtctgcgagcctctncactcccccnncactccccaggaaccaaaaannggtgatgtngcgcaactgccnnngccgcgggccgccccgagcgctcgcngtccgcaggaaccaccctggccggcngnngcggcgggggggagttcactgggctttcgccccgcggcccaggcgcccggcgcgccaccgctncgctccgacgagccgacnntcggccnnngcgttcctttcgaggcaccgtgcccccatggaccgacngnnacgtcgnntcattggccggcgnnngcggcggctggggcggcgggcgggcgg

SEQ ID NO: 61720 - DNA, 459 bp, Zea mays
  Clone ID: MRT4577_156282C.1
gctggccgcctacttcttcgccttctccgccacccgcgccgtggggcgcaaggggtccatgctaaccgagggcctcagcttgctcgtcagcgccgccctcaacggcgccggccaggacatcggcgtgctcatcgtctgacgcatccgtcctgggcgtaggcgcggggtgggcaaatcatgaccccgcctgtgcacctgtcgggggagggcgccggcggcgttccggggcatgctcaacagcgggtgccagctgatgatcaccatcggcatcctggacggcggagctcagtcagctcgggaccaacgagatcaaggccgggtacggcgggcccgtgagcctggcgctggtggcagcgccgggggtgatcatcgccctgggcttcatcatgggacagggcaccaacaagtccttgctggagcggaggcacctggtggagacacatctggtggttgggcggg

SEQ ID NO: 61721 - DNA, 570 bp, Zea mays
  Clone ID: MRT4577_156284C.1
aattcggcacgaggcaggaagagagacgacggcggccatggcgacctccttcaggggacgaccaccaagtgcactgcctgcgacaagacggtgtaccttgtggacaagctcaccgccgacaaccgcatctaccacaaggcctgcttccgctgccaccactgcaagggcaccctcaagccaactacaactccttcgagggagtgctctactgcaggcctcacttcgaccagctgttcaagaggacagggagcttggacaagagcttcgaagaatgctactaaagtctcaagcgcctttgctggcaccagagagaaatgtgttggatgcagcaagacagtctatccaactgagagggtcactgttaacaacactatgtaccacaagagctgcttcaagtgctgccatggagggtgcaccatcagcccttctaactacattgcgcacgaggggaagctgtactgcaagcaccaccacatccagctgatcaaggagaaggggaacttcagccagcttgagaatgaccacgaaaagacatcacaggctgggtcactggaggaggatgaacaagag

SEQ ID NO: 61722 - DNA, 663 bp, Zea mays
  Clone ID: MRT4577_156285C.1
catgggcctgcgctacctggagtacagcgtgtccgcggaggagagcaccctgctggagatgctggggccggagcacccggtgatcagggacccggactccgtgcaccgcagcggctgggacaaggtcgccgagtactacctcggcaagcaggacgtgcgcatcgacgtagaccgcttcgcgcccacgctcgcgcaggcgatggaccacctgcggcaccgccaccagtgagccttcattggtcgaacgagctgcacatggagggaggatacgtacatcataacacatctcactcactcgcctcaaaagggacgcacatgcaaacttgcgtttggcggataggttagctccaaactgtaagtcatcgattgtttggtacagaatcgagcggcgtatacgtattctttatcgtctttgtctgaaccatatacatgtatgtactgtttcattcagtcgctagattagctgcgaaatgaagtcattttgtttgttcgtttccgttttgccgtcagttgttatggcacggattggtaaaccaccttgtacttgcctactcgctccgtctcgaaaagagatgaatctgttaggccttattcggctattcatatcttatttagattggatcatattgaaaaaaattataaaagattttgatttgtttgaga

SEQ ID NO: 61723 - DNA, 269 bp, Zea mays
  Clone ID: MRT4577_156286C.1
ttaggccggtcgtgagctaagatcgctcgagcgagcttgcgcaagcaggctactagactcgtggctcaagcccttcaaactatccgatgaccggctcgacaagtttaaggaattacacaagacacggttacagataactgaaaagccgaagcataatagaagaccgaaatggaccactgagagaagcatcaaagtaaccagcaagtatgaattcactgataagatgcatcttgctgatagttctccaggagacggcatcatatgtcatc

SEQ ID NO: 61724 - DNA, 438 bp, Zea mays
  Clone ID: MRT4577_156287C.1
cagaggcatcttctgaccaatgaaaatggtgaaaccaggtagagtatctgactcaaagataacaacgtttacatgcagatacaagacaacaatatcattgttctctgaacacacatgacctccattgtgacccagcctgtgatgtcttctcgtggtcattctcaagctggctgaagttccccttctccttgatcagctggatgtggtggtgcttgcagtacagcttcccctcgtgcgcaatgtagttagaagggctgatggtgcaccctccatggcagcacttgaagcagctcttgtggtacatagtgttgttaacagtgacctggatgcttaaccggttgtcaagtgaagaaggctcaaactaccggaagaatgattgagatggttgaacacagaatcttaccctctcagttggatagactgtcttgctgcatccaa

SEQ ID NO: 61725 - DNA, 426 bp, Zea mays
  Clone ID: MRT4577_156288C.1
atggaggccaccaggaaggcccttgaagatctccaggcagagcaccgtgccggggtccagcgcattgccgagtgggccgacgaggcaagcacggcactggtgccactagggatgtgccccatcccagtgtcggagctgccgatgtcgatcttcgatgccctcccggtgctggactccgccgctgatcgtgtctggcgcctagatcagatcctcggggtccgcctagaggcagagggcagcaagctctgctgggcagtggttcaatacgtcttgacgtgcttccggagtcacgacctcgccatatccttggcgccgatgatcgatggtccggtagccgccacggaagacgccgcccgggagagcgtacaagatgctgtggagatggtggccgcacgcttccagcgtgatcctaccgacgccaagtag

SEQ ID NO: 61726 - DNA, 1087 bp, Zea mays
  Clone ID: MRT4577_156289C.1
aaaaaaacttgatattcatgaggcatatgactagatcagtgctgtatatggttttaaacatgttttatatcacccatccagttgacaccattcatgttttgttctttatgaacaactggcactagatgatgctcatcatgattgcatattatttggcagaatgctactaaagtctcaagcgcctttgctggcaccagagagaaatgtgttggatgcagcaagacagtctatccaactgagagggtaagattctgtgttcaaccatctcaatcattcttccggtagtttgagccttcttcacttgacaaccggttaagcatccaggtcactgttaacaacactatgtaccacaagagctgcttcaagtgctgccatggagggtgcaccatcagcccttctaactacattgcgcacgaggggaagctgtactgcaagcaccaccacatccagctgatcaaggagaaggggaacttcagccagcttgagaatgaccacgagaagacatcacaggctgggtcactggtttcaccattttcattggtcagaagatgcctcttcaccaggaagttatggtctgttgaagctaccttcaccaggaagtcgtctagcccatgctcatctccttgatccatctcccattggcttccccctcatcccaactgccccagcctgaaattctcggattggaacacatgttccatcgcggcaaagcagaacagcgtccccgacttatccttgttctacagatcacgcagacaggggagagtgctaatccacttgatcgatccgccgttgactcttctggatctcccgcattgggaagctgggatccccaccgtctctcgtgtgcatccaactcatgaagcggatcctctcggcctcccttgctcccacctcacgtaggcacacggctcaatctcggcatcccgtatgagctcgagctgcacgccccccgtctcgaacagcgggatcatagcgttctccggcgcgagcccaatgaccacctcgctcgcccgcctcacagtcgccaccaccaaatccgccctataccactgccggaaagatcggaagcgaacgcacgcgtggg

SEQ ID NO: 61727 - DNA, 303 bp, Zea mays
  Clone ID: MRT4577_15628C.1
ttgtattcatcggcttgcaacaaacccaaagtacgaaacagagaatgacatattgaaacttgcacccacattctcatagacccatcgtagacccatgattttatagaccctaggggcacttataacagagaggactagattactgagtggggctagtaataattggtttccaatgcgttactgccttttactctaacaaagacggaagagggaatatggcccatagcttatatcgctgggtcacaacacgccaatcagaatgcaccgctagtggtctaaccacaatatgaaaaggcctgagac

SEQ ID NO: 61728 - DNA, 1748 bp, Zea mays
  Clone ID: MRT4577_156290C.1
aatagatccagtggtgttcttgcgtgtctcctccctacaaatggcttcaggaactccgaaggttgtcaagccagaaagaaacgttgggaatgaggtatatgcaacgccttaatattcatgtgtttatgtgtttttctcagtgcctacaaagtttgcattttttttccttcactttttcagtccagagtagcacaggaaacaaatacattcaatcattgatgcacaaacaactccttaaacatgatgtgagatgcttggatcttgaatgcacagcaatcccaatggttagagagagaaagatccactcaaaacctaactgttatgcttggatcagaacagagtaaatcttgtccaataaaaagatcagaacaccagatatttaacagatcacaaaaaaaaaacttgatattcatgaggcatatgactagatcagtgctgtatatggttttaaacatgtttcatatcacccatccagttgacaccattcatgttttgttctttatgaacaactggcactagatgatgctcatcatgattgcatattatttggcagaatgctactaaagtctcaagcgcctttgctggcaccagagagaaatgtgttggatgcagcaagacagtctatccaactgagagggtaagattctgtgttcaaccatctcaatcattcttccggtagtttgagccttcttcacttgacaaccggttaagcatccaggtcactgttaacaacactatgtaccacaagagctgcttcaagtgctgccatggagggtgcaccatcagcccttctaactacattgcgcacgaggggaagctgtactgcaagcaccaccacatccagctgatcaaggagaaggggaacttcagccagcttgagaatgaccacgagaagacatcacaggctgggtcactggaggaggatgaacaagagtattgatcactgagcacaaccacagatgaataatgaatcctcttgcatttgcctagagcactatgtatttctgtggcgtggttcgatttcagttttaccaatggaggtcatgtgtgttcagagaacaatgatattgttgtcttgtatctgcatgtaaacgttgttatctttgagtcagatactctacctggtttcaccattttcattggtcagaagatgcctctgcaccttcaccaggaagttatggtctgttgaagctaccttcaccaggaagtcgtctagcccatgctcatctccttgatccatctcccattggcttccccctcatcccaaccgccccagcctgaaattctcggattggaacacatgttccatcgcggcaaagcagaacagcgtccccgacttatccttgttctacagatcacgcagacaggggagagtgctaatccacttgatcgatccgccgttgactcttctggatctcccgcattgggaagctgggatccccaccgtctctcgtgtgcatccaactcatgaagcggatcctctcggcctcccttgctcccacctcacgtaggcacacggctcaatctcggcatcccgtatgagctcgagctgcacgccccccgtctcgaacagcgggatcatagcgttctccggcgcgagcccaatgaccacctcgctcgcccgcctcacagtcgccgccaccaaatccgccctctgttgctttaagttttttgccaacctagcaaagcgttgaagctcaaaattgtcgttttatcactcctcagttacttttggaaccaccgaacgc

SEQ ID NO: 61729 - DNA, 467 bp, Zea mays
  Clone ID: MRT4577_156291C.1
ttttttttttttttttttttttttttttttttttttttttttttttttttttttttttttttttttttttggggcccattagctaggaccctatttatttttaaaaacccaagggtatttttccatttggggggcctggcctaaacgtaacatgggagggggctgtataaaggggaaccatagcttgccggtgtacaagtgacaaaggggcagagggctggggggttaactttaacggttgggagaacctggtggttgctaactttaagaaaatacatttttaagattttacatgttcaacccccgggttggtaaaatggagggcgggggtcctcccctgtctgtaaaaattggggaaaaggagcgggaatttttaccaatttattggggggggggggggaaaaaaccacccaatgggcctgcgggggaaacccacaatttccaagaacaacggggaaagggttttt

SEQ ID NO: 61730 - DNA, 1542 bp, Zea mays
  Clone ID: MRT4577_156292C.1
ccggccgggaatgccggccgctggggagtttggagcatacctctagcagcctcgcctctgtagctaggcattgtagtagaggggggaaagaagaagactagaagaagagggccatggcgacctccttccagggaaccaccaccaagtgcaccgcctgcgacaagacggtgtacctcgtcgacaagctcaccgcgacaaccgcgtctaccacaaggcctgcttccgctgccaccactgcaagggcacactcaagctcgccaattacaactccttcgagggagtgctctactgcaggcctcacttcgaccagctcttcaagaggaccgggagcttggacaagagtttccaaggtgttatctgttatcatcgcgcgtttcttaattttccctttgcaacgcaacatatatacatagatccgggtgtggttcttgcatgcttgcgtgtcctcacctcacctggctgcaaaattaatgcttcaggaaccccaaaggttgtcaagccagaaagaaacgttgggaatgaggtacgcaaacagcttaggattcatgttgcattttttttcactttcagtccagagtagagcagaatatgtatatatactaaatctaggcccatgagaaggggtacgggccgggaggccggccgctggggagtctggagcatacctctagcagcctcgcctctgtagctaggcattgtagtagaggggggaaagaagaagactagaagaaaagggccatggcgacctccttccagggaaccaccaccaagtgcaccgcctgcgacaagacggtgtacctcgtcgacaagctcaccgccgacaaccgcgtctaccacaaggcctgcttccgctgccaccactgcaagggcacactcaagctcgccaactacaactccttcgacggagtgctctactgcaggcctcacttcgaccagctcttcaagaggaccgggagcttggacaagagcttccaaggaaccccaaaggttgtcaagccagaaagaaacgttgggaatgagaatgctactaaagtctcgagcgccttcgctggcaccagggagaagtgtgtcggatgcagcaagacagtctatccaattgagagggttactgtgaacaacaccatgtaccacaagtgctgcttcaagtgctgccatggaggatgcaccatcagcccttctaactacatcgcgcacgaggggaagctctactgcaagcaccaccacgtccagctgatcaaggagaaagggaacttcagccagctcgagaatgaccacgagaagacatcgcaggctgggtcgctggaggacgacgaagaagaagagtattaattaatcgctgagcaaaaatacataccaccagaagaataattaatcttccttcttgcactatatatttctgtgccatttcagtcttaccaatggagatcatatgtgcgttcagagaacaatgatatcgttttcttgtatctgcatgtaaaccacgtctactaccttgatttcaccatttgcattgatcagatggtaatctagacttcttgttgg

SEQ ID NO: 61731 - DNA, 269 bp, Zea mays
  unsure (1)..(269): unsure at all n locations
  Clone ID: MRT4577_156293C.1
ggttgttgcttgatcctnngangacgcgtacgtacgctagctagtcttctgaagcggtacctgctttttataattgcctaaagcacgtgccacgcggagaggagcgacgcgacaggagcggagtcgccacgagcagcgaaacaggacactgccgtctccattgccttcaggacctgcagggagcaccgcagagacctgagtagatcaaccgagtgccagacagaggatccatacgacccgcatgctccaggacttgactattcatcatt

SEQ ID NO: 61732 - DNA, 1709 bp, Zea mays
  Clone ID: MRT4577_156294C.1
aacagatcacaaaaaaaaacttgtttttcatgaggcatttgactagatccgggctgtttatggttttaaacatgtttcatatcacccatccagttgacaccattcatgttttgttctttatgaacaactggcactagatgatgctcatcatgattgcatattatttggcaaaatgctactaaagtctcaagcgcctttgctggcaccaaaaaaaaatgtgttggatgcagcaagacagtttatccaactgagagggtaaaattctgtgttcaaccatttaaatcatttttccggtagtttgagcctttttcacttgacaaccggttaagcatccaggtcactgttaacaacactttgtaccacaagagctgcttcaagtgctgccatggagggtcccccccccacctccccctcgtctgctccctcgcgcctgccctcggctgctggccgctccccgacccgctgtcccccccgacaggctccctcgccagctgcctcggtcctgccttccttgcccccccttcccccggctgcacctcaccgcccccgccgtcctcccgcccccccgcccccatatggcgggccgctcgcggcaggccgtcgacccagtagccacagttcgcatataggcagccatcagctgtacggcctcgcgtccgtaagcagagtgtgtcgttgcggaggcaggaagagagacgacggcggccatggcgacctccttccaggggacgaccaccaagtgcaccgcctgcgacaagacggtgtaccttgtggacaagctcaccgccgacaaccgcatctaccacaaggcctgcttccgctgccaccactgcaagggcaccctcaagctcgccaactacaactccttcgagggagtgctctactgcaggcctcacttcgaccagctgttcaagaggacagggagcttggacaagagcttcgaaggaactcccaaggttgtcaagccagaaagaaacgttgggaatgagaatgctactaaagtctcaagcgcctttgctggcaccagagagaaatgtgttggatgcagcaagacagtctatccaactgagagggtcactgttaataacactatgtaccacaagagctgcttcaagtgctgccatggagggtgcaccatcagcccttctaactacagcttcccctcgtgcgcaatgtagttagaagggctggtggtgcaagcaccaccacatccagctgatcaaggagaaggggaacttcagccagcttgagaatgaccacgagaagacatcacagggctgggtcactggaggaggatgaacaagagtattgatcactgagcacaaccacagatgaataatgaatcctctcgcatttgcctagagcactatgtatttctgtggcgtggttcgatttcagttttaccaatggaggtcatgtgtgttcagagaacaatgatattgttgtcttgtatctgcatgtaaacgttgttatctttgagtcagatactctacctggtttcaccattttcattggtcagaagatgcctctgcacctacaagacacttgactgtaaccaaaggaggtcatgtgtgttcggagaacaatgatattgttgtcttgtatctggatggaaacgttgttaatgataatgtagatttgtatctgggtgtaaacctggggctcttggtccatcttttgtttaagatgatgtttggcaaaaaaaaaaa

SEQ ID NO: 61733 - DNA, 297 bp, Zea mays
  Clone ID: MRT4577_156295C.1
gcagatgaggacctacctgaacggcctccacttttagtcggatgagcgtgcactatcgtatgcgagggctcttatcgatcagtggtagcatatcgacacggaagctactcttgacatggcacaaggactacttcaacgcgccgaactgctacccgcagaatgacgctgacatcgtcaagatgctcaagggcccggtgttggtcaacggcagttacatcgggcgatactgctcctacaagggctactcaatatgctgctgcctctaaaacatctccaagacgttcaccgagaccaaat

SEQ ID NO: 61734 - DNA, 120 bp, Zea mays
  unsure (1)..(120): unsure at all n locations
  Clone ID: MRT4577_156296C.1
ttnnnnnnnaaaccgcgaacactatttaattcattcgattattattaaagaaagccccggatacataaatgggaagaccggtgaagggggtatttacaggttctagcctttagctggtcc

SEQ ID NO: 61735 - DNA, 436 bp, Zea mays
  Clone ID: MRT4577_156297C.1
tggctctggacctttgggctgatttatgtgcttgtggtcatggccctaattcggtcgcttccccgactattactgctatttcggaagcttcgtctcggatgaggcggaaaaatagtattggccttatgggggtacaccagtcatccaattgacccccacaggcgcccgcgacggctagcgaaggaggcctgcacctcccgcctgaacacccctgtgcgcacgtagccgcaacgcttgtacccgtcgtgcgacgcgcgtacgcgctccggatccgttgccttgacgttccccgcgtcgtctggaacggagacggaacgacgacccttgttgtaccctttacgtcgtgaacggcggcagactcggcacacctcgccgcgacatcgcgatcgatccacggcgcgcccggcccacggagctatctcacgtcccacgaggc

SEQ ID NO: 61736 - DNA, 259 bp, Zea mays
  Clone ID: MRT4577_156298C.1
cgctaagatggaggtttccaccaaccattttcctgacgcccatcaagcaagacaccaacggggtcgtccttccatactacgggtacagcattaactggaactatgggatactcccatatacatgggaagacccaacctctgcaaattctgaggttgaaggagcatctggcgataatgatcccgttgatgttaatgccattggtgtacggactgctaatacacagcatcgactcatgaccctgacttaagcatagtaccc

SEQ ID NO: 61737 - DNA, 272 bp, Zea mays
  Clone ID: MRT4577_156299C.1
cccacgcgtccggaagagcaagtggcgcagttgttggcgaggattgaagagggaaatcaagagaagtggcggatgatggacacgatgcaggcgacgatcgagaacatggagtcctcggtgaaaagtgtattgtctgaacaaggcgatctgcagaagtggcgctcggaagaggaggcgaacgtctctaaagtcgtggaggcggtaaaggcgatacagagcaaggttgatcaagcgattctaaagaaggcggtgatcctcccgaccaacgagtc

SEQ ID NO: 61738 - DNA, 468 bp, Zea mays
  Clone ID: MRT4577_15629C.1
atctccccctctatctggagagagagagagaaagagacatggggtcatctctctccccgtcatccgtcgccgcgctcaccaccgcagcccatgggcaccgccaccgctaccacctgtcctcctcctcctcctccgactactacgaagacgacggcttcgagttcacgccactcctacccaggccgcggcgccgtcacagcgcgcgcacggagcgtccaagaaccgtcgcccaggctgcggccacgacagcggcccagccgcagcctccccagctgcgcgcgcgccgcggagcgccaagcgtcgtggccgcgacgccggcggcgccaccaacaccaaggaagcagcaggtgcggtggcacgacatggcgttcgggtccgcgcgcgtgccggcggccatggacatgggcgagatcaggaggcgcctgagggcgcggcagctggctctggccggtggcgccgccgggaacg

SEQ ID NO: 61739 - DNA, 360 bp, Zea mays
  Clone ID: MRT4577_1562C.1
atggaggccctcataacagagctcagggccaagctgaatgccctggaccaaaccctagaggcccagcaggtccaacaagtggaggccattgaaaggatgaaaaaatggcaacaagagctggaggacaaggccaacgacattgccctcgccgaggagaaccttaaggagaagggtacatccctggacaggcgggagacggacctcaccaggcaggagaaggatctcgccttcagggaggagatgcttgaaaggtggggcatgttgctggtcgagcacgagctcgaggcggaggagaaggagcggaagctagaggagcggatccgctggttcgaagcggcgcaggcagcgccgggtccctag

SEQ ID NO: 61740 - DNA, 498 bp, Zea mays
  Clone ID: MRT4577_156300C.1
ctatctgagcgcgttctgtatgagattctacaactcgacagatccagttgcatgctaatgagttggccactctcacatgccgtgggacatcacctattgcgaccaactgtccataaacgtgctactgctactcctattcgagacccgggggaccgcggcgctagccgaaactgcaggacccggtcctgtgatcgtcagccgaggtgataaagatgctgttagaacgatactgagactgctacagcgtgatctagtgctccacctccaccccaagcagcgcgaagttaaaaagagactgcatgatcaggtcaggggcccccgcctcatcctcctcgttggacccggcgaagctggccgagacctgcgctctcgcccataccatcgccttgtgaaagccctggattattctaaggacctgtgacttcttatgccgtcagcgagaagatgtccttcccgcaaagcgtggcttagagcgtcatcctgtccatctctttgcag

SEQ ID NO: 61741 - DNA, 451 bp, Zea mays
  Clone ID: MRT4577_156301C.1
ttttttttttttttttttttttttttttttttttttttttttttttttttttttttttttttttaaaaaagttaaagtttaaaaatttaaaatggtaaaataaaacgaacggcaaaaataataaaaataaaaaaacccccaaaaaaaaaaaaactgggttactgcctattattagttattaaaaaaaaaaaaattattttaaaccgaattttaaataacccaaaactgattttttttttttgtaaaaaaaaggaaaaataattttttttggaaaaaagtaaatgaaaataaatttttagcgttaagccaaaaaaccggttgttaatcaaacggttaaactaaagtaaaaataagctggcttactttaaccggaaaaatttcaatggttcccccttcaagaatccggggggaaataagccctttggccccctttttggggtgtgaggggtcc

SEQ ID NO: 61742 - DNA, 290 bp, Zea mays
  Clone ID: MRT4577_156302C.1
agcagtggtaacaacgcagagtacttttttttttttttttttttttttttggaatacttggcaattcatcgactgacagtgcattaggtattcgagaatctgctattagttgttcttggggagaccattgactttttatgccagaaaataaaatccggttcttctgttttgtagtttcactttcgtttgtactgatctggcgacaaggaattccatagtactcacaacaataacatgttccagggtcacttgtctgttggttcccgctactctgcgttgttaccactgct

SEQ ID NO: 61743 - DNA, 442 bp, Zea mays
  Clone ID: MRT4577_156303C.1
acaacctcaaccttcaccttaataaggtaaaaaaagggggaaaaaaacctctggtttttaaccgggggcgcgggccaggggaccacccaacggaaccccagtggagccacagccacggggcgcccagggacccggaaacccacccccgcccacccaaacccaaaaccacaacccagccgtataaccccatcttcgttggcggggcccgccggggcgaagggcacgggaaaccagtttaataacaggacctgaaagaggggggccgcggcctttttttggcccagcccgacaagggaggggtctccaacaagcggcccgaaaaggggcccggcggccttaagggggaaaaaggggcccggaaaaacaacccgggggcggtgggcaaggcccgtaaaccccaaaccggggcgctggaatcccccggggccccgggacgggaagg

SEQ ID NO: 61744 - DNA, 182 bp, Zea mays
  Clone ID: MRT4577_156304C.1
accactagtctactttataatgaaggaccttgtgtcaggatcctggcccagccaattcccaagaaggattgcacagatggatgctgctacgtaaccagaggaccttcctatagccgctgctgcctctcctattagctagtcattgaaggcttatgccatcaacccagcttccatggtatgtg

SEQ ID NO: 61745 - DNA, 816 bp, Zea mays
  unsure (1)..(816): unsure at all n locations
  Clone ID: MRT4577_156305C.1
cattgggtacctcgaggccggccggggcctcgcctcccaccattagagcgcgcgcgccaagctcgtggtgaggttttcgagatgaaggttatcgagaagatcctggaggcggcgggggatggccggacggcgttctcgttcgagtacttccctcccaagacggaggagggggtcgagaacctgttcgagcggatggaccgcatggtggcgcacggcccctccttctgcgacatcacctggggcgccgggggatccaccgctgaccttaccctcgaaatcgccaaccgtatgcagaacatggtgtgtgtggaaaccatgatgcacctgacatgtacaaacatgccagtagagaagattgaccatgccttggaaaccatcaaatccaatgggattcaaaatgttttggccctcagaggggatcctccacatgggcaagacaaatttgtgcaagttgaaggcggatttgcttgtgctcttgatttggtgcagcatattagagccaagtacggtgattattttggcataactgtagctgtgttatccaggcgagggaggtgctacattggaagcatatagcaatgatcttgcgtacttgaagagaaaggttgatgctggtgctgaccttattgttacacaacttttctatgataccgacatcttttctcaagtttgtgaatgactgccgccaaattggtattacttgtcccattgttcctggcataatgccaataaataactacnaaggtttcctgcggcatgactgggttctgncaaactaagatacctttctgagatcactggctgcactagatccta

SEQ ID NO: 61746 - DNA, 205 bp, Zea mays
  Clone ID: MRT4577_156306C.1
gctcatgcacataggcgaacacgtggacgtagagataggataggacagtgcaccgcagaaaggaaagcaactgcaggatcacgaagggtagctacgaacgctgctgccatcaagtgcctcatcacagcgaatgacaggggataacagcttagcgaaagagctgctcatcgagagacatatgggtgcttaccgtgggccataagct

SEQ ID NO: 61747 - DNA, 1692 bp, Zea mays
  Clone ID: MRT4577_156307C.1
tagatcgcgcgcgccaagctcgtggtgaggttttttagatgaaggttatcgagaagatccaccgctgaccttaccctcgaaatcgccaaccgtatgcagaacatggtgtgtgtggaaaccatgatgcacctgacatgtacaaacatgccagtagagaagattgaccatgccttggaaaccatcaaatccaatgggattcaaaatgttttggccctcagaggggatcctccacatgggcaagacaaatttgtgcaagttgaaggcggatttgcttgtgctcttgatttggtgcagcatattagagccaagtacggtgattattttggcataactgtagctggttatccagaggcacaccctgatgcgatacaaggtgagggaggtgctacattggaagcatatagcaatgatcttgcgtacttgaagagaaaggttctctctactttcttgattttgtttacttttctcaatctcaaaatgatagaatacatttttgttggtatgaaccaaataataagaaaacggtatgatgttgtaagtcatgacactttatatgttttgcttctcactctgtatattttcaggtcgatgctggtgctgaccttattgttacacaacttttctatgataccgacatctttctcaagtttgtgaatgactgaccaaggtttcaaggccattaccttggaggccagcgactaatgttttccgtgttaaagaggatgttcgacctatattctgggccaacagaccaaagagctatcttaaaaggacattaggttgggatcagtatccccatggacggtggggtgattctcggaacccatcatatggagcacttactgaccaccagcgcttcacaaacttctgtcaagggaaactcacaagcagcccatggtcagaattggacggtcttcaaccagagacaaagattatcgatgaccagttggtgaatattaaccagaagggtttccttacaattaacagccaacctgctgtaaatggagagaaatccgactcgcctactgttggttggggtggtcctggaggctacgtttatcagaaggcctacctcgaattcttctgcgcaaaggagaagttggaccaactaattgagaagatcaaagcattcccttctctcacttacattgctgtgaacaaggatggagaaacattctccaatatttcaccgaacgccgtgaatgctgtcacgtggggtgttttccctggcaaggagattatccagcctacggttgtggatcatgcaagttttatggtttggaaggacgaagcatttgaaatctggactcgggggtggggttgcatgttccctgagggtgattcatcgagggagctactagagaaggttcggaagacctactacctggtcagcctcgttgacaacgactacgtccagggggacctgtttgctgccttcaagatctgattatgctctcatggtctgtattgttgtatggttggacccaacaatattcttgcatccccgactacaggtctgatcgccatgaaagcttctgttcatttgagctcgggggagtccgctagtcttatttttcttgatttctcttggctttctggaaccatacgaatcaataagaaatgagctgtgttcactttccagttcaaaaaaaaaaaaaaaaaaaaaaaactcgaggaagggggcccggtacc

SEQ ID NO: 61748 - DNA, 395 bp, Zea mays
  unsure (1)..(395): unsure at all n locations
  Clone ID: MRT4577_156308C.1
aaaaaacatatttttaaaaaaaaacgggggggggagacatgctacaatcactttctccaagcaagtttttcaccgtatatcttctaagggggcggggggggggtacatcacactgctatattgttatatgaccaaaataactgcccaatacaatcagatggctggggcttttccaggggcccaccccctcccagcgtgcccggggaccaactgggttgctcctcgctagcccttgggaagttntaattttatcttcgctcccaaggccacgcctcctttttttttttcccggggcccttccttccccgggcgctcttgtttttttccccccccccccccgcggggggcgtgtgggtccccccttcttatccctccctgtcgctgcgcttcttttc

SEQ ID NO: 61749 - DNA, 484 bp, Zea mays
  Clone ID: MRT4577_156309C.1
caccattagagcgcgcgcgccaagctcgtggtgaggttttcgagatgaaggttatcgagaagatcctggaggcggcgggggatggccggacggcgttctcgttcgagtacttccctcccaagacggaggagggggtcgagaacctgttcgagcggatggaccgcatggtggcgcacggcccctcgaaatcgccaaccgtatgcagaacatggtgtgtgtggaaaccatgatgcacctgacatgtacaaacatgccagtagagaagattgaccatgccttggaaaccatcaaatccaatgggattcaaaatgttttggccctcagaggggatcctccacatgggcaagacaaatttgtgcaagttgaaggcggatttgcttgtgctcttgatttggtgcagcatattagagccaagtacggtgattattttggcataactgtagctggttatccagaggcacaccctgatgcgatacaaggcgag

SEQ ID NO: 61750 - DNA, 477 bp, Zea mays
  Clone ID: MRT4577_15630C.1
atcctaagggaacatgcctgcctggggccaatttaaagggggttttccagggaaccgcgtccctgggaataaattaagaccccctgaaccccaaaattaacccaacagcccaaagggcatgggccgggtttccatttccttttttttttccccccccaaacacaagggccacgtgcgcggggggggtttttttttatttgttgttgtagacatgcaagtcgggggcatgctgttcccgttcggggacgtccccctttgggagattcggggcgactccgggagctgggcctcgggtgagttggggtcgggcccccccatttggttcttttccaccgccctggggttgaccttgatcttttcggagacccacttggtgtggccggactccaggtcgaacccgagggcccgggccggcgaccgggcccagaggggagcagaggccaccaggaagagcaacgcggacgggcgcagccacct

SEQ ID NO: 61751 - DNA, 925 bp, Zea mays
  unsure (1)..(925): unsure at all n locations
  Clone ID: MRT4577_156310C.1
tcccgggnagcccgnaaaaatcaaccaagggccgagggaaaaagnanaaacgaaaaaaaacacagcaaattagagagggggaacacgcgaagttagccggaggccaaccctcgcgcctcgcacacaccgtacctccctacctccgccggacgtcgggcgaccgaccgatcgatctgtcaaacgcgcggctatggccgacgcacaggccccgtccccggcgcggttcacggcgcgggagctcgcggcggcggagcagctcatccacctcagcgagagcagctcctcctcctacgccgccctcccgcggggatccgtcgcgtcggcctcctccacctcgtccccgcgctccgtcaacgcgccgccgccgcctgcgacccctcctccagctgggctattagccgccccggcggaggatgacgaagacgacctggaccagcaggaggtgcgcgggaggccacgcaggaacaggcgctaccgcctgatcgccgagatctacgcggcctcggagcccaagccgatcgtgggcggggcgcgccgcaggaaggtggacaggccctcgacggacggcgcgccggaggccaggaagtagagggagagagagaggaggtggacttgcttgtaattatggataattatcagggactagctagctctagctttgctataggaaggtttgtgtgagagcttggtttagattggcatatctacccaccatccattctctctaccttagctacctttttgttactcatatcatgcatgatgttcttctttctcatggatcatctgatccatttctcttctgggagagaagatcgatgacacagatcggtgatcatcactaggagttggtgggttattaactgtaaattaaactattgtatatatcctttcactagtgagatcagtacttggcacttgctgc

SEQ ID NO: 61752 - DNA, 2189 bp, Zea mays
  Clone ID: MRT4577_156311C.1
caccattagagcgcgcaccattagagcgcgcgcgccaagctcgtggtgaggttttcgagatgaaggttatcgagaagatcctggaggcggcgggggatggccggacggcgttctcgttcgagtacttccctccttctgcgacatcacctggggcgccgggggatccaccgctgaccttaccctcgaaatcgccaaccgtatgcagaacatggtgtgtgtggaaaccatgatgcacctgacatgtacaaacatgccagtagagaagattgaccatgccttggaaaccatcaaatccaatgggattcaaaatgttttggccctcagaggggatcctccacatgggcaagacaaatttgtgcaagttgaaggcggatttgcttgtgctcttgatttggtgcagcatattagagccaagtacggtgattattttggcataactgtagctggttatccagaggcacaccctgatgcgatacaaggtgagggaggtgctacattggaagcatatagcaatgatcttgcgtacttgaagagaaaggttgatgctggtgctgaccttattgttacacaacttttctatgataccgacatctttctcaagtttgtgaatgactgccgccaaattggtattacttgtcccattgttcctggcataatgccaataaataactacaaaggtttcctgcgcatgactgggttctgcaaaactaagataccttctgagatcactgctgcactagatcctatcaaagacaatgaggaggctgttagacaatatggaatccaccttggaactgagatgtgcaagaaaattcttgctactggcattaagactttgcacctttacacactaaacatggacaagtctgctataggaattttgatgaatcttggattaattgaggagtccaaggtttcaaggccattaccttggaggccagcgactaatgttttccgtgttaaagaggatgttcgacctatattctgggccaacagaccaaagagctatcttaaaaggacattaggttgggatcagtatccccatggacggtggggtgattctcggaacccatcatatggagcacttactgaccaccagttcacaagaccacgaggccgtggtaagaagctccaagaggaatgggctgttccactgaaatctgtggaggacattagtgagcgcttcacaaacttctgtcaagggaaactcacaagcagcccatggtcagaattggacggtcttcaaccagagacaaagattatcgatgaccagttggtgaatattaaccagaagggtttccttacaattaacagccaacctgctgtaaatggagagaaatccgactcgcctactgttggttggggtggtcctggaggctacgtttatcagaaggcctacctcgaattcttctgcgcaaaggagaagttggaccaactaattgagaagatcaaagcattcccttctctcacttacattgctgtgaacaaggatggagaaacattctccaatatttcaccgaacgccgtgaatgctgtcacgtggggtgttttccctggcaaggagattatccagcctacggttgtggatcatgcaagttttatggtttggaaggacgaagcatttgaaatctggactcgggggtggggttgcatgttccctgagggtgattcatcgagggagctactagagaaggttcagaagacctactacctggtcagcctcgttgacaacgactacgtccagggggacctgtttgctgccttcaagatctgattatgctctcatggtcggtattgttgtatggttggacccaacaatattcttgcatccccgactacaggtctgatcgccatgaaagcttctgttcatttgagctcgggggagtccgctagtcttatttttcttgatttctcttggctttctggaaccatacgaatcaataaggaatgagccgtgttcactttccagttcctccatgtgcaagtggcgcaacggccaggttctagatgtaaaattcgtcctctaatacagaggttggtattgtatgttagtgtaggatgcgctgctcgcattgcactgtattgtgcttctgtttggtggaaataaagattggtcgaaaaaaaaaaaaaaaaaaaaaaaaaaaaaaaaaaaaaaaaaaaaaaaaaaaaaaaaaaccccccccccccac

SEQ ID NO: 61753 - DNA, 2569 bp, Zea mays
  Clone ID: MRT4577_156312C.1
tagcgtgcgcttcagcaagccctgtaattggaagtataaactcatccgcaccacctcccccgggcccgcgcgccgctcctgcctcgcctcaccaccattagagcgcgcgcgccaagctcgtggtgaggttttcgagatgaaggttatcgagaagatcctggaggcggcgggggatggccggacggcgttctcgttcgagtacttccctcccaagacggaggagggggtcgagaacctgttcgagcggatggaccgcatggtggcgcacggcccctccttctgcgacatcacctggggcgccgggggatccaccgctgaccttaccctcgaaatcgccaaccgtatgcagaacatggtgtgtgtggaaaccatgatgcacctgacatgtacaaacatgccagtagagaagattgaccatgccttggaaaccatcaaatccaatgggattcaaaatgttttggccctcagaggggatcctccacatgggcaagacaaatttgtgcaagttgaaggcggatttgcttgtgctcttgatttggtgcagcatattagagccaagtacggtgattattttggcataactgtagctggttatccagaggcacaccctgatgcgatacaaggcgagggaggtgctacattggaagcatatagcaatgatcttgcgtacttgaagagaaaggttgatgctggtgctgaccttattgttacacaacttttctatgataccgacatctttctcaagtttgtgaatgactgccgccaaattggtattacttgtcccattgttcctggcataatgccaataaataactacaaaggtttcctgcgcatgactgggttctgcaaaactaagataccttctgagatcactgctgcactagatcctatcaaagacaatgaggaggctgttagacaatatggaatccaccttggaactgagatgtgcaagaaaattcttgctactggcattaagactttgcacctttacacactaaacatggacaagtctgctataggaattttgatgaatcttggattaattgaggagtccaaggtttcaaggccattaccttggaggccagcgactaatgttttccgtgttaaagaggatgttcgacctatattctgggccaacagaccaaagagctatcttaaaaggacattaggttgggatcagtatccccatggacggtggggtgattctcggaacccatcatatggagcacttactgaccaccagttcacaagaccacgaggccgtggtaagaagctccaagaggaatgggctgttccactgaaatctgtggaggacattagtgagcgcttcacaaacttctgtcaagggaaactcacaagcagcccatggtcagaattggacggtcttcaaccagagacaaagattatcgatgaccagttggtgaatattaaccagaagggtttccttacaattaacagccaacctgctgtaaatggagagaaatccgactcgcctactgttggttggggtggtcctggaggctacgtttatcagaaggcctacctcgaattcttctgcgcaaaggagaagttggaccaactaattgagaagatcaaagcattcccttctctcacttacattgctgtgaacaaggatggagaaacattctccaatatttcaccgaacgccgtgaatgctgtcacgtggggtgttttccctggcaaggagattatccagcctacggttgtggatcatgcaagttttatggtttggaaggacgaagcatttgaaatctggactcgggggtggggttgcatgttccctgagggtgattcatcgagggagctactagagaaggttcagaagacctactacctggtcagcctcgttgacaacgactacgtccagggggacctgtttgctgccttcaagatctgattatgctctcatggtctgtattgttgtatggttggacccaacaatattcttgcatccccgactacaggtctgatcgccatgaaagcttctgttcatttgagctcgggggagtccgctagtcttatttttcttgatttctcttggctttctggaaccatacgaatcaataagaaatgagctgtgttcactttccagttcctccgtgcaagtggcgcaacggccaggttctagatgtaaaattcgtcctctaatacagaggttggtattgtatgttagtgtaggatgcgctgctcgcattgcactgtattgtgcttctgtttggtggaaataaagattggtcgaaatctgagggccagattgaaagccaaaaaaaaaaaaaaaaaaaaaaaaaaaaagactcgaggggctaaatttcattttttgttcaattttgaataagaagaagaatctagcccctccggtttctcattcccaatctgtcctgaatgttcacaagcccccatttgaatttagccgggtaacccctttaattaggaggtctattgaggcgtttttatgggtatgtggaaagcttaggagactcgagacgactctatataaaggcaggcctcctttgggtcaaagaataattttctgaatcacttgtttttg

SEQ ID NO: 61754 - DNA, 136 bp, Zea mays
  Clone ID: MRT4577_156313C.1
cgaaccttaacacccgcacaccttcccggtctactatcttctgctcctagatcgcgcacgacttgtgcgatgaccgtctgatgtcgcactgacttctgcagtaactggttgatgcgtcagcgaacatgccaacgct

SEQ ID NO: 61755 - DNA, 366 bp, Zea mays
  Clone ID: MRT4577_156314C.1
tcacctgcccccgaggagagagagagaaaatcagcgagacgcgaatcagcggcggcgatggctctcccggcgtccagctccaccctctcccgcttcctctcctcccgccgcatccagcccacggacgtcaccgccctcgccacctggggcatcttcgccggcagcgccgccatctacctcgtccagccattcgactggatcaagaaaaccttctttgagaagcccgagccagaggcatgagtgtcgtcctgggcatggacggctgcaacttttgatgcgcacattttcaggatgattctctgagcttggatgacaacccagccaataatatacaagaccctcgcgttcccttgtttgattttccat

SEQ ID NO: 61756 - DNA, 376 bp, Zea mays
  Clone ID: MRT4577_156315C.1
gttccgtagcgaattcttggggtttttgcagtatgaacaaaacctccaagaaaatatgaggggttactgaggggtgcaaacacgctagtccgagtgaaactaaatggtcggaaccgagcatgccctgaggagaatcacttgtgggttctggctcccctccttaatcggaaagttgcccgaaccaagctatagtcagtgtttatgaccccctgggcaaaaaaatgttgatttttgtagccgactttttttccggccccgttcattcaaatgattgtgaggaccaacacccctggaaagtccagagcacttgggacttaataaagggctgattggtggaagacaaaactttttttgggggggggggagatctaaaaat

SEQ ID NO: 61757 - DNA, 593 bp, Zea mays
  Clone ID: MRT4577_156316C.1
ctgaggatcgtgcatgtggagacagacttgttgaacgacattcacaatatccggactggtgaaagtgaggtactgtaatgcgcctgcaagactgtgaaattccgtgggatttgagacagggtcaccatcagctgagagtttgggttgatatcaacaggggttgtacagggtttgcagtcactcataccagctcgctcaagtatctcaatcatatactggcgctgagagtgatgccagaagcagactgttgaacatgcatacccaggaaatgatgaagaggaccaagatctttcagtgaaaactcctgttggtgagcagtaatagtgcgccgtagaagaggcatggacgaagcagttaacacaatgtcatccacgtaaagaagaaggtaaatcatatctgcacccttgtgatagacaaacaatgaagtgtcagacatggcctcaacaaattcaagttgaatcaggtgggaagcgaatctgctgtaccaggcacggggggcctgtttgagcccataaagtgaccgattgagacggcacacataatcaggatgagtggaatcttcaaaaccagtgggctgaacacaatgaacagtc

SEQ ID NO: 61758 - DNA, 391 bp, Zea mays
  Clone ID: MRT4577_156317C.1
aggggcgcacaaacttttgcggcattgataaaacaaaaaggacagcttcggctaaaatttttagtcccccaaccatttgacaaccctaaaaaaaattgcctagggtcttgacaacacgtccatacgtattcctcgatgcaatatggggcaatacaaacaatctccttcacaaaaaggggctcggcagctaattaaattcaaggagcccccctgaacaaggggtaaaccaatcaacacatcagctaggctgcctactaaactctcatccaacataaccacctgtgcctgtttttttttcctccttcctttaggcttcatcagatctgtggaccgggagatgacgtcatggatctttaggatcattttcaccacctgaatggccaacaagatc

SEQ ID NO: 61759 - DNA, 215 bp, Zea mays
  Clone ID: MRT4577_156318C.1
cagacgcgttgagagtagatatttatagctgctctgcaacaaactgatacgaccgaacaccttaccatgccaacctcatccaaagggttgtttgccctatattacatattatttttcttaaatatttttattcaatatagtagatgattagctctctttcaatcttacatttaagtattaaaaacatctttcttatattggaacccttttttcac

SEQ ID NO: 61760 - DNA, 1799 bp, Zea mays
  Clone ID: MRT4577_156319C.1
ggagatagctagggaagggcaaatctgcagggcctgagagggtgaggtagagcgcgccagccagaatgcaggagcaggcggcgagctcgcggccttccagcagcgagaggtcgtccagctccgggcaccacgtggacatggaggtcaaggaagggatggagagcgacgatgagataaggagagtgccggagctgggcctggagttgccgggagcctccacgtcgggcagggaggctggccctggcgctgcgggcgcagaccgcgcccttgcccagtcgtccacggcgcaggccagcgcgcgccgccgcgtccgcagccacgccgacaaggagcacaagcgcctcaaaaggttactgaggaacagggtgtcagctcaacaggctagagagaggaagaaggcttatttaactgatctggaggtgaaggtgagagatctggagaagaagaactcggagatggaagagaggctctcgcgatctagaactaccggacgcgtggccgggcccgcactcctacggcgctgctcctcttcctgtgtctctctcgtctcccaacgacgcgattggcgattccatttctaccccgagacctccagccgtccgcccctgaaccctcagccttctccgtcccgcctcggcactcgacggccgccggcacacaccgcgcagtctcgagacaggaaccggaggaacgaggatggaggatgactcgccgctgacgaagacgatgaagggtgcggtgacaggactcgccgcggggaccatctggggcaccgtcgtcgccacctggtacgacgtgccccgtgtggagcgccacgtcgcgctccctggccttatccggacgctcaagatgtgcggcacctacggggccaccttcgccaccatcgggggcctctacatcggcgtcgagcagctcgtgcagagccagcgcaagaagcgcgacttcgtcaacggggccgtcggcgcgttcgttgccggagcctctgtctgcggctacagaggaaagagtattcagtcagccctcatcggaggctcctgtctggctttcacatctgctgtgctggacattggcggcaatacgaccagagttgacaacggcaaagagtactatgcctacacaactgagaagaagcctgcaaattgattccaagtctgcacttctagcaaacaatcttgcacgccatcaactcagtgaatttgaagctgatgtgcagttttatgtttgttttgctgatgcaattagttcttaagcaaatccatggcaacttgtttatcgctgatgcttgagggatggaaatgacactcagaataaatctttgatttgctttcttgtgatcgttgatcacattaaacgcagtggcgcgatatactgtgtaattgtctattttcccgtagtaagtattgataggaacgttgacctgataaaatagataatctaattttggtttaaaaaaaaaaaaaaaaaaaaaaaaaaaaaaaatacctccaccctccagaacgagaaccagatgctccgacagatactgaagaacaccgctgtaaacagaagaggttcaggaagcactgctagtggagagggccacggccaatagcactgaatgacggaaaaatagtaatgaatcatgataaatatatgtttatatggagtggatttggtgagcttgctttgtggccaaaggagggaaccccaaaaactggggtcagacagccaagtgccgacggttcagggaaaaagaacttatggaattaatgcatttgattttaacatggtttacaaaaaaaaaaacaaaaggcgggcaa

SEQ ID NO: 61761 - DNA, 496 bp, Zea mays
  Clone ID: MRT4577_15631C.1
ctccaatgtacagcgctccagcgtctcgcgccctcagccagtttatctccactcaatcgcgggataagctgcgctgcacgtcttggactctcgggtagccggcggcaaggctaataagggggctgttgtgctgcaaggctggtgggcccaggaagaatgtctggtgctcgctggtccgtcaaggccgtgctgcatggtcctcgtctggctgatcgggcgctacctcaagacggggcgagacgcgcagcgcgtggacaccgtctcccccgtctatatcgccacacgcttgactcctcgcgccgggtgctggagctggacaaagacgcagcgaaggacaacaagaagactcgcgatagttccgatacactacatcctggcgattccgaacgactatgatgctatgtacgctactgtgttgagacaccatcagcgcacggcggacgtctgcacaacatcaatccggttgttcttgccacgaaggtgccggataatgcgt

SEQ ID NO: 61762 - DNA, 446 bp, Zea mays
  Clone ID: MRT4577_156320C.1
gggggtcgggaccaactggttttccgccaaaaccccaaaaaacatttttttgttttacaacaacccacggggggcccaaaaaggaccaccccaacgggacgacagacgcccaccaaaagggggggcccccccccccagggatgggcccgggtgccaaccacaaaaaaaaccgccggcggaaagcctacaggagggggcgaataaaaaaaaaacaggggacacactaaggggaccaaattgcccacctggacctggggggagctttagggaagggcctggaaaaagcccttttttttgggcccaaaagaacttttttccccgctaaaaaaccggcccctaaccatttgataggggggcgggaaatttggggggaagaccgcctccccctcccgggtcccgggcccaaaccttaggggggggccctttcagatttgggagcggggggg

SEQ ID NO: 61763 - DNA, 1510 bp, Zea mays
  unsure (1)..(1510): unsure at all n locations
  Clone ID: MRT4577_156321C.1
ccggccggngatcgcagcgttccgagatagctagnggaagggcaaatctgcagggcctgagagggtgaggtagagcgcgccagccagaatgcaggagcaggcggcgagctcgcggccttccagcagcgagaggtcgtccagctccgggcaccacgtggacatggaggtcaaggaaggcaagctagctactacctctggcatggcaccccgtgctgtggaactatcctgtgcatcttctttttggcttataagcttgagtttatcaccaatcccagttctttcattgtttttttagaacttcgttgttccaagttccaacgcttccgataggttctcgtttgcttttgtcgtgcaactgaactgctgcaagacttgtcaagcaagtctactcgagttcgagtctcgagctctctctccaagatcttgactcgtttatttggtgaactgatccagccacacctgtggtgtgattgagttgcagggatggagagcgacgatgagataaggagagtgccggagctgggcctcgaggccgggggccggcacgtcgggcccggaacccggcaccgacgccgccgcgaccgggctccccactcctacggcgctgctcctcttcctgtgtctctctcgtctcccaacgacgcgattggcgattccatttctaccccgagacctccagccgtccgcccctgaaccctcagccttctccgtcccgcctcggcactcgacggccgccggcacacaccgcgcagtctcgagacagatcccgatctcgttctgccaaccgccgagggagggttgcgctcgccggatcccgcccgagtcacgtgcggctttgattcgctgcacctgtcgtgcaggaaccggaggaacgaggatggaggatgactcgccgctgacgaagacgatgaagggtgcggtgacaggactcgccgcggggaccatctggggcaccgtcgtcgccacctggtacgacgtgccccgtgtggagcgccacgtcgcgctccctggccttatccggacgctcaagatgtgcggcacctacggggccaccttcgccaccatcgggggcctctacatcggcgtcgagcagctcgtgcagagccagcgcaagaagcgcgacttcgtcaacggggccgtcggcgcgttcgttgccggagcctctgtctgcggctacagaggaaagagtattcagtcagccctcatcggaggctcctgtctggctttcacatctgctgtgctggacattggcggcaatacgaccagagttgacaacggcaaagagtactatgcctacacaactgagaagaagcctgcaaattgattccaagtctgcacttctagcaaacaatcttgcacgccatcaactcagtgaatttgaagctgatgtgcagttttatgtttgttttgctgatgcaattaattcttaagcaaatccatggcaacttgtttatcgctgatgcttgagggatggaaatgacactcagaataaatctttgatttgcttttc

SEQ ID NO: 61764 - DNA, 228 bp, Zea mays
  unsure (1)..(228): unsure at all n locations
  Clone ID: MRT4577_156322C.1
cggacgggagaggttatctatccaagaacaaacttgggattcttgcctggtcttaattattggcctgacaggagaaacaaagatgaggnctcagntgatactcgtcgnnactctgnctgttctcgccatcctcgcagctctcggcgaaggctcgtcgtcctggccctgctgcaacaactgcggtgcttgcaacaagaagcagccgccggagtgccagtgcaatgacgt

SEQ ID NO: 61765 - DNA, 780 bp, Zea mays
  Clone ID: MRT4577_156323C.1
atcgcaggcagatagggaaggagaagcggagggcgcgcggtccaaatctgcggggccggaggcggaggcggagggcgagcaagaatgcaggagcagccggcgagctcgcggccttccagcagcgagaggtcgtctagctccgcgcaccacatggacatggaggtcaaggaagggatggagagcgacgaggagataaggagagtgccggagctgggcctggagctgccgggagcttccacgtcgggcagggaggttggcccgggcgccgccggcgcagaccgcgccctggcccagtcgtccacggcgcaggccagcgcgcgccgccgcgtccgcagccccgccgacaaggagcacaagcgcctcaaaagattactgaggaaccgggtgtcagctcaacaggcaagagagaggaagaaggcttatttgactgatctggaggtgaaggtgaaggacctggagaagaagaactcggagatggaagagaggctctccaccctccagaacgagaaccagatgctccgacagatactgaagaacaccactgtaagcagaagaggttcaggaagcactgctagtggagagggccaatagttcagaatgacaggaaaatagtaatgcattatatgctaaacatatgtttatgctcagtggatttggtcagtttgctttgtggccaaaggagggaaccccaaaaactgggggtgaaggatttgtgcagacagtcatatatatcactgtattaatacgaatggttcagaaaaagaagaacttatggagtgc

SEQ ID NO: 61766 - DNA, 2048 bp, Zea mays
  unsure (1)..(2048): unsure at all n locations
  Clone ID: MRT4577_156324C.1
gatcatgtggttctcagaattcttcgcccgtttcctttgcccaacagtcgtaaaataaaatctcgtagaaactgacgcgttgtcgcggagtgcagtaatacggcacgccgttcaatctaccgggacggcgagacggagaatagaagacgtcaacactcagcagttcagcactgacccgtcggccgtcgccctcccggctcgcaaccgcatctctctcggcttctggcctcttcctagttcctaactaccaccgctaccactggcctcaatctgcaaaccctagccctcatcgccggcggccatggccgagaccgtcgacgacaagatcagctacttccaggctgtcaccggcatctccaacacggacctctgcacggagatcctcgccgcgcacaactgggacctgcagctcgcggtgtcctccatcaccgccaacccctcctcgccctccgccccggtttccacctcctcacgcgacccggccccttccgcccctttggcagatgcggagttcgtcgcgccaccgccgccggctgacttcgtcgccgagttcgagcgcgagtgcggcgctggccgcggcccgcgcttcgtggccgaggggttcgctgatgcgctgcagcgagcgcagcgggaattcaagcttctgttcgtgtacctccactcccctgatcacccggatacccctgccttctgcggcggctgcctctgtgctgaaccggtcgcggcctttatagatgagaacttcgttgccgtgggggtggtagtatcnagaaggaccgaagggttcaagatgagcaacagcctgaatgcgtcgagatttcccgtttttgtgctggtggtcatggcttctacaaaccagagaatcgtgctattgcagccaggttgaagggcccaaatcacctgaagagatgataacaattcttcaacgtgtttgttgaagaatgtgctacatcactcgttgctgctaggattgaagctgaagagagactaaacaaccagcgattgcgtgaggaacaagatgctgcttacagagctgcacttgaagctgatcaggccagggaacgtgaaaggttagaggaactgaaaagacgtgaaagagaggctgcagaggctgagaaaaagcgtaaagaagaggaggaagctgtagcaagggcatcccaagaagcagctgagaaggaagctgctcttgcaaggaggaggcaagagaaggccatggctcttggagctgaacctgagaaaggaccaggtgttactcgggttctcataagattcccaactggagagcgcagagagcggagattctacagttctgcaaccgtcgcttccctctatgactatgtcgattctctagactgcatgaaagcggagaagtacaccctagtttcgaatttcccacgcgttacatatggtccagaaaagcaatccctgacgctggaggaagcaggcttgcatctgcaggcgagcttgtttatcgagatagaacaatgatgctgtaagctaaagaaaagccgaaactaaagtacagacgctcctttttcgaagttgttcagcgacagttaaggatttccagatggtaatacaccacaggtgcatgcttcttgtgttcatgaaataaaattcgccctcaccaagatcagttgactgcagccaggtcttgtgaattgtgattcgtttggaaagcctgccttgattctgtcagccaaagcatgacgacctaatttgcctatccttccgtaagacatcctcaagaaaggaattctccctggcttcttttagcaactaagtgactccagggtaaaatggattcgcaagttcagttggattcaatttgggtaggcatatcaagcttccatacattaagaaaactactactttttctctatatatatatagaccacagtttctgcttgatagttgttcaaacacgttcaaaatctttacaatgagcattaatttagtccgacttgagcacggcttgacccattgtctactggacctatgttggcttggtccaatcatcgtgctatgtctaagtcttagttgtgtcg

SEQ ID NO: 61767 - DNA, 518 bp, Zea mays
  Clone ID: MRT4577_156325C.1
tggccctggcgctgcgggcgcagaccgcgcccttgcccagtcgtccacggcgcaggccagcgcgcgccgccgcgtccgcagccacgccgacaaggagcacaagcgcctcaaaaggttactgaggaacagggtgtcagctcaacaggctagagagaggaagaaggcttatttaactgatctggaggtgaaggtgagagatctggagaagaagaactcggagatggaagagaggctcgtccaccctccagaacgagaaccagatgctccgacagatactgaagaacaccgctgtaaacagaagaggttcaggaagcactgctagtggagagggccacggccaatagcactgaatgacggaaaaatagtaatgaatcatgataaatatatgtttatatggagtggatttggtgagcttgctttgtggccaaaggagggaaccccaaaaactggggtcagacagccaagtgccgacggttcagggaaaaagaacttatggaattaatgcatttgattttaac

SEQ ID NO: 61768 - DNA, 419 bp, Zea mays
  Clone ID: MRT4577_156326C.1
acatagttgcatgtcaaacatgtcaggaacaccttgccccatattcaagtatttatagggcatggtccagtaaagaatactccttgccctcgagctctaatcaataaccactgcaaggggtcatccaagtgcccacctcgccgcggtcaagcaatcacaagcgattccccagctgtacagtgcatgtttcgtgttctccttagaacacctaaacgaggtggtatttgaagaagtctactccaatgcctgctcctcaagtggatgaagccatctaactgggtattggatagagggatctagaaccacttcactgcaacaaaggatataactttgtgctgctgtgatggtgttaagtgccggtgggctcggccttcttatataagtataccccgtctttatcttcttactgaggatggtca

SEQ ID NO: 61769 - DNA, 350 bp, Zea mays
  Clone ID: MRT4577_156327C.1
gttcctaatcgccaccgctgtccccaaccagcagaaccctagccctcatcgccggcggccatggccgagaccgtcgacgacaagatcagttacttccaggctgtcaccggcatctccgacacggacctctgcacggaaatcctcgccgcgcacaactgggacctgcagctcgcggtgtcctccatcaccgctccctctccctcctcggcagcggcgaccgcctgctagagctgccgccgtcagctgccgaggcggctgacttcgtcgccgagttcgagcgcgagtgcggcgctggccgcggcccgcgcttcgtggccgaggggttcgctgatgcgctgcagcgagcgcag

SEQ ID NO: 61770 - DNA, 213 bp, Zea mays
  Clone ID: MRT4577_156328C.1
acgcctgcgatcatcccccagacattgagaccgtcgatacaaggccgaaatccaccaggcgaggagaggataagatggttcgtactacgcagaccttccgaaagtcaacggcaaccacggcgaggcccaagcaactctccaccaattcctctagtaagtcggcgccgacgtcaggtggagtgaagaaatcaaacacgatcaggacttccaccg

SEQ ID NO: 61771 - DNA, 283 bp, Zea mays
  Clone ID: MRT4577_156329C.1
gcctgcggctactggcagcgcagaggagcgcgagaaggggtctgcagggaatggccggtgacgtcgcgcgccgtgtgccgcggactgcgctgcagggaagccggaaggcgaggaggaagatggcggtggccaggctcggcgggagcggcaggacgcggcgcaggttcctgggcacggcgctgatccggcggctgcggctgcggtgtgtagcggccctgtacaggcgggctctgcggcggctgcgcgcggcctgcgccagcgacgccgtccagcgcgtcctgga

SEQ ID NO: 61772 - DNA, 225 bp, Zea mays
  unsure (1)..(225): unsure at all n locations
  Clone ID: MRT4577_15632C.1
tgacactatagaanagctatgacgtcgcatgcacgcgtacccgtaagctccggaattcggcttcgaggaaaagctcgtccctgtctcgggtatcgtccctggtcgctgccgcagccttcgtcctgcctctcccactcccgatccatccacctggaccctacggcacccggacatgccgggggaccttctagcgcttgccgacttctcatcctacaccgatcgcga

SEQ ID NO: 61773 - DNA, 747 bp, Zea mays
  Clone ID: MRT4577_156330C.1
cgggaattctacccccctttccattttcacattttcctcgtatgttattatcatgactgcattagtggtttaatctgctatctaagtataaaaatagcaacctaccaaatagtcgtatggttcagaaaagaagattatgttgaatccactatcgaggcatttatacatgcaatgatgtttgaggtatcacactctaggtttcaatcagtttggggtttcaagttcagtgtggtttaacgtatttgtctaatgtctaatgccatgcttgaacagacctcatgtatattggacttgtgttccaactccaaatacttgtcaagaacagaaaccactgcaatattggagatggagagttgagtagtaagaaagggacaattctttatggttgactgtaatctcattgcttttgactagtctatacttaataatctattaagaacctaatgtgggcacctggtgctaccacgacttcaccctccgcgttgacactctgggcccgccgcatgcgctccgcttcgggagccgtgccatgtgggcccacgttggcacctggtgctaccacggcttcaccctccgcgttgacactctgggcccgccgcatgcgctccgcctcgggggccgtaccctgtggccccctgtgggcccacacctagcgctctctcagctactacgatgtggaccccagcgcccgcaaagccagctactgcgcctgaccagcacccgacctcgcccgcgctgctaacacca

SEQ ID NO: 61774 - DNA, 1354 bp, Zea mays
  Clone ID: MRT4577_156331C.1
aacgacgcgattggcgattccatttctaccccgagacctccagccgtccgcccctgaaccctcagccttctccgtcccgcctcggcactcgacggccgccggcacacaccgcgcagtctcgagacaggtaacccgctcccctctccgctgaactcctctcccaacaaggggccagcctcacccccaacgcccatctaagccaagtgcacggtgctgctagatcccgatctcgttctgccaaccgccgagggagggttgcgctcgccggatcccgcccgagtcacgtgcggctttgattcgctgcacctgtcgtgcaggaaccggaggaacgaggatggaggatgactcgccgctgacgaagacgatgaagggtgcggtgacaggactcgccgcggggaccatctggggcaccgtcgtcgccacctggtacgacgtgccccgtgtggagcgccacgtcgcgctccctggccttatccggacgctcaagatgtgcggcacctacggggccaccttcgccaccatcgggggcctctacatcggcgtcgagcagctcgtgcagagccagcgcaagaagcgcgacttcgtcaacggggccgtcggcgcgttcgttgccggagcctctgtctgcggctacagaggaaagagtattcagtcagccctcatcggaggctcctgtctggctttcacatctgctgtgctggacattggcggcaatacgaccagagttgacaacggcaaagagtactatgcctacacaactgagaagaagcctgcagagccagcgcaagaagcgcgacttcgtcaacggggccgtcggcgcgttcgttgccggagcctctgtctgcggctacagaggaaagagtattcagtcagccctcatcggaggctcctgtctggctttcacatctgctgtgctggacattggcggcaatacgaccagagttgacaacggcaaagagtactatgcctacacaactgagaagaagcctgcaaattgattccaagtctgcacttctagcaaacaatcttgcacgccatcaactcagtgaatttgaagctgatgtgcagttttatgtctgttttgctgatgcaattagttcttaagcaaatccatggcaacttgtttatcgctgatgcttgagggatggaaatgacactcagaataaatatttgatttgctttcttgtgatcgttgatcacattaaaaaaaaaaaaaaaaaaaaaaaaaaaaaaaaaaaaaaaaaaaaaaaaaaggaaaaaaaaaataaaaggaaccaaatttaaggaacccaacaatcgcaaaaaaaaaacctttcatatagggccccctaaaattaaattcattagaccgaat

SEQ ID NO: 61775 - DNA, 974 bp, Zea mays
  Clone ID: MRT4577_156332C.1
attggggctgggtgctggtgttgtatgagggcatgtgagccacgtaggctagctgatatgttgctggcaccatgggaggacaccttagctgcatgtcaaacatgtcaggaactccttgccccatattcaagtatttatagggcatggtccagtaaagaatactccttgccctcgagctctaaccaataaccactgcaagggtgaagttgttctggtgttccagccagtgttaatcctctcccttactgcagagttaagttgttcctgagctgagtgtcaacctcctgtgtggtgaccagggtcatccaagtgcccacctcgccgcggtcaagcaatcacaagcgattccccagctgtacagtgcatgtttcgtgttctccttagaacacctagacgaggtggtatttgaagaagtctactccaatgcctgctcctcaagtggatgaagccatctaactgggtattggatagagggatctagaaccacttcactgcaacaaagaacacctagacgaggtggtatttgaagaagtctactccaatgcctgctcctcaagtggatgaagccatctaactgggtattggatagagggatctagacccacttcactgcaacaaaggaagcttcagcattgggatggagaacttctcttataacaggacgagggaaaataaagagtgggcgacgaagctagaagccaaaggacttcacgctgaacatgttgatgaagctcaagtatgataacgcctgaaaaggataaagcccacacactccgtaataattcttgttaatattgtagatagttcccagagatataaatgtacttttacccggcctgcgtcccatgcctataaatagatgcacagtaacattgcactgttcacgctggattgtaatcactcttgcgtcatcctcgttctctcccctttggcaagccgaaagtcccaatgtaatataaatattatttatgttt

SEQ ID NO: 61776 - DNA, 1281 bp, Zea mays
  Clone ID: MRT4577_156333C.1
tgggtttttttttttagttttaatttttattttttgaaaatttgatcatgtggttctcagaattcttcgcccgttttctttgccccacagtcgtaaaataaaatctcgtagaaactgacgcgttgtcgcggagtgcagtaatacggcacgccgttcaatctaccgggacggcgagacggagaatagaagacgtcattgacctcgaggccggccgggactgacccgtcggccgtcgccctcccggctcgcaaccgcatctctctcggcttctggcctcttcctagttcctaactaccaccgccaccgctaccactggcctcaatctgcaaaccctagccctcgtcgccggcggccatggccgagaccgtcgacgacaaggtcagctacttccaggccgtcaccggcatctccaacacggacctctgcacggagatcctcgccgcgcacaattgggacctgcagctcgcggtgtccaccatcaccgccaacccctcctcgccctccgcttcggcctccacctcctcgcgtgacccggccccttccgctccactggcggtagatgcagagttcgtcgcgcccccgccgccgatgccgctgccgctgccgccccagcagcagccggggatcgcgtggaagctggtgacgctccccttccacgtggtctcgggtggggtcggcctcgtcgccggcacgttccgccttggcgcctgggtagccgggggcgtgctgtcccgctccctctccctcctcggcctcgcggggcaagccggcagcggtgaccgcctgctagagttgccgccgtcagctgccgaggcggccgacttcgtcgctgagttcgagcgcgagttcggcgctggccgcggcccgcgcttcgtggccgaggggttcgctgatgcgctgaagcgagcgcagcgggaattcaagcttctgttcgtgtacctccactcccctgatcacccggatacccctgccttctgcggtggctgcctctgcgctgaacccgtcgcggcctttatagatgagaacttcgttgcctggggcggtagcatcagaaggactgaaggattcaagatgagcaacagcctgaatgcgtcgagatttccgttttgtgctgtggtcatggcttctacaaaccagagaatcgtgctattgcagcaggtatgatgttgaaatgattatctttaggtctggaaataactttcaatattcatctaggttggatttggctgctgctgttgatagatttgtcattttggttaattttcgttaccacattattca

SEQ ID NO: 61777 - DNA, 1802 bp, Zea mays
  Clone ID: MRT4577_156334C.1
cgacgagaatagaagacgtcaacactctattagttcagcgacactcgcgcacgtcagcactcagccactcagcacagccactgacccgtcgcctccccggctcgcgaccgcatctctctcgccccttccaagttcctaatcgccaccgctgtccccaaccagcaaaccctagccctcgtcgccggcggccatggccgagaccgtcgacgacaagatcagttacttccaggctgtcaccggcatctccgacacggacctctgcacggaaatcctcgccgcgcacaactgggacctgcagctcgcggtgtcctccatcaccgccaacccctcctcgccctccgccccggtttccacctcctcacgcgacccggccccttccgcccctttggcagatgcggagttcgtcgcgcccccgccgccgatgccgccgccgccccagcagcagccggggatcgcgtggaagctggtgacgctccccttctacgtggtctcgggtggggtcagcctcgtcgccggcaccttccgccttggcgcctgggtagccgggggcgtgctgtcccgctccctctccctcctcggcctcgcggggcaagccggcagcggcgaccgcctgctagagctgccgccgtcagctgccgaggcggctgacttcgtcgctgagttcgagcgcgagttcggcgctggccgcggcccgcgcttcgtggccgaggggttcgctgatgcgctgcagcgagcgcagcgggaattcaagcttctgttcgtgtacctccactcccctgatcacccggatacccctgccttctgcggcggctgcctctgcgctgaaccggtcgcggcctttatagatgagaacttcgttgcctggggcggtagcatcagaaggactgaagggttcaagatgagcaacagcctgaatgcgtcgagatttccgttttgtgctgtggtcatggcttctacaaaccagagaatcgtgctattgcagcaggttgaagggcccaaatcacctgaagagatgataacagttcttcaacgtgttgttgaagaatgtgctacatcacttgttgctgctaggattgaagctgaagagagactaaacaaccagcgattgcgtgaggaacaagatgctgcttacagagctgcacttgaagctgatcaggccagggaacgtgaaaggttagaggaactggaaagacgtgaaagagaggctgcagaggctgagaaaaagcgtaaagaagaggaggaagctgtagcaagggcatcccaagaagcagctgagaaggaagctgctcttgcaaggaggaggcaagagaaggccatggctcttggagctgaacctgagaaaggaccaggtgttactcgggttctcataagattcccaactggagagcgcagagagcggagattctacagttctgcaaccgtcgcttccctctatgactatgtcgattctctagactgcatgaaagcagagaagtacaccctagtttcgaatttcccacgcgttacatatggtccagaaaagcaatccctgacgctggaggaggcaggcttgcatccgcaggcgagcctgtttatcgagatagagcaatgatgctatagaaaaaccggaacttggaagtataggtgctcctttttccgaatttgtccagtaacagttaaggatttccagatgtattacacaccacaggtgcatgcttgttcatgaaataaaattcgccctcaccaagatcagttggctgcctggctgctcataaaaaaaaataaaaaaaaaaaaaaaaaaaaaaaaaaaaaagaagaaaaat

SEQ ID NO: 61778 - DNA, 406 bp, Zea mays
  Clone ID: MRT4577_156335C.1
gggtacctcgaggccggccgtcttcgcctcctcctgcagaagcgcaacgccaaggacctccccctctccgctgtatctgatggaggagctgctccagttgctgttgccgcacctgctggcggcgctgcggctgctgctgccccggctgtctgaggaaaagatggaagaggccaaggaggactctgatgacgacatgggcttctcctgttccactgaagagaccccctcacccagccattagcaaatttcacttgtgctgtcaaagactatcttgacttatgccatgtctctacgcttttgttaccactacccaagtgttgagtttctgaaacgcggctatgtcatgaactcaaaccatcttatgaggctgaaaaagaaaaccaacatggtgaatgatcttgcaaac

SEQ ID NO: 61779 - DNA, 498 bp, Zea mays
  unsure (1)..(498): unsure at all n locations
  Clone ID: MRT4577_156336C.1
gaccccggtcgcgattttcgccgggtatgtgagcaaatagttaatgttcagaacagtactaacttctaatatttgtgagtgtggattcccaacatgctatagtcacatgttggacgggatgtaccggggggtgctttncatacattatagctttatatgttaactacacgtgcatatcagttgaattagcattaaggtatggtagcaggtagatgccatttaggctctaagaggttgtggtgatatactctcttgtcatacactgactttgacgtggagagatagtgggatatttaggagctaaaattagtgtgaacgggttggtcgactgtctcaataaatttgtttagtgatagaacattcaagctcgagggaatagtatagtttttgcttgatcctgctatggtgtatggtggtatttaaatcaaattacttgatgtatgctattagaaattaattagcatcttagtattggtttttgacaatagtctgacagga

SEQ ID NO: 61780 - DNA, 519 bp, Zea mays
  Clone ID: MRT4577_156337C.1
tcaagcggccgcccgggcaggtacaagctttttttttctttgttttttcttgtgcattttttacattgatggtaggttttgtgctgttgttaagtattgccaccgcactttgagtagcttggtgagatccacataacctcacatggtagacgatgatgctcctcctggataatggattgaaccatgtcgtaaattgcttggcgaatgtattgtggctcaatctgcctaagcatcatgacaacattgttgctgccatacccggaaactacttggctgcatcaaacgtgagtggagaaaaggcattaccaaagggctgccctgctgccttaagaactcctgacgatcctttaacaactgagggtgtgggggtcaacaacaaagttgccacacttgcacaaggccgtgggcaccggcaaggacagggccgttggcgagatcttggactgggcctggtgacatagctgaagctgcagtggcagggtgctgctcggcatgaccctggaatagatgctgatgatt

SEQ ID NO: 61781 - DNA, 352 bp, Zea mays
  Clone ID: MRT4577_156338C.1
tgatgctttgtcatatcatgtagtacggggatggtgtttgacaataatgtcctggccctgctgttgatgaaaaaaaaaaaaaaaaaaaaaaaaaaaaaaaaaaaaaaaaaaaaagagaaaaaaaaaaaattaaaaaaaaaaaaaacaaaaaaaaaaccaaatttaaaaaataataactaaaaaagaaaaatatacaacgagggcggaccgccccatgaaggaccatgacccgcctaattattcaagttgggaggatgagggcgatcacccttacacacaatacttcgaaaaaactcgtaggggaaaatatggcaaacagatcttctacttaaaaaaaggacacaactcaaaa

SEQ ID NO: 61782 - DNA, 1441 bp, Zea mays
  Clone ID: MRT4577_156339C.1
attcggctcgagaccagtacctcgccgttttcatcaaggcgcgcaagcttgagctcgccggcaacggcaagtgcgacgcgccggcgcacgacgacctgctgtctcggttcatgcgcaagggctcctattcggacgagtcgctgcagcacgtggcgctcaacttcatcctcgccggccgcgacacctcctccgtggcgctctcctggttcttctggctcgtgtccacgcacccggacgtggagcgccagatcgtactcgagctgtgcgccgcgctcgccgcgtcccgcggctcccacgacccggcattgtggctggcgtcgccactcacgttcgaggagctggaccgcctggtctacctcaaggcggcgctctcggagaccctgcgcctgtacccgtccgttcccgaggactccaagcacgtcgtggccgacgactacctccccgacggcacgttcgtcccggcggggtcgtcggtgacctactccatctactcggccgggcgcatgaagacggtgtggggggaggactgcctcgagttccgccccgagcggtggttgtccgccgacggcacccggttcgagccgcacgactcgtaccggttcgtggcgttcaacgccgggccgaggatctgcctcggtaaggacctcgcgtacctgcagatgaagaacatcgccggcagcgtgctcctgcgccaccgcctggccgtcgcgcggggccaccgcgtggagcagaagatgtcgctgacgctgttcatgaagcacgggctccggatggaggtgcacccgcgcgacctggccccggtcatcgatgagctccgtggcgcgggcgcggcaaggccggccatggcgccatgctgcgcgtagaagattcccccttccgtgctgcgggggagacgctgggaattcaatgtgtagataagcgtacaagtacaagacaggagtaaagtaaaaattaaatgggtccacgcgtccccccacgcgtccgttgacgcgtgggttaccattctgggagcagcgagatgagaaaatttttgcgatctagctggatttggatctgagcttttacaaattacaaggagtgggaggaaggaaaaaaaacagagagtaataaataattcgtgagaacgctgaagatttgatttgctacgattctttgaaattcgtcatagttttttcaagcctactaatatcctatttttagagggggctgtaaaatttaccaagaaacgtgtaagtaaccatgtattgtaagtttatttgcttctttgataccatcacttcttcatgtgcaagcgatcgaggcatcatcctgtagcgtgttggctgcgttgctctcttgccctttttgccaaaaaaaaaaaaaaaaaaaaaaaaaaaaaaaaaaaaaaaaaaaaaaaaaaaaaaaaaaaaaaaagaaagggcggccgccggcaagtacgctc

SEQ ID NO: 61783 - DNA, 265 bp, Zea mays
  Clone ID: MRT4577_15633C.1
gcctgggtcccttaaaacgggccgccttttttttttttttttttttgggccaaaacaacatcctggtcctggaccggtatagggaaattggtggagagggctttaaaccctaaacctactcgaccatagtcagaaataggtatatttactaaatctagaatggtggggggtaaaaagggggcgaccggagctattcaccaatgatttacagatttacatgtaccggagtctccgcctttttcccccgtgttcaaaaagaaagggc

SEQ ID NO: 61784 - DNA, 379 bp, Zea mays
  Clone ID: MRT4577_156340C.1
attcggctcgagggccgccgtacataatatattgtgaaggcccatggctcgctgggccaatgttggctaaaccgcaggctaatattggtggctggattggggacaattactgaaagtgaaagttttacaagtttctatgcgcatgctgactaggctgcataagaggaccaatatgattttacggacagagacagcactggccttgctagacatatcgatcatacacaaaagcatgctctgagccctgaactagcatcagaatttgtcatggatgctgatgcagtgatcttcacagaacaggtcgagaaggcttgaaggcattgtacatgtgacgccaaactacacatatgtgtttcgtgtgcttcgctctacaactggt

SEQ ID NO: 61785 - DNA, 421 bp, Zea mays
  Clone ID: MRT4577_156341C.1
ggaaaacaacccccggcaacccattacattcaacaataggggggggcccactcatactccttaagccggggaattatacattacgggggttttgactaccaaaacagggtcctaacataagacgggaacatccttagccagacaagaaaagccgcatgaccccataaaatttacctcctaaaagggggggcgctgccttgcccaaaaggaccccccccacgaccagaagcagcccgagcacccattgaaactggacgtccacccccaaatccaaaagctgaccctttgcccctaattttcgcttccaagcgcttgaacagggggagcgtttttgagcatatcagggataaacaaaaatcccactttgcttcctttgaagaaaacgtgctccagctggaaaaccttcccatccttggggggg

SEQ ID NO: 61786 - DNA, 515 bp, Zea mays
  Clone ID: MRT4577_156342C.1
cctgaataccgggcgccctccacgtttccggcccgctcttcgagcaaatcaaacataggtcggcctacccactccatggctatttctctccagtgccgacggagatttctaattgcactacccgcgggctccacccccgacgacctcggccaccatgggatcacgaggagtcttgcctgtccgcaatgcagttgtgaagaaagaaatcatgcccatgaccttgcataccgccatagcagctgggcctcatggaagtactcaaaaaagaaccaggagggggacttgcgatgctagcaccaaacgaggtggtgatgtggatgccatgcgatctaatcgaccccaccgtggctcagtttatgaagtacagggtgctcgggttggtctacttgtacgacggcctccaaccccaaaaggacgactccctttgccagctcgagcaactatacttcgcaccgctcctttgcaagtgggtcacccccaaccatgaccatgtgaacatggaagacctcctgctc

SEQ ID NO: 61787 - DNA, 324 bp, Zea mays
  Clone ID: MRT4577_156343C.1
cctcaagagtcctgtataatcgcatcacgcgtattactcgacataccagcgttaaggatacgggggggtgcattataccgcaacagcgcctaagaatgtacttagagttcaatgctagcggaatgagtgtttttcgcacctgaggcacactttacatggttgctgatgttaatatatgcactgactacatgggcctgccgcaatgttacatagagaacataactgaacacttgtattttcatgagcccttattgatttgatacaacgcgccatcatgaatcttgtaaccaaattatcaaagctgcattctcgatatttaatcaa

SEQ ID NO: 61788 - DNA, 682 bp, Zea mays
  Clone ID: MRT4577_156344C.1
agcgtggtcgcggccgagtacagtgcctggccgcggcaggaggaacgcggccaacacggctaagacaaccacgctggtctctttttctcgtagcatggtatcactctgctgaaacatgtattttatttcttttctttccctccttcatatgccatctgggttgcatgcagtttgttggctacttcttttatgctgaccctttcacttggtgacgggtgcgtgcatgaaagagctacttgtaacaggcacagtaaacactggtaagctgcattttctggttccaccttatctcgggcaaactccttgcattcctcgctgagacgaggatcgacgacgcgggatatctgatgcggaaagttgctgcttacaaagttgacgatatccagcccatctttgaaggtagggtctgttggtcgcttgcctgtcaccatctccagaacaactataccaaagctgtaaacatctccagaggtagacgcctgacggccacctcccgcgtacctgcccgggcggccgctcgggcaggtacgcgtccgtgcgggcgatggagagcccgtccaagctggacgacgagcagtggctcgcctactggatcctctactccttcgtcacgctcatggagatgctcctcgagtccctcatatactggatccccatctggtacctcggccgcgaccacgct

SEQ ID NO: 61789 - DNA, 835 bp, Zea mays
  Clone ID: MRT4577_156345C.1
ggtacccccgggctcggccgggaaacggctcagcgccccctcccctgaaacaccacccaaacccaagcagagaagcaaagacacatttggctcactcactcacactcactcgctcatagattgtcctgtccgtccatcatctctagctagcagctacaagtgagagcagcaagcgacaccacaaccagaccaccaccaacgcctagctgtgagaggatgggcaagctgtggacgatcctcactcacctccactcccttgcagggccaacggtgatgctgctgtaccctctgtacgcgtccgtgcgggcgatggagagcccatccaagctggacgacgagcagtggctcgcctactggatcctctactccttcgtcacgctcatggagatgctcctcgagtccctcatatactggatccccatctggtacgagctcaagctgctgttcatcgcgtggctcgtgctccccaacttcaggggcgccgccttcatctacgacaagttcgtgcgcgagcagctccggaagcacggcctcaccgccgccggctccgtcaagtcgtcgtcgccgtcgtccaaggacaaggacaagcccaagaacaagttcctcgccttcgtcacgcccaagaaggatcatgaagcttactgaagtgggttgcagtgatcccattcctggaccatgtcccggcaacctgtagctgtagtgcactccactagatttctgttgtgtttgttctcgacttgaatagagcctgtacgatgtgtgtatggccattctgtatgtgtgagcatcaactctaacatggaatggagacaagtggcaactttcggggctgaag

SEQ ID NO: 61790 - DNA, 1674 bp, Zea mays
  Clone ID: MRT4577_156346C.1
agcgtggtcgcggccgaggtacagtgcctggccgcggcaggaggaacgcggccaaacacggctaagacaaccacgctggtctctttttctcgtagcatggtatcactctgctgaaacatgtattttatttcttttctttccctccttcatatgccatctgggttgcatgcagtttgttggctacttcttttatgctgaccctttcacttggtgacgggtgcgtgcatgaaagagctacttgtaacaggcacagtaaacactggtaagctgcattttctggttccaccttatctcgggcaaactccttgcattcctcgctgagacgaggatcgacgacgcgggatatctgatgcggaaagttgctgcttacaaagttgacgatatccagcccatctttgaaggtagggtctgttggtcgcttgcctgtcaccatctccagaacaactataccaaagctgtaaacatctccagaggtagacgcctgacggccacctcccgcgtacctgcccgggcggccgtcgagcggccgcccgggcaggtacgcggggaccacccaaacccaagcagagaagcagagacacatttggctcactcactcacactcactcgctcatagattgtcctgtccgtccatcatctctagctagcagcttccagtgagagcggcaagcgacaccacaaccagacaacacaccaccaccgagctgtgagaagaagttcgcagacaggatgggcaagctgtggacgatcctcactcacctccactccctagcagggccaacggtgatgctgctgtaccggccgacgctcgggcccgggcaggtacgcgtccgtgcgggcgatggagagcccgtccaagctggacgacgagcagtggctcgcctactggatcctctactccttcgtcacgctcatggagatgctcctcgagtccctcatatactggatccccatctggtacgcgagctcacgctgctgttcatcgcgtggctcgtgctccccaacttcaggggcgccgccttcatctacgacaagttcgtgcgcgagcagctccggaagcacggcctcaccgccgccggctccgtcaagtcgtcgtcgccgtcgtccaaggacaaggacaagcccaagaacaagttcctcgccttcgtcacgcccaagaaggatcatgaagcttactgaagtgggttgcagtgatcccattcctggaccatgtcccggcaacctgtagctgtagtgcactccactagatttctgttgtgtttgttctcgacttgaaatagagcctgtacgatgtgtgtatggccattctgtatgtgtgagcatcaactctaacatggaatggagacaagtgccaactttcggtgctgatgatgatgtgaatgtgtgaaatttatgtcattatacagtgttctaggcagacttttcactccgaataatttgtctgccttctctctctctctctctctgaaaacggctgtgtttttgttgctaggtccgaaatcttatgattaggtgcaaatttggagggagtcattaaaacatcaattaatattgtttcctaatggcctgtctccatgggccaaaaataagcccaaccctggtggccaatttcatataccagttgtagtttgtaatatacacacaccagtatgtacaatgagtataagttatggt

SEQ ID NO: 61791 - DNA, 248 bp, Zea mays
  Clone ID: MRT4577_156347C.1
cttttattgtggggcctttgcaaacaaactgcatttgccagatatggtaacattggttacaggcttttaaaatgtgattaccgaacccttccctggttgggcagaaaaccttttaactttggtaaggtttttcatctacccaagcgggttcaacttactgtgacacatatacacgcaccaaagggcatgaacacgggttttgtgggggaaaaacacacatctttgaaatctgtgaaaagaaattttgt

SEQ ID NO: 61792 - DNA, 857 bp, Zea mays
  Clone ID: MRT4577_156348C.1
ccgggctcctggtcggcctcatcttcaagctgccactctatgccgatctctatcttctaacgctctctctctctctctcccttctgatattttgcaccgccgtgcacaggtttctggtgttttctccaatgcgttcatctccctctgcgctcctccctgtcgcgccctccctggtgcacgcgcgcagctccctctgccttccatggccgcgccggtttggagctatcttcacgcgccctggttcctgcacccagtcatcttctcctaccgcaactctctcctccctccatctctcctgcgcgcgcccagccccagtgcccggccgagatccctggccgccgcgccctgctctcggttgctgctcgccggtgctccagcttgtcgggcgcgcccctgctcctcgcccctccccagccgaggcccctccttcccgtttcccatggccaagcgtccggccggagcttcttttgctcagctctctgctgttgagctcctccggctgtgcttccctgctcagcgcgtttctccctactctctccctcctctggacatggatgcttaggagaagtggtagccccagctcggcaacaccaataggctccctggaaccagcctccctttcgagtccctccgcgtgccactggtctctgcttctcccacggccgccgtcgagtcgtcggactcgtccattccccgctcgcccctgcgctcgcccagctccctgtgcctgccattccagcaactctggcgtcaacgctccctgttcttgttgcttagagtgctccagcatctcgccctcgtggccttcgagttagattaagttattggtgagcgccgtgctgtcggactccatcatg

SEQ ID NO: 61793 - DNA, 223 bp, Zea mays
  Clone ID: MRT4577_156349C.1
tgcgttcacgagagtcgatcgctcagctagctatagtgttgctcaatgaagtctcctgctgctagacaatcttctatttatgttcatgatcagctgttagacttgcagtatacctagcctgtactcacagatgttctgtgtgtatctcgaacacagtaatttattgaagtacagttaaattaagtcctcggaacgtgttagcaataccagtgacgttactaaa

SEQ ID NO: 61794 - DNA, 962 bp, Zea mays
  Clone ID: MRT4577_15634C.1
gacccacgcgtccgcccacgcgtccgcgcatgtgaagtacataacctactatgaggatgctgaaagtcttccaggatggagaacagcagtctgggagctcgataaagcaaaccacaggaatattgttaggacgccagtattaatgcgtgagttatggcttgaaatgtggcacgatttgcatcctgattcaaaatcgaaatttgtgacgaaagctttccgaggtccactaagaaacgaagactgtcgctgggactatggaaaggctcgatgtggctttccagaacactgtgaatacaggtatacatttggcgatgtccatctgggaatgagctgcagactgagaaatacgtccgctaaccttcttcaacagtatctctgaaatgtcgtgggccgagtaattttgtgttttgttgctcgcatggaaatggtatctgattccccattttgacctgccaatgaaattagccatcaacaaggtagaggtagatacagtatcaaccggaggccctcgaatgacaggtcaactcttattcttgtcaccattttggcacacttaaatctttgaagtcgacatatgcaaagctgaaacaacacgttcgcatgacaaattttggttgaagatggaggccaacgtccccaggagtgtcggcagagttttcgtcttgtctgtagcactggcaccttcggcgtcctgaaggtgccatgagatcatacactgatgtacactgtagcatggttttgtaaatcaacccgtcacaaattgacttagtcttacaaaaacgataccctatagcgtggcagtgggaaaattctttacgactcccaattaaccaccttgattgtaatgtgcccttaaagagatgaaaggatgaactctgctcaatattagaccttgtttggttagggtgactagattttactaaaatacaaaggagggtgactgataacaaaaaaagggatag

SEQ ID NO: 61795 - DNA, 286 bp, Zea mays
  Clone ID: MRT4577_156350C.1
gcgggcacctagctgtgttgaaccttgattcctactcgcaacagcaactgcttgcggccgacccatttgctctggcgaacgtcgctgcataccagcaacaacaacagctgcaacagcttatgccaatgctcagacaactagccatggtgaaccctgccgtctacctacaactactatcatctaacccgctcgcggagttcaatgcacctacatacctacaacaacaatcgctgcaacaaattgtaccagctctgactcacctagctctgacaaaccatgcttccta

SEQ ID NO: 61796 - DNA, 281 bp, Zea mays
  Clone ID: MRT4577_156351C.1
atttttcttagaaattagctatttgtgcatatcagtatttgtaactgtaacacattgttatgtgagatatgttactggggaaatagatcagccacttttaaggtgctgtcatatatcttggaatgaatgacctaaaatcattttaaccattgctactggaaagtaacagagtcaaaattggaaggttttattcattcttgaatttttcctttctaaagagctcttctatttatacatccctagattctgttaaaatgtagagggatacctgtctgcataat

SEQ ID NO: 61797 - DNA, 235 bp, Zea mays
  Clone ID: MRT4577_156352C.1
ttgaaagatcactagcagtcattacttgattcaattgccagacttgatgaatcatgggagggcgataatgaacatatcgccatggaacgcctaatgggttctgatggggaaaggaaccgcatcactacatagtttcttttggcatgttcgtattgtccgatttacatacttatattccgcatcttctttgaccgaagtacatttttacttcattatggccaaacttaccaccata

SEQ ID NO: 61798 - DNA, 246 bp, Zea mays
  unsure (1)..(246): unsure at all n locations
  Clone ID: MRT4577_156353C.1
gacaccaacaancatccanntcattgatacacaaattctgaatcataaccacaattcacgctgacacaggactgaatttctagtaactgccaacaaaaagagcacgactcccgtaagcaaagtgccggatctcctccaccaacctaaccaccttcaccaacatcatactcctttcataagactacccattgcaccccatgtcaatacggagcatttttaccatatttgatttattatgttgggaat

SEQ ID NO: 61799 - DNA, 2451 bp, Zea mays
  Clone ID: MRT4577_156354C.1
ttggcaggcgtcgtcggccgcgtggggctgtcggtccatctgcctgaacccatgactgcggcctcatgcttgccaccccaccgtacctgagggacgcgaatcaagtatagcaccaccacggagactccctaggggtggcctgctcgggaaaacgacatacacaatccgctcaaggatttggacggcacgacaagttcctcgtcccctccggtagacgggaccgcaggctacagtaccatacggggtgtcgtggtgcaaggggacggcaaggacccacggtcgcgactgatggaagccggccaccccatccgagccgacggctacatcaacggggaatgcagctgggtagagtcagcaagcagcgcagaatagccgataccgttctatgcacatgcagctctcgataatatgatctaatgcttgagggctttcatctgtaagtctgtcaatggcttcaattaagtttaatggtgtgtgcccctacatcgcggccaaaaaaaattagtgcaaatattcatggtcggcgagtttaaggcgcgggagaattacggccgagcatggctggcaaatcagcacgggtaactctgccgatcctaatagtcgtcgatcgttccatcgaccggccggccggccagcctagctcttggcctcttgctccgatcggatcgagcgccggacaaggcaaggcagccgtacgtacgacgatggcgcagggcagccgcagcgctgccgtgcccgccgcagcgtccttcttcgcccttctcgccgtggccccgctgctcctgtgctgcgcgccggccgccgcggagctggccaggctggagcacccggccaaggacggcggctcgctcagcctgctcgtcgtcggcgactggggccgaaagggcacgttcaaccagtccagggtcgcccatcagatgggcagggttggggagcagctcagcatcgacttcgtcatatccaccggcgacaacttctacgagaacggcctgacgggcacggatgacgaggcgttcgagcagtctttcaccgatatctacacggcgaagagcctgcagaagccgtggtacctggtgctgggaaaccatgactacaggggtgacgcgctcgcgcagctgagcccggtcctgcggaagatcgacagccggttcatttgcatcaaatcattcgtcgtcaacgcagaaatcgtggagttcttcttcgttgacaccaccccgtttcaactcaagtactggactcaccctaaggacgatcactacgactggagaggggtggcgcctcgggaaaactacataaacaatctgctcaaggatttggacggggccatgaagacatcgactgcggcgtggaaggttgccgtgggccaccataccatgaggagtgtcagtgatcatggtgacaccaaggagctactgcagctactgcttccagtcctccaggccaacggcgtcgatttctacatcaacgggcatgaccactgcctggaacacatcagcagcagagacagcccaatccagtacttcacaagcggaggcggttccaaggcatggagaggagtgcagaaccccaccgaagatgacctcaagttcttctacgacgggcaaggcttcatgtccctccagctagaccgtagccaagccaagttcaccttttacgatgtcgacgggaaggcgctgtacagttacacacggtcgagcctgatggaaacaggccaccacctccaagcctccggctacatcaacgaggaatgaagcaggggcgagtcagcatgcagcgctggagaactgagatcgatatatgcagttcaagcgtacgtataaattctcgagtgcttgatgtggttcatctgtaggtcatgccatcgattcgaaaacatgacatggtaggggcagccataatgcagccaaaaaaaattagtgcaaatattcattatcgaggagttaaagcattgtgtggacagcggccgagcataggaccaaaatcagcagggggcaatcaacagattatgtaaaaattacatggttcagtggtgcaacaataaagacacagtatatatatggaaatatatcgaatgcaatcaagtgatgtgctacaccctttcatttgcatcaaatcattcgtcgtcaacgcagaaatcgtggagttcttcttcgttgacaccaccccgtttcaactcaagtactggactcaccctaaggacgatcactacgactggagaggggtggcgcctcgggaaaactacataaacaatctgctcaaggatttggacggggccatgaagacatcgactgcggcgtggaaggttgccgtgggccaccataccatgaggagcgtcagtgatcatggtgacaccaaggagctactgcagctactgcttccagtcctccaggccaacggcgtcgatttctacatcaacgggcatgaccactgcctggaacacatcagcagcag

SEQ ID NO: 61800 - DNA, 3300 bp, Zea mays
  Clone ID: MRT4577_156355C.1
cattgggacctcgagccggccgcgtagccttgatgtggttcatcctccgatcggatcgtcgaccggacaaggcaaggcagccgtacgtacgacgatggcgcagggcagccgcagcgctgccgtgcccgccgcaggggttttcttcgcccttctccagcggcccccgctgctcctgtgctgcgcgccggccgccgcggagctggccagccaggagcacccggccaaggacggcggctcgctcagcctgctcgtcgtcggcgactggggccgaaagggcacgttcaaccagtccagggtcgcacatcagatgggcagggttggggagcagctcagcatcgacttcgtcatatccaccggggagaacttctacgagaacggggtcacgggcacggatgacggggcgttcgagcagtggatcaccggtctctacacggcgactcgcctggagaggccgtcgtaggtggcgctgggaaaccatgactacaggggtgacgcggtcgcgcagctgagccgggcagggtgggggaatcgctcaccagagactttgccatataccatggcgacaacttctacgagcacggcccgaggggcacgttttcttcgatctgggattaaggtaccgattaggcatgcgaaagctgtaacgtctgacatatccttgctatccttctactggaaatcatggagttatgcgtcatgcacacgacccccggtgccgactcccggacgaagatcgacagggggtcgatctccacgaaagcagagcgttgtcaccgcggaaaaacttggaagtctacttggttaagacgactgcgtcttctcgcatgtacgcgcgtcaccctaacagcgacaacaagaagagttatgattattggagggagctatggcttatttaaatccctctttttgtcgtggattatcacctgcaatattcaattcaggatttggacggggccatgaagacatcgactggcggcgtggaaggttgccgtgggccaccataaccatgaggagtgtcagtgatcatggtgacaccaaggagctactgcagctactgcttccagtcctccaggtatacaatacaactcaaagcaagcaagcatcagccgcccgtcgttgtcttcacaagttctatgagaaggaacggatcggagccttccagagtaacgtacggttcttccatggcatttggtttaatttccaggccaacgggcgtcgatttctaccccacgcgtccgcccgcctgccctgacagcaggagccgcctccagtatcccccgtcaatgcttgcaagacagaagacagcggacctgatctgaccaggcagatcgagtggcttgccgtcgcgtgcaaccgcaaccgccgctggtattatatagagacccctattacatatatcggccgctgtggcgctagtcgtcgaccgttccatcgaccggccggccggccagcctagctcttggcaggctcttgctccgatcggatcgagcgccggacaaggcaaggcagccgtacgtacgacgatggcgcagggcagccgcagcgctgccgtgcccgccgcagcgtccttcttcgcccttctcgccgtggccccgctgctcctgtgctgcgcgccggccgccgcggagctggccaggctggagcacccggccaaggacggcggctcgctcagcctgctcgtcgtcggcgactggggccgaaagggcgcgttcaaccagtccagggtcgcccatcagatgggcagggtcggggagcagctcagcatcgacttcgtcatatccaccggcgacaacttctacgagaacggcctgacgggcacggacgacgaggcgttcgagcagtctttcaccgatatctacacggcgaagagcctgcagaagccgtggtacctggtgctgggaaaccatgactacaggggtgacgcgctcgcgcagctgagcccggtcctgcggaagatcgacagccggttcatctgcatgaaatccttcgtcgtcaacgcagaaatcgtggagttcttcttcgttgacaccaccccgtttcaactcaagtactggactcaccctaaggatgatcactacgactggagaggggtggcgcctcgggaaaaatacataaacaatctgctcaaggatttggacggggccatcaagagatcgactgcggcgtggaaggttgccgtgggccaccataccatgaggagtgtcagtgatcatggtgacaccaaggagctactgcagctactgcttccagtcctccaggccaacggcgtcgatttctacatcaacgggcatgaccactgcctggaacacatcagcagcaaagacagcccaatccagtacttcacaagcggaggcggttccaaggcatggagaggagtgcagaaccccaccgaagatgacctcaagttcttctacgacgggcaaggattcatgtccctccagctagaccgtagccaagccaagttcaccttttacgacgtcgacgggaaggcgctgtacagttacacacggtcgagcctgatggaaacaggccaccacctccaagcctccggctacgtcaacgaggaatgaagcaggggcgagtcagcatgcagcgctggagaactgagatcgatatatgcagttcaagcgtaaaaatagtgcaaatattcattatcaagcatctctcgatattttgatataattctcgagcgcttgatgtggttcatctgtcaagggcaacagttaagtttatatgtgtgtgcccttgcatctctcgacatctgtcactgccgtccggtactatttggggtcatgccatcgattcgaaaacatgacatggtaggggcagccataatgtagccaaaaaaaatagtgcaaatattcattatcgaggagttaaaacattgtgtggacagcggccgagcatagaaccaaaatcagcagggggcaatcaacagattatgtaaaaattacatggttttgtggtgtaacaataaagacacacacagtatatatatggaaatatatcatatgcgacatctgtcactgccgtccggtactatttggggtcatgccatcgattcgaaaacatgacatggtaggggcagccatgatgtagcaaaaaaaaaaaatagtgcaaatattcattatcgaggagttaaaacattaattgtgtggacagcggccgagcataggaccaaaatcagcagggggcaatcaacagattatgtaaaaattacatggttcagtggtgcgacaataaagacacagtatatatatggaaatatatcgtatgcaatcaagcgatgtgctacaccct

SEQ ID NO: 61801 - DNA, 1862 bp, Zea mays
  Clone ID: MRT4577_156357C.1
attgggtacctcgaggccggccgggctccgttcccccgtcatgcttgcaagaagaagacacctgacctgatctgaccaggcagatcgagtggcttgccgtcgcgtgcaaccgcaaccgccgctggtattatatagagacccctattacatatatcggccgctgtggcgcttgtcgtcgatcgttccatcgaccggcggccggccagcctagctcttggctcttgctccgatcggatcgagcgccggacaagtcaaggcagccgtacgtacgacgatggcgcagggcagccgcagcgctgccgtgcccgccgcagcgtccttcttcgcccttctcgccgtggcggccccgctgctcctgtgctgcgcgccggccgccgcggagctggccaggctggagcacccgcccaaggacggcggctcgctcagcctgctcgtcgtcggcgactggggccgaaagggcacgttcaaccagtccaggaaaaaaaaaaaaaaaaaagcggccggggagtgctgcgcgccggccgccgcggagctggcccggctggagcacccggccaaggacggcggctcgctcagcctgctcgtcgtcggcgactggggccgaaagggcacgttcaaccagtccagggtcgcccatcagatgggcagggttggggagcagctcagcatcgacttcgtcatatccaccggcgacaacttctacgagaacggcctgacgggcacggatgacgaggcgttcgagcagtctttcaccgatatctacacggcgaagagcctgcagaagccgtggtacctggtgctgggaaaccatgactacaggggtgacgcgctcgcgcagctgagcccggtcctgcggaagatcgacagccggttcatttgcatcaaatcattcgtcgtcaacgcagaaatcgtggagttcttcttcgttgacaccaccccgtttcaactcaagtactggactcaccctaaggacgatcactacgactggagaggggtggcgcctcgggaaaactacataaacaatctgctcaaggatttggacggggccatgaagacatcgactgcggcgtggaaggttgccgtgggccaccataccatgaggagtgtcagtgatcatggtgacaccaaggagctactgcagctactgctcccagtcctccaggccaacggcgtcgatttctacatcaacgggcatgaccactgcctggaacacatcagcagcagagacagcccaatccagtacttcacaagcggaggcggttccaaggcatggagaggagtgcagaaccccaccgaagatgacctcaagttcttctacgacgggcaaggcttcatgtccctccagctagaccgtagccaagccaagttcaccttttacgatgtcgacgggaaggcgctgtacagttacacacggtcgagcctgatggaaacaggccaccacctccaagcctccggctacgtcaacgaggaatgaagcaggggcgagtcagcatgcagcgctggagaactgagatcgatgcagttcaagcgtacgtataaattctcgagtgcttgatgtggttcatctgtcaagggcaacaacagttaggtttatatgtgtgcccttgcatctctcgacatctgtcactgccgtccggtactatttggggtcatgccatcgattcgaaaacatgacatggtaggggcagccatgatgtagcaaaaaaaaaaaatagtgcaaatattcattatcgaggagttaaaacattaattgtgtggacagcggccgagcataggaccaaaatcagcagggggcaatcaacagattatgtaaaaattacatggttcagtggtgcgacaataaagacacagtatatatatgg

SEQ ID NO: 61802 - DNA, 244 bp, Zea mays
  Clone ID: MRT4577_156359C.1
ccgcgcatcgaacgtagcaactcggcattcgcgctcgagttctagatagcgcccagacgcactttatataccttttcagatgcgacaaccgatacatcaccgttaaaacaacgcgatacacgctccagattgtaccatgggatctacaaaataccatctcatctcacatgcctcactgtcgatcaaccacaccagatccgctcatgttcaccatcacatcactctccctctaccagaacaaaaa

SEQ ID NO: 61803 - DNA, 333 bp, Zea mays
  Clone ID: MRT4577_156360C.1
taccggaacggagggtccgcccagcgcgaccggtcacgcgcacactacacaaggtgactaaaaataagaagagaaagaaaaagactgaaagggggggaaaaagcaattttatgacaaaaagcaaaaaagaaaatgaaaaaaaaaaaaaaaaaaggaggtaaaaaaaaagaacggggcgaccaattaaaagggtccagattttggtacccagaatttgcaaggaatacttatttaatgggatcacgaaaagtaagtaatctgcgaggggtttaaaaaaggggggggtgggaaaaaattggggggttaaaaaaaattaaataattttatataaaa

SEQ ID NO: 61804 - DNA, 397 bp, Zea mays
  Clone ID: MRT4577_156361C.1
tcatgcacgtccgcccgttgtggaagggagcttcgaggcggcccgactctgcacagtctccgggcgggctgatccaatggcacgggcccttctgacactatctccctaactttgatcgtttcgtcgacttcaaagcttccgtttttactttatcttcctaattcgtttttttattttttcactttgtttttttttctttaaaattttatatttttttttttaattttttttttttatatttccattgttcatttttcctattttaatttttttattttatatattttcttatttataaatttttattattttacatttttttgaattttcttttttttatatttttctcactttttttaattttttaatatttttcatattttttaaaatttttatt

SEQ ID NO: 61805 - DNA, 273 bp, Zea mays
  Clone ID: MRT4577_156362C.1
attagaaaaggacagaacaggacaggtattttcacaatgcttttctatacagtgtctgtaatctatagatagcataaccgattaagtcaggggttgatctttaactaccagacacagggtgtggtgccgcgctgtctgcttgtggatttcatttctgccttttagtttttacttctttctttggaggcagaaattaggcataagacaatatgaggggtggtctcccttacttccaatgccagttgcaaacccaggtttttgtttgtttgtttg

SEQ ID NO: 61806 - DNA, 274 bp, Zea mays
  Clone ID: MRT4577_156364C.1
gttttgcctaaagtgtctatagatctttaactttaaagtcttatctcactttctttagtattgcagaaaaacttaagagtttttctgtttgcttttgtgtaccaggtggtctagaggaataattaaacattttagaactacttaacggtaaagtactgaaatgggtacaacttaaggcaaacaagaatgttgtcttctaacactgacattataccttgtttgtcaccgccagtgggaaattcattgcaggccgtgtgtcaccctgatcacgtct

SEQ ID NO: 61807 - DNA, 688 bp, Zea mays
  Clone ID: MRT4577_156365C.1
ctactaccatgtcaatctcaagaatgtgatgataacatgaccattcaaattggtgaagtacttcagatgcaaattgaggttcagagatagttaaatgaacaacttgagaaatggtcatttgttaaatctgagcataaaagatcggaaatccaagggcttatggaattggtattgcaaagatcttcatgtgattcggatccttataaggaaagataatttatatacatgagggagccccctattgattcttttgatgtctctacatgtgttgctgcggaggaagccgacagcgcggctatggtcgctgaaaaaaaggttgtcgcgtctgtgtagcttgtcgccgttgctgcgcacaaggcgggctgcgccgtggatgctgtctgtttgtattacttttcgttggttgcattaagtgttgtactatgtgtttggtaatgcagttacttttgtattcagtgaactgtttggtaatgcgattccttttgtatttagtgaattgtgtggtactgcgtacaccctgtagttttttatgtattaagtgtagtagtgatgaggtaatgcattgcacttgtactactgagctaaatctgtgtacttgtgcctgttggtgctaaaaaatcatatgtttaagaaaaaactgctttctgtaaaaaaaaaaaaaaaaaaaaaaaaaaactcgagagagggc

SEQ ID NO: 61808 - DNA, 1024 bp, Zea mays
  Clone ID: MRT4577_156366C.1
gtacccctcgaggccggccgggaaactacgcgtccgccaccgtctccaccacggcaccaccatcactccaacaccaccgcctccctctccgttctcttcctcccaacgactcaaaccgccaccgtcgcggctccctgaaccaccagaccagcccagagcccagcccaccacaaacgctgctgctgctggagagaggggcgcgcgggcggacgggagcgatgggcaactgccaggcggcggaggcggcggcggtcatcatccagcaccccggcgggaaggtcgaccggctctactggtccaccaccgccgccgaggtcatgcggaacaacccgggacactacgttgccctcgtcatactccgtgttcctgcagataacaagcccgccgccgccggggacgccgcggcgtcctccggccccggcagtggtggggccaagatcaccagggtcaagctgctgaagcccaaggacacgcttctccttggccaggtctaccgcctcatcaccgcgcaagaggtgacgaaggcggtgcgggcgaggaagaacgagaagatgcagcggtgcgaggccatcaggcagcagcacgagcagctccggcgcggcgacggggctcaccagagctcttccagccaggacgggaagcaggacaaggaccggcaccggggaagaggccggcactggcggccggtgctgcagagcatctccgagtccgcgagccagagcagcagcagcatcgtctctgaatccgccaccagctaatgctactgaccggactgtgccatccggccggtgctctctttctttctttttcttttgggatttctgtttgcttgttagtatagagtgcttgagcctagccagaaatggaaaaaaaaactgtaaatcagagtgtcagggcaggactaataggaagtttgtttcgtctgtcaatgtgatttggcatggtgaaactgacactaaaaccgcgtattcagatcaatcgagtggtttgccaattgcaacaaaaaaaaaaaaaaaacctaagc

SEQ ID NO: 61809 - DNA, 355 bp, Zea mays
  Clone ID: MRT4577_156367C.1
aactgcaatattattcgatgggaggatacatcattattgttccttaatctgcatagctttgtccggtttctcgtcatgcaacacacttttcttacatgtagtccaacagtcgtcgccatcgaagatgttgggggcgcctcttcttggggacgacgacggcagcggcgcgaagaaatagagggtgcaggaggagtggcaccaatggagtcctcctcccaaagccaggcttagcttcacctgtatggcgtagtagccccgcgcggcgtcgtccgcgtacgtcctggtgaccaccgcgcctgcagcggcgggcagctggccgcccgcgtcgaggggaaccgtcgccgtctccaaatac

SEQ ID NO: 61810 - DNA, 210 bp, Zea mays
  unsure (1)..(210): unsure at all n locations
  Clone ID: MRT4577_156368C.1
cccacgcgtccgcccacgcgtccggactgtttataattgttgttgttcttgtacttctgggccggaggaaaaatatcctggaaaagcancattcaaaggcactctcaagagccatctctatggctccgataacccctcgctcaattggaagcaaaggctggaggtttgcatcggagcaacaagggggttgcactaccttcacacttgatc

SEQ ID NO: 61811 - DNA, 451 bp, Zea mays
  Clone ID: MRT4577_156369C.1
aggatatatatatttatataggataaaaaaatattatggggggccaattaatttatgggtacaggagacgcaatcggatcaaccaaaatgcatgtaaacccacgtacatgagcacaaagactggcgccaaaaatggggagggggggatagcaaactggaaaactctggttttttttttttttcaaaaaccaaaaaatacctatgtttgggagccaggtcggcctcgttttttattggtcaacccccaccacaaggtggatagataataatcatatccatgggcggcgatcgatgggaacaacagttggagggggcgcacttggagctggtaccgcaaccggaggggggggggggcttcccggactccgccgggggcttaaaaaaattgggggggggcttttttttcggggccaccccgaggacaaagggggccctcgcgggggggcttgtt

SEQ ID NO: 61812 - DNA, 329 bp, Zea mays
  Clone ID: MRT4577_15636C.1
accgtcacgccgtccgccaagccttccgccaacccttctgccaatccttccggaaaaaggtggttgctgttttaaccgaacaatcagtagatccatctgaagggtcctaaaggaattgcttccgaagaagatccggataagcctggcacactctctgatccgtttcaagccaatttaggcattataggtaaatcaatggatggagactcattgcattcatttgatatctctagtgaggcacatgaagacgaggcatgtggcacctcatggtggcgacaagtagttttggatgggttagagggtaaggataaaatccctctaaaagatta

SEQ ID NO: 61813 - DNA, 712 bp, Zea mays
  Clone ID: MRT4577_156370C.1
ttgggtacctcgaggccggccgggagaccgctgttccccaggccaagtctgcaggacaagggggtatggatgctgagaaactcatctaccgcactatatgcattctggggaagaagaggactactctagggctgttagatttcgtcggcctaggtgacttcctccagataattgtcgtaaaacaggaaaaggcggtgaatgtggtagagatcaccagcgagagcactgaatatactgacggttgaagctcaccatcgagggttcgtactgagtgaccagccaaactggagtggatatctcgctctagagctaaatcatcatgcctgagcagtgtgatgaacataatttacgaagaactacgacgtggtcgtggacatattcaatcgaaaggactgtgctggagtataacatatgatgatgaatcgctacggatcgcacgatacgacataagaaacatattcgtgctggagagaacagagctgtcagacgtctgatggcgctcagttcatgcgcacaggcgatacgtaatttttggccgacgatcaagtgtatgtgacactcagaagacatagaactgcgatatgtctatatggtatattcgacagctatgactcgtgcatgagtattggcagtctctatctgacaatctaccactcgaagtgaaaacaaacgaaaagagagttttcctctccataaaggaggtatgtataca

SEQ ID NO: 61814 - DNA, 270 bp, Zea mays
  Clone ID: MRT4577_156371C.1
atggtgcgcgcggccatcgcgggggtcatgacggcggcgcggttccaagagctggtagactggatggaggagcggaaggtggcgttcagggacgacgccaagtggacagagatggtgaatctggggctcgggagccccaggctcatcatgtccgggctgcttccgttcgccattgacagggacctcgggttcgagaaccccagcctcgtgcttaggggtgaaaacaggcggatacggacggatattagctcatcctgtatcctaccctga

SEQ ID NO: 61815 - DNA, 584 bp, Zea mays
  Clone ID: MRT4577_156372C.1
accaggtctttccctccacggccgagttttttttactccccttgcactgttaagatgtatcacaagaaccgtgattcggacgcctcctcctcctaatcctaacctccttccctgttttattcttcctcgtcgagcctgattcccctgccgccaccgcggccagcgccgccctcgccgccggtcgccaccgccgccgccaccgtccactcctcgccctcacctaatctcactcggagggagaaaaaaaaaacctcgccctcgccgccgggttgagttgaatctgtggtcgctgggttgaattgaatcgatttagatccgtttatccctagtgcgcgcgcccgtgctcgggctggtctgaccggtttgcgcactgggtcgcggatggaggcatgctttggtaaaaggccatggacttttgtcttgcttgacaactcggtagaatctgtgaccgcaggaaatggatgcgagcagatgacatggctagatgcagagatggtgggcgtggaaaaagtctcgcatcggtatggttgtgaccactggaaggcttgaacgctgatattcatcggatggggatggagatttcg

SEQ ID NO: 61816 - DNA, 599 bp, Zea mays
  Clone ID: MRT4577_156373C.1
gattcggcatgaggtgaatacgcaattgcttgcttgtgcgccggcggctatacgaccacttcactcgacttacctcttgtccgacactagtgttcacatctccgtcctctctagagtctaaagccatcgtggccaaggcgcgtacctgccgagcacgaccctacatattggaggccaacaacgaccccttcgtcgctgccgaatacgtgacctacgtgttcgagtaccagacacttcacgaccgccgtctccgcggcgactgcgcacagagcgaatgacacacacttctcctacctgtacacgacgctgaccgactttgagctccagagaccctaatgaaatcgcgagtacagatggtgaatctcacgatcgcccgacttacaacgatggaaaacatggttatcgcacatgactggtgaaaatctccttactgtggctcagacgtggattatctctgccacggaattttacggcaccatgttagatgatgaggccgacgatgaaccccacacctcatactggtgacgactagagtccgatggttctggtactacaggcggatcgtggtccacgtgctctttattactgagacatctgct

SEQ ID NO: 61817 - DNA, 1259 bp, Zea mays
  unsure (1)..(1259): unsure at all n locations
  Clone ID: MRT4577_156374C.1
ggtaccctccgggttcggccgggacatgtcttcccgcggccgttgtttacgcagaatcctcctgttccactcctcgccaaatgtcttttgttagagttcatatgaaatttctggtcgttcgattttagatcgatttctttacggcgtattttgattgcatcgcgaccggctccggagccatccggtcataagaccgtaccaacgcatttctttttgaggtgcgggacggcgggcgccgaacggtcgtgtgccgtagatccaaagtcgcgggaaatctctggtcgaggagtcgatttggatccgtttatcgctagtttggtcgtcgttgatctgaaaggtggagctttggtcgattttctcttccagaagcatttgtgtttctgaggtgctaaggtgctatatctgaagcagccgacgaggagctgagtctttgattttttttttgccaatttctgtcgtcgtttgttgatctgatccgatggaggctatgacgggtggcaaattccttcaaaagtttcggctctacgaaaccagatcgaaattttatcttattggaagagacaagagcaggattcactggagggtgctaaaaattgatcggtcggagttcactgagctgggtgtcgaggaggatccaactatttacacagagaatgaatgccaagaactgcttcggcggatccatgaggggaacaggttgaccggtggactgaaatttgtcacaaaatgttacggaatagttggttttgtaaagtttcttggtccttattacatggttataataaccaggagaaggaaaattggcacaatatgtggccatgaaatttattccgttggcaagagcgaaatgattgcaattccgagtgttacagtctggcccaacatggcttattctagggatgaaaacagatataagcacctgctttgctcagttgatctttcgaaggatttcttcttcagctactcttacaacatcatgcacagccttcagaagaacataaccgagaagaacattgggcaggtttatgaaacaatgtgtgtatggaatgaatttatgacacgagcaattcgggatcatctcatgaatacctgttggactgttgctttagtccatggattntttaagcagtcaaggttctctgtgtctgggaaggatttttggctgacgcttatagctaggcgctcacgccattttgctgggaccagattcttgaaaacgtggtgttaatgggaaagggcagggtagccaatgatgttga

SEQ ID NO: 61818 - DNA, 3446 bp, Zea mays
  Clone ID: MRT4577_156375C.1
ccggccgagcgtcgtcggcgcggacagtatttagcctcgacgattgctcgggactctctttacaggtcctatttcgcggtttcctcatcctcctaatcctaacctccttccctgttttattcttcctcgtcgagcctgattcccctgccgccaccgcggccagcgccgccctcgccgccggtcgccaccgccgccgccaccgtccactcctcgccctcacctaatctcactcggagggagaaaaaaaaaacctcgccctcgccgccgggttgagttgaatctgtggtcgctgggttgaattgaatcgatttagatccgtttatccctagttcgggtgcccgtgttctggaaggtggaagctttggttgggttttctcttccagagcattaatgtttctgagggcctaagatgctctatttgaagcagcccacgaggagctgagtctttgtgttttttttatcgttctctctcgtcgtctgttgatctgatcggatggaggctatgacgggtggcaaattccttcaaaagtttcgactctacgaaaccagatcgaaaattttatcttattggaagagacaagagcaggattcactggagggtgctaaaaattgatcggttggagtccactgagctgggtgtcgatgaggatccaactatttacacggaaagtgaatgtcaagaactgctttggcggatccatgaggggaacatgttgactggtggactgaaatttgtcacaaaatgttacggaatagttggttttgtaaagtttcttggtccttattacatgtttataataaccagtagaaggaaaatcggcacaatatgcggccatgaaatttattccgtcggcaagagtgaaatgatctttttttatttttgtactatgaagaaatttgtggtctctcctctcaatttctgtagatataagcgccttctttgctcagttgacctttcgaaggatttcttcttcagctactcttacaacatcatgcgcagccttcagaagaacataacccagaagaatactgggcaggctgtttatgaaccaatgtgtgtatggaatgaatttctgacacgagcaattcggaatcatctcaagaatacatgttggactgttgccttagtccatggattttttaaacagtcgaagctctccgtatctgggaaggatttttggttgacccttatagctaggcgctcacgacactttgcgggaaccagattcttgaaacgtggcgttaatgaaaagggcagggtagcgaatgatgttgagactgagcagattgtttttgaagacacatctgatggaatcccaactcagatggcttctgctgtacagcatagaggatcgatacctcttgtctggtttcaggaaacttcaagacttaatattagaccagatattatattgaaacctgatgtggactacaaggcgacccgccttcattttgagaaccttgcacttagatatgggaatccaataatcatcttgaacttaataaagacccacgagaagaagccccgtgaatctctgctccgtgcagaatttgcaaaggctatccattacattaacaagagcctgcctgatgacaagcgtctaaaatttttacacatggatctgagtaagctttctcgaaggaaaggcaccaatgtgcttgcactgttgaccaaggtggcatcagatgtgttggatctaactgaattcctccactgtgaaataagtacatcaacaaaacctgatgacacctcaagtggagaaagaactgctgccaaaccacatgatgacagaagtagcagtgatcaaactgaatgtgcagctaagttggcacctcttttattacagaagggtgtcctcaggacaaattgcatagactgcttagatcgcacaaatgttgcacaatttgcatatggtttagctgctttagggcgtcaacttcatgcattggggcttactgaagcacagaaaattgaattgcacgatcctctggctgatgatctgatggacttctatgaatggatgggtgatacattagctattcagtatggtggttctgctgctcacaacaagatcttctgcgagcaaaggggtcaatggaaggcagcaacccaatctcaggagttccttcggaccattcaacgctactataataacgcctacactgatcacgacaagcaggatgctataaacatgttcttaggtcatttccaacctcagcaagggaaacctgcactgtggaagctggactcagatcagcattacaacattgggaggcaagggactttaaaagaagagattggaagatcgttcataaagaggtcactatcagatggtaacatactgttggagaacaacttgcctgtaactagctgtaacaatgaaacaaacaacacagaattgcttccaatgcaacagctggatgatattagagaacctaccgactctgcgccagagatctccatatgtgaacctaacccgtgctccagtgtgaactacggcagagtgcctggaagacactctatttcagaagagcggcagagttatttgaaaagattaggttaccctgaattgcattcttcaaatttcctcgaccttgatttgttgtcgtcttctgggaattcctgtgacgaggaagtttttgagaggtcatcactgatcaattcacctatggatgtggtcagcgttgaatcatctacgtcgtacagtgaacaaggacacactgatgagggaagggatgacatggatctttcccgttcaagcagccaggtctcagacgttcgggactattctgaccggtttgcgcactgggtcgcggatggaggcatgctttggtaaaaggccatggacttttgtcttgcttgacaactcggtagaatctgtgaccgcaggaaatggatgcgagcagatgacatggctagatgcagagatggtgggcgtggaaaaagtctcgcatcggtatggttgtgaccactggaaggcttgaacgctgatattcatcggatggggatggagatttcggtggttgggttgagtacaagattcaatttgctgtggtgaaaaattttaccatagtttgtttagacaataaataggcaaaatatatatgattcttttattttagcttacagtgcgtcccccttctccatagaaaattctgaaaagcaaaaaaaaaaaaggaaaatctagaaaaaggaagaaaaaaaacttagataaagaacacttttgctgtaaatagttagtatgttacggaagtataaatattgggaaattttgctgacgacacgacttcgctcaaacgtgtaatatactgttggacagtgttaacaaaatatatcccgtatcagtacgaaaaatgtgtaaatttactgtaacgcacagtatgcattatttcataattgtttctgagaaaaagctgaaagaaaccccgtatgtcttttaatatgc

SEQ ID NO: 61819 - DNA, 612 bp, Zea mays
  Clone ID: MRT4577_156376C.1
ggtgaatcccggcttgcttcgctcatcatctcttactattacacatgaaccattacatatgaggttgctgctgctatatgcagtgtctggtgtgctttgatgtggtagatcgtgaaccttgcatttataattgctctgctatgaagcaagtgccgctgtttagttagttaaaccttagcattccaaatagttaaaccttagcattccgattggaatgccgacttgccgaggtttaatcatattggctgcccttaaatgttaatgagccaggtggttttggcttcaaatatgtaggcatatcacatttttaaggtgacatggcattatctagtgcgccaagatcaaatacaaacaagaactcaagcaccgtcttatatgtaaagatatatgtccatcgtccatccatttgttaagcaatttttgtctatggttagtgtgctctcaacaagtcagtaggcattttataggctcgctgtgggttgtatttggtaatactgaccacctcttgctcatgccatgatattttacacatggcatgtcttggttcttgtttgggttttgatctttgatttgatctcaagtacatcatttggttttactagctttgtcttt

SEQ ID NO: 61820 - DNA, 350 bp, Zea mays
  Clone ID: MRT4577_156377C.1
aaaatctgttttctgctgcatgcgcacaaatttagcatgacaaaaatgtgcgttgaaagaaattggattggcttgcatggaaacaaaaatatgattttaatgctttattcctccataaatataggacctctccaacaatcacgcagttagattatgctacacagtgaaggtgtttatgcactgtggttaggctgtttagaatcagttcctatttttacggagcgcaggcttgcggtttctattttgatgtagatcccaaaattatggtatgtcgtgagagttttcattgcatgtgcgcaaaatttggatgacagtttcgttcacactgcatgcgcataaaaaatggatga

SEQ ID NO: 61821 - DNA, 421 bp, Zea mays
  Clone ID: MRT4577_156378C.1
acccatattaaagatacaaactagcgacagacatagtgaagtacactagcaacattctaacaccaatgggaaccaagatacttggccatacttaggcctgcatggtctgtcaaaaaccggggttacggagccaattaagccacatgggtcacaacggtaccgatgtctggtctcaagcgcgagatgaaaatacccagctataccgacgtactggctacaggaggccgtgaagctgacaatgtcacggagaaacacgtcgctccactcagcaaccatttgtgagtgaactgaaacaagatagattatgaatagatgtttaaggaacaatgcgctgagaacaatagcaacacggttactgttaatgacgaaaagactattggcgagtggcctcgcttttgacagaatgactctaagggcaagg

SEQ ID NO: 61822 - DNA, 452 bp, Zea mays
  Clone ID: MRT4577_156379C.1
attggatgtggggatgctaatgaggtggaatgcttaatttcatactccaaagttaaagacaatacatatgcacatatgtagagtagagttagaaacaaggtaaacagagaacacgagttgggttcaaaaggcatcataattcaggttataccacaagaaatcattataacaagtgtcttggcctctgaaccaacaccagagttggatgcctgttcaattactcgaccgcttccagtagagatggccattttccagcggtttaatgaatgtgtgtttgttttgttgataagtgggcaaatgttgtctcctcaggtggttccaacattattctttttgtaaattgctaatgtaggatacttatgatgctacttgtaggttctcttgtgcatttcgaccagtgtttgtgttgaattcttatccttgaatccttctgaagtttttgtgtaacatgt

SEQ ID NO: 61823 - DNA, 448 bp, Zea mays
  Clone ID: MRT4577_156380C.1
agcgtctctcctctcccacgcatcgcgccaaggaacagagagagatcgccgctccccttctcggcgtcggaggtgcggcagacctccctcctcgagcgagatctgtctgcttacagatctatctgataaaatggtgaagatctgctgcatcggtgctggctatgtcggcggtccaaccatgcccgttattgtcctcaagtgcccagacattgaggccgccgtggttgacatctccaagccccgtattgaggcctgtaacagtgacaccctgccaatctacgagcctgccctcgatgacgttgtgaagcagagcaggggcaggaacctcttcttcagcactgatgttgagaagcacgtcgctgaggctgacattatctttcgctcggcgaacacgccccccaagacaccagggctcggagctggaatggctgccgaccccacctactga

SEQ ID NO: 61824 - DNA, 727 bp, Zea mays
  Clone ID: MRT4577_156381C.1
tggggtaccggaaacccggctcaactttttttttttttttttttttttttttttttttttttttttttttttttttttttttttcccaagcccgattggcggggtttttattttaaagctaaaagttacaagccgacccctgtcctttcaaaaaaggggtaccaacctcctcccgttttccatgtttggttttatttggctaaaagaaggaagggctggccaaactatacaaggggatggttttcgaccccgggggttcctacaaatggctaactaacaaaaaacgcgggattttcctcacaaaagcttataatcccttgggaacaaaaaaaaaaagaccctccgaggcatataaggcccccatccttaattggttttccaggttattcggtggaggcaaattcgggggccccaaacggggaaacctttggaatcagggaattggaaaatcctcgcaaaatatgcatcatggggtggtttctaagcatttttttgctttggaggccccccggggggggccacctcctgaaaaaatccatgggcaactgccaagcgggtcctgacacggttggttaatgaccaactactccggcccaaaataccagtcttgttttgacagccggccaaaagcataaaaattggccttaaaaccaacaaactgacttccaagctgggcacacggagcattgggccatttgcaccctttttttgggcggaaggggcaaag

SEQ ID NO: 61825 - DNA, 693 bp, Zea mays
  unsure (1)..(693): unsure at all n locations
  Clone ID: MRT4577_156382C.1
actcttctccccccctctctctggcntccctcgatccacctgctgccgccttgttagcgaccattattaaccccttctcccccgctcccccccctcctaatgcccaccaccctttggctncccaggtcctcccatccgctgccgtcctttccctcccttcctctattccctctctgccccatctggtcccctcttttgctgccttcttcctcccctctagcttctgtggccccttaatacctcccctccttccctnctccccccctctcctcttctctctcttcctcctcnccccttcntgcntttgtggctccctncctttccgcttncttgntctctccccccctcctcnccttncncctccgtcccncctctctcttcccttcctcctcccccccttctcnnctctcttttttgcncccctcttccccccanntccccccccccttttcctnncccttcttccccccttctccctttccccctcgctccccctcgccccccttccctnntttgccccccccccctcctttccttccnccctccctccncccccccccttccttctttttccctcctnccctccccctccncctcctccctcccctctcccctctccctttcccctctttctcccctctccctctcttgttttctcttccccccccccccccccttcccctcccctccccc

SEQ ID NO: 61826 - DNA, 791 bp, Zea mays
  Clone ID: MRT4577_156383C.1
agagcaaaagttctgcaacactatatgcatcgactggagcagttattgttttttttatggtggcctcatcagcactatgtttcttttactactgccgcaagaagactagcactgttgtacctttgtctgcaaacagttcaagcaggcaactgcagaccactaccatggaaggttgcttgatgtgctaatattttgctatgcatatttgttcaatgttttttttccccgaaaacctagcacgagctctgcctctcaattaaggaaagaggtttatgtacaggttcgcctgaaggcctgaaatgccccaaagtgctcacacagaaaacaagaaacacacaatcbcctccctttggggattagactawatagccaaattgggttactaaagacbctagttcgcacaatcgcacatttgttcaatgctcacattgctgtagtgctttgcattcctgtagtttgcatatgctttaggtgtacgctgcaatactgcttgcttcaatgcacaaatagaacctgtgttcctcttctaaccyctgtttatgcagggataactttattcagacgatctgagctcgaaacagcctgtkaaggtttcagcaacataattggcacactacctggatttacactgtttaaaggactctcccatgtggrgcggaatagctgtggsgtctacatcggtggctatgcaggaggktggtcgctatagatgagcacataacatgaataaggttggagcttgtcaargtaaacataagaatcttttgacctgtgggtattgtgagacgaaa

SEQ ID NO: 61827 - DNA, 594 bp, Zea mays
  unsure (1)..(594): unsure at all n locations
  Clone ID: MRT4577_156384C.1
naaaaaaaaaaaaaaaaaaaaaaaaaaaaaggggggggaaaaaaaaaaaaaaaaaaaaaaaaaaaaaaaaaaaaaaaaaaagggcggccgttgggcggggctccttgattggctcccgctttcactgccgccgtcgcttgctatttttataggtttcctttaattgcaactccatgtgccagtcgtttgcaccgcgtgttgtgactgggtaaaaccctggggaaacccctgctttttcccctttttaaatccatctgccttttcataccccttttgctcctgctcgaagaggccccaacggggcccccctctcttaccacttgtcccaacttttaatggagaattggaaaggcgcccttgttacccggcctctttaaccgcgcttgtatgtcgggggttactgcgcaggttacccgctacatttcccatccccttgccgcccccttattgccctttctttcctttttttttcctccctttctcgggctttccccgggattttctaattagggtgttactttgggggtcccttttgggtgcttttcggggcttttaccccaaatacttctttaagattttgtttggggtatgggg

SEQ ID NO: 61828 - DNA, 312 bp, Zea mays
  Clone ID: MRT4577_156385C.1
ttgccgtgtgttgattgggatatagagagttttttttcctctcttgatggaagtacttgggaagctatgttgatagactgaacatttttttgtaaaaaaaaaaaaaaaaaaaaaaaaaaaaaaaaaaaaaaaaaaaaaaaaaaaaaaaaaaaaaaaaaaaaaaaaaaaaaaaaaaaaaaaaaaaaaaaaaaaaaaaaaaataaggggggcccgtcaaagatattcaatccttagacccgtcggcatctagcggcaaattcctcttcgaattaacccaaaaaaattttgctgcccccaattataaacccaccg

SEQ ID NO: 61829 - DNA, 388 bp, Zea mays
  Clone ID: MRT4577_156386C.1
accaggccccaaacaattagaacgaattacgatcccgttttatacaaacaccaaagggggaagggtttaatacaaaacttattcgaaaagacaagaactacgggggtttgaattcccgaactggacagaccgaaatccaccccttcccaccaaaaaaaagggggggaaattttttcaaaaaaattatttgggggggttctataaagggggaaggtttgccactacccacttatttggtctttttggggttgggttttcccgaccggttagaaaaaaggggggggcttggacttttccctttgaggtttttggggagatttatgaaactgggaaaacccttgggggcaaacgcctttgggggccacctgggggtgagaaggttacgggc

SEQ ID NO: 61830 - DNA, 429 bp, Zea mays
  Clone ID: MRT4577_156387C.1
ctttcacgttgggtgacatccgtccaacttttcgattagtaggacctacatgttttgtgccgatgattgacacagcaattggtattgtgagacagaacttggtggccattagaatgttcatatgttattcgaccatggacagtttaccctgagggtggattcacagtatggacagtggagttaagaggagcgggatacatattggtgcaatatttagagcaagagagttacccctgtagatagctcttgccgggactggagatgaaccatgggtcgtggtctaccagtttgatgacaatatatctgttgggaaatttgactatttcgagtgtgcgatttttacggagattatggctcagtggatagcaactgacagaatggacgcaaagtgtgaattgtcagcgctgttggatatcgcgtacacagtac

SEQ ID NO: 61831 - DNA, 373 bp, Zea mays
  Clone ID: MRT4577_156388C.1
gagaaagctgctgagtacgaaaatggtgtcaagggtgcagccaagggtctacttaacaagctgcatgacctgcaatttgacgttggtgagtccatggaagatgacgcgtatggtgattccgcctatgacaagggtggtgccactgatgcgacctttctttcttcctttcatggtcttaatgatatcaagtgctaggcctacggctaaattagctacccatgttgggtcctatgtatggaccattattatatccaaaactatatccgaaccgatctgaattgaactctaaatggaacgcttgagaaaaaattggaccaagattggatcgcttattaaagctcaatattgagattgaagtggttaatgaagagtt

SEQ ID NO: 61832 - DNA, 508 bp, Zea mays
  Clone ID: MRT4577_156389C.1
taaaaaaaaaaaaaaaaaaaaagaaaaaaaaaaaaaaaaaaaaaaaaaaaaaaaaaaaaaaaaattttaaaaaaaaaaaaaaaaaaaaaaaaaaaaaaaaaaaaaaaaatttttttaattttttcccacttgcccgttcaaaaggttaattttggaattttcaaaaaactgggagcctttgggcctttcttttatagggccaaattgcccttttaggggtttgtttaaaaatttactaaccccctttttaaaacttttacaactggggaaaacccttaaaatcccccattttactacttttttacgcctatccccctttttccccatttttggcttattttggctaaaaggcccaaaaagaccccccctttccaattttcaaaaattttcaatgcttaattgacccaccctctccccctgcattaaccctttaagttgtggggtttcgcgatacaacattaactttaaatttcctagcccccaacccttcggtttttttacttttttt

SEQ ID NO: 61833 - DNA, 2514 bp, Zea mays
  Clone ID: MRT4577_15638C.1
atggaaggtccaccattaccgtggcaggcgtcacttggtacttcgggcaggcgtatgaatggagtttttctccaacttctcgtcgctgctggacggcggcggctacctcatcttgcacggctctcgcctcaccggcgacggcgggaaggacaaagcggcggcggatttgggttcttgtctcccaaattcaattcctccccgaatctaatcgccgacgtcgctaccacggatcaccgtggaaccctgagtctgtcgcgggtttcgcgggttttggcatgctatagccgccagcctgcagcagcgatcgtctcggtcttgggcccccggactagccatgtcatggggacggttcagcttcactcctcagcaggggcccacgctgaccggcgaacgcgggtgttccctgctcacaagcccgcgcctcgcaacgtggtggtcatcaatgaggacgatgatggcgatgttatcattatggagcacgcagttgcacgagaatcagcttctgcggcggcggcactaggatccgaagcgaggaaagggggtggctcctctggtgatgtgatcaacatagatgatgatgaagatgagaaatatggtaccagaggggataaagcaggtcctagcatgtcccgtgcctctgggtctccagtagcgatgaccccaggccggggttctcctaggaaccgatatgggtttgattgctcgtatgacagctctgagagcaatttgaccaaaggatgggactctgacactgatgatggctctgattgtgagattttggatgacacgactggtacagcctgggagatgtgggagacggctgcttccagaaaaaagccacctcatggtgtcgacgagtgtgaggatggtggtgctactgcattcacgtcatgtgctgggttggagacacaaccaggtaaatactctgagcatctctttggtgttgaatgccatccaaaagagagtatgtcttggtcttacagtgttgcaagcaagtatggctctcaaaatagtagtgacagtacaaaagaaagccctgggcatgctcaaagcagttctggcactgaaaaggatgtccatggcccttctgtaccaaatactgaagaatgctctactggagatttttccagtacaaatggtaaagaaagcgcaaaaaatcgaaatgacagtggaaaggatatccctactgaatgccatctcaatgataacatatctcgaagttttagcgatgcccgtaaggaaggtcttcaaaataataccggcaggtcaaaggatcaccatgaccagttttcagcaccaaatgtcaaagaatgttcaatggttggttctgaaaaagcttcaagaggggttcaattacctcgccctgatgaaagctctgcctataacttcgcccctgcaaataggttttttttttctggaatcttgtcagtggataggaacgatggaagtcctccaatttttgtcagtactcctgaaaaggttgatgagaaaatacctgaagatgtatattcacaaaaggatccatcaccacctgaagcttcctacaacacaaatttttattctgctcaagataatggtctggccaagggtaaggatttgcttcaggatcctaaggaattaggacagtttgcttcagtgatcggtgaacgtgaaaaacacaaagaatctgttgagtacaagcgagcagcagaggaggaatgggcttcaagacatcggcaattacaaatacaggccgaggaagcaaagaaattgcgaaagagaaagaaagctgaagctcaacgattgcttgacacccagaagagtcagcggacgcgtgggcaagaagtccgtgaatcgcagagaaagaatgaagaagctatacaactgaaggagcggtatcgggcaacggtcggaaaggagctggaagatatagaaaggagacattgtgatatgacttcaatactgcatgcgctaggcatctcagttgaaggtggtgaggttaaagccttcaagcaagctcttctgaaattccatcccgacagggtatcaaggaatgatatttatcaacaagtaaaagcagaggagacatttaagttcatttcgcggctgaaggagaagctacctcggctatcctaatagccatcccactcttttttccacatgccttggcgcatcctccattcacctgtagggtcaaggtacagaattcagaggatgtttattggcgttatttacaagtaactagggctttagcttgttaaatgtgtttttgtgtgtgtgtgtgtgtgttgggggttgggttgggtaggcattcgtgtcagctatgacatgggatggtaaccacttcgatttgtgatggcgaaatggttgtacatcaccgatggcagaaagatcattttttaagaccatctttattagtttattcgacagaataccacggtgtcgtcctctagttttcatacatctgcattttgtactaaaaggtgtctaggagacatcagaacatcgcaattaaatcggatgtagcccttttct

SEQ ID NO: 61834 - DNA, 145 bp, Zea mays
  Clone ID: MRT4577_156390C.1
tggaccgctcctccgtcttctcgcgtgagacgtgccgccggcgtgtcgctgtcagctccctgccattatcgacatgtgtcgcagccggacgaggtccgcccgctatcctcgacgcgggcatggagttcggcttcttcctggtggt

SEQ ID NO: 61835 - DNA, 789 bp, Zea mays
  Clone ID: MRT4577_156391C.1
cctcgaccccggccggagacggggagacccgctgggaaggctttcccatcctattgtcggcgcctcctccacatcgagtgcgctagggttttctctgcccctcgcccgccgccgcagccgccgatggccgagcgctggcgctcgagggcgcggcgggacccagacctggacgaagatgcttccccgccgtcccggcagccgcgccacagcgggggcgacgaggaggacgatgagctggggaacgaggatctcagcctggagatcgtcgcgcgcgcgcagcggaagcggcgcggggaatcagccggcggagtgcccgtgttcgccgaccttctttcggtgtcctccgccgacgaggagggcgccgtggtggagctcgatgaggcggatgagccccggaggaagcagaagaagaagcagcgccggaagcaaaggaagaagcatcggaaggagactacagaggctgcggcgggggccgccgtagaggtggatgagaatgcggtttgtagcaccgaggaggggcccattgggacagcagaatcggtgttaactgaaaatggggctgatgcccctgcatctgataatatggttctgcggaagctccttcgcataccgagatactttgatcctggggaaacactgttggagacttgttttaattgtagcgaggaagggcatgtagctgcaaactgtccattggaaaagcgaaagaagccttgctttgtttgtgggttgtttgggcacaatgcaaagcagtgcacgcagggtcaagactgttttatctggtaaaaa

SEQ ID NO: 61836 - DNA, 318 bp, Zea mays
  Clone ID: MRT4577_156392C.1
gattcaaccctgattcccactagccaaagttcttttccacccgtttaattccctcgagtggcatgcatatatgggggcgaccgcgtgtcactgcaaaaagtccccaactccgattgctatgctgtaaataattgccttccccgaagaccccccattccttccttgattaaaaaaaatcacgagacactgccattcaatggtacaaaagaccgagcttgtgaatgtcaaatttctgcgcaactatcgattcttctgcttacaatatgcttgttttaatcaagctttactttctttttcttcttaagtacttctccatgt

SEQ ID NO: 61837 - DNA, 358 bp, Zea mays
  Clone ID: MRT4577_156393C.1
cctggcgcctggggcttacgctcgctctggggggagggatagagagagagcgagagagatagacagatctagtagagaggctaggaggtgggcctcgaacgaagattccaggccgggtccatcacacaggtggtggaagtgccagccgagctggtggcagcatgcatccggaccccacagcccaagacgcaggctgggcttctcgtggggccgcttcctggccgcactccaagccggtcgtgaccgcgcagctcttgtaccacggccacctggactactcccacaccaaccaggcgctcctgcgacccagggcagccgcggccaaggaccaagtgttgtgcctgttccaaggggagct

SEQ ID NO: 61838 - DNA, 597 bp, Zea mays
  Clone ID: MRT4577_156394C.1
actcacttccctcagtcctcgtccgtctgctccctcctctctctacctagctctagctagccttcctgtagcgcggcagagatggcatgcccctgcctccaccacaggacgagcggctggacggcagacgcatgctgcatgcctgctcgctctctgtacgactcgcacgctggccggtcgggacaatgtctgatctgttgtccgtacgagcggagccgcacacgacgcatggaggtcgcgagcggaatgtaccgcaggacgtggcatggacgagtgcacgggcactggaccgtacatagcgcgcgatcaggcgaaggcaggatgctggcgtgtacccaggccgcatccgcagacaagcctacgctacattgacgcgcacaacgccgccgacgacgcgggcgtacactgccttgcgactcggacttaaccgcttcgccgacctcaccaacgacgagtacctggccacctaccatcagcgccaggaccaggccgcagagggagaggaagctcggggccaggtaccaagcaggcgacaacgaggacctgacagagtccgtggactggaggtgcaagggcgccgtcaggcgagggcaagga

SEQ ID NO: 61839 - DNA, 862 bp, Zea mays
  unsure (1)..(862): unsure at all n locations
  Clone ID: MRT4577_156395C.1
cctcgaggccggccgggaaaaaataacgaaagatcgggagtggccgggaccctcgcactcccgactcctgcacaacgacgctgtcgagcctgcctggcgagtgttgtccggcggccggcgacggggaagagagcgtccgacggcgacgcactcgagcggcacccctcccaactcgctccctcctcggcccctgcagccctgctccgtggcgcgcatcactgggcggctcgccgtacaatcagcgagcgggtggcggctacctccatactagcaagactcaatcggcgaaatcctgggcgtgcctgccaatgagcaagaagaggaagcatctggatccagcgaactcgttgaaagacagcgaacaagtagtcgcctcagatttcataagaggagacgatcttgatgacctattatcgaagcttatcaggagtgtggagattgccaaggcttcaaggggaggcttaccagaaaagatatggatgaagcaacaatttgctatcggcgtcaatgatgtcacaagggttcttgagcgaatgccgcattctgtcactgctcatcctgctcaaatgtctaatgaagcaccaactgtctcaggccgacgtcaagctcctttggtgccattgcaggctgtccttgtagctgccgactgcaatcccaaatggttaacaaaacacataccaacactagcgtctacaaggcaggtaccggtattgtgcgtgaaggacaacaagggaggctcagtaaggttaggccatgtggtngatgtcagaacagcccttgccattggagtaaggccaaagatagcgttctcaacagaccanttgatgagtcctgaaagacagtaaactggttgccaatgaac

SEQ ID NO: 61840 - DNA, 824 bp, Zea mays
  Clone ID: MRT4577_156396C.1
ccggccgcggcccgctgcaccctcgcagtcccgactcccgactcctgcacaacgacgctgtcgagcctgcctggcgagtgttgtccggcggccggcgacggggaagagagcgtccgacggcgacgcactcgagcgacacccctcccaactcgctccctcctcggcccctgcagccctgctccgtggcgcgcatcactgggcggctcgccgtacaatcagcgagcgggtggcggctacctccatactagcaagactcaatcggcgaatcctttgtattttgaatttgaatacctattttcaagatcctgggcgtgcctgccaatgagcaagaagaggaagcatctggatccagcgaactcgttgaaagacagcgaacaagtagtcgcctcagatttcataagaggagacgatcttgatgacctattatcgaagcttatcaggagtgtggagattgccaaggcttcaaggggaggcttaccagaaaagatatggatgaagcaacaatttgctatcggcgtcaatgatgtcacaagggttcttgagcgaatgccgcattctgtcactgctcatcctgctcaaatgtctagtggagcaccaactgtctcaggccgacgtcaagctcctttggtgccattgcaggctgtccttgtagctgccgactgcaatcccaaatggttaacaaaacacataccaacactagcgtctacaaggcaggtaccggtattgtgcgtgaaggacaacaagggaggctcagtaaggttaggccatgtggtgaatgtcagaacagcccttgccattggagtaaaggccaaagatagcgttct

SEQ ID NO: 61841 - DNA, 239 bp, Zea mays
  Clone ID: MRT4577_156397C.1
acggtctgcgctactcgttccccaggtcgagcgcacctgctcccgcaccgtcctaccgaccgaacgcccggcctcgtgacccgagaaggcggcagcgctgagcttaccggaggtcgcgacggagtctgtggctttggacgcgcccggcgccgacttcaagctcgggagggagcggggcgcggccaccccaagcacgaactcggcgccgtaatgctgaaggcaacagacgggcctggcgg

SEQ ID NO: 61842 - DNA, 107 bp, Zea mays
  Clone ID: MRT4577_156398C.1
cggacgcgtgggcgcaaggtaaccgagacgatgaaaaacagacttgtgtaataagtaaatgaacctataaaataccagtttaactgtttaaggagatttgcctcatt

SEQ ID NO: 61843 - DNA, 444 bp, Zea mays
  Clone ID: MRT4577_156399C.1
aaattgggaacaaaacttttttcttttcatttaaatgggtcattcagggcattggtaaaactgaccctgccccccatggggatgcgggacacatttttactcaatcatcgccgctaaatgactaaactagctagctagccaggggtttttctacagcacatagttttttaagggggggacacccccggcagcaacgtaggggcatggagtcggctgctgcaggatggactggaggaccaacccaaaaatcgcctggtaccggggctggggttccacctgcctgagctggtggaaacactgttgccgaaacaactggcacttagggaagcagtagggcgttcccctcgggctgcactgatgcctaaaaaactcgacccactggcccaggatcggggtgctgccaacccccaaggttccctgaaattggcacgggcttggatgcgg

SEQ ID NO: 61844 - DNA, 737 bp, Zea mays
  Clone ID: MRT4577_15639C.1
ccggccgggaaaatgtgtagtcgcagatgacggacgactggactaccgacagacaacatgtgcgactccgcctccaccgtctacgggctcgtcggcgcctccctggacagtcgaccggcgtactccaccaatttcacctacgagggacgatcgtcagctaagaaccccctgatgatgatgatacctgcgagagtgaatgcgacaggcatgcatcctcgacatagaacgtcttccctcggggtactggttcgacgatggacctgagctgttgtcggcttctacctcatcggatgaatggggtcgatcagcgtcactggcatcaacgtgaacacgcctcactgagctcttcttctcgcaacatcgggcatgagctgggccactttctcgcgatctcgaccggcgacttccagatctggttgtggcctatagcatcgacgaatctgaggctgctcatcctgctcatcttctgctagatcgcattcgaggccatgagctaggactagcttctagaagagaagggtgtaagatgcatatgcatcatcgctggtgctgcgcatgcggtgcttgtgaatgcacgctcgcctcttatcgaactcgtttggtgtatacggttccgattacatccaatgcaacgcatgatgctacctgtgagcttcccgttgaatctatgccgcccagataccacaatgcttgcgtgtatgcatccaaccaaaaaaaaaaaaaaaaaaggggcggcc

SEQ ID NO: 61845 - DNA, 583 bp, Zea mays
  Clone ID: MRT4577_1563C.1
gccggccggtccgggaagccgcaacccattcctccacctgacgacggcgcgaagagtatattgcttagtattatgactggcccttctgcgctgatgctgcaaagtcacctccggatgtacatcggcttgacgaccatgacatctcgacaaggaagatatgcgacacaagggcgccagctctttcccatcacgcaggccccacgaatacgacatgctgaacgaatttggagactcgagctgccatctaaacctatcacgagatatatatactactcatcactttacatacatatatctatgtgtgtgacggcctcgcgcgtattgcccggtagatatcataaacatcgaggacgtctgggcttgcgtcattcatagatggccgtggatctgattacatgatgctgggatgctttctctatgctgctctagatcttctatatttggaacacagctgctcctgactatatcgacatctactgatgaggctgcgtagtctgtaccttgcacctgcattattattcagcgtcacatctagcatgctctagtagcttgctttgtactgctagcgccgctagatccgccg

SEQ ID NO: 61846 - DNA, 212 bp, Zea mays
  Clone ID: MRT4577_156400C.1
tcggcggctcaacttcagccttacgggcccgcgaccgctatggccgacgcgtactggaagtacccggcccctgccccgcgccagcagcaacagcaacaacaaccgccggccttcgccagggggggcgtcgcgcaccccggcatgggccgcggcgcaccgcaaatggcccccgccggggggcaacaacaacccatgaaaccggcccgccccaa

SEQ ID NO: 61847 - DNA, 348 bp, Zea mays
  Clone ID: MRT4577_156401C.1
tttcaatctcaacattgttgtgttgtggggggaggcacatgaaggagcaatggcacatggctaatccatgcatagatctgtctctacaccattgtggtatgccaccatcctcgatctccaccttgttgtgctacgcattgaggcagatgaaagagcatgtgagcattgtggatcatatatagagatgagcctccatgccttcttgttatgttctccattctcaatctccaccttgtttgtatgtcgaggtatattattgtgcattctttctttcgtgggtgtgtggggagatccactcttataccttctatgtttttcactattctttatattctatcttttttcttt

SEQ ID NO: 61848 - DNA, 511 bp, Zea mays
  Clone ID: MRT4577_156402C.1
tctgtttattggcaatggtaaggattcgttaacagtgtatcaggagctcaaaaaatcctatcagaaaatggtggtggactggtgggctgccatggcgattcgcgcgcgcacaatctatcacgcgcagatatggcctgagaaggattcgttaactcagctctgacgaattccagactttcccccccgcaaaaaagcataaatcaacaggattaaaaattcgcttgaggaccggaccattcggttctacctaagaaactgtatagacaattggcagaatccgattacacttgtcgatctgcttcccctgcactggattccatgttccaggtaaccatcggcggcggcggcagcagcagaaaaattttatatgcgtgcatggtcggccggctttatttatccttgttcttggatcaacaacctttttcctgcaaactggaaggacgagtagtagtagtagaagcgaccctcacagtcacagccagtgctccactgggctttgcaggcatctgga

SEQ ID NO: 61849 - DNA, 923 bp, Zea mays
  unsure (1)..(923): unsure at all n locations
  Clone ID: MRT4577_156403C.1
ctcgggcgggactcccgctgcccagtcctcgccaccgccgcactctgtcgccaaggagagggggtgcggcatggagctctcgctcctcaaccccgccgcgacgcaccgccaccgcggggggctcgccgggctgcccctcgcgcggggctccgtgggccgcttccgcgtgtgcgcctccgccgggggcaccgcgccgcccaagtcctcgggggggaggaagcggggcaagacggagatccaggagacgctgctcacgccccgggtctacaccacggacttcgacgagatggagcgcctcttcaacggcgagatcaacaaggaggtcaaccaggcggaggtcgacgcgctgctgcaggagttcaagacggactacaaccagacccacttcgtgcgcaaccccgagttcaaggccgccgccgacaggatggagggcccgctccgccagatcttcgtcgaggtcctcgagcgctcctgcaccgccgaggtctccggcttcctcctctacaaggagctcgggcgcaggctcaaggttccttcctgctcctttcttcgtgcatttcctcgaccgcctggtgggcgtgtgtgctgatgccctgctttttcctctgcagaaaaccaacccggtcgtggncggagatcttctcgctcatgtcaagggacgaggcgcgccatgctgggtacgcacctaccttatctcttttcatccattcggggagaaattcagctgaaagtttcatgtgatttgcactcactgtttaggttcttgaacaggggctgtctgacttcaacttggcgctgngacctgggttcctgaccaaggctagggaagtacaccttcttcaagcccaagttcatcttctacgccacctacctgtccgagaagatcgggtactgggaggtacatcaccatcttcaggcacctc

SEQ ID NO: 61850 - DNA, 771 bp, Zea mays
  Clone ID: MRT4577_156404C.1
cctcgaggccggccggggagcatatacgcctcctccctgaactagagagcagctcactcccgttgcccagtcctcgccaccgcccactccgtcgccaaccaatggcctccgccatggagctttcgttcctaaaccccgccgggacgcaccgccaccgcgggggcctcgccggcctgcccctcgcgcggggctccggggtccgtttccgcgtgtccgcctccgccggggccaccgcgccgcccaagtcctggggccccaagaagcggggcaagacggaaatccaggagacgctgctcacgccccggttttacaccacggacttcgacgagatggagcgccttttcaacgccgagatcaacaagcagctaaaccaggcggagttcgacgcgctgttgcaggagttcaagacggactacaaccagacccacttggtgcgcaaccccgagttcaaggccgccgccgacaggatggagggcccgctccgccagatcttcgtggagttcctcgagcgctcctgcaccgccgagttctccggtttcctcctctacaaggagctcggccgcaggctcaagaaaaccaacccggtcggggcggagatcttctcgctcatgtaaagggacgaggcgcgccatgctgggttcttgacaaggggctgtctgacttcaacttggcgctggacctggggtttctgaccaaggctaggaagtacacccttcttcaagcccaggttcatcttctacgccacctacctgtccgagaagaatcgggtac

SEQ ID NO: 61851 - DNA, 353 bp, Zea mays
  Clone ID: MRT4577_156405C.1
gggctccatctaagttcgttgtgggggcatatataaaaaaaaaaaagcggcgcacccaaaccaaaggaccctctcaccaccctcacaaagggcctctcctgcaggcacgtttccaattcattctgctaatactcgtcgactaacactcacgcgcacgcgcatgccgatacagctggcattggcaacagtaatgtgctatccccaagattactattttcccacccaccgtcttttataatagcggcttcaaacacggggcgcgggtgtactgcacctcctttcctttcacaaaggcccttatgtaggtcagatatgacgacttctctccactagctctctccggtggtatggac

SEQ ID NO: 61852 - DNA, 278 bp, Zea mays
  Clone ID: MRT4577_156406C.1
caaccaaaccaagggaacaagccccttgtttcccttttttttattgggccatggaatttttacatccacaaaaccccgacaaagccccaacttataaacaggggtaaaccattattaattggggggctaaaaaattatgggggctgggctttgattgaaacctttgcacccccccctaggcgggaaacccaaggctgccggcaactttattaacaaagcggtagcggactttttttttttggagccgttccagggccgggtggacgtaatccattttg

SEQ ID NO: 61853 - DNA, 253 bp, Zea mays
  Clone ID: MRT4577_156407C.1
ggcttgctgcgccagctactgcgtacggttgagtaactgcagagagggctggggagcgacgacgagatgctaattgtggtcgggggacgctgttgaaactgaagtctcaaacaccggctggcgacaggactgctagtggtactaagtgtgctaggaacctagggtgaatatcgctcctagctgaatgcaagggcataaggagagaagacctttggcggcgaaaatgccagcggcgcacacatgcgtacggctg

SEQ ID NO: 61854 - DNA, 202 bp, Zea mays
  Clone ID: MRT4577_156408C.1
aagcagttgtacttgggttgctagagctatcgacaacccaagaacactttctcttagggggggcgattcagggggtgggttgtgtctccatttctcaatgcacaccccctaatcattcaccgacgggggggaatacaatgtcacaaaaatcctcctggtgcgcttctcggacaactacttttttcttactccgcgggagaac

SEQ ID NO: 61855 - DNA, 184 bp, Zea mays
  Clone ID: MRT4577_156409C.1
gacgatccattctttcatactcattgatgccaccccgcacgtcttctatagagacatctataatcaacgggcgggtcgccgatctacatactcacgactggcaaaaccccatccattttcatccatgcttgctgagaggacatacttctttcttcaggtggttgattatccatgatgtctctag

SEQ ID NO: 61856 - DNA, 481 bp, Zea mays
  Clone ID: MRT4577_15640C.1
cttatctcctcctccaccccgagatatttccacgtctcctccgccaccatggagtccggcctcgttgcaagccaccgcctccgcgtcccgcccccctccgcctccgccgggcaccaccacctcatccgccaccgccacgcccacgccccggtggccgctgcgcccctccgcctcagtctcccgcgccgccgccgcagtcccagcgcccggggacgacgcgtcgcccaagttcctgggcgtggagacgaagacaatcaagaagatcgtgcccctggggctcatgttcttctgcatcctcttcaactacaccatcctgcgggataccaaggacgtgctcgtcgtcaccgccaagggcagcagcgccgagatcatcccgttcctcaagacctgggtcaacctgcccatggcagtcggcttcatgctcctctacaccaagctcgccgatgtcctctccaaggaggcgctcttctacgccgtcatc

SEQ ID NO: 61857 - DNA, 487 bp, Zea mays
  Clone ID: MRT4577_156410C.1
ccctcgggcctgcctccttcccttaacatatatatagaggtcatgattgtttaatgatttatcgtgtagagagtagctactttgtttaacttgtttggtttgttccattacaagaggaagacatggagatggctctgattatgttgtctaagaaaggataaagccataaaggaataatcatagtaacgtactcaccgctcattggctatcctcttctctgtatggctgcatcgtcctcaatgataattcaatcctgtatttctttctattatatctgaatgccacatcaagtttatggttgttgctgtaccatctgcaattacctctcacgacaggaataggcccggctgggcccggcacgagaggcaacagtctaagaccggcacggtatagtattgtgccaggccgggccgacccgcgggctggctgacatggcccaagctcgacacggttattcttacacgggtcgtgccggttccgaacccag

SEQ ID NO: 61858 - DNA, 1014 bp, Zea mays
  Clone ID: MRT4577_156411C.1
aaaaaaaaaaaaaaaaaaaaaaaaaaaaaaaaaaaaaaaaaaaaaaaaaaaaaaaaaaaacccttacaacaaccaacgaaaagcgcacgcgcacgcgcatcccggcagtcagtagcgcagctgcctctcctctctttggcccccggagccggagcaagagcgccgccaacagcccgctaccggcgccgtgtcatggcgggggcaggagacaaggtggactacgtcttcaaggtggtgctgatcggcgactcggcggttggcaagtcgcagatcctcgcgcgcttcgcccgcaacgagttcagcctcgactccaaggccaccatcggcgtcgagttccagacccgcaccctcgtcatcgaccacaggagcgtcaaggcccagatctgggacaccgccggccaggagaggtacagagctgtgacaagtgcttattacagaggtgcactgggagctttgctggtctatgacattaccagacgccagagcttcgatcatataccccgctggctagatgaactccgagcccatgccgacaagaacattgtgataatgctggttggcaacaagagtgatctcgaggagcagcgagcggtgagcactgaagatgccaaggagtttgccgagaaggagaacctcttcttcctggagacctctgcgctccaggcaacaaacgtagagagtgcttttcaaactgtcttgacagagatattcaagatccacagcaagaagaacatggtgtcggagccgaagagcaatggagctgccccagcaatgccggggacaaaggtccttgtcccaggtccggcgcaggaaatcccaaagagcaagtgctgcagttccatgtgatgcttctacgtttggtgctgggtgggttgaaaatatattcacgcaacattgtgttggttttaaatccctgctgaaatgcttgggttttggcgggattgtgttggaacaccggtgtattttagatatctgtcacaattgtgacatgagggaaggatgtgctgatgtatt

SEQ ID NO: 61859 - DNA, 263 bp, Zea mays
  Clone ID: MRT4577_156412C.1
tctcgttcgcgacgactgagcgatatatcatccatagtctctcgataaacttcgatctgtgtgatttataaataaaccatattaatggaataatgctttaataagcagttcagtatatgtgtgtcgtcaaaatcacgtttttatactactactatgtgtgcatgcacactttttgtgtaatgctttacttgtaatttattgcgaataaacagagtccttcaccacttgttgtcaaaaaaaaaaaaaaaaaaagaaaaatataa

SEQ ID NO: 61860 - DNA, 299 bp, Zea mays
  Clone ID: MRT4577_156413C.1
gcagcgtcggacggggactcgccgtcggcctcgtactcgccggcatggttcccgcctcctggcccgcacggcgagggttgcaatgacgccaccgataacaatgattccccactctttcccctgagtaataatcagtcaaatcagggtaaaaaggagactgctctaaaagactacacggggtccctagcaattatctctgagattgaaccaaaggatgccataatgcaattgcttatgcaggaaacctattcaaggtccgagtgcagcaagtttataaagataattcaagagcgggtttt

SEQ ID NO: 61861 - DNA, 746 bp, Zea mays
  unsure (1)..(746): unsure at all n locations
  Clone ID: MRT4577_156414C.1
gtgagaaaattcatggaatgtctgatatcctatccggaaatatggagaagatttagatagcccaactaatctccgtgattcagatccttntgcctcagggaaaactgtacttcccaataagcatagtgtaaggctggctgttgcctttggtctgatttcatctgagcctgggaccccaattcttgtcaagaagaatgtgcgtgtatgcaaacactgagatcgtggactgaagttgatatcaaaatattcaagacggaagattgtagttggtgacacaaagatatatcacatattttcagatggctcttgttgctgtggtgactactggtgaactgttaagattgatgacgaaatgcctgaatgagattctgcaagagcaggatacctggatctggatgtacacccgggttttcaaaatctgacacaaggtaaactgcaaggaattacatcacgtatccaagttgaggacacataccgccataccggagatatccattcccaggactcgtagtcatagtagatgctccgagaaggaaccaacaatttgggggagaattctaacctacaactgattacacacattggacaagaacgcaccaccacatttttgtagcaattggagcaggatgatgtacaaagttgttttttcccttcataagcaatgtaaaaaaggctgagctgattgtattcattgtatgacacatcatacatggatcaaatgcaagaaattgaagtgtttctctctc

SEQ ID NO: 61862 - DNA, 380 bp, Zea mays
  unsure (1)..(380): unsure at all n locations
  Clone ID: MRT4577_156415C.1
gcgccccccccccccccaaggccccaaccttctcaggaaaaaaaacccggaatccgcacccatccatggccgccgccgccctgctgcgccgctcgccggcggcgcgcgcgctcctctctccggcgctctcgtcccgcctcgtcgcgtccaagccccactcctcctcccccacgcagccgccccccggggcntggggcgcctccagcgcgaggaccttctcgatctcccggtgggacccggtctcgccgtcgtccatgccgcacctctgggtctgcccgggggggcctggccggctgcgggccgttggtgctgggcgcgctgctcatgctcgcgagcgtgcgggccccgtcgctccccttccgccgtcgctgccgccgcgg

SEQ ID NO: 61863 - DNA, 192 bp, Zea mays
  Clone ID: MRT4577_156416C.1
gtgacgctgccgctgcagacgggcgtccaggtcggcatgtacaggcggatgcggtatgagacccagtacgacatgcagttggacagccagatgaacagcttagcacgacagcagtggcgagcggtccacggtgttctgcgcccaccagccacggctaaaacagccgctagcacggtacgctcaactcgctga

SEQ ID NO: 61864 - DNA, 335 bp, Zea mays
  Clone ID: MRT4577_156417C.1
gtaaattcattttaactccaaattgagtcgttccagtttctataattttgttttaatattgtctatcaactagtaacactgtttagccatgaaacttgaattaaaattgttcattgaattaatctgttctatgtgctaaataacttcagaaatccataacttggtaaccgtaactccgaatttaatgattcttgtttccacgatttcgtagcaacatgtagattattattatgtattttgtttatatgtttggtgtgatgttaattttgcctataccatggttggctgtattgctacgtttagcgtgaagatacgtgccatcccgaagagcaagt

SEQ ID NO: 61865 - DNA, 794 bp, Zea mays
  unsure (1)..(794): unsure at all n locations
  Clone ID: MRT4577_156418C.1
gggtacctcgaggccggccggaatacacaatcccaaacccgccaacttaacccacactcgtttaaccaaacaaccccaatcaatcaagatgaaattcgctgccgccgctaccatcctcgccgcttccgccgccgtcgctgcccccaccgcctccaagatcaccgacgttgagatcctcaactacgccttgaccctcgagcacttggagaactacttctactcccactacctcgagcagttctctgcccaggactttgaggccgctggcttccccgactgggtccgaggccgaatctcccagatcgccggccacgaggcccagcacgtcgagctcctctctggtgctctcggagacgctgctaccaagccttgtacctacaagttccccgtcaccgatgtcaagtcgttcactgccttggctaccatcatcgagaacgtcggtgtctctgcctacctcggtgctgcttcttccatcaccgaccccgcttacttgaccgttgccggatccatcctcaccaccgaggcccgacaccaggcnttggatcggatctaccgtccagaagggcgccgcttggtccggacctgaggacactcccctcactttcgacagcgtttactctatcgccgccgctttcatcactgaatgcccctccaccaaccccgctctccccgtcaaggctttccctgctctcaccatcgccgctgacggtactgttacctcttccgtcgatgtcgagggcaagttcattgccgtctacgctggcctcgtcgccaacaccttccccatcaaggga

SEQ ID NO: 61866 - DNA, 167 bp, Zea mays
  unsure (1)..(167): unsure at all n locations
  Clone ID: MRT4577_156419C.1
ccatctccactcattacaaatattcctnactatcaccatcatacaatccatantattacatctcatataaatntccattaatatccccatataattacatacaaacctaactctctacacttaccaatacctacatcaattacttctacccatnaatcatcatctca

SEQ ID NO: 61867 - DNA, 219 bp, Zea mays
  Clone ID: MRT4577_15641C.1
tttgacttgcttgaaacaacttttatagtttaaatactgtaaatgaatactactattgtttggatttataaaaggacttttagttgaagttacaagggtaggcctgttgcattggtgggagctgcattatgtttctgatttggtcgcggctgcactgctgtgtatgggcacttgcagggccaaggctttcattggttgacgccagtgcctcacatttta

SEQ ID NO: 61868 - DNA, 242 bp, Zea mays
  unsure (1)..(242): unsure at all n locations
  Clone ID: MRT4577_156420C.1
cggacgttttttttttatagagtnngacattctattcaacgttggcgctatcgattaaaagattgacattacatacggaccgagccatggcaactgcatctgaattcttaacgcctaaaaggcaacatcctgccatatcaaaatgctggctctaccagaaaactgtacggatgttgcgggcttataagtggggaatgccccgctgcatctggaagtcctgaacctggtgttacttgtcgaat

SEQ ID NO: 61869 - DNA, 242 bp, Zea mays
  Clone ID: MRT4577_156421C.1
ctcacttttcggcgcccgccctttttttcgcttggaggggcaggacggccatgccagatgactgattgtagtgcttactgaagatcgatcaaacatacacatcgttgcagaggtccaaatacgacacaaaagacagacgtgggtatttttctactatgcctgcgactttcattagggggatcaggcatagccggccttgccaacgttgccagttgtgttactgacccttacggtggatgggc

SEQ ID NO: 61870 - DNA, 291 bp, Zea mays
  unsure (1)..(291): unsure at all n locations
  Clone ID: MRT4577_156422C.1
cggacgcgtgggcgagtagcactttcatatcctgggttcgattcctatcgaaagcgaattttcaggcttggttaaaaaaatcccctcgttgtgccccatccgctcttgggttgcgatgttctgtgcgccaccgagagggcggtcattcctccccggccaagtttttctataaagtaacangaaaaaaaaaaaattttattaaaaaattaacaaagaaaaaaaaggaaaagaactaaatgttgttaaagaaataaaaccaacttttacaaaagttcaaaacttttacttatg

SEQ ID NO: 61871 - DNA, 321 bp, Zea mays
  Clone ID: MRT4577_156423C.1
ctgacacctggcttcaaactgttccgtgagaccaatactgtggactctggctcagcagcgggctcaaaggactacgttcacgtgcgcatacagcaacataatggtcgaaagagcctgaccaccagccatagattgaagaaagagttcagatacagcaagattatcactgatctgacgaccgagttctgctgcaatgatacagtgtgccacgacccagaactcggacaggtcattcatcttcagggagatcagaggaagaacgcctataatatcatactgcaggccggcattgctaatactgagcacatcgagattcatgga

SEQ ID NO: 61872 - DNA, 277 bp, Zea mays
  Clone ID: MRT4577_156424C.1
taccatgaccgagcgaccgtagcaagggaaaaggtcggcggcgcaagcagcggcccagaaaagtcggaccggccgtcaaggcggctgcagtcccgtcgcggatcggcgctacctgaaaaggccgtacccacgctggcactggcccccgtctacctcgcgccgtctgagtacctgcgcgagttctggagttggcaggaacgcgcgaaagacacagaaacgcgcatatcccggccactgctcctgcgatccgacgacgagagctgggagctgctgcagc

SEQ ID NO: 61873 - DNA, 660 bp, Zea mays
  unsure (1)..(660): unsure at all n locations
  Clone ID: MRT4577_156425C.1
gggtacctcgaggccggccggggccgatctcgaagcagcagccatggtgctcgcgcgcaaaaagttgaagctgaagctccacacgctcctcccagccggcaaagccgcggaggaggcgcatggagaggatgtggaggccgtaaaggagaggctcgcatcctccaagcggctgcgccccaagcgggagcggaggcccaagaagaagttgtcgctccccgaggtggtgcggcagacggaggaggagataatggaggaggtggagcggaggagggaggagaggaggaaggagaagaaggagaaaaggaggatcaggaggttgatggaggccgaggccgcggagccggaaacgcaacaggtggagggggagataggggaggncgattctgctgccgggtctgagtctgaccagccggtcgaggcaaaggatagcgaccaaaatataaacaagttggaagtgaccaaccccgctgttgggtccaacaataacattgttccagataataggcatcagaatcacaaaatgcagttggccaaaactgttgtcgtgtctgacaatcatgtagtcgcagagcatagggagcaaaacataaagaaggtgtatgttggtggcatcccatactattcatctgaggatgacataataaatttctttgaagcatg

SEQ ID NO: 61874 - DNA, 4195 bp, Zea mays
  Clone ID: MRT4577_156426C.1
aattcagttcgaggcgaggccctcctccatcccccctcctaggctcaccaagtcaccagtcactaccactccgccagccaggcgctccctccatttccgacgcggcgcgccgaggtctgcacggacgcgcctcggtcactccgtcttcccacctctccggtctccgctggtcgtggtctcgagttccctcgcttgcttacgggaggcaacgacacgaccccgattcgagtggcgaccgggggaaccgcgtcttcgttccgtcgggggccgcctccgggtactccattctccggccccgcgattcccttcctcgcctgctgctgaggatcaagtcctcttctagtaagacaccgcgggctccaggaggcgcggcccaggctgctgatcctcgcccctggaccggtagacactgtggtggtgactggtagtattagtgattttaaatggcttcagcaagaaaagtaagaaacgcgaataagcgttatgccaaaatcaatgaagactggcaggataaagatacaccaagtgtacctaaaagtaaagtgcgaaagaaaaagttatcggacatgcttgggtctcagtggagcaaagatgagctcgagcgcttctatggtgcctacagaaaatatggaaaagattggagaaaggttgctggcactatccgcgatagaacatctgatatggtgaaggctctttacaacatgaataaggcatatttatctcttccagagggaacagcaactgctgcggggttaatcgcaatgatgaccgatcactataatattctggatggaagtaacagtgatcgagaaagcagtgattcaccaaaagcttctaggaggctacagaagcgtggtcgtgcaaaacttcaatctgtgtctaagacatctgatacacattttactgatctgttgcaacctcagcctgcttcatcgagctatggatgcctttctttgtggaagaaaaaacgttctggagacctatttgtagggaaccggccacgtgctgttgggaaaaggactccaagagtacctgttgcaagcatgtaccatcgagatgacaggggtgcaccaaatagacaagctaaaccggatgctaatgatggtgatgatgaaggagctcatgtagctgcacttgctctggcggaggtacatcaaagaggaggctcacctcagatttcccatacacctcggagatctggtgatcatatgtttttgtctcctgctaaaagtagtggcagaaaaaacgctgattcagagatgggaagctcaaagctccatggatttcagttggatgctgattaccctgaaggtagcttgggaagtagggaagccgagactggtgattataccaaaggcacatcctatttgatagccaacaaaggatctccatctagcaagcctcagaagaaagtcaagaggcctcaaaagaggagaaaaaaagctgtacgcagaacggatgatcagtttgaggatgatagagaggcttgtagtggtactgaagaagggtgcagcatgaaaaaggcaaaagaggaaccagagctggagacattgggaaccaaaactgcatggccatctagcacatcaaataaaagaagtcgccaactcttttttgatgatgaaagtttggctcgtcctgcattacatactttagctgatctatctgtgaatatcctacaaccatcttctgttgttgaatctgaatcatcagcacagatcaaggatgaaaaaagggacaatgattctgatggaaagcctggtatacctgcagcagctgtatcggtgtatgagcagaaagataactccaaaagtacatcaaagaaactcaaaaggcagccagaaatggcaagcactgatatggttactaggaaaaaaggcaaacttgctaaagatactcatcctgatgggagcaccacttctgaagtaaaacagcaagcttgtacatgtggtgtgaaaacagaaaaaaagaagaaatcttccatgggaaagattttaaaagatgaaaagaaaatgccaaaagatgttgagaagactgaggtttctcctgaagaagagaagacatcttctaacaaaaccatggatatcgcagagacaactacacaagttgcaacaactctgcatgctgacttgatggcaaagggtaaaagccgtcgtaaactaggcattcaaaaatcactaactcaagaatgtaaacctgccgagggtgctggcgattctggaagtgataaattgtcttactcactaagtaatattattgatctcaaggacaaactctctcattgcttatcatcacgtttgctccgtagatggtgcatgtttgagtggttctatagtgcaattgattacccgtggtttgcaaagagtgaatttgttgagtatttgaaccatgtcaagctaggtcatgttccaagactgactcatgtcgagtggggtgtcatacgaagttctcttggaaagccccgtcgattgtcgaagcagtttttgcacgaggagagagagaagcttgcgcagtatcgtgattcagtcaggcagcattatactgaacttctatctggcgttagagaaggtctaccaaccgatcttgcgcgacctctagcagttgggcagcgtgttatagcctgccatcctagaacaagggaacttcatgatgggaatgttcttactgtcgatcataatcagtgccgggttcagtttgatcgacctgaactgggtgttgagcttgtgaaggatatcgactgcatgcccctacatcctctggaaaattttcctgaatctctcagacatcaaagtgccatcaatggatactacagccacttatcggaagcaaaatatgaggatcagatgaaagagttggctagcggaggtgcagcaagatccacatcgaatttgaatggtaccgatgcaaccttctataccccttctggtcatccgatgagtaccttaatgaagcaagcaaaggccaacacggcagttaatgaggttgcagttgcgacacaacagtcaatgtacaatcaaccatgcacactttcgcagatacaggaaagagaagctgatataagagctcttggtgagctatcacgtgctcttgataaaaaggaagctttgctggtggagttgaggcacatgaatgaagaagtgtctggaaagcagaaagatggagaaattattaaagacttggagcatttcagaaagcaatatgctatggtgcttgtgcagctaagagattctaatgatcaagtggctgcagctttgctttcgcttcgccaacgcaatacatatcatgggaattcagggcagtctaaatctatggaaaatggcatagcccttgctggagcaccagatccgtataaccttttcagttatattaatccagagtctggttctcaagtgatcgaagttatcgagacttcaaagtccagggcaaaaatgatggttgatgttgctatccaggctatgtgcaaagtgagtgaaggagagaatgctttttcaaaaataggggaagcactagatcacttgaatagccgcggtactggctctggttcaagtatacttggcataagacggatacctcccgattcaggacagtcaaatgcatcttatcatgacgactgcacagcggcccctgcagcaaacagcagttcaaggttgccgaacggctgtgattcggaagctcaatttcccaaagagttgatatcatcctgcgttgctatgatgcttatgataaagaactgcacggagaagcagtatcaccctgctgaagtcgcgcacatcctcgattcggcactgtcaagcgtacaaccgtgcagctcccagaacatcccgatcttcagagagatcgaaatgtgcatgggcatcatcaagaaccaaatgctggcgttgatacccactccaagtggctaagcttcaatcctgccgcgggtatttaactaatgtactctgaaaacgaaaaaacggatacctgtatgtgatgtgcaatattcctttttttgctgttgtctgtatgtacaaggcgtgtgttattattcattgcctgttattattatattcaactggggtaaaaaaaaatatcatgtactctgtctccctttctccctctttctcaaggatgcattctttttatgtctaactaataactaatgggtaaaaaaaaaaaaaaaaaaaaaaaaaaaaaaaaaaaaaaaaaactcgcctcgtgc

SEQ ID NO: 61875 - DNA, 980 bp, Zea mays
  Clone ID: MRT4577_156427C.1
tggggaccctcgggctgccggcctagaactaactctatatcatttttgctttagctcctggaatccaacatgcccttagtataccttttttttaccatctcaggtttcttgtgaaaatttagtagcatacactggggcatccccgtcccacatgcctaactttcttttcctgttggtcattgcctcgaggccggccgggcctatctgcccggtccaccgccgcaaactctgcccgcccgcgcgcgccccaccccgccgaccgcggtgagcccggactccgccgccgccgcttcgctctaccctgaccagccctagatctgtgcgggatccgccgccatgttctggcgcatgaccggcctctccgcggcctcgcccgtggatacaattctggacaaggagaactttacattggaagagcttcttgatgaggatgaaatcattcaggagtgcaaagcgctgaatacccgactcataaatttcttgcgagataaggcccaagtgtcgcaattacttcgttacattgtggaagaagttcctgaggattcagagaagaaacaatctttcaagtttccttttatcgcttgtgagatttttacttgtgaaattgacattattttgagaaccttggtagaggatgttgagttaatggatttgcttttttcatttataaaacctgaccatccgcatagcacactgttagctggttacttcagtaaggtggttatttgtttgatgcttcgaaagactgctcctcttatgaattatgttcaggagcatccagatattgttgtccagcttgtcgacctcattggtatcacatcaataatggaggtgttggtgagattgattggtgctgatgaaaccatatacttgaatttcgcggatacattgcattggttagagaatacagatgtactgggaaatgattgtggataaatttagctcatcagactctcctgaagtgcatgcaaatgctgctg

SEQ ID NO: 61876 - DNA, 330 bp, Zea mays
  Clone ID: MRT4577_156428C.1
tcggtaattgcagggcttgggttgaggcgggggtggattaaccctaggcgggggtttagcttggttggtggctctgattccgtcgtcggcccaattgttcccggaatatagtgaggtgacgaaagctgccattggctattactatgccacgattggattctaagatagtcgctggccgcttccaaatttctagaaccaatttgtgtttaacgagaagcgtgacttttgattaattctttcaccctcttcattggtggtgttttgtccagggagacaagccaacttgtggttgaaagttacccttttcaaaccttcccaaggtttttaaaa

SEQ ID NO: 61877 - DNA, 243 bp, Zea mays
  Clone ID: MRT4577_156429C.1
ggcgcatacggcatacacagcgcagggcatcagaagcaggtgggatctggatcgacatggctgccgccagcatgggtatcacgtcccgcgcgctcgtcggcaaggcggcggctggcacgagggacgtcttcggcgagggccgcatcaccatgcgcagtacgcgcgccaagcccaagccggcggcgtccggcagccgatggtacggtgccgaccgggtcgtgtagctggggccgctgtcgggct

SEQ ID NO: 61878 - DNA, 704 bp, Zea mays
  Clone ID: MRT4577_15642C.1
ccggccgggagaccttcctctcacttcgcgggtacgcagagagtcgcaagacgcacctcgctcgcaacttgttggactcgaaggggcaatagacagcaggcagggccccgaactgcgggaggagattcccaaggatctcgtcggccgggtagaggaagggacggggacgggcgatggcggcggacggcggcggcggggtggactgggagagcctggcggaggccacctccggggcaatcggctcgctcgtcagcaccaccgtgctctacccgctcgacacctgcaagaccaagttccaggccgagctccagacgcaccagggcgcgcagaactattttaaaagactctacttggagaagagtggagcaaagtctattggaacaacagccaacttgttagtcgcagctgctgctggtgcttgtactgttatcgtgacacagccattagatacagcagcttctaggatgcagacaagtgtctttggaaagtctaaagggctgagagaaactcttgcagaaggtacttggatggaagcattcgatggcttaggcatttccattatattgacttgcaatccttctattcagtacaccgcgtttgatcagttcaaggaaaggatacttcataggcagcggcgcaaaatgcaggatcagcggaggataattccggagttgctctttctgctttctcagcttttctgcttg

SEQ ID NO: 61879 - DNA, 1779 bp, Zea mays
  Clone ID: MRT4577_156430C.1
ccggccgggacgttttattttgtccggcattgactgggtcagtactcagtagccactagccagtaccgtccagtcatccacgctgatttgccggaaggcgcctcggcggaagctgctatctagttgaagccagccatggccgccgagcccccggcgtacttgctgctccttcccctcatcgccataccgctcatcgtcttcctcgtcctgtcccgccgaagggatgaccagcggcgcttcccaccggcgccgtgggcgctgccggtcatcggccacctgcaccacctcgccggcgcgccaccgcaccgtgccctgcgggaccttgcgaggcgccacggcccgctcatgacgctccgcttctgcgagctccgggtcgtggtcgcctcgtcgccggacgccgcgcgggagatcttgaggacccacgacgtggacttcgcgtcgcggcccatcgggccgatgctgcagctcgtgttccggggcgccgagggcctcatcttcgcgccctacggcgacgggtggcggcagctccgcaagatctgcaccctcgaactcctcagcgcccgccgcgtccactccttccggcccgtccgcgaggacgaggtcggccgcctcctcggctcggtcgcgtccgccgcggcggcggggttgcccgtgaacctgagtgagaggatcacggcgttcgtcgcggacgcagcggtgcgcgccatcatcggcagccggagcgagcaccgcgacgagttcttgcgcctgctgatggacgggctcaagataattccgggattgagcctgccggacctcttcccgtcgtcacgcctcgcgatgctcgtcagcagcgttcccggtaaaatcgagcgccgccggaaaggcctccttgacatcgtcgaccccatcattctggagcatcaggagaagagagcggccggtggcatagacgaagatgaggacttgcttgacgtgctcttgagactccagaaagacatggactcccagtaccctctcaccaccgacaacatcaaatccgtcctcatcgacatgtttggagcaagcagcgagacgtcggcgacgacgctgaagtggacaatggccgagctgatgcggaacccggcggtgatgcggaaggcgcaagatgaggtcaggggagcactcgccggccacgacgaggtggcggaggacagcctggtcaatctgcggtacctgcagctagtcataaaggagacgctgcggctgcacccgccggcgccattgctgctgccgcgggagtgccgcagcccgtgccaggtgctcggctacgacgtgcctcgtggcaccatggtgctggtgaacgcgtgggcaataggcagggacccagcgctgtgggacgcgccggaggatttcgtgccggaaaggttcgaggagagtggacgagacttcaagggcatggattttgagttcatcccgttcggtgcgggaaggaggatgtgccccggcatggcgttcgggctggcgcacattgagctcgctctcgcggcgttgctgtttcacttcgactggaagctaccggaaggggtggtcgccgaggagatagacatggccgaggcggtcgcgatcacggcccctccgcgatctgatttagtggtgctccctgttactaggctaccggtgtcaatataatgtgcttcggcccaaaagcttattttctttcagtatgctagaaatagaacaacaacttttctttcgctttcggcggttgtgaaggtcgaaaccttttcctcgttatgtttgatattggttccttttctt

SEQ ID NO: 61880 - DNA, 456 bp, Zea mays
  Clone ID: MRT4577_156431C.1
cggccttaaaaaaaaaaaaaaacaaagaacaaaaaaaaaaaaaaaaaaaaaaaaaaaaaaaaaaaagaaccatccgccgaaaacaaaactaaggaaaaaaaaaaggggtggtccctcggccgggcccccgctaggggcgtgtttctgcagggccccttccgccctgggcgagtcgagctacaatttaggggccgacgtttcccatggggggacgggtaaaaccctgcgggcccccatttaaaacgccttgcaccaggaacaccctcggcccgcctggggttattgcgatggggcccgaaccggtcctccttcccagcggtggggcacgcctgaacggcgaatggaccccccctttagcggggcataaatcccggggggtgggggggttccccccagggggacctctaaacttgccaggggcttggcgccccttcctttggcttccttccctttctt

SEQ ID NO: 61881 - DNA, 261 bp, Zea mays
  Clone ID: MRT4577_156432C.1
aaaaaaaccaaaaagggtagcggattgggctttcccctccgcctccctcccgggaagagaggggggcagcacagcgccacccctcttgtcccgccgagttcggagcgcaacgcaaggcggggggaggagcaagaagccgcgggcctccctcctccggctcactaccaggtttactccgcaccgtgctgtcacagttagcagccgcgggggggggggactcccaagcagccttaccccggaggctgagccaatgtttcttct

SEQ ID NO: 61882 - DNA, 395 bp, Zea mays
  Clone ID: MRT4577_156433C.1
attgaaatttttatcatagtaaatcaactttgcaatggttgtcttgccaattcctccaatgccatagataggaaggatagtgatgtgttgtgtcatgctctgtagtaaagatgccactattttctgtttctcttcttttctccctataaggaattcttctccaacattcggtaatttttctcttcgataaaattttgtttcggtgcaaatagagcctgacatcaatttgtttaaatatctgtttgaatatggcatatagcttccatacattcttccatcctgccgaaaactacttgtccaagtactcttgaatctatgggtcttacggtcctttagattattgatgaccatatctatatcaggccttttctgtggggctttctccacacaattca

SEQ ID NO: 61883 - DNA, 543 bp, Zea mays
  Clone ID: MRT4577_156434C.1
tttttgggggcggcgtgatctaaaaaatcgagtggatggtgtcgcccccaactcaaatcctactttgacctcaaaccaaacacgccattaataactatggcaggcttctttgcgtacctgtttgaatcccctggtcatcatcagcgccggcttccatgcccatcgagtgcaacgatgacggttgctttgattcaggcgtgcagccaggggcacaacccactcagcgagggtgactccagcacatttcccctgccagagcagcccacaccatattggcatgcatgatgtgtgcccactgaagcctcgccgacacgtggcctctgagcaacctcaagctgaggagctgtggtggagccgccggcacccgtggttcagcttgggagagagcagacttggagctcagggaaaagaggagagaggttaagctcatgtcagtgtgccacatcagcatacaagcaaggttacctgcttggacttgctcttagaaccaaacagagattgaggatctaaatggagtagaatggacgatttgtgagttcaagg

SEQ ID NO: 61884 - DNA, 443 bp, Zea mays
  Clone ID: MRT4577_156435C.1
ccctgtacccaatctgccattctggagagttgatagacggagaacttgatgcaacacagaaacacagggggccacgccacaaaaagaagaaccgagccccattaccaccaccagaccaaacgacgcacactttattaagcccatgaaactacgaggccgccccgggcactgctgtggggaggacacacacgggggacccccgccccagatggaaaaaaaccgtgaagtccgcgttttttttaacaataggcgccagcgcgcgcgacgcgacgggtatttttcccccccaccccaacacttggacccccggacggggggtccacccccccagggcgcgtacggcgaaagaaataacgccctggccctctaggccacatgagaggccccctggccctctttgatttatttattccccagcttagccgtcggggccttataagaaa

SEQ ID NO: 61885 - DNA, 804 bp, Zea mays
  unsure (1)..(804): unsure at all n locations
  Clone ID: MRT4577_156436C.1
acggctccgctcgcgacgccgcggcggccgagcctcctcccgaccaggagacgataaatcggggagaagagaggagaaataccccaagctaaatcgctccacgcagctcagatatcaacttgaagtcgcctccagtctcctgcttcgccataaatgcgggagaaggatgcctgctgggagtacggcgacaagctggacgggaacagggttcggtgcagattctgccagaaggttatcaatggcggaataagcaggttcaagtttcatctgtctcaaattccgagcaaaggcgtcaacccttgcgtcagggtgacggatgatgtcagggaaaaggtgatcgctctcatagaagccaaggaatcacacagggagctcgagcttctcaagagaaaacgtgttgctgaactgtcggtgcttccgaaaagaacacgggaacttccatctcagccttcctccccagggttgcctacttcgcctgctattattcctgcattcgagccgagtcagctccttggcctggaagtgcctgctccggtacttagactatctggtgctgccaccaagccccgtccggcttcaggattggaagtggaacggtgcattgctgaattcttttttgagaataagttggactatagtattgcagactccatttcatacaggcatatgatggacacacttcttgngcaggaattccaagggccatcagccgatgttttgagaacanatggcttcaaagtcaagtcagaggttttgcagagaacgcagagatcaaaaaggatgggtaactacaggctgtactat

SEQ ID NO: 61886 - DNA, 673 bp, Zea mays
  Clone ID: MRT4577_156437C.1
aattcggcacgaggctcccctcccctgctctgctcctcgcctcctccctcccgaatcccgatcccagcttccctccttcctcccgcccacgccgccaaatcgagccccagccgcgatgagttggtggtggacgggcgcgatcggcgcggtcaagaagcgccaggacgagcaggcgggcggcgccgagccctcctaccagagcgtcgccctcgtcgtcggatccaccggcatcgtcggcacctccctcctcgacatcctcccgctctccgacacccccgccgggccgtggaaggtctacgccgtctcgcgccgcccgctcccgccctggtccccggcgccctccccggccgtcacccacctccacctcgacctcgccgactccgccgccgtcgccgaggctctccagcccctcaccgacatcacccacgtcttcttcgtcgcctggaccagccgccccaccgaggcggagaaccgggaggccaactccgccatgctccgtaacgtcctctccgtcgtcgtcccgaactgccccgcgctcgtccacgtctgccttcagaccggccgcaagcactacgtcggccccttcgaggccatcggcaaggtcgccgccccggacccgcccttcaccgaggacatgccgcgcctcgactgccccaacttctactacgacatg

SEQ ID NO: 61887 - DNA, 356 bp, Zea mays
  Clone ID: MRT4577_156438C.1
cagcacacgattggacagctgtaaggtcgattcgtgtgctatacactgtatttaacgctttgctatttgagtctcacgcacagtgatgatcggtgaaatacgtgtgtagaacatgcaacccttctgacatgtgaagagaaataacacaactgcaaagcatgtgcttcacagagagctgcatgcttcattgcagattctagacggagtaactgacaatggtgtgacatgtgtaagcacagctttcttaacaaggcataagatgggaaacaatgactaatttgtggcagctggctatactcatgatagatatttaaatgaccatgcaaactctgaattgaaaataggaaatactaaca

SEQ ID NO: 61888 - DNA, 234 bp, Zea mays
  Clone ID: MRT4577_156439C.1
ttattttttttttttttttttttttttttttttgtgtagagtaaaggggcattcggggattcccttggaacaatatctctgcaattagtccctttctcttccaacttttaacaaacataaatgaaatgggaatctggatctttgagaacatagtcaggcggcagttggccaccctctgcgagggtaaccccctccattttaagacgtggagcacctttactcattctcagctgg

SEQ ID NO: 61889 - DNA, 387 bp, Zea mays
  Clone ID: MRT4577_15643C.1
accggttcggaattcccggctcgacccactcgtccgtcgacacatacacccacccattctcttttatgtcagactaccaacacttgatgccagtgcattatccgtgattaggctcattgtcttgcatgagaatgcacctcctccgtccattatctgagacatctgacttgatcctagtcgcatccattacacattcccctcacagctgttaaaacactgaacaaagaacacccaaatatgaacggctctttgctacaacacacatctgactccagtttctatctacttcatcttatcctgattcagcatcactcctatggacatttaaccatacaaactatcttatcatacagctaacataatatactacctgactagactcatata

SEQ ID NO: 61890 - DNA, 2247 bp, Zea mays
  Clone ID: MRT4577_156440C.1
cattgggtacctcgaggccggccgggctgacatctattgttgtaaaggtgctcactcaggctaacaaccactgcagtgcagagtcgtacgtgtaccctagatctgactagtcagtcaatccgagattgcaattctcccgtcccgtggtctctacctccatatgccacaaccaccaccaccactgcattctcaaacgagcagtgcctgaacccaagtgcagtgcagcagccatgggagcagcagcagcaggtggccacgcgctgcgcgccgtcggcgacgtcgtctcgttccccgcgaccgtcgccgccttcgtggaggcgctgctccagggctgggccgaggccagggccgggctgctggtgccgctgctccgcgccgcggtgctgctgtgcacggccatgtcgctgatcgtgctggccgagaaggtgttcctgggcgcggtcagctccgtggcgaagctgcggcgccggcgtccggggcgggtgtgcaggtgcgaccccgacgaggaggcggctgcggcatcccaggcctatcccatggtgctcgtccagatccccatgtacaacgagagggaggtttaccagctatcaatagaggcagcctgcaggctcacatggccggtagatcgactaatagtgcaggtgctggacgactccaccgactccgtcatcaaggagctggtgaagggcgagtgcgagcggtgggccacggaggaggggatcaacgtcaagtacgagacgcgcaaggacagggccgggtacaaggccggcaacctcaaggaggggatgcgccacgcctacgtgcgcgcctgcgagttcgtcgccatgttcgacgcagacttccagccgccgccggacttcctcgtcagaaccgtcccgttcctcgtccacaaccccagcctcgcgctcgtgcagacacgctggaagttcgtgaatgccaacgactgcttgctgacgagaatgcaggagatgtccatggactaccatttcaaggtggagcaggaagctggctcttccttatgcaacttctttggatacaacggaaccgctggagtatggagaacgcaagcgatcgtcgagtccgggggctgggaggaccgaaccactgctgaggacatggacttggcgctgagagcagggctcctgggctgggagttcgtctacgttggaagcataaaggttaagagtgagctgccgagcactctcaaggcgtaccggtcccagcagcaccgctggtcatgcggacctgccctcctgttcaagaaaatgttctggcaaattctcgctgccgagagagtgtcggtctggaagaagtggtacatggtctatgacttcttcattgcccggagaatcgtaggcaccttctacacgttcttctttttcagcgtcctgattcctctgaacattctgctacccgaagcgcagattcctgtgtgggagctcatctatatccccatagctatcactcttctcaactctgttgggactccaaggtctatccatctggtcatactgtgggtcttgttcgagaacgtaatggcgttgcatcggtttaaagccatcttgatagggtttctcgaagctgacagggccaacgaatggatcgtgacgcaaaagctggggaatctgcagaagctgaaatcgatcgccagacttacaggaagctaccgtttcaaagacaggttccatttcctggaggtgttcattgggctgttccttttggcctctgcgtgctttgactacttatacagagatgactatgtttacctctttgttcttccccagtcgatcatgtatttcgcgattgggtttcagttcattggtctcaatgtctctgaagactgacctattgcaagacaactgaacgttttggttgcgatattatgattgctcgggtcaaggttcttgtatcgatggtctacagaagggcaggtttgtgtgcgatctagtagatacgtcatacttcaggagaggataagcacacgctggaggttgagacgaatctattataatccagtaggtgccaaaaaaatgcatctaaaacctgttgatgtgtctggaaaacacaaccagtgtatttagatataagagttgtgtaccgacgatcagatcttgctggtagtatgcttgaagggaaaatactgagtacagccacactttcgatggaaaaaaaaaaaaaaaaaaaaaaagaaaaaaaaaaaaaaaaaagcggccctcgagctccactgggaatccctttagtagggtt

SEQ ID NO: 61891 - DNA, 158 bp, Zea mays
  Clone ID: MRT4577_156441C.1
cgaggacactgtggaacggtgcgcttctaagcttctacgaggcgcagtcagtaatgcggcacaggaggtcaagggaacgcctgttagatggatgcatagccagtaaggaacgtgtgtgcgtcccgctttgcactagaacctcgtgcgaggagactatg

SEQ ID NO: 61892 - DNA, 228 bp, Zea mays
  Clone ID: MRT4577_156442C.1
aaaaatttttgtttttttaaaaaaaaaaaggggcggacactttgggggatagaatattaattacacaataatacaaagccatacctcttttgttttgaaggttaaaatcttcgggctggcgggggttcaactttgctttttctggtgagaccctgttgtgcccccccttggtggacttgctcttcatccccctttcgccggctttcattttttctttcttgtcgcccc

SEQ ID NO: 61893 - DNA, 307 bp, Zea mays
  Clone ID: MRT4577_156443C.1
gagctcattagtcggcggccgccctgactctcgcggtcttttttttattgctttatagaataaaaaactggagattgcatagctgaatactcagactgagcgtggatagcgacactccccacgtatatgaccaagtactgagatgatccagcaccagcaggcgggggtggccaacgaacaacacaccaacagcaatgtgaacctcttgcacaaccaacaactatgtctaacctttcatttatggacgcaaaaccggacgcgctgggcgcgtggatcggtcatcttcttgagggccaggtgcatggct

SEQ ID NO: 61894 - DNA, 241 bp, Zea mays
  Clone ID: MRT4577_156444C.1
gtgcaccccacgctcggatggaaggaactcaggtccactcctggcaggacgtctggatctgaaagctgacactgttcataaccaccagtgggaacaaggagaccatcatggtagaccacatgaggaagatgaagaacaatgccagtgcctgcgaacataggccacttggacaatgaacacgatgtgctaggccttgagacctaccctgacgtcaaacggatgaccaccaagccccaaactg

SEQ ID NO: 61895 - DNA, 334 bp, Zea mays
  Clone ID: MRT4577_156445C.1
acctgggcgacctggttggtaccgcctaggctgctaaccttgcttttggggcgcactgtgagtcatcgactctagtcataccttactgtgatgggctttcggtctcttacattttatgggttgagaatgcctctgatgtgatatgcaactggcttgctgctattaggcatgatgggctggccgggcaaatggtctacatatgcttctacttctgtggcatatcattcctcatctgtatcgctgatagaggcatggacctcgtcttagatatactaggtgtgccgacgtgcacggagatgtagatgagcatgccatattgatcgatatatatttt

SEQ ID NO: 61896 - DNA, 340 bp, Zea mays
  Clone ID: MRT4577_156446C.1
cttgttgtgtctacaccccggcacctgtaacagagggaaccgtcgtgatccatgccgctgagcatctagaaaattatgctaagaccaaggaagctatggtggaagagcttatcaaagcgtgcactaactctggtgccaaggttacagccagtgcagcgtgcagtgggtgacatgagacttcattttgtggaacgtaataaggtgacaggagatgaaaatgagctcgaagttagaactaagaagggtctgacgaactactgtggctggagaaattgagaagcttagccgaccctatgcggaccaactagggtacggtgattctgtctctgcagactaaatt

SEQ ID NO: 61897 - DNA, 378 bp, Zea mays
  Clone ID: MRT4577_156447C.1
gaggtcggccgggctagaactcactcccgtcagcgctacagcccgccgaacagacggagctcttggagtgtcgagggcaaccctgcttctcactggtaatgtcgtgagcactgtatataggctttgcgctgcacctttcctagggcggtctcgacgaaaagaaaggagtgataacgcgttgcggactgtcagaactgatgatcatacatcttaccattggatcccgctctgctgacatgaaccgaacatacactttgactctggagctcaagacatagcaagagctgcacaacaccttacatactaccaccgacatcttcactggctacagggattgagcagccattgcgaggaataggagatgtatctccgattctg

SEQ ID NO: 61898 - DNA, 227 bp, Zea mays
  unsure (1)..(227): unsure at all n locations
  Clone ID: MRT4577_156448C.1
tcgagggccggcnncgggaaaaaaaaaaaaaaaaaaaaaaaaaaaaaaaaaaaaaaaaaccaaaaaaaaaatatataaggtatacacctccttcataggatccggtcggggagggagttcccttaacattttcttggcgacatgggagtacaaaaagaagggtggatggggctaggggtttttcctcctttacttccccctagggatatctttgctggctcatggcg

SEQ ID NO: 61899 - DNA, 275 bp, Zea mays
  Clone ID: MRT4577_156449C.1
tgggcgcgggagtcgcctccgactaagtatcgcgctaaagcggtcgctcctcgtgcggccgcattagcgcgctacatatacggtgggatagctaacagcacatgtgggctgtcgtcatcctaggtcgtaccacactttgcctatagtgaagtcgaataaaatcacttgttcggtcgtctgtaatgtgaccatttggtagagcttccaacgcgtttgatgcatatcttgtgtatactatatatgtacctaaataggttggcataattatggtcata

SEQ ID NO: 61900 - DNA, 1516 bp, Zea mays
  Clone ID: MRT4577_15644C.1
gggtacctcgaggccggccgggttcctctcacttcgcgggtacgcagagtcgctagacgcacctcgctcgcaacttgttggactcgaaggggcaatagacagcaggcagggccccgaactgcgggaggagattcccaaggatctcgtcggccgggtagaggaagggacggggacgggcgatggcggcggacggcggcggcggggtggactgggagagcctggcggaggccacctccggggcaatcggctcgctcgtcagcaccaccgtgctctacccgctcgacacctgcaagaccaagttccaggccgagctccagacgcaccagggcgctcagaagtataggaacctttcagatgtcttttgggaagcgattcgtaaaaagcaatttttgtccctatatcagggcctgaacacgaagaacattcagtcttttgtctcctcgtttttttatttttatgggtatagctattttaaaagactctacttggagaagagtggagcaaagtctattggaacaacagccaacttgttagttgctgctgctgctggtgcttgtactgttatcgtgacacagccattagatacagcagcttctaggatgcagacaagtgtctttggaaagtctaaagggctgagagaaactcttgcagaaggtacttggatggaagcattcgatggcttaggcatttccattatattgacttgcaatccttctattcagtacaccgcgtttgatcagttcaagcaaaggatacttcataggcagcggcgccaaaatgcaggatcagcgcaggatgggccgggagttgctctttctgctttctcagcttttctgcttggcgccgtctctaaaagtattgctacagtattgacttatccattaatcagatgcaaggtgatgattcaggctgcagaccctgatgaggatgatgacgatgaacctggaaggccaagcaaatcaagaacaccaaaaacaatgctaggtgccttgcatgctatctggagcaaggaaggcattccaggcttcttcaaaggcttgaatgctcagatccttaaaacagttctgagctccgccttgctgctgatgattaaggagaagatctcgaagttcacttgggtctcactgcttgccctgcggcggtatcttttcgtttctcagaagaggatcaagagtgcaactgtataaatacgttagctccaaaacacaaactagcacacatagcgacatggtgcttctggagatgttatgccaaggaataaatctgaggaataatcagcagaaatacttaaccaagagagagagaataaggtgtgtatctggggtcgatagcatcagagggctcttcaataagtttgtccatttcttttttttctctctctctctgaatctcttgtagctagtgacgtagatgttgcgcggatctgaaactggactgtacttttagcgtttgttgcctgtaattaggggtgataatgggctctgaatttacagtataatatttaagggtcggattc

SEQ ID NO: 61901 - DNA, 423 bp, Zea mays
  Clone ID: MRT4577_156450C.1
cgagcgacaaggctccggctcaccctccacccgtttacctttaagacccacacccgcccgggatcaggtgcaccccgatgatgagtaccgaaaactactcctaggcctcacggcggtccaagaaacccaagaattccaagatgacccagccagagctcacaacaagcaagccaatgttaactcctggaatagacatccgagctcactcgcacaacggcgacttcttcgtcccaaacagactaacatggctatccgcgtataataacatcgctgacgtgatagatcgatctaacgccgagcgtgtgtacgccaacaactaagtccgcttcattcagcacaccaaaaccgacaaggggcgcacaaaaaagatcaccgagccaaatccaatgaaagggccgacacacatatactaccagctcgaga

SEQ ID NO: 61902 - DNA, 743 bp, Zea mays
  unsure (1)..(743): unsure at all n locations
  Clone ID: MRT4577_156451C.1
ccggcccgggaaaaaaaaaataaaaaaaaaaaaaaaaatcctctcctcacctccaatcaccatccagtcaattcctctcctcgacaaatcctcacaatggcttcattactgcgaatgaaggctgtaacaggcctctccggcctatcgcgagtcgccgcctctcgagtcgccctctcccacagcgcaaccctctgccagcgcggcgccatcgacccccaacgtcgcctgttcagcaactccggcttcctcaatggctcctatattgtctccgtgcctcccatggctgagtccatcaccgaaggaacattgtccagcttgtccaagaaggtcggcgaggcggtcgagcaggatgaggagattgctagcatcgagactgacaagatcgacgttcttgtcaacgcgagcgagcccggtgctatcgctgaatactttgctgaggagggcgataccgttgtcgtcggacaggatcttgcgcgtatcgtgaccggcgaggatgctggttctgctaagaagagcgagggaggagagcaaaagccagccaaggaggagcccaagaaggaagaatccaagccttccgagcaacccgccaagactgaggagaagaagtcttctcccgctcaagacgctcccaagccttcaaagcccgctgagtctaagcctgcgtccaaggagtccaagtcggctgctcccgcacaaagctcangcgcccctaaccgaggcgagcgagttgagaaaatgtcccg

SEQ ID NO: 61903 - DNA, 477 bp, Zea mays
  Clone ID: MRT4577_156452C.1
ggaggggcggtggcggctgctagttgcggaggggaagaacatagatgatcggcaatgggacatgaaggccggtaagaaaaagaccggtcaatgccttctcttacaagggctgagatgacatctaggccgcatcggtcttcagtgagcagcaagatggggaagactctcgtgtccaggacacagggttccaggaacgccatccgatggccctgaagcacagagtctttgaggggagtctagctgatcttcagggtgacgaggatcaggcttacaggaaaatcaagctccgtgctgaagatgtgcaaggcaggaatgtgctcacaaacttctggggcatgaattctaccaccgataagctcagatctctagtaaagaagtggcatacattgattgaagctcatgttgatgtcaagacaaccgacaactacatgctgcgttcgttctgcaatggtttaccaaagagcgcccaaaccagtc

SEQ ID NO: 61904 - DNA, 403 bp, Zea mays
  Clone ID: MRT4577_156453C.1
tcgtttaaaaaagctagacataccaatgaggccgaagaatgaagcacgaacattacggtcagtttctaacctaattatgcctagtagagagcagcggcgtcaggtgtaccagaggttgtagagaatagtagcaggcacggcatgaatggacagggctaccatgagcagcaatgcagcaagcacagtgttgaataaaggaaaacagaagcaggccaaggacgagctggaccgtcagaagcacgcggagaagaagcggctcctactggagaaagcgctgggaaactcggctgccataatatcagagctggaaaagatgaagcgagggaagaaggaagaacagtaaaggctggacgacgaaggagctgccatagccgaagctgacgctctggatgtcctcatacgc

SEQ ID NO: 61905 - DNA, 538 bp, Zea mays
  unsure (1)..(538): unsure at all n locations
  Clone ID: MRT4577_156454C.1
gggtggtcaaacacccggcgccggcgtgtctgcccaacagtctctccctgtccacggtcgtctggggtcagcgcccttatgccttncnnaccttcacggactgtcacgctggcttgctctcacttggcgcgcgccctgcctccctggctcctcgtctgtggcgcgccctgcgtcagtatcgcgtggggggcgggggcgttgcgcgcactcactgggcgccaagcgaaaaggtggtggggcgccacgcggcggcgtgccgcagtatcagtgtacctggtgaggactacactttgcagagatcttcggaccgcggatggtttcgccctgcttagttggtcttactgaagaattgggtaagggggaggaaagaaggatgagggaataatacaggcggaaaatcattctgctcctccggtctcttgatggcagcgatggtggatgcttgtctttactctnntgtattgtactgggagccttgggtggggtttttgggtctttggtctgggcttcatttttccctttacaacatccaagccac

SEQ ID NO: 61906 - DNA, 344 bp, Zea mays
  Clone ID: MRT4577_156455C.1
gtcgaccacgcgtacgccaacacgtaccaatcgagcactgaatatcgctccattgatatggttctcatgatacattctgtggcgtcagacgacgctggtgcatatgacgacaacgcggaggagccggtaactcgtaacgtggatcccgatctacatgacaactatcagtagctgatcgccaaggaccactagctgatctacgtgcaacggctcggcaaggttctacaatgacgactacaagcacgcttaccagatttccgtgcttaaagtcaatctgcacctcgcgcgccagctccatatgatagacccatgatccgatcacggtataactaagctcttcgacc

SEQ ID NO: 61907 - DNA, 207 bp, Zea mays
  Clone ID: MRT4577_156456C.1
tcttaccacagcagcgatcgatggctgaggtacacaacgagcggccctaggggatggtagtgtctattacaggggacaaatatctcattcgggtgcactacatgtggtaagacgactcgctactcattatattatactttcccagtgggatgactagcaaattctttcattgttgagctccagcctccagcgaaaagcctgtgcgcc

SEQ ID NO: 61908 - DNA, 274 bp, Zea mays
  Clone ID: MRT4577_156457C.1
ggggggtttagagaagcacatgaatatggttcagagttcaaacctttcctgcgccgaacaaacagttttacctgccagagacgggaacattaaccggcctggcctggtatcactggattattatcaaccccaccgtcgtttcgagatccgcagcattgtaccttgtgcttccacaccagtgcgcaacgcataagtatgggtgggttcaagaaaacattttggcctttttctaaatggaaaattattaccaaagcccgccggggggcaatgattt

SEQ ID NO: 61909 - DNA, 533 bp, Zea mays
  unsure (1)..(533): unsure at all n locations
  Clone ID: MRT4577_156458C.1
cgatcccgcaaaagcactgcgtatcattatataggaagaaagcaaagatatttacaagaaggccatgctgagcaaggccagacagaaaccaaaatcaggacaaaaaagaatggaaagaaaaacattgactaaaactgggtctggtcggggcaaaaatacgtgtcaaaaacaccataaactcatgctttaatctgccaggataaaaagggatctacattctacagaaaagtggtggggatggtggntgtggtacctataacatcagggataacaacgaaaagtatatttgtacatgcaatttagaacacctcgtctctgtctcagcaaagaatacaaaaatgtcctcaaaaataagccgcgcgaggagttagggagttgaccaccaccaagattcaattgacacctaagtagcttctaaagaactgctgcatgaaaaactacgcttttggtggatatttgtcctcaaagtatgatctcaggcgtttaataagattttccatcagcgactccggaacttttgacctacatactct

SEQ ID NO: 61910 - DNA, 447 bp, Zea mays
  Clone ID: MRT4577_156459C.1
gctgagtaatgtattatttcttaagctctcgcacaacagtctttatcttattatagactactccagctagctgcaggggagcgggaggagctggacctcgagctcagcctccagccctgctcggacttggcggcggaggcggcgccttccggcttcttcgtctgtacctactgcgaccgcaagttctacagctcgcaggcgctcggcgggcaccagaacgcgcacaagtacgagcgcaccctcgccaagcgccgtcgggagaacgtcgacttcatgcgcgcgcacggcgcccggcaggacgacccctacgacgcctacgggcatcatgagatgatgaggttcacgcttgtggaagcgcgttaggtgcctgctgtgcactctgccgccttgctgcgcggcacgagcagctctcttgagcacggcggcgagtcgctggatttgtctctg

SEQ ID NO: 61911 - DNA, 1727 bp, Zea mays
  Clone ID: MRT4577_15645C.1
acgccggcggtgtatagcaaaaaatgccccacactcccacccggcgtggcggctggcgtacccgtcgtccgggcttccccactcgtcgcccatctgccgtgacgtcaccccattcttcatcggttcccttcctcgcctcggttcgcgggtacgcagagtcgctagacgcacctcgctcgcaacttgttggactcaaaggggggcaatagacagcaggcagggccccgaactgcgggaggagattcccaaggatctcgtcggacgctagaggaagggacggggacgggcgatggcgggggacgccggcagcggggtggactgggagagcctggcggaggccacctccggggcaatcggctcgctcgtcagcaccaccgtgctctacccgctcgacacctgcaagaccaagttccaggccgagcttcagacgcaccagggcgcgcagaagtataggaacctttcagatgtcttttgggaagcgattcgtaaaaagcaatttttgtccctatatcagggcctgaacacgaagaacattcagtcttttgtctcctcgtttttttatttttatgggtatagctattttaaaagactctacttggagaagagtggagcaaagtctattggaacaacagccaacttgttagttgcagctgctgctggtgcttgtactgttatcgtgacacagccattagatacagcagcttctaggatgcagacaagtgtctttggaaagtctaaagggctgagagaaactcttgcagaaggtacttggatggaagcattcgatggcttaggcatttccattatattgacttgcaatccttctattcagtacaccgcgtttgatcagttcaagcaaaggatacttcataggcagcggcgcaaaaatgcaggatcagcggaggataattccggagttgctctttctgctttctcagcttttctgcttggcgccgtctccaaaagtattgctacagtattgacttatccattaatcagatgcaaggtgatgattcaggctgcagaccctgatgaggatgatgacgatgaacctgaaaggccaagcaagtcaagaacaccaaaaacaatgctaggtgccttgcatgctatctggagcaaggaaggcattccaggcttcttcaaaggcctgaatgctcagatccttaaagcagttctgagctccgccttgctgctgatgataaaggagaagatctcgaagttcacttgggtctcgctgcttgccctgcggcggtatcttttcgtttctcagaagaggatcaagagtgtaactgtataaatactagctccaaacatagcgacatcgtgcttatggagatgttatgccaaggaattaatctgaggaataatgagcagaaatactgaagcaaaagagtgtgtgtaaagtgtgtatgtgtgatcgatagcatcagatggctcttcaataagtttgttcattctttttttcccctctctgaatctctgatagctagtgacacagtgttgcacggatctgaaactggactgtacttttggctttggttgtctgtaatgtgtaaaatagcagccgtgttaatattccctttctcttaaaagaaaatgaatcgattggcagtttgatgtaagaaaaataatgggctttgaattttacagtataatatttaaggttcggattatgattgggtcctgtttctattcatttttaattaaattttatttagggctcttag

SEQ ID NO: 61912 - DNA, 1320 bp, Zea mays
  Clone ID: MRT4577_156460C.1
aaatgataatgaatataggtatatatgagaatcatactcatatattgcttaataaaaatgtgtttaatataaaacgaattatattttgggatggggacattacatcttaaagaatgccttggctaccatcccatttttaggttttacacaccattgggccgttgcaggttgcagcgcccattttctagttccaaatcaaagtggatgctgcttcacagatgaagcgtagaaactattgctcctgatttaaactcaggttgccagatccatttgacatgatatttcgggatcactcctgcgctggacatgccttaaacctgattatctcgtgcttaactcatcatcattatatggtaccagaaaaaggttgggctacgggaccatgagagaggggggagggaacacttaaaatccccatcaggcctctctctgaggtgcaactcttgttatgctgccgctgctgacttcgtcttcttcgtctgacaagtcggtaacgccggtgacacagcttgaggacggcgactgtggcgccgggaacagcaacggctgccgtcctcccacaccttcccggagctgcggcggcgcagcggatgcgcggtgtctcagagctctgctgtggttaccatcccggcccggcctgcttcttcttgctcccttcttcagaaagacccggcacacgacccactctcccggctcagcatcgcaacaaccgtggctcgcattcttcttcctctgctcggccacgccgcgggacgcggcggcgagccggtactcgtgcatgacccagcctgtccgcgacgacgacggcggcgacggctcactgcggtggaaggcgagcgccgtcttgccgcccacgagcagctgcctcttgccgcctacgccgccgccgccgcactgtaggaacaccggctcctccttgcccgtggccttccagtacccgctcccagctctcctcctgcggctgccacggccggtcgccggcgctcgccgcaggctaaagaagtaaccctccccttcgcttgccccagggaggtcccatggatcgagcccggcgacgtcgtggacgacggggatgacggcggccggcagcgggcgagccagggccttccggcggaggtacagcactaccagctcctcgtcggtggggtggaaccggaaccccggcggcagctgcgtgggcgcctgcgcaggtctctccatggcactgaatcctctctggtcagggctcacagccggactctgctctgctgcagagctggctggctgtgcacactgcacagtagcgccgaagcagagcaggacagtctagctggagcttag

SEQ ID NO: 61913 - DNA, 511 bp, Zea mays
  Clone ID: MRT4577_156461C.1
gccggccgggtccggaacccacactcccgaaacgaccgaatcccctccccgcaccaatcatgaacacccgccaggcacgcaccattcgtaccgtgcggtcgttgctggcgcagtctccgggacctccgtcctgaacgagccccacaacgcactacatgctgcagctagctccatgttctcgatgagactcagtgaggcttaccactattccctctgcatgcaccagttactggacatgctctagcgatacctagtaaattcgttacttgacgcgcaagactacgacaaacaccatcagatgattcaaagcgaacacatatgactgccggctcaccatccaagtcatcgtgaatttctccttctcccagccgacggctctggaagctctccttgagatgtcccgtatgctaaacagaatgtccctactcatatcaattgctcctactggatcaattcctgtcacgactgattataacacactgtatgacaagaactaactactcctgacttc

SEQ ID NO: 61914 - DNA, 721 bp, Zea mays
  Clone ID: MRT4577_156462C.1
atctcatgggatttgacaagaataagctcactgaatctcttcaaaagagattgcaaaatgaggcgacagttgcatattatttactcttggacaataagcttcgtacaaccagtggctaccttggagctgagtatcaagagtcgatggactcatctttctcccaagtttcacctgaaacaccaagttcagcatctgaagctcggcagtatggttctccagggtttggcttgaggcatcattttgcagctgagaggaaatgggctcttggtcttcagtctcgagcgcatccacgagaaatcataactgaagtgcttaaagctctgcaagagctaaatgtttgctggaagaagattgggcactataacatgaagtgcaggtggagtcctggctttgttgagactatgatgcataacaacaatggcttcggtgtggagtctgctataattgaagctgatggcctcagtgacaaatcgacccacatcgtgaagtttgaaattcagctctacaaaacaagggatgagaaatatcttctcgacttgcaaagggtcagtgggccacagctcctctttctggacctgtgttctgccttcctaacccagctgagagtcctttgattctgaagatggtgacttcccaactgcaaagccccacagcttcctgcgacgtgcgaagttacagtcaaggtgtacataactatcataatcctccagtagaatctact

SEQ ID NO: 61915 - DNA, 483 bp, Zea mays
  Clone ID: MRT4577_156463C.1
tagtcgagtttgtgaacgcaagttgcgcccgaagccttctggcggagggcacgtctgcctgggcgtcacgccaaaagacactcccatcacccccccgcggggcgagggacgtggcgtctggccccccgcgccgcacggcgaggtgggccgaatcaggggctgacagcgaaccgcgccgggcgcatgacgtggagggcgacatcaagtcgttggtctcggtgcaacggcccagagcgcgagcggacattcggccctaacgacccatcgagcgaccgatctcgccctcagaccgcaaccccaggtcaggctgcactacccgctgagttcatgcatataattaagcggatgacaagaatcccacaaggattgccctattatcagtgagcgataccgggagcagcccagcttgagaatcggtcggggtgagagaaatacttgtatatatgagagggcgtctctgggacaatccttgcacaatgtttg

SEQ ID NO: 61916 - DNA, 341 bp, Zea mays
  Clone ID: MRT4577_156464C.1
accggactggaaaacccggcccgacccacgcgtacgcgaggtacacggagaactgttgaatttctttcgtaacgcataataaattgatgagcaaggtggactactaactaaagatgtcagctcctaaccatatcattataaagtaaaggaatgccatatagctaactatttcgtccacaatttccatgaaaaacacaaatccctcatctgtacaacaatatactctattcctcacatgcctgcagatcagaagtgcattacctattacaagcttacctcaactaaatctaaacccatctgtgcttgacaagataaccatgctacctctaaaactggtgcaa

SEQ ID NO: 61917 - DNA, 507 bp, Zea mays
  Clone ID: MRT4577_156465C.1
cacaggattcaagaatactgttgcataatgttttgggtccaacacagaggacacaacaggtccattaataccaacgaagccacaaccacgattcatgacacacaaaccacactgtttattaaacgacgactacacagatacccagttacagcaacagcttaaaatgaaccatggcttactgaccaccatggaggctgatcaccagatggagagtgtttttcttttaaatgtagaagtctgctagagtgctaccatcatgcatctacttgccaatgaataaaagaccctattgaactgtggggatgccctctttgatctgaatcttatacttaacgttttccatggtgcacacagatcttaacctgaagagttataagatcttatcagtcaaggactttacaaagatattcataccatctcagatgcgtagaactagttgtagggtgctttctttctggatttttgaatgtaccagattacggacattctccaactacttgacagcta

SEQ ID NO: 61918 - DNA, 1506 bp, Zea mays
  Clone ID: MRT4577_156466C.1
aattcggcaccaggcgcatttcaggacccatggggagacaatactcgatgaagccatcgcgttcgcgagaagccgtctggagatgatgctgccctacgtgaaagggccattgttggcgcatgaagtcagatcctcgctggagatcccgctgcctagaagggtcaggatctacgagtcaaagtattacatccatgcgtatgacacaagtggaacgctgcatgagaaggtactgcaacttgccaagctgaactccaacgttctgcagctccatcatcagcaagagctgaagatcctgacaagatggtgggaggatatgcagatcggatcaaaacttcctttcgcacgagatagaatcgtggagtgttttctatggatcttaggagtatactatgaaccgtgtcattcaagagcccggataatattgacaatggttatcgccatcgtgacactcttggacgatattttcgattctttcgcgaccccacaagaatgtgaaatactcactaattgcatcgaaagctgggatcccaaaggggctcaagaccttccaggttgcatgaaatttgctctagagaagatattggatagctaccagaccattacaaatatgctccaccgagaggacaagtatcgaatgacgtatctaagacactttacagaagatctagtgagaatcttcaacatggaggtaaaaatgcttcaaaaaggttacatcccagattctgttgaagagcatcttaaggtttcactcagaactggtgggtgtcccatcttatcatgtgcttgctttgtcgggatggatgatatagcaacaaaggatttctttgattggatttctagcgtacccaaaatggtgcgcgcactttctataattctgagactagcagacgatctccactcgtatgagcgggagcagctaatccctcatgtagcttccacaatcgacacctacatgaaaaagcacaatgtctcaattgaagtggcgcaggaaaacatacacaaactaaaagaagagtcatggaaagatttaaatagcgagtggctaaatccatgcaatgatgtgtatccaaagcaactattggagaggatattcaacttggcaaggacgatggagttcatgtacaaccaagaggacaatttcaccaactgccacaaccttaaggataccattcgctgcttgttggtagagccatatacgatccacatttagtttttggcaacaaactaatgaattacattgtccagttaatgtaatgcagagttatctgtcatccttatatgtgtcaatatgttttctctagtgtatgtaatatggtgtcatctcatcatgtgtgtcaatctttttttcgtgtatagtgtcaatatgtacacatatatgtggcatcatttttgttttcaccctagagtttgctcttgttgtatcatttgcccttccttttggactttttatgttgaaaggaccttatcgtggtttcggaaaccggaaacacagtaaaaaaacaaacc

SEQ ID NO: 61919 - DNA, 595 bp, Zea mays
  Clone ID: MRT4577_156467C.1
atctcagtccacactcccccctccattttctaccactcacactgacacgttcctaccttcctagccttcagctatcaacgcacgcatgtactaatctcagatactgggaacgacgaggaggacaacgataatgaagatagacctccgtgcccgcggaaacgatcgtcgatggtggcgctcgcagctgctctctgctcagtgacaccctgattcgtatcactgacttgtgtcggacgtgatgaccgtctccgactcccggggtgatgcaggcgacaacatccgcgtgaacgacgctgcagcttaccctgttatcgtcgtagctccagaacttccacagcgctgacacgaccttggcattactgtactgcacattaatcttcacgccacacaacgcaacgagaccaagacccctgtacctgccgcccagtctgccctcaggacgcttgctcattccgaaatgaaaatcccacccattgagcacgttaccccgcgccccactgacataactcgcagaaagggcggtcactatacgaaggcaggtgtatgcgtctcgtctgccgtgaatctcccgagtcttggccgcggggccattatg

SEQ ID NO: 61920 - DNA, 401 bp, Zea mays
  Clone ID: MRT4577_156468C.1
ccggccgggccgggcttttctgtgcctgtctgctgctccaggtttctactcgtggatacggccgatcggtgctcgcactcctttcctctctcgagctcgatgatatacaagccgcactatggaacgttcgaggtcacctccgtgtctcgggaagaacatgctaccgaggttcatatctgatgaatgcgaatctggttgatatctgacacttcgagcctactagcattcatgtgtctgctggcgaacgatcttgggaaggtcatcggaactgcactgaacatgtattgtgatgaagagcatcaggtgaagatcccatcgaaatgttggatatgactgctcaacggtcgccattttactattccatgcatgtgccctttctcactatttagacgcgaaaactg

SEQ ID NO: 61921 - DNA, 418 bp, Zea mays
  unsure (1)..(418): unsure at all n locations
  Clone ID: MRT4577_156469C.1
gntttttattggagctggtcttgtggcaattgagcatcttgagcctaggccaatctagatggaggactcctagttttattggcgaagatgtttttgtggagtccgatcgttccatgatttttattggagctggtctttggcaattgatgagcatcttcttccttggccaaattggatggactctagttttggtttgagtccgaccatagaatgatttttattggagctggttcttgtggcacttgggcatcttctcccttggccaaataggtggactcactaatttttgtggacgagattaactgtggaaggtttcgatgttttacaaattggtacaacattcactggtcattcctgagtatttaaatcgcgatacttttataatactttcttgtaccaagtttaactaattgagcat

SEQ ID NO: 61922 - DNA, 2228 bp, Zea mays
  Clone ID: MRT4577_15646C.1
cccgggcgcgcctttttttttttttttactatcacaaaaagacattgattggccagcaaataacaccagcaaccaaatataagtgaataacaaattgtcgagaaactcgtcggaaaactaaacatacaaaacactccagacacggcgctacctgcttctcttacatccaaggtgatctaaaacctcattccctaccctaacagaatctagtcgaaagccaatggggcttccaacaccaaaaaacgatgtctgttacacgctaggctagcgaaacatggcgcaacagatggaagttgcgctcagtatctcgtccagtcagcaaaggctgagaggctctgctccagcggatgtcaaacctcagggggggaggactctacctgccataatcatggcgcaatgtattgagcgagaacaggtcctaagctgcatattatggggaaaaggtttcatcgcttcccgcccttcgatcttgaagcaatcaagcggatggcctgcttccccagctccacgttctcagacctgccattatctaaccgaatacacagtgtgccacccatgacattagacaccatcccttgatgccatttgccatcagaagttagatggacctcaatcctctttccgatcgcatccttgcccaacttgcgtagaatccagtttgcgtccatcacttcatctcgtgctctgctgatgcctcttggctggagttataccgtccaaaccatctgccttctccatcgaaggcctcttcctctttgatctctggcctttagcaacatttaactgctcctcttgctgagaaacccaggaggtcggctcctctggttgagaggcctgggtgtttagctgctcataatgtggacgcttaaacttgagtttgagcaatgatggcttcaagttatcaggagagtcagcagttccctggttctcgtccacctgactagaatgagattgtttctgtgcaaatggccggtttctagtaccagtttcatttccattctccattccagaaattagagcattgctccttttcccagttgcatgcttttttgaggtaccaagatcacccaaaaggctatttctttgttgtaccccagtctctctaactaacttcattacacttctctcttttacctcgcttcttgaacctttcagctggcttgtgacatctattttccgtccatgtattgatcctaaatcttgctctctttgataattggacagctccgacttaggagagccactcctagttttatgccgtgaaccaagatggataaccaacttggtagcttttccagtgtcagtcttggaagtattttcttcaccatctttgtaatgcaaactcgaaaccttactgcctttaatcttgactttgggtatcatatcagcattgtttgtcacagctttcatggatggagattttaaattcttttctgaacttcgagttgaagatgaaatataggcattatcatcattcttaaaagggctcatatcatgattgtcatctatagtttgatctcccaaacagctatttgatgatttaacagcatgccttctctccagaaatatttcatcatggccatcaactgttttattagcctgaccacttttctttttggaaggcttcttatttgatccagagctcttaaaaacaatcttctcttgctcaggtgtatctggtggaggtttactactgttacttttcaatgaaaactttagagtatttctactctcatttttcaatgcatatgcaccgagtttctcatcatcagagttttgataaggtggtgagacatcttcaagagaaggcagtgcagcagcagcccgtaaagtagccataagctcatgatcggcaacatccctcctcttccaaagctcccggattgcatcctcagtgtctctgatctgggagcattcaccacggcatgctgcacatgtgtactgaaggttttgatcagcttggaattgttggtacttttcctcactgatgccatcacactcaatatgcacccacttttcacaaacatcgcagcaaaccataggtatcacttcagagtctctataaaccttcaagcagattggacagtagtttcctttcacaaacaatcgtccacacgcatcacagcatgtgtaccccaaaaaccaccttgtgctgtgtccactaccaggcacaccagatccacagctgtggcaccttgtatgttttggacataaatatggtccatgag

SEQ ID NO: 61923 - DNA, 156 bp, Zea mays
  Clone ID: MRT4577_156470C.1
ggcaaacatgatatacttttaatgtacttgtactgtgtagtggaaaactatgaggtgccggagcttagagtgacatgatatgatggaaatgagggtctggggcgtttgacttttgatgcacagcttgatgctgctgttgacccgccatctgatata

SEQ ID NO: 61924 - DNA, 309 bp, Zea mays
  Clone ID: MRT4577_156471C.1
aaaaaaaaaaataaaatattaaaaagaatttaaaaaaaagcatataaaacgtgaagataaaaaaatttgtacgctatcattagcctaatgcatcccttttaaatcgatacttgcactcaagtcactgatctatctatcacaacttaatgactgccaaggcgtcatcgattcctgataataccataattccaataaacaccatgatcatcataggcgtttactgattgcactctgtgtcgaacgtcttatcaatccttatcaccattccaaactgcaaatagaacacccattctcgaaatctcccaatct

SEQ ID NO: 61925 - DNA, 1121 bp, Zea mays
  Clone ID: MRT4577_156472C.1
gccggccgggtccgggctcccgttccaactcctacctacgcagcagaggccagccacctccccgtcgctctcacgctcttcgtgcccgccgcctctcctccgtctctgcctctctccctctcccctcccgtctgacgcacatggcctccatcgccggatcttcggccctctccttcgccaggcccgtcaaggcaatcaacacaaattctctagctttctccccggcgaggaagggcaacacattcctccgcctgcgaccaatgcctatgagatctgtttcctgcgctgccaagaaggatacaacagacaaggtttgtgagattgtgaagaagcagcttgctcttcctgaccatactgaagtttgcggtgaatcgaaattctctgaactcggtgcagattcactggacacggttgagatcgtgatgagtctcgaggagcacttcgatattagcgtggaggagtccggcgcacaaacaatcgccacagttgaagacgccgcggacctcatcgacaagcttgttgctggcaaagcgtagttctgtacctcctctatcgttgtcctaccactctaggtctatcccttgatctaggtttctatggtctgaagatttgtgattttctccgcactgttgttgctatccccgtgtcgtaataatacgagatgttttaagcggttgaacattacggtggtgtaatcagagtaatctgttgctgttaaggtgcattgttgtatgaaaaaaaaaaaaaaaaaaaaaaaaaaaaaaaaaaaaaaaaaaaaaaaaaaaaaaaaaaaaaaaaaataaaaaaaaaaaaaaaaaaaaaaaaaaaatatttgaaaaaaaaaaaaaaaacaaaaattagggttccttgggccgaaccccctttagggggaatttccaccccctggggggcgtttcttagggaacccaccctggacccaaagttgggggaaaaaggggcaatagtggttccttgggaaaaatttttttccgttaaaattcccccccaatttacagccggaaaacttaaagggaaaacctggggggcccaatgggggaccctaccccaattaattgggttggccttcatggccctttttcaaacgggaaaccttgccggcc

SEQ ID NO: 61926 - DNA, 747 bp, Zea mays
  Clone ID: MRT4577_156473C.1
attgggaccctcgaggccgggcgggatcgttctttactccggtgacggtgtcacccacgttgtccccatctacgagggtttcgctcttccccacgccatctcgcgtgtcgacatggctggtcgcgatttgaccgactacctcatgaagatccttgctgagcgtggttacactttctccaccaccgccgagcgcgaaatcgttcgtgacatcaaggagaagctctgctacgtcgctctcgacttcgaacaggagatccagaccgccagccagagctccagcctcgagaagtcctacgagcttcccgacggtcaggtcatcaccattggcaacgagcgcttccgtgctcctgaggctcttttccagccttccgtccttggtcttgagagcggtggtatccacgtcaccactttcaactccatcatgaagtgcgacgttgacgtcaggaaggacctgtacggcaacattgtcatgtctggtggtaccaccatgtaccccggtatctccgaccgtatgcagaaggagatcactgctcttgctccttcctccatgaaggtcaagatcattgctcctcctgagcgcaagtactccgtctggatcggtggttccattctggcctccctctccaccttccagcagatgtggattctcgaagcaggagtacgacgagagcggtccctccattgttcaccgcaagtgcttctaaggtactgcaatcccccgcgccgacacgatcccaacgactgacg

SEQ ID NO: 61927 - DNA, 937 bp, Zea mays
  Clone ID: MRT4577_156474C.1
gcctgcctgcgcgggggtcccgccctccgtcctcgtggaccccgccacccatcgatactaccgatgcctccggtcgcgtcgccatcccgccgtgtataaagcgccctcgctccggccaggtcacggctcccgttccaactcctacctacgcagcagaggccagccacctccccgtcgctctcacgctcttcgtgcccgccgcctctcctccgtctctgcctctctccctctcccctcccgtctgacgcacatggcctccatcgccggatcttcggccctctccttcgccaggcccgtcaaggcaatcaacacaaattctctagctttctccccggcgaggaagggcaacacattcctccgcctgcaaccaatgcctatgagatctgtttcctgcgctgccaagaaggatacaacagacaaggtttgtgagattgtgaagaagcagcttgctcttcctgaccatactgaagtttgcggtgaatcgaaattctctgaactcggtgcagattcactggacacggttgagattgtgatgagtctcgaggagcacttcgatattagcgtggaggagtccagcgcacaaacaatcgccacagttgaagacgccgcggacctcatcgacaagcttgttgctggcaaagcgtagttctgtacctcctctatcgttgtcctaccactctaggtctatcccttgatctaggtttctatggtcttaagatttgtgattttctccgcactgttgttgctatccccgtgtcgtaataatacgagatgttttaagcggttgaacattacggtggtgtaatcagagtaatctgttgctgttaaggtgcattgttgtatgaattgtctctacccgagtagaagaatcagaccattcgggattctatgatcatagtacattttttgcttgaaaaaaaaaaaaaaaaaagcgggc

SEQ ID NO: 61928 - DNA, 1337 bp, Zea mays
  Clone ID: MRT4577_156475C.1
ggccgcttttttttttttttttttgtcaacaatgcaccttaccagtaacagattacaccaccgtgtgttcagccgcttaaaacatctcgtattattacgacacgggaatagcaacagcagtgcggagaaaagtcttcagaccatagaaacctagagtggtaagacaatgatagaagagatgcggcctatgccttcacagcaacaagcttgtcaatgaggtcagcggcgtcttcaacggtggcaattgtctgcgcgctggactcctccacgctaatgtcgaagtgctcctcaaggcccatcacaatctcaaccgtgtccagcgaatccgcaccaagttcagagaatttcgattcaccacaaacttcagtgtggtcaggaagagcaagctgcttcttcacaatttcacaaaccttgtccaccgtatccttcttggcagcgcaggaaacagatctcataggcactggttgcaggcggaggaatgtgttacccttcctcaccggggagaaggctagagaatttgagttgattgccttgacaggcatggcgaaggagagagcggaagatccggcgatggaggccatgtgcgtcaaggcaatcaacacaaattctctagctttctcaccgttgaggaagggcaacacattcctccgcctgcaaccaatgcctatgagatctgtttcctgcgctgccaagaaggatacaacagacaaggtttgtgagattgtgaagaagcagcttgctcttcctgaccatactgaagtttgcggtgaatcgaaattctctgaactcggtgcagattcactggacacggttgagattgtgatgagtctcgaggagcacttcgatattagcgttgaggagtccagcgcacaaacaatcgccacagttgaagacgccgcggacctcatcgacaagcttgttgctggcaaagcgtagttctgtacctcctctatcgttgtcctaccactctaggtctatcccttgatctaggtttctatggtctgaagatttgtgattttctccgcactgttgttgctatccccgtgtcgtaataatacgagatgttttaagcggttgaacattacggtggtgtaatcagagtaatctgttgctgctatccccgtgtcgtaataatacgagatgttttaagcggttgaacattacggtggtgtaatcagagtaatctgttgctgttaaggtgcattgttgtatgaattgtctctacccgagtagaagaatcagaccattcgggattctatgatcatagtacattttttgcttgaaaagatgagcaacgccggagtactttttcaaaaaaaaaaaaaaaaaggccccta

SEQ ID NO: 61929 - DNA, 700 bp, Zea mays
  Clone ID: MRT4577_156476C.1
agcagtggtaacaacgcagagtactctgtttctttttttattttgttcttgtgcccggagacttggatccgaggaatcttcgcgaccttcctaagtgctggctggatgggtatctagactcagattatctgactttctggtccagatggtcctattattgctgcatttccgaattctattgacacgcatcctccgaagactttactatttgccaagtactttattgagtatttctctataggagttggaatctctctcaatgcgggagaggaatacaaactacccaaccttaggcccacctataggaatggaaactctaagaggaattcaatccaagctactcactcgatacagaaatattgttatgatacagggattattctgaactacgactctctcccatactactcctctcttctcccatgtgggttcactcctctattaaaggttaaagctactctgagatcgtataaaggaagcgtatcagagccgggacaccacactggagtgaatctatctcgaaatctatctgattggaaaggggattcccaaagaagcctaaaaaaggatgggcttagaggcatgagcaattgcagctttgaactctctttctcagcaagaagaatacaagtcataagtaagggtgcaactcataaaacagtttgcttgtagtaagcagaccgagtagcaaataaggttt

SEQ ID NO: 61930 - DNA, 322 bp, Zea mays
  Clone ID: MRT4577_156477C.1
gggggcggccctttttttttttttttttttaactggaacgggatcagccagagcaccgctcaggattcttctaggacaaggaatacacaggagcgcccgcgcatttatcacacgaagggatactgcgtattaatatcaggcccgaagagatccagctggtaaaaaatcgctatggctaacatatcggttcatcaacgaccacaggctgcgaccattgccacgacccgaactggtcatcgcggtgtttgcatgcgcgagcatgcaaacagccaccgatgtgcaggttctttatgaggcacaacacatatgctgcacccaccga

SEQ ID NO: 61931 - DNA, 105 bp, Zea mays
  Clone ID: MRT4577_156478C.1
gtcatacttagtcattgaactacaggaaaatgtgcacgtgggtgcagagcacacattcggggcagagctcatcatcgggcgatctcgcggagggacgtgaagcca

SEQ ID NO: 61932 - DNA, 430 bp, Zea mays
  Clone ID: MRT4577_156479C.1
gccaaccaccggaaacaaagggggttggggaaaacgggtccccaaaaggggggaaaaacttggggttgggggccccaaaaaaaaaaaaaaaaaggggggggccccccttttttttttttttttttttggtttttaaagaagaaatctagggggtggctaaaagcccaaaagttggaaaaagggaaaacccaaaaagggggaagcacgggtaaccagggccccctgatttttgcaaaggtttaaaataaaccccccccccaaaaaggggaaaaaggcggaaacacaactttttcaaaaaaaaacccctgggggcccataaagcccgaaaaaacaaaaatttcggggtttccaggggaccccccacatttccggtctgggggcaaggggtcaaaaaaagaaaaattcacatggggaacgcccccctgggctg

SEQ ID NO: 61933 - DNA, 416 bp, Zea mays
  Clone ID: MRT4577_15647C.1
atatagatgcattttaagtgtagattcattcattgctccgtatgtagtccacttagtggaatctctacaaagacttgtatttagaaacggagggagtacataatattgaacgccgcacataagtatcactagccactgaggttggcgtgcaggaggcagtggaagtggtgcatggccatctccacggacggcgcgtacctgcccacgccgtaggccggcgactccaggccccgctggactccctcgcacagcgcaatgtcttcaatctgtacttgttcgctgtcctttaagcttctatcaatgaaatcctggtcatccagaagagattcgttcagaaaataatcaaaaaccactttacacctggttgcatccaatggaacagctagattagtgtccatccatggaccatacctatt

SEQ ID NO: 61934 - DNA, 290 bp, Zea mays
  Clone ID: MRT4577_156480C.1
atatatcgaaactcttggcacgatcatatttcctaaacagcccgtacaattttcctaatggccccatctcatctccacaggacccataaacagccttggaccattcaaatacgctgaggaatatgaggatttctatataggccacaagagtgggagcttgtattaacagccacctggcctgtccatgacaccggcgtgcatcaaccttgtaaaaagctctaatggcaaccagggccaaatacctatcgttaagaacctatattcccaaacctttgataccctccgggggg

SEQ ID NO: 61935 - DNA, 604 bp, Zea mays
  Clone ID: MRT4577_156481C.1
ccccctcggatttttccttttttttttttttttttttttttttttttttttttttttttttttttttttttttttttttttttttttttttgggccacccaaaaggggtatcgtttcccatttttgatttgaaaacttttgttattacaagggggggacccaacccccaccaaaaaatttatagttaaggaaaacagggggctttcaagggaggggttataactaaccccagtttaaattttttttactactaccacataggatcaaacagcagggttaaaaccccgacacccagttaaggcaaaaacatccccggggggagcttccggggccttttaagccttttttttttccctcgaacaaccccttaaaaaagcctgggtcatataaaagcccatgggcacagaatttttaaaaaaacaaaaaaaagtttaaacatctttgaccccccccttgtttccgggggccttaagtttcatttcaagcttggaaggcctagggacccacccagttttgggggcgggcccaaaaagggggttttgggccatttaaaaagttttggccacataacctttttccgaatagccgattgccacaatccccc

SEQ ID NO: 61936 - DNA, 223 bp, Zea mays
  Clone ID: MRT4577_156482C.1
tcaagcggcagctgagacccatatgaccatctctgaacacttgtctgctaccagtctctatgggaaaccatcactttcaagcaagaacagcaacaattctagctacacgcactgcctatgccttaatctacagcgcaccttaagaaatttgtgatatatggatcgagaatctgatatccagtagattgcctagttttaacatagcgattcaagtaaacgtgaa

SEQ ID NO: 61937 - DNA, 280 bp, Zea mays
  Clone ID: MRT4577_156483C.1
tcttagagacgagagggaggagaggggagtgaacttacttactcgggaggaatgcagcatggaggtggagacggatggaggacacattgaacagaactatggggatatatcatgcatgctgtaaggggaacaaagaaagaaagagggtacactctaggacagtatgggacggcttatgtggattggaaaacagacttcatgacataggatcgagagacagggacatggatttttggtcaggctcatcaaacgaattggattagtctaggagacaagagtg

SEQ ID NO: 61938 - DNA, 247 bp, Zea mays
  Clone ID: MRT4577_156484C.1
atctccgatcctttatatacctgtcagacgagctgcacaaaaagcaccatgtcaatcaagacacagtccagcacgcagccgcaggcactctggccttaaacaacctagccacctgtgcagattagctagctacgattccacttatgctatcactgcacatgacaacgcattaacctgtaagtagcgactatgctatcatcggacgaccacagcaacaccatttacatcacaactactaaatggggcc

SEQ ID NO: 61939 - DNA, 445 bp, Zea mays
  Clone ID: MRT4577_156485C.1
gcacgcgcgcgtacgctggaaattggtctcgaggtttctggttcatcagggttttacgttgctaaccagctgaaggatcaacagggggtgatgccaggccatcgcgggtcaaacctgaaaagggacctgcacagattcattccaaccgctgcagcattctggtggattatgcattggtgcgctaactgtgctagctgttttcatgggcacaatgggctcaggtactggcattctgctcgctgtcactataatattccattgctttgtgacatttgataaggaaatgacatccacgcttgcttaatatggttcttaatcttggtcgatgcggtagaatactgaatcttcctgcaagtgacagtaaatgcttgtccggcgtgctgtgtacagtaattggatagctcatattcagtttaggttgccggctaatttacacatggaaatt

SEQ ID NO: 61940 - DNA, 277 bp, Zea mays
  unsure (1)..(277): unsure at all n locations
  Clone ID: MRT4577_156486C.1
gggtgaggaagtaaacatcgcgantacgtgagactacgagacattacgagctacgagcgagcgtacagtngacgatgacatagccagtatccataccgagtgtcagacggacgagcgaagggacgaagtgcggatgggttacccgaggggtgggcgtgggcaggtgttgacggcggcacttactctaaagaagacggtaccatggtacgtgagggcggatacaaccccaaggtagcccaaggaaggaggccgtcgccatattccggccgactcctcc

SEQ ID NO: 61941 - DNA, 448 bp, Zea mays
  Clone ID: MRT4577_156487C.1
ttaagtcgtattcaacggtgcacacatcaaactgtacaatttttcagcgcttttacatctttgagagactttactgatatttgcaaaaaatcatctcatgttagctaaatcccgcagagactagaagctcaagaagtcggtgaaaatcgactgtgggtggaacttgagcttgaaataaacgagacgaaaatttagctaaacaagagactgtacggatatccatgtgctttcgatctaaatacagaaagaaggaaactgaagaacaaaacgaacatgcccagaccgccaacggcgaggaatgttttctttttagattcacctccggccatcagaggggcctcgttcatgaggatcattccgacgaccacgcatccgtacaggaccatgattatgtaagactccatgacgagttgagccgagcttcgatccgtgaatatagcttacacca

SEQ ID NO: 61942 - DNA, 381 bp, Zea mays
  Clone ID: MRT4577_156488C.1
accccagtcccgatctccgatcccctcgtcgatacaagatggagatattattcaagactctcactggaaagactatcaacctcgaggtggagttctctgcacatcattgacaacgtcaaggccaagacccaggacaacgaaggcattcccccggacctacagcggatcaccttcggtggccagcagctcgaggatgggggcacactcgccgactacaacctcctgaaggagagcaccctccacctcgatctccgcctcatgggaggcatccacaccttcgtcacgaccctcactgcaaagactatcaccctccaggtgccagtcttctgacaccatccacaaagtcaaggaccacctcccgccccacgacggcatccctcc

SEQ ID NO: 61943 - DNA, 396 bp, Zea mays
  Clone ID: MRT4577_156489C.1
aggatagatatgtgggggcaaatcatatcatcggggaccaattaatatatgggtacaggagacgcaatcggatcaaccaacatgcatggtgacacacgtacattagcacaaagactgacgccaaacatgcagagggggattgcaaactgaagaactctgtttttttttttttcacacacacaccacacaatacctatgtatgggagccagctcggccttgcttattattgttcaaccaccaccacaagcttggttgataataatcattttcatggtcgtcgatcgatgtgatcagcatttgcaggggttgcactttgagccgcttccgcaacttcagcccggggggggctttccggacttcggcgggggctttataaatactggggcgggcttttt

SEQ ID NO: 61944 - DNA, 165 bp, Zea mays
  Clone ID: MRT4577_15648C.1
gctagaaccatcaccagagggaaagcggaggcgacaatacagggcgggacatataggaaaaactgctaggtgtcagacgaaccaagaaatcaccaacatttatgcaggacagacacatgacatagggatcaggacacaaatcacaggcgggacacgcaggatcag

SEQ ID NO: 61945 - DNA, 190 bp, Zea mays
  Clone ID: MRT4577_156490C.1
gcgggtcacacaagcgtctacactaagtcgcgatacactcatccgctgagggcgtcggccttctggcccttctccccccggccgacctcgcccctccggcgctccgtccgcttcctgaactcgtctccctcacggacgttctcctccctccgctcaccacgccggaacccggaagaggagagcgtcgctc

SEQ ID NO: 61946 - DNA, 310 bp, Zea mays
  Clone ID: MRT4577_156491C.1
gggttaaaagggggggaagccactatccatgcgagtggttactgcctaactttcgtggcccgggcacatgctgcatagccgagatgtactatacaggacatgcctggcatatgatcagactgtcatgtgcaggaaccgctcctgcatgaagtggagcgcactccgtcagcatggatgactgaccgttccgtcgtcacgcccaaaagctcaagtaggggtggcagattttataagtggcggtacaacgagcagtcttgagtcctgctgcactcacgcagacagactgtgaggagtggggaacgtagtgact

SEQ ID NO: 61947 - DNA, 236 bp, Zea mays
  Clone ID: MRT4577_156492C.1
ggcgggaattttcccagatctcacagcaaactccaacgaccctcagcagcggttcaggaacacatctgtctgactagatccggtagcccttctcatcaggacacatctggctcttgaagaatcgcactctcccactccaaagaatgagagatactcgaccgtcagacactactgacattccatacactccaggtgaggcacacgtgctcgcgggacatgtggagtacgaagaggta

SEQ ID NO: 61948 - DNA, 1129 bp, Zea mays
  unsure (1)..(1129): unsure at all n locations
  Clone ID: MRT4577_156493C.1
gcctgccgcggcggcgagcacgtgcggagctgcgggcgccaccagacaaacccgctcattcgttcagcccccctgcccggagcaatggaggcgctgcgggcgtggagggcctcctccaatctcatcggcttcgcggcctcccgcgccgccgcctccgcttcaaggccccttggcctccgtatccgctgctgctccgcggccgccgccaccacgaacccgccggcgcagcctcaggaccgccgacgccgtagtgcctcctcatccgcctccacctccgaccgcgactccatccgcgccatccgcctcaaaaaagttgaggagctcagagggaagggttatgagccgtacgcgtacaggtgggacaggactcacacgaccaaggcgcttcaggaacagtacactcatcttatgaacggtgaagtctgcgagnngacgtgtcggtgtccgttggctggccggattgttgcccgaagagncatttggaaagcttgtttttatgactgtaaaagatgatgcggggactgtgcagctttattgtgagaaagacagccttacggaggaccaatttgagcaactaaaggcgtttatttgatattggtgatatattaggttgcaagtggatccattaaaaagacagagaaagataagtatcatggattaactgatgtggacaaacgttatcgtcaaaggtatgttgacatgattgcaaaccctaaggtcgctgatgtattccgaactagggcaaaggtggtttctgaaatccgcaagacaatggaatcatttggttttattgaagtcgaaactccagttctacagggagcagcaggtggtgctgaagctagaccttttataacctaccataactcacttcaaagagatctttacttgaggattgcaacagagctgcatttgaaaaggatgttggttggaggacttgagaaagtctatgagattgggagaatattccggaatgaaggcatttctactcgtcataatcctgaatttaccactattgaagtaggagtcccccccctcaaaatatgcttgtataaatggattacttttatccttgccagcatgaatgatagtatgtatgaagcatattcagactatgaaagcatgatgaata

SEQ ID NO: 61949 - DNA, 399 bp, Zea mays
  Clone ID: MRT4577_156494C.1
ttgtccgatcatggtgaagggcggcagcacgacggaggcggtggtaggccatacggctggctctgcagttgatggcagatacaccgacggccatggcctgccgctcaccgcgcggagcctcaccggatggctccctcgccacgaggcccaaagcgactatactaccagccacgctgcgctacacgggggagacacgcaaatacattacctgcctcagtcgtgcttgatcctgtaactataactgatcgaggatgctacatcatatctactactgctggtgcttgagggcatactgcacgagaatgaagccactacgatctgacacaggatgcgcctgccgaggacgtacgtgcgtacgtatatatatacgctacctcgtgagctgttgtacgagtgata

SEQ ID NO: 61950 - DNA, 2375 bp, Zea mays
  Clone ID: MRT4577_156495C.1
gccggccgggctcccgagacggccctatcctcgctcccgcggccgccgtctccggtctccctatcctgccgcggcggcgagcacgtgcggagctgcgggcgccaccagacaaacccgctcattcgttcagcccccctgcccggagcaatggaggcgctgcgggcgtggagggcctcctccaatctcatcggcttcgcggcctcccgcgccgccgcctccgcttcaaggccccttggcctccgtatccgctgctgctccgcggccgccgccaccacgaacccgccggcgcagcctcaggaccgccgacgccgtagtgcctcctcatccgcctccacctccgaccgcgactccatccgcgccatccgcctcaaaaaagttgaggagctcagagggaagggttatgagccgtacgcgtacaggtgggacaggactcacacgaccaaggcgcttcaggaacagtacactcatcttatgaacggtgaagtctgcgaggacgtgtcggtgtccgtggctggccggattgttgcccgaagagcatttggaaagcttgtttttatgactgtaagagatgatgcggggactgtgcagctttattgtgagaaagacagccttacggaggaccaatttgagcaactaaaggcgtttattgatattggtgatatattaggtgcaagtggatccattaaaaagacagagaaaggggagctatctgtttatgtgaaaaatttcgaaattctcacaaaatcattactcccactaccagataagtatcatggattaactgatgtggacaaacgttatcgtcaaaggtatgttgacatgattgcaaaccctaaggtcgctgatgtattccgaactagggcaaaggtggtttctgaaatccgcaagacaatggaatcatttggttttattgaagtcgaaactccagttctacagggagcagcaggtggtgctgaagctagaccttttataacctaccataactcacttcaaagagatctttacttgaggattgcaacagagctgcatttgaaaaggatgttggttggaggacttgagaaagtctatgagattgggagaatattccggaatgaaggcatttctactcgtcataattctgaatttaccactattgaaatgtatgaagcatattcagactatgaaagcatgatgaatatggccgaagaaattgttactcgatgtgctatggctactcatggcaagcttaaggttgactatgagggaactgaaatctctctcgaaagaccatggaggagggagaccatgcattctcttgtcaaagaagcaactggaatcgactttaacagctttggacaagacgttgaatctgctaaaagagctgtgaggggactgccaggtttcgttgtagggaacagtgaaagtacttcactgcaagcctgttcatctgttggacatgttctcaatgaggtgtttgaaacatttgttgaatctactcttgtacaaccaacatttgtccttgactatccagttgagatatcaccattggcaaaaccacatcggagtcatgttggccttaccgagcgattcgaacttttcatttgtggccgtgagattggcaatgcgttttctgagctcacagacccaattgatcagagaagccgttttgaaaatcaaataaaacagcacaatgctaagcgtgctgcaatggctaaggaggtcaaatctaccgagggtgaaggcgacgacgattactcgtatgaagtttctttagacgaggacttcttgacttcattggaatacggaatgccaccggcatcaggaatgggcctcggtatcgaccggttagtaatgcttttgacgaactcttctagcataagggacgttattgcctttcctgtcttgaagattcagcaatagatccccttcattctgtgaagaggcgtggctgctgaagaaaacaccagcagccttccttttgtgcttggttcagtacagcaggttttatatctgctgacctttttatagctcatagatgtggccatttattatttgatgatgtaattgagatgtactatagttcagagtccaagccgatattaaaaactttatagatgtttgaataataatggaatccacattttacaattaatgtgctgcaaaacagctatctccgcagagaaaatgcctcgagccgaggtccgagtaccaagcgctgcagcgctgaagtatgagccccgtggactagccattgcttctccacgaggctcataccaggcgctacggcgctgaagtatgtaacccatgccatactcccaggaaaagctcgaacgaccttcaacaaaagggtacctgtacccgcacccgacacagtgggaggtagagaaaccggacgc

SEQ ID NO: 61951 - DNA, 1135 bp, Zea mays
  Clone ID: MRT4577_156496C.1
cggccggttcggggagtctatatatgggtcatcgggatttaggccccttcttgcgacaaagttttagttccagagacaaaactgaagaaagaactgggagagctagcatggcaagttcgcgctgctttgagaacccgccggcgctggagccggccagcggaggaggcgaggtcgttgacgacttcggcgggcagaaggcctacgtcagcggctccgccgggtccaaggccgccgtcgtcctcatctccgacgccttcgggttcgaagcgccaaacctgaggaagatagccgacaaagttgcttcgctcggttacttcgttgtggtgcccgatttcctgcatggggatccatatgaccccagcaataatgcccatagcaatcctggaacgtggatacagtcgcacaatccgcaaacggcattcgaagaggcaaaaccggtaattgcggctataaaggagaagggtgtgtcgagcatcggagctgcaggttactgttggggcgcaaaggtggttgtggaactggcgaaagttcacgagatccaggctgctgtgttggcacacccttctttactaagtgtcgatgatatcaaagaggtcaagtgccccatttccatacttggagctgaaatcgacaggtcagccccgcctgaattgctaaagcagtttcagcaagttctttcagcgaaccccgaggtcgatcactttgtcaaggtttttcctggcgtagcgcatggatgggctgtgaggtacagcgacgacgacgcagcggctgtcacgagtgcggaggaagctctgcgcgacatgagccactggttcaacaagtacctgaactgaattatgtggcggcatatgtgcgtgcaataagctcctaatggtgaacattatgcaaagccggagcatcaactttattaagcaaagccactagggatcggaagaagatagttggaaggtttagatacaataatatggtttttttatatatataatttgaaagttatattacacagagaactgaatataaaaaaaaaaaataaagtgctctaaattttacaatataagatttaaataaataacaaaaaaaaaaaaaaagaaaaaaaaaaaaaaaaaacaccaacaaaaaaaaaaaaaaagcggcc

SEQ ID NO: 61952 - DNA, 259 bp, Zea mays
  unsure (1)..(259): unsure at all n locations
  Clone ID: MRT4577_156497C.1
cgggctccaggtgacgatcgcgtcgcggaacccgaacgagtcgggtgggcgtgtactacaagacgctggacgcgttcaccacgtaccgcgacgaggcggtgagcggtgcccatattagtaccggcgatgtaccaggatcgcaaggccgctttggtgcgggccttattattagcctgcggctgggggcggngncggcggacctggcggacgcaatggagcggggcgaggtggcgggaaccgtgctggtcacacgtgaggt

SEQ ID NO: 61953 - DNA, 277 bp, Zea mays
  Clone ID: MRT4577_156498C.1
gcaagagcaagcaagagaggacgacatggcggcgccacggagcctggcggaccgcgctctcgctgctcgtcttcgccaccctcgcgctcctcgacgccgacaccgtcgcctgcctctacccggtgctggagctcgccgagcccaccatgatggccgtgctgccgcccgtcgtcggcgccgtcgcgggctacttattcatggagttccccaacaaccggcacggtgtcgggtaccagcccacgcccgacaccttggacttgcagtacaaatactagcc

SEQ ID NO: 61954 - DNA, 458 bp, Zea mays
  unsure (1)..(458): unsure at all n locations
  Clone ID: MRT4577_156499C.1
tatgaccatctgcacacgagtcggttggtaattggacatgctagtgagaacgccacaatgtgtagcaagcgcctcacagggattcacagacatagcaatgcacaacaggacatgcttaccattatgacccttgaagatagcaacaaccgttaacattatttcagtagttaccttgggtccattgggggggacaaaacataacggcacaacaactacaacatcttgtgctagcaaaccttgctgcatactctcaggcaacatcatattcttccatttaaccaactgggtgcattgaactctgctgcttatttgcaacaacaattaccattcagacaacttgttgctgcctacactcagcaatatgtttcattcaaccaactagcagcnattgaactctgctgcttatttacagcagcaacaactactaccattcatgcagctatctgatgtgagccctg

SEQ ID NO: 61955 - DNA, 323 bp, Zea mays
  Clone ID: MRT4577_15649C.1
acgacgccatctccaacgtctacgtcaacatcttggaacacccaaaacttactagggtcagggctcctttatcacaccatcaccatacttacaacactgctaatctccaccttcaaagtaaaacacgtcgctaactgcacacaggtctacaatatctctaaaaacacatatgatcagaaaatctccatacgtcatcttccactcctaatgattaccagtcctaacatcacccaaaaactcataaatatctcgattcaacatcatactttattacctattacatgcctcatgaatttaactgtttacatgatcatcagaaacct

SEQ ID NO: 61956 - DNA, 681 bp, Zea mays
  Clone ID: MRT4577_1564C.1
gccgtactctggttccggcctgcagctccccagcccagggccgcgggctacagccgttccttctccctgctcctccttgcttcttcccgccgtgctgctttagctcggggataaaatcccgtcgcgcgcagcctctgctcaccgtggctggtgcgctcatttccgtcgagctccttctctgccatggccgccgtcagttcctccctgcccagctcccagcaccgcgctccctcagctcgcggagcttctcctcgccccgctcggcctctgtttctccctgctcccgcacagccgcgcgctctgcttaccatcgcaagctcgccacacccctggacgcctgcttcttgtctgctcggcgcccctgcgcttgctcgcttggatctcccttgccatggccgtacgctgccgagctccaagctccaactcggatctttctccctcgtcttccttcccacgagctcgcaccagcctctgcttcctgctcgccatggcgcttggcatccagctttctgcgcaccggctccttgctccagctcccacgcgcgtccgagctcgccccggctccagcttctcccatggccggcgatactccagtcctctgcgcagcgcgcacgcttagcttgcctctctggcgcgcagtcctttgttcctgcgtgccacaatcctccagcttggttgccg

SEQ ID NO: 61957 - DNA, 380 bp, Zea mays
  Clone ID: MRT4577_156500C.1
caccatcctcggcggtggcctgcacgacagccgccatgctgctggacccggaccaccttacgccgtctcttgaacggcagcgaccggtccacacgtccactctctttcaacttcaccttggggtgtgctggtgcggccacggcggcgtcgttgggcgatgcggccttgccgctgagcgctgagtgggtcggtgccactggccccgagccggccatcgtcgccccgccgcgcctgccgctgcctgataccggacaccttgcaaagcgactgcgggtctgcgccatgcaaaaaaggtacatacagtcatgggctttgcagtaatatatatatatatatatatatatatatatatatatatatatatatatatatatatatat

SEQ ID NO: 61958 - DNA, 302 bp, Zea mays
  Clone ID: MRT4577_156501C.1
gggcaaaggaccgcccttcgtctttggcaaaatattatctcatttacttatgacctaaggggaatataatgctaccaggggctgtaatgatagccgtttctgacgatacatgcgacaatgggggataaatgagcccaagtgtaaagtgacgggacaccatcaaatttggaaaacttaatgctgtggaaaagaattcatcatgacggtatacctattgtgttcagaagggtgagcaagtagaattatgaaaatgatttatcaacaccctgttgaacactaagatgtcaatctcccttaggggg

SEQ ID NO: 61959 - DNA, 625 bp, Zea mays
  Clone ID: MRT4577_156502C.1
gcttctagaaaactaatttacagcaactaaagaaaacaaacaagaacgtttaccaatctctatcaagatagatacaacatatgaaaaaggaaactacactttttgacaaaccattattacgcaatgtgattctgtgccatacatggatttggtatggttatgccaaaatgaacatcgttcactctctttttttctgtgtttgttagctgctctgcttctctctatcgtattggctggtctcttctgcaacctttgcccagacgtttcccattttctctgcgtatccaacctggttaacaacaaaacccttcatcatgttcatgaagtctgcacgcctttctctgtccaacctctcaacctcagaatcggttgttttccttgattcgctcataccctttgatggcaacattttttgcatcctcagtgaccttgattggttcttttaactcttctatttttcggatccttgatttgtcaccaccaaataccttcgatgatgcagcctctagcttctcaactctagtttgcagagaaggaagctctgatagaaacgtctgaactgtcagtaaagcactagatctatctgcaaatgcgccttggacagccatcatcatgccaaggtact

SEQ ID NO: 61960 - DNA, 280 bp, Zea mays
  unsure (1)..(280): unsure at all n locations
  Clone ID: MRT4577_156503C.1
ctaatttgtatcactagttcgtccatggaggaagcagaatggaccatgaagtgtgggcaacccgacgaccatgaagtgttttctttcaatggagtctatggtgtgtgtgagttctacaacaggttgtgccgcaccaaaagtcaacactgtaccaggaggaggagatctttgtcagtacacaatttgtctgtctagaaaaaaatgagtacttttttcgctcgcccaaaaaaaaaaaaaataaaaatataaaacataggttttttttttnntcttttttttt

SEQ ID NO: 61961 - DNA, 375 bp, Zea mays
  Clone ID: MRT4577_156504C.1
ctggtttttcctacggctattaccaattcctgtttgggttagggttacttagggttttgtggaggggccatggcagcggctgacgtggagtaccggcgcttggtcagcgggcttgcctgagccaccaccaactagtcgctggaaaatgccttcggctcctacggcgagatcctcgactacaaggtcatcaccgaccggaagaccgggaggggtacctacttcaggttgtataccttgtactacaagaactccatgctcgacgctatcctgaacatgaaccgcctggagctcgacggccaggacatcaccgttaacgcaggtccagagatgtgcctgcgaagctgctgtggtagctactgtagatgtcgcggctgc

SEQ ID NO: 61962 - DNA, 432 bp, Zea mays
  Clone ID: MRT4577_156505C.1
cggacgcgtgggctcttattaaggatatgcacatgaattggtcatcaagtgctagagtgctttctgattcagtgcagaagattcccaacaatgagcttatatcatctatagcaagatttcagaattacattgtcttctgtgatacagatggtcaaagggttctgaagcacgacttggataccaagaccacctcaaccattcaattttctgactgtgaggtacttgggttgccatattggtctgtttgcaatctcgagagagtgtcaacctgggggtattcatctggacagttacaggagcatgcgcagcaagtagacgtgcttcctggaagatgcaacatcaccgtctacgtggacattccggttggcactgaacttgccgcgcctttggtggataattgcatctggcgccaagtaaggtgatctggcgctg

SEQ ID NO: 61963 - DNA, 304 bp, Zea mays
  Clone ID: MRT4577_156506C.1
agactcttttcaccttaatagggagaaaaaggctatagggaaaaccaaaaaatggggggaccctacatgggggagggagcactggaactcttgtttccacggacctgaacccccggtcatggacctagccaagaaactgagtaagttggtcaatgagcaccaaacaggtggcatgattcacggtacgagaaccatttacaacctatcaaaactcttcagaacgccctttgtcctatggatccagggcatgtcatggttcactttatcgacagcatcgcgaacggcagctaccccgtcatggaac

SEQ ID NO: 61964 - DNA, 777 bp, Zea mays
  Clone ID: MRT4577_156507C.1
ccaaaaaaaaaaaaaaaaaaaaaaaaaaaaaggcaacgcgcgatgcttatcctccgggagtgatgtagctcgagcagacccaatcgcccgcccggactactatatttatacaccagccccacccgtccgccccccgctcatcgcagaccatcatcacagatcatccacagagaccatcttccgtgtaagagacaagagagtgggagagaggggggatatatggcagacatcgcgttgctggtgacggagcagttcgacaagaagctgaagcgaggcgcccccggcgaggacatcggcggcggcgccggcgaatataggaggaacttcggggccgtggccaaggtgtggagctcgtgggtggagtccgccgccgccgcgtccggggtgaggttcagcgtcgcggtgcacctggagcccaagaccgcgctcgccctggccgccgccgacggcctcttctccgcctagctagctagctagctactagtgtcgcctagctgcttccaggcccttctcctgagtgagcagcagtagtcgagttcttctggaccatataatacaatgcgcggttcacctgtacattcaatcggtgagcactgagcagcagtagtcgagttcttctggaccatataatacaatgcgcggttcacctgtacattcattcttcgcttctcctgcgctcattgatatgcgcatctgcttgattgttttctccttgtcgtgacattttttttaaggacatttacatttgaacccaaaaaaaaaaaaactcgagcccgg

SEQ ID NO: 61965 - DNA, 433 bp, Zea mays
  Clone ID: MRT4577_156508C.1
aaagaggcaacatattattattattattattatgtacggaatacactgacgaacatacatactcacgtcacaactaacgtaccaaatgcaacaaaattaaatgaaaatagaagtacacaccttagagagactagactagagagagagagggggatatatggcagacatcgcgttgctggtgacggagcagttcgacaagaagctgaagcgaggcgcccccggcgaggacatcgccggcggcggcgaatataggaggaacttcggggccgtggccaaggtgtggagctcgtgggtggagtccgcctgtacatataatacaatgcgcggttcacctgtatattcattcttcgcttctcctgcgctcattgatatgcgcatctgcttgattgttttctccttgtcgtgacattttttttaaggacatttacatttg

SEQ ID NO: 61966 - DNA, 469 bp, Zea mays
  Clone ID: MRT4577_156509C.1
cattcaaaaaaaataaaaaaaataataaattaaaataaaaaatatttaaaaataaaaaaaaaaaaaaataaggggcttattaaataaaatgttcctactttacatacccttgcttgcaatatttttacttttttttttgtccttaaattcaattttctggctttttttttccccttttttgcttttaaatccttgtctttacctcacttattttctttgcttaatcatctcctttctccccttttgtttttatcaactttctggccctctcccgttctgctcctttctaatctgtttgctccattttttttatgtgttgtatttgctctccctctcctcgtgctcggttctctttatactccctgttgcttttgttgtatttttacctcctcactcttgttccccctttacattttgtccacttgccccttatctcccccttttccctttttgcttttattttcccttt

SEQ ID NO: 61967 - DNA, 330 bp, Zea mays
  Clone ID: MRT4577_15650C.1
atcactctagaccacgacccacttttttttttttcacaggcactctacctaacgagcttctttccttgtagaacgcgcatgatttccaacctttcaaccatggtcacacctgacccataccttgcacgattgtccacctttcgatactgtacaatcttgttctgaccaacaattctgtatctggagagatcccaaaggtctttggcagccttaaaaaactgacacagttggacctttcagataaccatcttagtgggaacatttctgaggagcttgtggagattgtctagattaacacgcttgatctgtcacacaatgagctttctggtc

SEQ ID NO: 61968 - DNA, 205 bp, Zea mays
  Clone ID: MRT4577_156510C.1
aataattactgctattttaaaatttcttgattattgaatgtgagcacctctatctaacatgatttgagaagctgtacactgataggcagagttattttcctgtttacattctgtgttgtttgggggattggtaggtgtctgattactgtttacttcactgttgtgtttcagtaaaagacttaaaacaaccagtgcatgtttgctt

SEQ ID NO: 61969 - DNA, 408 bp, Zea mays
  unsure (1)..(408): unsure at all n locations
  Clone ID: MRT4577_156511C.1
atataatttagtatttttacgaaatatatagattttgtataaagtatatgtgaactatttaaaaacagggaaattattcgctgttgtaattgaattacattattcgtgttgataaacagcaaaactaaatagacaatttttataatttaagatttaagtaaaattttatatgaaaaatgataatttttctgatattaatatttttgttatgtagtaaactttctactatgtgaatattactagcgattgatcaaatcaaaccaaaccaaaacaagaataacagaaaatcaataatttgtgaaaagtgaagatcaaaagtgttttgataaaaaatatatagaacattaaataaaattacgaaatattctgtgatttgcccnnnnanaannnaannnaaaaaaaacccat

SEQ ID NO: 61970 - DNA, 558 bp, Zea mays
  unsure (1)..(558): unsure at all n locations
  Clone ID: MRT4577_156512C.1
tttctgggcatctcggtgttcaacatcctggggggggggggacgggcagctggacctcgcgcgcgaggcggaccggctgttctggtccatgcgccgggcaggcgtgccgccaagcgtggtgacctacaacaccatgcaccgtgtgtatttcgtcgttttgctgnncgncnangctttttgggggggggggctcatacccancacttcanatcgcaacggtggggggggggggggaggcaaacccaatgaggagacgtacaacaccatgattaccatctacggcaagtcgctggaggacgagaaagctggaaggttggtgcaggagatgcaggccattggcgtgcagcctgatgccatcacttactccactatcttgtccatatgggtgaaggccgggaagctcgaccgcgctgcttttttttttgtgaagcagacgccaacttgttcggagatcgacccagggctggaccacacaangggaggggcctangagcgtgccgggcttgttttacaggccaagcgtttgtttcgcgatctgaaagaccccggaggcatccc

SEQ ID NO: 61971 - DNA, 966 bp, Zea mays
  Clone ID: MRT4577_156513C.1
attcagccccgtccatcccatccctgcgctctctcgctcccggatcgccgcgagctcctttttgatctttgactcgcatcgcgtctcctctcgcctccgttttggataagcccgtctggaagcctctcctgctttcatttcgccggcccgcggagaacagctcggcgggttcccttcgtgcagcgttcggagagctcttcctgctgctctgcgacggacggggacggagaggtcaaaaatgtaccatcacggatgatggatggtctccggtatcatctgcgtgggacatagatggaggactacttttcacgcttcctaaaccttggttggcagctaagacaatacttgacagaattaatagaaaatttggttcggaccattaatcggattcctcaacgtcttggagtccaattctctgctagccatggaggatcattgactggcaccacagtatactttcatgaaagggcatctacgttatctgttaatactactactactacagaaaaacagactgcaaatggaacatctgaaggcgcaattttcagaaaaggactttccagtatttacgaaagatcatgtgtcaggtcttcctatcttttacatggcttcatgctggtacgaagattggcattcagtgtgcgagatctgtggaatctattttcaagtgaagtacacgccaaactaaccaggatcttacatcgtttctggacaacactacagggatcttgtgaagacataggatggttgcaaagaactcgggcatcacttcgttcagttgatgggacaggtcgcttcaaggagattttgcatgagataaggaatggcgtgcattgcccgcctgatacactgatttacttatttattcctggcctttttagcaaccacagtccactttacttcaccaatacgaaacgattcttttcaaaaatgggattggcttgccatattgcgaaaattcatagc

SEQ ID NO: 61972 - DNA, 391 bp, Zea mays
  Clone ID: MRT4577_156514C.1
cctcgagccgggcggggaacgactccctgataaataatcctacctctccgcagccgccaggcgagtgagagttcgcatgacggctgattaccagctcctacgccatgacgcgcgcacgagttaggcggtccaggacaagccaaacgctgtccaccgcctctgactctgactcgcatatatcctcccgcacgatctcagctcgactagcagtcgcttccttcgacgactcaatgtcgaccccaccacgctatatagcccacccacagccgtagccccaggaccgatgggactagctcggtttttcgatatagaagcgtcgacgacaaacctcgaacaaggcaacgatgctacactaacttgttttcttagtcccccacccccagcccgcttg

SEQ ID NO: 61973 - DNA, 451 bp, Zea mays
  Clone ID: MRT4577_156515C.1
ggatcctgaataccgggcgccctccacgcgtccggttgctctgaacacacatggcggctgaaacacagtacctagtgggacgtggatgcactgttgctgccattgtatagacatgtaccctctacacatggactcgcacggatcctgaccaaaagctctacttcacatttgaataaagggcctaggtcttttggtaccatgtttatcgatcctaattcaaaaaaagggataagcagatgccaatcatgcctagtttgcacctgctgtacataaaatggggctgcctccagcgagtgaaagaccaaagacctgacgaaagcatctacagtggaggcccccagggcgatggcgctccctattgtgttgatacctgagatggcatacccgatgatccaccacgaacctaacgaccgctccaaaacgatatggccaccgtccttgttgaactgca

SEQ ID NO: 61974 - DNA, 591 bp, Zea mays
  unsure (1)..(591): unsure at all n locations
  Clone ID: MRT4577_156516C.1
cgagtacttacccatcgatcacgttacattgaaccggctgtggtgcctgagtttggcggggaggcctcttcagctgctgaaacaagagaaactattcctctcgtgcaaaggactgaagagtcggctataatgccgacggcaccttcggttgagctagttgaaacaaaggttgacaaagataaagctgaaaggtcaaaaactgaagaagtaacaaagatgccagagattttaagcccttcaacagaagcaacagcgccgaagacacaagagagttctgccacaactcctaagaggaggaggatggcaaatgtgctagatgttgtattagaaacagcaaaaaccttgaatcctgctcctaccagaaaaattaccgaagcttctaaggcgcaacccgaagctgaaacaaaacaggcagaggtcgaagctacaataattcaaactgaaaccaaagcagggccttcagagcccactgagatagagcttgttgaaattgaagaaaaggcaatagaagaaaaggccacagaacaaatttcgtctgaaaaggttgcaacttatgctcccgaagctntaaaagagagcattgattacatc

SEQ ID NO: 61975 - DNA, 303 bp, Zea mays
  Clone ID: MRT4577_156517C.1
ggcaacaagaacaggcccctttaattggcaattaaaaaagaaacttttttttatgccaaattcaaaacaaaaacaaaattttttacacgatcactaaacatgggacgcgccaaaaatattgctgttttcaccggagccagaaaaaggaaacaacactgctccatacagttttttaaagcaaggaatttcctgtacaagctttttttacaacctggaaacatctaaagatccaaccaacaaccacggcttggggggctttagtgccaccacgaggtccttctcttggatattggggccaacggg

SEQ ID NO: 61976 - DNA, 210 bp, Zea mays
  unsure (1)..(210): unsure at all n locations
  Clone ID: MRT4577_156518C.1
caccaccaccncnngccggcaaagttttccaccganccgccggcggggccgcgcgcgcgcaggcagcagnngaggacgagcgcgccccanacnccagccccgacgcgaaggaccccgagcnannaagnngggcgaggagaggnggnncannccagcagggaccccccncgngagcccagccgancngaccgcccncggnggggggggggg

SEQ ID NO: 61977 - DNA, 408 bp, Zea mays
  Clone ID: MRT4577_156519C.1
atagacggcaccgagtttaccttaagatagttgcaattacacgcaagggcaacccttgtgcaaggcccatccggaccaacggcaacactacaaggcgaactataaaatgacagttgctcacaaaaatacacaatccactagtgcctacaagaagcattcaacgctatgggctcagcaccgtggacatgcatgaatgccggatgcacactcaccctctttatatatgacatgatcactctcggccatgcaaggcaccgacacacatacaaatatgtgggtgaataccattgtggttgtacaggagcaatctatgcggcacgacttgccaggcaacacgggctccaaaaacctgactgaacaagctgaccgagagaccgtgctttggtgaggagctcaggatcattcttt

SEQ ID NO: 61978 - DNA, 313 bp, Zea mays
  Clone ID: MRT4577_15651C.1
attcggttcgagccgtcatctgagactgctctgtcttcaaagcggcaatattggatgtccatgggggaactcaaggatcttaagaagcacttaacgggacgacaagaggatgattacattctaatgagctcctgaccgtacggagcgaattctgtgtttgtccaaatgaaggatagctcacaaagagagcatgtgggttatgaattgcttaaagaggttactggaaaaaacaagaattctgtcccccatattgagaacttaatctatcagccaacaagggcaagggtctattccaagacagatcttcacttgg

SEQ ID NO: 61979 - DNA, 751 bp, Zea mays
  Clone ID: MRT4577_156520C.1
cctcgaggggccggccgggaaaaaatcgaaaaaaaaatcgggaccaccaccagcagttctgagctagctatggcgatgatgatgagagcattggcagcagcggccatcctggccacggcgtttgccgtgtcggcacgagccgagcccccgcagtgcggcgccaactccaccacggcgctctgcccctactgcctgtgctgcagcaaatggggcttctgcggcagcaccgaagcctactgcggcaacggctgccagagccagtgcgaccgctgcaacgccaccgtcgcgtccatcgtcacgcgggagctcttcgacgagctgctgctgcaccgcaacgacctcaggtgccccgcccagggcttctacacctacgactcgttcatcgccgcggcgggcgccgacgcgtccgacggcttcggcaccacgggcgccgtcgacatccggaagcgcgaggtcgccgcgttcctggcggagccggcgcaccggacctcgggcggctgggacggcgcgcccaacggcacctacgcctggggcttctgctacaagccggccggcgcccagaacgtcacggaccccgtcgccttcttcgagacggccatcgcgagctggatgacggcgtcggcgcgcccgcccaagccgtcgtgccacgacgtcgtcaccgagcagtggaccccctcggacgccgacaaggccgcggggaggctgcggggcttcggcgtcatcgccaacatcatcaacggcgacgccgagt

SEQ ID NO: 61980 - DNA, 219 bp, Zea mays
  Clone ID: MRT4577_156521C.1
agcagtggtaacaacgcagagtactcggtgtgtgtgtgcgtgtgtttactatacttacgctaaaccagaatactacagaccagaaaactatttatatcagttacgggatgggatttattttttatacagcggtttaccttattaatgttgtttttttttacttactttagtcctttagttttgggaaaataaatagggggtccttgttttcttacatat

SEQ ID NO: 61981 - DNA, 659 bp, Zea mays
  Clone ID: MRT4577_156522C.1
ccctccctcgagttttttttttttttttttttttttttttttttttttttttttttttttttttacaacgggccgggggttataatttaacaaaccccggacccaacatcccaaccggccggggtttttgacttggaaccaaaataaaacccggacggaccccggcctacacaaggaggaacccttactggccggcccgcgaaccaccttaaaaaggacccgggccttggccaggggaacccccttgaaacaaacttttgggaaaaggaaaccaaaaccgaacccccatgcccacggttggttccttttggacccccaagggccggccccgggcaagaccccccctgggaatgggaccttaggggctgggcctgggccccccggggggggcccccttgggggctggttccccaactgaacccttgggggaaccgggtattttggccatgaatttgcccaaaaagccctttttttccttggcatccgggggggtcacggttcccccctggggggcccggccccgggcggggacggggggaacccgggcgggagggggaggggttttagggtttttgggggggcccccggggggcttctccttggttttggccaagagggcttttttttcctccttcggggcatggggggggggcccgggc

SEQ ID NO: 61982 - DNA, 240 bp, Zea mays
  Clone ID: MRT4577_156523C.1
gcaggcgtgcggccttcttgcaccaagatggcacctgcctttctggggttttttaagtgccggtgctgacgcaccagccttcgcagtctcagcttttgtgtctgtttgctgtgtttcttttccagagggtcacccttcgcagacctatttttttgagagtgtgtgttgtgtttcttttccagagggtgaaaatatttaggattgatcaactggggatctgggatgattggttgacacttt

SEQ ID NO: 61983 - DNA, 270 bp, Zea mays
  Clone ID: MRT4577_156524C.1
cggatactgggggttatcctyccaacgraaacatgkcgattcacacktaccatgsaarscgtccggactggtccgcgcaarcatssaactaaagggcaaakttttyggacaarccacaatthgtccttatdggacatctggcggggractcgtcctggctttttctccaaaaraactgggaartacattggaggaaasaaattggaraktggtcttggtaatkgataccratcccktggaggasaaccggctaataaaattcatggcact

SEQ ID NO: 61984 - DNA, 447 bp, Zea mays
  Clone ID: MRT4577_156525C.1
gagcaacttaggtcaggaattcttcagcagaagtcgtttatacataatcaacagcaattgcagcagcaaatccagatgctgactccacagcagcagcagcagcttatgctgcatgctcagcaaaatatgtcttcaccaacatctagtgatgtcgacaacagaagattgaggatgatgctaaatagaaatgctgttcttggccgggatgggcagacaaacagtggtagtgatattattccaaatattggctctcctagtcaaagtggtggcgatatagatatgcttataaagaaacttgctcagcagcagcaactattacaacagcaaagcaatagccaacagctcccacagcaacatcagcttcagcaacctgctgtctctagccagcaatctcaaagttcaaatcaacatcttcaacaagaaaagccaggaattggaagtatgcct

SEQ ID NO: 61985 - DNA, 323 bp, Zea mays
  Clone ID: MRT4577_156526C.1
cctttgtctggccgactaccccaaagccttctccgatctcaaggtgtaggagctcattaacggccgcctcgccatgtttttcatgttcggctttttcgtccaggccattgtcaccggcaaggtcccgctcttgtacctcgctgaccacattgttgaccctgtcaacaacaacgcatggtcctacgccaccatacttgttcccggcaactaaactcatcggttatgctatgcagcttcattgtctttcggatcggagagggtgtacttacgtggtttgattgatgctgctagatgcatgtgtgttttttgttttactttgcatt

SEQ ID NO: 61986 - DNA, 312 bp, Zea mays
  Clone ID: MRT4577_156527C.1
aattcggcacgaggccctcctgagctcctacgactcacggccacgcctcgagtccccccacccgctcctcgtcctccaccggccgcctcacgccgtcacctccgctcggcgagtctaggctccgaccccagccgccacgtgcgacctcccttatttctgactcctgagagatctgcggcgctcgtcatggggtgaccagatcggaccgctggtagatgctctccagctgaattctgcccagaactggtgtccgcggcagcgcacacggcgaaggccggggcgccacacggctgagggagtgctggccatgct

SEQ ID NO: 61987 - DNA, 188 bp, Zea mays
  unsure (1)..(188): unsure at all n locations
  Clone ID: MRT4577_156528C.1
atctaagcttncacatggagagtatgatccagatgattacctgtaaaaagcttatggatggggggcactctctcaagatgtgtgggtcttctattacagtctctgatcatggttatattcattactcaattcacaccacctatactcattcgaagtgggtcccctccaattacttccccctttattca

SEQ ID NO: 61988 - DNA, 276 bp, Zea mays
  Clone ID: MRT4577_156529C.1
catcgaattcgtcaacgctctattgccgattcgactgtcgtcgatggtgatagcttcgcgtgttgtcgagcccgtcgctttctctttctagtgctcgtgcggtttcctgctcgcctgcgcgccctctcggcttgcttggtcttaatccccatcgcgtcgtcaatcttgccggttatcgtcgttcgtcgtcgacctcgcttggccctatatcattatgggttatagttttgtgctgctgatgatggtgttaagtgttggtgggctcggccttcttat

SEQ ID NO: 61989 - DNA, 703 bp, Zea mays
  unsure (1)..(703): unsure at all n locations
  Clone ID: MRT4577_15652C.1
ctgccagtaggaagggcagnacacgcagcatggatatttcaacagattctgttgctaatgagttcttggatatgcttgcaatagagcatatcccatttgggcaaccctcagatagtgatcccgagtcaccgagggaacgactttggaagcagtttgaaaaggaagcactagcatctgacaaagctattcttggtttggactttgatgatggaattgaaggacctatttgtgagaatgttgtggaggatttcgatctctctgcaatgatacatgaggctgagctcgagcttcagaatggaagtcaacccattgataccaaatttcgagctaagtcgctggaagacgaagaaactgaggccttaatgcgtcaatttgggctaaatgagaagtccttccaatcttctcctcctgaaagtagaagtgggtttggtagccccattaacctcccaccatcaagaatcggaactaggagctagctgctactagtgctcatcaagcacactgtacgtacgtacgtatgtactcgatcgcgtggtcattcatcgaccatcatcgtttatatgctgtcacgcacagtgcgggacggccagtgttgcattattgtgtgttttatttcgcatggattaggatcgagccgcgccaatggtagattctacggaataaatataataacattgttatgattgatatcattatgttttag

SEQ ID NO: 61990 - DNA, 360 bp, Zea mays
  Clone ID: MRT4577_156530C.1
gggcaagcacaaccaacgggaagaatattcttaattctgcgtaccaacaaactcattcaaagggatctgcattccctatattcttgttcttcttattgaatacaattgttcagcttgtttattttgcttaaatgactgactccgttgattatgataaaaccctataatattttcaacatgacaagtttaacgtctccttcttttttatatttctcattttctaggacttgcccaacaattatcttaatcacattattctttattacaatgaatacaatctctttacaaatattctttacacttaattaaatactcttttaacaatacctttaaatttttcaaaatttttaaacttttttt

SEQ ID NO: 61991 - DNA, 316 bp, Zea mays
  Clone ID: MRT4577_156531C.1
cttcgtctaacttttggcgggttcttaattaagagcagcagcgcaagaggtccttcaagcgtgcgcgaggaaagcgctgtcgcggcgtgagatttttgtgtacatggcagtacacgtacaatgggcaccaaaacaagatttgcgaccatcatgttcgacgctgtgctgcacacctgtctggcgcaggaccccaacagcaaggtggtctgctagacctgctccaacacaaacaaagtggtggtgttccgcgagatcaccaccaacgcgagcgaggactaccacaagatcgtgcgcgtcacctgcctcttgatctgat

SEQ ID NO: 61992 - DNA, 781 bp, Zea mays
  Clone ID: MRT4577_156532C.1
ccggccggggttcctgggcgtgtccgaccttgccgggcgcccacgggccaccgccaccgccaccatcacaaggagaaacaaattcttctattttagctctagctcgctcgccatcccctgcccggctgctgcccccaacggaacgacggccagaggaagctaccagagtcgatcgatcgaagagagagagagagagagagcatggctggcaggagtttcctgattcggtcccccaaggaggaggagtccaacgccgccgtcagagaagctgtactgctgggagcaaagaacgccgcaatagctggtactgtggttgcagttcccacgttggttggctgccgtgtccttccttgggcaaaggcgaatctcaactacactgcacaagcactcattatatctgcagaagccagcagcagaaacaaacagcctgaaattttactggtttgtttgacagcctgtattgctggcttcttcatcactgctgacaaaaccattctacggaacgcacgacaaaacaccatcgggaagcttgacaagtcaacttgatgcagagatgtagctgaagctgaaaaggttctctggttgccgcggcggttgatagggtgtctattgccccatatgcagtggcaccatttctcttcgtggacaagtaatttttgggtgtttggctattcaaacccagagttgtgctgtaatgacttgtctaactgatggacccaactattgtatccagtttactccgaaattgatcagaataaaaggtggttctatatgttcgtag

SEQ ID NO: 61993 - DNA, 376 bp, Zea mays
  Clone ID: MRT4577_156533C.1
aaaaatcaaaatgaaatctgagggaaaaaaagaaaaatatttgccatttatccactcggtattgtgctataatgatgttaatttaatctggttggagatggcaaattatgtgcctgcaggagctgggccagtggactccgattctactgaaccgtttttctgttgagtttatgatctaaattctacatataaaggctggtttcccccgaaccccccttccaaactagttgaatggttgataaactgtctatttggctatactccgtgttgagtttgtgatctaaattctacatataaatgccgtgttggcgtcgctacactccggcccgaggggcggagccctccgcagtatatattattgaccctaattagggtt

SEQ ID NO: 61994 - DNA, 228 bp, Zea mays
  Clone ID: MRT4577_156534C.1
gcataataatgacaataatcgatcttgtccgaaggcctgaatatcacgcgcggcccccgtagcgtgtgaccgaaaaggcgctgcgcgcatcacgggaccgctgaattccatagcttcaacgctcgaaattttccgcgaaggtggaactggtaaaactacatttgtggagaggcatctcactggagcggtcgagaagaaatatgaacccaccattgaggtggaagtcca

SEQ ID NO: 61995 - DNA, 559 bp, Zea mays
  Clone ID: MRT4577_156535C.1
ttgcgctgaacagtggaggaagctagaagagtccagagagagagagagcatggccagcaggagcttcctgatccggtcccccaaggaggaggagtccaacgccgccgtcagagaggctgtactactgggagcaaagaacggtgcgatagctggtactgtggtggcggttcccacgttggttggctgccgtgttcttccttgggctaaggctaatctcaactacactgcacaagcactcatcatatccgcagcctgtatctctggcttcttcatcactgctgacaaaaccattctacggaatgcacgacaaaacaccattgggaagcttgacaagtcaacttgatgcagagatgtatctgagaaggttctctggttgatagggtaccttttgccccatatgcagtgtcaccatttccctttgtggacaagcaaattttcggtgtttagctactcaagccaaaggttgtgttgtaaagacatgctacctgatggacccaactattgtatccagtttactcccaatttgaatcagaataaaagatggtgctatgggttgcat

SEQ ID NO: 61996 - DNA, 761 bp, Zea mays
  Clone ID: MRT4577_156536C.1
cattgggtacctcgaggccggccggggttccgatccgtgtccgaccttgccactcgcccaccggccaccgccaccgccaccatcacaaggagaaacaaattcttctattttagctctagctcgctcgccatcccctgcccggctgctgcccccaacggaacgacggccagaggaagctaccagagtcgagagagagagagagagagagagagagagagagagagagagagcatggctggcaggagtttcctgattcggtcccccaaggaggaggagtccgacgccgccgtcagagaagctgtactgctgggagcaaagaacgccgcaatagctggtactgtggttgcagttcccacgttggttggctgccgtgtccttccttgggctaaggcgaatctcaactacactgcacaagcactcattatatctgcagcctgtattgctggcttcttcatcactgctgacaaaaccattctacggaacgcacgacaaaacaccatcgggaagcttgacaagtcaacctgatgcagagatgtagctgaagctgaaaaggttctctggttgccgcggcggttgatagggtgtcttttgccccatatgcagtggcaccatttctcttcgtggacaagtaatttttgggtgtttggctattcaaaccagaggttgttctgtaatgacttgtctaactgatggacccaactattgtatccagtttactccgaatttgaatcagaataaaaggtggttctatatgttcgtag

SEQ ID NO: 61997 - DNA, 895 bp, Zea mays
  Clone ID: MRT4577_156537C.1
cgttgctgtcggtcaccacaaggagaaacaaattcttctattctcgctctagcgcgctcgccatcccctgtacgacgagtgcgccggccgggacgacgtccagagtacaggttcgttccgatccgtgtccgaccttgccactcgcccaccggccaccgccaccatcacaaggagaaacaaattcttctattttagctctagctcgctcgccatcccctgcccggctgctgcccccaacggaacgacggccagaggaagctaccagagtcgatcgatcgagagagagagagagagagcatggctggcaggagtttcctgattcggtcccccaaggaggaggagtccaacgccgccgtcagagaagctgtactgctgggagcaaagaacgccgcaatagctggtactgtggttgcagttcccacgttggttggctgccgtgtccttccttgggctaagggcgaatctcaactacactgcacaagcactcattatatctgcagcctgtattgctggcttcttcatcactgctgacaaaaccattctacggaacgcacgacaaaacaccatcgggaagcttgacaagtcaacttgatgcagagatgtagctgaagctggaaaggttctctggttgccgcggcggttgatagggtgtctattgccccatatgcagtggcaccatttctcttcgtggacaagtaatttttgggtgtttggctattcaaaccagaggttgtgctgtaatgacttgtctaactgatggacccaactattgtatccagtttactccgaatttgaatcagaataaaaggtggttctatatgttcgtagaaaaaaaaaaaaaaaaagcgaaagcgcagcttgtcttaaaaaaaaaaaaaaaaaagccctctagggc

SEQ ID NO: 61998 - DNA, 265 bp, Zea mays
  unsure (1)..(265): unsure at all n locations
  Clone ID: MRT4577_156538C.1
ccttacttacatttttttttttttttnngncccaaggaggggtttttttaatcacgcgggggtaccaaaagacgagactggcgacgcacagacatgtgataggtgctcatgcaaatcgatccgtgtgacaacctccaggcacaatgcaggcccgcacacgaccttaataaatattgttcatcgaactcagcgaatttccctaacacgagaatctggggcggatctttgaggagccaggattgtacttggtctagacgctatacaa

SEQ ID NO: 61999 - DNA, 1876 bp, Zea mays
  Clone ID: MRT4577_156539C.1
tcaagcgaacttgagccagagagagaatctcgcaccgcagcaggaggggaccgagagagaagcgaactcgagaaagggattcaaggaggctgttgccgatggccatggcggcgcggctgctgcgagcaaccgaggtggcatctcgatttctatctgcttcccatggtttcgtccagcgagctgcatacacagctggtgggatagtcgatgttggccaaccaacaccccagtctcatccagagttattagctgatggagagatcacaccaggcatcacaaacgaggaatacatctctagaagaaaaaaacttttagaggtgctaccagagaagagcttggccattattgcttctgctgatcagcagatgatgactgatgtagtgccatatccattcagacagaatggtgattacctgtatattacaggttgtacacaacccggtggagtagcagttttgagtgaagaaacagggttctgcatgttcatgccagatacaaataaggaggatttagtttggcaaggtgaaactgctggagttgaggctgctgtggatttctttaaagcagataaagcatttccacttagtcagatgcaaaagatccttcctgaactgattgagcaatcaaaaggggtgtatcacaatgtgaatacaacatcttcttataagaacttggatgcctttcgtagggcatcactcaacaataaagtaaaagatcttacaaattacactgatgaattacggtgggtcaagtcgaaatcagaaattaagttgatgagggaatcagcatctattgtttctcagtctcttttacaaacaatgttgatgtcgaggacccacagagaggaaagccagttggcagctaagattgaatacgagtgcaaaatgagaggtgcccaaagaatggcgttccatcccgtagttggtggaggagcaaatggcagcattatacattattcaagaaacgatagaaaaatcaggacaggtgatcttctgctcatggatgttggctgcgagtatcatggctaccttagcgatctgactcgaacatggccaccctgtggcaggttttcacctgctcaggaagagctgtacagcctaatactggagacaaataaggagtgcataaagctctgtaaacccggcacaagcattaacgagatacacaatcattcggtaaagctgttgataaagggattccaagaactgaggatcctggagaaggggaaatccatccaatacaactacttgaacccaaccgcaataggccactcgttaggcatggatattcatgactccatgacactccccaaggacaagcccttggagcctggcgtcgtaataacgatcgagcccggggtgtacatcccggcggccccggtcctgaacgagcgcgcgccgagcaggtaccgcggtatggggatccggatcgaggacgaggtcctcatcaccgacgacggccacgaggtgctgacggcgtcggtgcccaaggaggtctcgcacctgaccaccctgatgaacatgggcaggggcggctcggctgcggacgcccatggccatgagctgcgagccgcctgcagctagctgaggcggctgcgtgcgtgaggtcatgcccgtggcggcggccggacctagtagacctggcacgacgtcgtggagcagaatctacgtgctctgcgaatacccgttgcatccattgattggactgttgtaatcacgggaacagatagcgaattgggcaggtgttttttttaaggtaatgggaggtgttatattctggacccttaccatggcgcgtcattgtatttgcatgcgcagttgtgttgtggccgcattcagcttctttatattgttttgtcgccgttcagaacggttag

SEQ ID NO: 62000 - DNA, 506 bp, Zea mays
  unsure (1)..(506): unsure at all n locations
  Clone ID: MRT4577_15653C.1
ggcccgcccagcccgctgctgcttctccgccgacggcgcggcatccccaccccgtcgtccctcctcgtcctcctccgcaccggcccttcgcctcctctccctccccacccgcacccccaaccccctcgtccgcctcctctaagccacccgcccttttcgctcgcctctccttcgtcttcgatcatgctcgatgccctggagggggggggggggtccgagctctcggcccgcgctgccgtcctccgccggatccatggcctgtggccgccccgtgccgccgcctgaggcatccgggntggatgccgttgcaggcccggggccggtgcagggtggtcggtctgaagctgctctggcgttggcagtctgccgctggggtggggctgcgcctgtaggaggcgttgggcgggggggtggcgcggtggcccccttggcgcggttgggccgaaccggcggggtgggttgctccgcctgggtgctccgtccttgggcgtttctgctgtgccgcg

SEQ ID NO: 62001 - DNA, 1799 bp, Zea mays
  Clone ID: MRT4577_156540C.1
agagaatctcgcaccacagcaggaggggaccgagagagaagcgaactcgagaaagggattcaaggaggctgttgccgatggccatggcggcgcggctgctgcgagcaaccgaggtggcatctcgatttctatctgcttcccatggtttcgtccagcgagctgcatacacagctggtgggatagtcgatgttggccaaccaacaccccagtctcatccagagttattagctgatggagagatcacaccaggcatcacaaacgaggaatacatctctagaagaaaaaaacttttagagacagaatggtgattacctgtatattacaggttgtacacaacccggtggagtagcagttttgagtgaagaaacagggttctgcatgttcatgccagatacaaataaggaggatttagtttggcaaggtgaaactgctggagttgaggctgctgtggatttctttaaagcagataaagcatttccacttagtcagatgcaaaagatccttcctgaactgattgagcaatcaaaaggggtgtatcacaatgtgaatacaacatcttcttataagaacttggatgcctttcgtagggcatcactcaacaataaagtaaaagatcttacaaattacactgatgaattacggtgggtcaagtcgaaatcagaaattaagttgatgagggaatcagcatctattgtttctcagtctcttttacaaacaatgttgatgtcgaggacccacagagaggaaagccagttggcagctaagattgaatacgagtgcaaaatgagaggtgcccaaagaatggcgttccatcccgtagttggtggaggagcaaatggcagcattatacattattcaagaaacgatagaaaaatcaggacaggtgatcttctgctcatggatgttggctgcgagtatcatggctaccttagcgatctgactcgaacatggccaccctgtggcaggttttcacctgctcaggaagagctgtacagcctaatactggagacaaataaggagtgcataaagctctgtaaacccggcacaagcattaacgagatacacaatcattcgacatatctcccaaaaaaatctatcaaatgcaggtaaagctgttgataaagggattccaagaactgaggatcctggagaaggggaaatccatccaatacaactacttgaacccaaccgcaataggccactcgttaggcatggatattcatgactccatgacactccccaaggacaagcccttggagcctggcgtcgtaataacgattgagcccggggtgtacatcccggcggccccggtcctgaacgagcgcgcgccgagcaggtaccgcggtatggggatccggatcgaggacgaggtcctcatcaccgacgacggccacgaggtgctgacggcgtcggtgcccaaggaggtctcgcacctgaccaccctgatgaacatgggcagcggcggctcggctgcggacgcccatggccatgagctgcgagccgcctgcagctagctgaggcggctgcgtgcgtgaggaggtcatgcccgtggcggcggccggacctagtagacctggcacgacgtcgtggagcagaatctacgtgctctgcgaataactagggatgtaatatggttcggaaaatatccgtccgaatccggattcgaagatggtgaacgctggttcggatggaattttcggatattcggactttttttcggataattgatacgaatacggatattctgttcagatatcgaatttgattacaatatgtctgatatccgtcagatatcgaat

SEQ ID NO: 62002 - DNA, 458 bp, Zea mays
  Clone ID: MRT4577_156541C.1
gggaaacaaggaagcaaagccccatggggggggaactaaaaacatggccacacgggggactggattccggtcctcctagacgacccatgtaacgaagtcagacagacgagacccccggggttacggggggatgtacaaaaaacacaattggggggggggggtaaaggaatccattttagaataaacctagggcgggaaagaacaaacgaggggaacagagggtccgggccaaattattagggggggtcccccctggccccgccacataaaataagggaaaaacagggggttcctgcccttttccaaaaagtaaggcttaaccgaggggactccggggggacctttaaaggtactgggccttgccctccctttgaacctaaaacctgggggactccatgccatcggaccacttgggggggctgtatggagcttttttaacaaccctgtcaaggggtttt

SEQ ID NO: 62003 - DNA, 404 bp, Zea mays
  Clone ID: MRT4577_156542C.1
tgcctatatgcgtgacactggcgaggcgctttattatgcctggaaaggcaccaacatcgcccataaaactttattatagaactatatctcataagaattctaacagaggacaccgccaatgctgggttgttgccagaacactgctgtgtttgtcaaagcaagttggttgaatggcagcaattgctgcagatgccagacggtgccagcgttaggcgcatcgtgctggttgaacggcaacaactgcgcttgctgcaacaaggcatcagggctcacaccagctagctggctgaacggtaggacctgttgctgctgtaatacgctagagagctcattgctgctcttcggttcgttggttgatattgctgtcggtaggctatcccgatctggctgaatgggaggtgttg

SEQ ID NO: 62004 - DNA, 553 bp, Zea mays
  Clone ID: MRT4577_156543C.1
gaggtcggttttgtttctcttttggttggtgggcgatcgaccaggatgtaatatattagcaaatggacggtattgatttacataaggttggaggtatggattttttataatctcggatgcctgtaaacaaaaatgtaacagatactctaagaatctaataaatgtgcgtgacaaacaagtattgcagttgcaggggaggtatatctctttgcttagtagcttacagtaggccgatgttcaggactcttcctcaacatgcttttgataagtgttttcatagatgaagaatagaaggtaggcaaagggccaatggaggagcgatttatcttacttatcagtccagccatatcaaaagccttgaaagcaggtcgatgagcagccatctcatacatacaacatccaagagaccatatatctgacttgaatccatagggaatgtctgtaagcaactctgggcacatataatttggggttcccacaaccgaagaggctagatcatctgcctttaaaggcttggccaggccaaaatctccaagacgaatatccctggggc

SEQ ID NO: 62005 - DNA, 306 bp, Zea mays
  Clone ID: MRT4577_156544C.1
tgttgatccaaggagcattctgcattacaaaatcaatgcatatacgaagaagtaatagaggcatgtgcgcttcatgttgacatattggcaatgaccagaggagatatgtcacatattggagagaaaggtaccaacttatctggtggacaaagagctcgtctagcattggcaagggctttgtaccacaattctgatgtatacttgtttgatgacatccttagcgcggttgactcccaagttgcttcgtgcatcctggaaaaggctattatgggggcaccaactaatgcagaaaacaagattactatg

SEQ ID NO: 62006 - DNA, 1636 bp, Zea mays
  unsure (1)..(1636): unsure at all n locations
  Clone ID: MRT4577_156545C.1
aattcggcacgaggtgttgttgttgttgttgtacatcaaggttcagctttgagtctttacctatttgccttagtgatagatgaggtcatgagggatataaaaggagatatcctttggtgtatgattttcactgacgatgtagttctagtagatgaaagccgggaaggagtaaatagaaagctagagttatagcgttagaccctagagtcaaaaggatttagaattagcaggaccaaaaccgagtatatgagatgtgactgtggtactacaattagtgaggatggagatgtaagtttgggagaccaggtagtaccaaagaaggacaccttccgttatttgggatcgatgctacagagagatggtgatattgatgaagatgttagccatagaatcaaaatggggtggatgaaatgacgtcaagcatcgagagtcctatgcaacaagagagtgccacagaagttgaaaggcaagttttacatgacaacaattaggcctgctatgttatatggggcttgagtgttgggctactaagagtcgacatatccaacaactaagtgtcgcagagatgcgtatgntgcgtgaggcaacatgtcaggcgattaggcatgtgtgctatatggggctgagtgttggcctactaagagacgacatatccaacaactaagtgcttaccctaacttgcttgggactaaaagactatgttgatattgatgttgtgatggtgtggaggcaacacaacaagagtggacccaacatatgactttagtgatgtttgtttagtggccagaagactgtgcaggtctatattccttgttgataagttcccttctgtgaagcagactgatctatcatgcctaaccactcgccttctccatcgcagcttgttatatttctgcttgctttagtgtctgtaccttggatgttgattccaaaacctcttcttttgaagaaacaaaatcagcatagtactcgtatatttttattactattatactatttacagggtagccgtggaatatgtgttgcaattttcctgtagcattggaagaggagcattttggtgcttctgccggtttctagttgttggtttgcaaccaaccggtaacttttattgtcacctattttacccaaaatagcttgacatgtcatttgatggttttcaagaaatgtgttgtggtttcgaaagaatgataatgtcatataaaaaaatcacatatctatgatttttagtccggatagctgccttcctagcattacctatttattgaaaaattatagcagtctttcaaattcacatgataataacaaagtagtatcaatgaactaaataatgtgtccacctgtaagcaaaagatgtctggtttgctggagcacttgtctcgggatacacagaggcaaagtttggatcatgatattggtccaactattgctcatttcttgaaatgtttcatgggaacatttcttggaaagtttggatcatgatattggtccagctattgtttgatgagatagcaaatgttcgagaacggttgttcgacttcttggtgaatgagatgatagacattggtggatcatgcagggttgaaggagcttcatataaactaacctagcgtggctggttagtttttgtacagga

SEQ ID NO: 62007 - DNA, 537 bp, Zea mays
  Clone ID: MRT4577_156546C.1
gtgatgggatactctgcagaaagttcgccctctagcccgtggtcccgcggcccgaggtacaaagcttttttttttttttttttttttttttttttttttatttttttttttttttttttttaagggcgatttccatctcaccggggggcgcgcccaggggggccggggggggcacaaagcggggggggggcaagggaaaaggggggggcggggaaaaaaagaaaggcgggcaaaaggggaaacaggggcggggccggaaacaaaaagagccaaagcccaaaaaaaaaaaaaaagagagcgaacaaaaaaaaaaaggaaggggcgaacagacaaaaaaagaaaaaaaaaaccaggcgggccaggagcaaaaaggacccgcccaaaaaaaaaaaaaaggcggcccgcaaaaaagaaaaaaagcccccgcacgggggagggaggggctgggcaaggacgccccccccccgccagccgaatcagcgcactgagggggggggttccggggagccggagaagctggttttcacgcaagaaaga

SEQ ID NO: 62008 - DNA, 414 bp, Zea mays
  Clone ID: MRT4577_156547C.1
tcggcgccgctcaaggccatcgacttcggcctgtccgtcttcatcgaagaaggcaaagtttacaaggacgtggtggggagcgcgtactacgtggcgcccgaggtgttgcgccggaactacggcagggagatcgacgtctggagtgctggcgtgatcctatacatccttctatgcgggtcgccgcactttctgggaagaaacgcagaaaggcatatttgacgcaatattggccgacgagctcgatctggtctcctccccgtggccctccatatctgaaagcgcgaaggatctcattagaaaaatgctgaacaaggaccctcagaggcgcattacggcttcacaggccctagaacatccatggctcaaaggtggtgcacctgacaggcctatcgacagcgcggtcctgtcaagaat

SEQ ID NO: 62009 - DNA, 359 bp, Zea mays
  Clone ID: MRT4577_156548C.1
cccacgcgtccgaataaaaatacacaaaaaattataattaaaaaaaaaaaacaaaaataaaaaagaaagcaaaaaacataaaataaaaataacaataaaaacaaaaaaaaagcaaataaaaaaaatacatcacctttgtcacttccaataatgagctatcagttcaaactttatcataactcctatcgattctcaatatatatgcccaaatccatgcgagacgctagtgattataatttctacatcttcttactacctagacttgctacaacttacctgcctctcttcaaagagttttttgttaacagatttgaagtctccctggttctgcctgaatttacttctgtaacgctttccat

SEQ ID NO: 62010 - DNA, 408 bp, Zea mays
  unsure (1)..(408): unsure at all n locations
  Clone ID: MRT4577_156549C.1
aaagagggccganccaccccacgccgcccgcccacgcggaccgctacttttcctcggcaggcagggaggaggacgtggggccgacttcctccaataccatcgacggcatcatgaacggggtcatcaaggagaagctcaagatcatccccaaggacgtcaggtgggtggaggtctccaatgccatctactacacgctggtcaacgacttcatgaagccacgaattgacgatgcaagcaagctactctatatgaattaagctgatgtacgtggagtttttgttaaccaaatgctcctatccttttttttggtgtgtgtgtgttcattttcgcaaattgatgagatgctattgtatggtgtgaatgttactgtatacaacaggcaggtcagtatctcccttttatacaacg

SEQ ID NO: 62011 - DNA, 306 bp, Zea mays
  Clone ID: MRT4577_15654C.1
gccggccaggttcgggttagcagtccgtataaatggactattctatttgatatatatgatagagggctatatccaaccctttttttttatttagcaggcagaaaaaaaaaaaaaaaaaaatgaaagaaaagcatagcctatccccctttcaaaaccgtttgtctcttgtttgtctcggcgaatccccggtttagggaactttcttagaaagttggatttgcaccctcgaagcactctttttttttgagtcgggtgcaaaggaaggataagataatcaaataaaaaaaaaaaaaaaaaaggccccta

SEQ ID NO: 62012 - DNA, 253 bp, Zea mays
  Clone ID: MRT4577_156550C.1
acgtaagctcggaattcggctcgagcaacagaaacgaccaccttttttatccggagaccttggcctgacggtggggggagctatatgaccggtccgctgggttcaccgcaggaaaccagaatcagtgaggccggggacctatggctctcatgctagtgcgcagcccgcctttccctagtggcgcacgacgatccggttgtttctgctcaatggctgcacgaccacctagggacgcctggcgttaaggtaaaaa

SEQ ID NO: 62013 - DNA, 177 bp, Zea mays
  Clone ID: MRT4577_156551C.1
caagaagtaaggatagaactggtaagatatggaattagagaagaatgaatactccttagaaagaatttgaagatctgcctaatcactacgccgagacaaatgcagtatttagctcagacgagcagcttattttttcaggaacatctattgaaaaagatggagacatagggggattac

SEQ ID NO: 62014 - DNA, 682 bp, Zea mays
  Clone ID: MRT4577_156552C.1
ccggccgggatcgaacacaaccaaccaggaatcataggcccagccgtgcgacggtcggtgcccagccccagcatcaggaccgtccgctccgccgccgtcgccttttcatgcctcgtgtcgtctgcgggtccggtcccggtggtctcggtccgaccccaacgaagggcgaggagagaggaagaggcgagatgccgcaccgagcgcggccgatgacggggctgctggtgttcatgggcgtcaacctcgcgctcttcaacaccatcactcccgtctacgacttcgtctgcttcctcccccactgggaacgaaggagagaacaccgccgaagggaacttgaaggtctgcaagcgaagggttctgtagaaactactaactgaactctctcctaggtaaggaccaagcttcccaattcctctgttccaaatttttattcgttcttgcagatgcaagaaacgtgctctcatgattcctgaagcaattaaactcataaccttttctttgtcacatatagaccattcttttttgccgctagttgtctcaagtatcaagatgttcgcaatagctactcttttttttttatgtagagaaacatccccttgtaccttgtgatgatttgagatatgttttgaccatttctattttctcatttttattgataaaataacaccattgtggttctgtc

SEQ ID NO: 62015 - DNA, 331 bp, Zea mays
  Clone ID: MRT4577_156553C.1
acccaaggggccattcattagaatagttttacttaatgaaaaaggaaacctatgttaggacctattttgctgaaaaatttcattcataagggaccaaaccaaaaacaccggacctaaccaacattaccacgctaaacacactgtatggaaacaaggtaaatcgatgccaaaaccatacacgtccacaccacagtcacttttaactacgtacctgtctacgtacgagacacacaccacacaccctgagagacgccagccttaactagaaaaattctgaacagaacaatgcggtattatactgccatatacacgcgggagaaaataccccgtc

SEQ ID NO: 62016 - DNA, 302 bp, Zea mays
  unsure (1)..(302): unsure at all n locations
  Clone ID: MRT4577_156554C.1
aaagcggaggagaagaaacnnacgagganncccctagnaacggcgagcgaaccgggagcagcccagcnngagaaacgggcggccncgccgcccgaanngnagncnggaaaggcggggggggggggggaccnnttttttttctctgnaaagggacccctgggagggtgagagctccgtcggcccggaccctgccccaccacgaggcgccgtcaacgagtngggttgtttgggaatgcaggccanttcgggcggtaaactccgttcaaggctaagtacgggcgagagaccgacggggaacatgt

SEQ ID NO: 62017 - DNA, 198 bp, Zea mays
  Clone ID: MRT4577_156555C.1
aatggacatgttgccaccacttttaaataaatagaggaattgaaaaatgatgcgagctactttcggcgtcgggggaagccaccgcatcaccgtgctgtgctgcggcggcctcgtcctcctcctactcccttctgcccttattataggccgcctctccctttatccatttttcaccaccctattcccacttcatactat

SEQ ID NO: 62018 - DNA, 591 bp, Zea mays
  Clone ID: MRT4577_156556C.1
cccagccgtccgattgcaacagtatgcatgttcttggcgggaaagttgaagaacacccagagcctctgaggatgtcatacttctttcatatgagatcatccacaaaaggatcctgctgcagttcaacgaataaaacagaaggaagtatatgaacaacaaaaggaacttattttactcggggaacgtgttgtgcttgtgacacttggttttgatttgaatgtgaaccatccttacaagcccttggttgaagcaataaaaatattcaaggttgctcaaaatgcacttgctcaagttgcctggaattttgtcaatgatggaggttagcaaccagatgttggaactgtatgagcaaaaccgtgttcaaccaccaccatcacaaggcaatgatactgaaggcagttctgcaagtgttgcgaatcaacgtgttcctggtaaagttccaggagtagctgatgaacctcctgcccatgaccataaccaagcacccagaccatcgagccagcagaacatgctagaccaccgtggctatgaccaccctcacccagataagcaaaactataggatacctccaaatgatgcaagggatggcac

SEQ ID NO: 62019 - DNA, 301 bp, Zea mays
  Clone ID: MRT4577_156557C.1
aagaatgaaacaaggcagtttccattcaagtgggactctacatacaccattgattgtgcaccttctacatgttagcataccagtattctgaataacgtcttgcggagcactgtcacagttcatacaaacccactgatcaagccggggtatcacctgtagcattgttaccaatctcacatggcacagtataattcaaaaaacgatttcacatggaggcacatcgggccatgctgctaccaaccagccctggagcccttttggacccggggggggggggggggttctcaatctctgtctcctt

SEQ ID NO: 62020 - DNA, 2243 bp, Zea mays
  Clone ID: MRT4577_156558C.1
ttgcgcatttgtttagttaggccttgcgagtcttgcaattttttatgggtttttttgcccccatgatgtttttttggtccttttcttcacttttgacatatttctgctttgaaagatcatttttatgaattataccatcaaagctacatgcttatgccttatgtttatggttactcctttcacccaggagtccgggctcggtgcctggcgttagggtttcggactcgaggccaagttcatctccggacgagcataccgtgagccccaacgctccaggtggtcagcttcacttccgagcgcccctctcccgacagccgtctcctcctcaccgctgcttcatcacctagccgtcgccacccatcgcctacagcgacagccgtcttccgtcacagcggagcgcccctcagatccaagggacgctgcacgagcgcaagagcaggttgttgagaaggggaatataatcatggatatcatgcagactagtgactcttcacatcatggaattgtagaaaatagcccgtacagaattccatatgacagacatgcagaaggtggtcaacttggtgcttcatggtattttagtagaaaagaaatagaggagaattccctttcgaggagagacggcattgatctgaagaaagagtcttatcttcgcaagtcatattgcacatttctgcaggatttggggatgagacttaaagtacctcaagtgacaattgctactgctatagtgttctgtcatcggttctttcttcgtcaatcgcatgccaaaaatgacagacggacaattgcaacagtatgcatgttcttggcgggaaaagttgaagaaacacccagacctctgaaggatgtcatacttctttcatatgagatcatccacaaaaaggatcctgctgcagttcaacgaataaaacagaaggaagtatatgaacaacaaaaggaacttattttactcggggaacgtgttgtgcttgtgacacttggttttgatttgaatgtgaaccatccttacaagcccttggttgaagcaataaaaatattcaaggttgctcaaaatgcacttgctcaagttgcctggaattttgtcaatgatgggctccgcacttcactttgcctgcaatttaaaccgcaccatattgcggctggtgcaatcttcctcgctgcgaagtttctcaaagtcaagcttccatcagatggcgagaaggtctggtggcaagagtttgatgtaactccgtggcagctggaagaggttagcaaccagatgttggaactgtatgagcaaaaccgtgttcaaccaccaccatcacaaggcaatgatactgaaggcagttctgcaagtgttgcgaatcaacgtgttcctggtaaagttccaggagtagctgatgaacctcctgcccatgaccataaccaagcacccagaccatcgagccagcagaacatgttagaccaccgtggctatgaccaccctcacccagataagcaaaactataggatacctccaaatgatgcaagggatggcactgctaatagcaacgaaggtcccaatgtgtcgtcttcaatgatggatgcgatgaagaaggtaaacaaggataaggtgaaagcggcactggagaagcgtaggaaatcgaaaggtgatttttcaagaaaggtcgatgtgatggatgacgatgacctcattgagagggagctggaacatggcgtggagttggctgccgaggatgagaaggtcaagcaggagagaaagcagagctggcctcatcttgcacaccaccagagcaccaaccgtgagaataccgaagagggtgagctgtccatggacagtcaagaataccgttctccggagcatgacaatcggaagagaaaggatgtgcgtgagtaccggaactacgatcgtgacgaaagggaccttaaaaggctaagatcatgagagttgcacttttgtcggagtctcatgttgttcgtgccataacatgatgtggaacctctatctttctgtcacaggtgtacttgatgcttatttggtatgctgggggatttgaactgttacatatataagtttataagatggtttccccacggtcatgtatgtgtttagccatgttggcaattgagatggcgctgtgccttgagtattccacaggtttatgctggaaacaacatttaaggaagctgcgtcctacgggtatctgaaatgtatgtattttgattccaaggtttcctcaactctaatggtagcctgcgtt

SEQ ID NO: 62021 - DNA, 623 bp, Zea mays
  Clone ID: MRT4577_156559C.1
cattgggtacctcgaggccggccgggacccctatttaccagcgggccacgccttctccctctcatctccccgctcactcccgtgcccatcccatcgtcgatggtcttccgcctcgacgtcgacatatccatcgcagcgcctgatgaatgcccttccccggaacgccaccgtcgccacgaccggatcgtcgccctccaccgaggcctctccaccaacgcgacgcgaaggatcgcacactcactcgttcccgtgacgccggcagggagagagacactcccgctgagatcagaacgctggaataaaatgtccaggagggagcaaataaacatgtaaaccagctagctgagcagagcaaggtacccgatctcgaagatgtcagggattcaagctgagaatcgggtgataggaaaaaatacttcggtgatgcgtgcccacacgacaacgaatactggctgacatggtgcgagctaagcactgaggagctactcatagtaatcgatggacacctaccgagtacatggaatccacgccatgatgacattagcaaacggcgcagaatgagagatgacggaggatgataatggcggcattaaagtaccctacgtcaccatgacagtatgacc

SEQ ID NO: 62022 - DNA, 403 bp, Zea mays
  Clone ID: MRT4577_15655C.1
gaatggaactgaattaacatagcgaaacccgataaccggaagtgtgataccactaaccctatacacaggcatacacccccccccaagcctcgcaggcgcaaggcaaacagcaacgcgaaaggtgtaaaacattcctcttttccctataaacatgaggcatgtatgaatacagaatctctacatctgcaacgatgcaaagaaattgtggccaacacccaagacagatgctggcgccagccattataaaaatgggcctgagagctatcttcaaatcagcgaaccgcgtccggctatgcaaactaactggggggcacccggtaaaatgccatcgctgtgtatctcttaaagggaggtccttccgaatcagagggtctctcgtgaggaaaatcacaaggacaaggac

SEQ ID NO: 62023 - DNA, 211 bp, Zea mays
  Clone ID: MRT4577_156560C.1
tcatgcgctacagagtctcgtgcgggctgctcgagagcggaaggtatggaagctaccgaaggatgctcgtgagcggtggtattccgttgttggggacacgcactatcggtggtctttatcgtacggtggtagtcaaggtgaggctcgcagcaatgaccggtctcgacccgaagcagatcatcaactggttcatcaaccataggaagaggca

SEQ ID NO: 62024 - DNA, 284 bp, Zea mays
  Clone ID: MRT4577_156561C.1
gcctgctggcaccgccgcgcactaaccgccgcgacccacccctccgttttgttccaccgacagtgggcgaaaaagcctctagagctgctgctaatgccttcatctatttcgatgcttcaaatgctttcaaactagacgagaacacaggaaatatgaatgacttctctggaaagacacggctatagctagcgttgcctgacgctggacttgatgctacctttatgatctggacatcatgatccctatgtagaactttggagaagctgcagctgcggaaacgcatg

SEQ ID NO: 62025 - DNA, 321 bp, Zea mays
  unsure (1)..(321): unsure at all n locations
  Clone ID: MRT4577_156562C.1
aacatttctcgacacatttttacaataaaaattcggaaaaaacaggggttttttgctacctcttagaacaancccaaaacaaacttaaccatcaatcgacaaaacataactcccaattgttgactaacactcccaacttacgctactaccccactatatctaaaccgccaaatcaaatattcatggccactattttactcttccaaaccggaaaaaaaacctcacaactataatcacctaccatcactacgaccaaaaaaaacctcttaaccacactacctagcttccattgaaccttcccctacaagcaatactaaaaat

SEQ ID NO: 62026 - DNA, 680 bp, Zea mays
  Clone ID: MRT4577_156563C.1
aatacctaccctcacatcagccgtatccacaacctgcctctctcgtaccctggcgccgtccgcgccaggatggcggatctacggcgaggacggagaaggatgtcaacccgcactagatcggcaaggcctactccgcccacctcaagcgctccgcaaaaatgaagatccctgagtgatctgacattgtgaagactgcgacgtcctaggagcttcctccttatgatactgactgacactacatcacgactgcatccattgcgaggaacatctacctaaggcgatgcatctccgtgggtggctttcaaaagatctacggaggacgccagaggaatggctcccgtccaccacacttctgcaagagcagaggtgctggtgcacgcaacatcctgcaggaactgcacattatgggcatcgtccatgcccatcccaaaggggcacgcctcatcaccaaccagcgaaggcgtgatctgcaccaagtgcctgcaacgctacctgttgaagcgcgagcacagccatctctgctttcaaaggggtcatgtgtgaggcccgagaagactgagctctatatgctctttagcatccagcatgttcgagactcgaagctgtatccacgtgtatagcatgccagatatggaaactcactatgtatcccgagtatctgactgtgaattcaagactca

SEQ ID NO: 62027 - DNA, 189 bp, Zea mays
  Clone ID: MRT4577_156564C.1
cccaagataagggaaaaacatagccataaaaataactagatagcctaaaccaaccaattaaacaaactcaatccagtaaacaaagggggaattgttgaagggatactgccatcataggaagagctgaaacaagaccccagaccagacaaaagaacacatagaacgggaggacaaaacatgagagaaaaa

SEQ ID NO: 62028 - DNA, 316 bp, Zea mays
  Clone ID: MRT4577_156565C.1
ggacattaaaggccccctattttttgaaaccatcactttagcaaatcccacaaacagaagttaaaagggccccagctttgccggggtgggattttttatgttgcagcaaaaaaggatacattccccgtttgggggggcgattcagcttcctatttcccaggtgggggacgggaaaaccagggatcactcccatgctttaagggcaccacccctcccaattgccttgatgataggctggttactggggggcggcactgcactttttgggctccgcccgggattttggggtcctcctcgtacgcctcctgggcagggg

SEQ ID NO: 62029 - DNA, 183 bp, Zea mays
  Clone ID: MRT4577_156566C.1
tcgtccacgcgttcggtggagactgcggccttcctgaacgcgtgcgggctctgcaaacgccgggcttgggcctggctacaaacctttatctacaagggctaagtggcattctgccagcaggagtgccgggagaagcacatctgagtacgacaacctctacttgcgcatggagcatacctgctt

SEQ ID NO: 62030 - DNA, 912 bp, Zea mays
  Clone ID: MRT4577_156567C.1
atgagaagttcttgtctcaatttcgtgcgatactcgatgaagttgaggcatgaatcaagacgcaccgaaaccaacggagacaaccaccgagacgttaaggaaaaggaagcagagcgatcggtaagaggtgatagaggacttaacaagtttccatacatctcatataaaatcttagatgtgagcccaaaaggtcagcccctagcactagaagaggcattgcctaagttttggaatgcacttgagttcttagttagagataatgttgacatcacaatccgacagtggagagatgtgtcagatgatgtcaagaatcaaatgtggaataagctattaacgagaaactggaggcctgagatgaatacaaagtttgcaaagaaaggcatgaacccaacaaaaaactataaaatctcaatgacaactccacagatgcaaataattctagtagctcaaccgccgtcttccaccgatcgtacgactgttccaagatctattgcgccaacaggaaataagaaagtagccacaggccttgcgatcccaggtcgcaagttccatggaagcgacattccagaagaatattgcagggtagaagtaacgacggtcgttcatggatccgaggacgacatgctaaacatccttgggaacgaagtttttccctcccaccatcgttctgcactcagaaatatccttacggatgagttccgttcgttaacgctgcctggcatgtgggacctgcggcctgacatgtgggacccatcccttttctcgccccgaatcagaggaaatagagccgacagcagattaccagatccccgtgctctcgttttccccagcagcacatctccgaccaaccccgctgtttcctcccgtctgcccgccgacacgctcggcatggctttgctgcagctgtgctag

SEQ ID NO: 62031 - DNA, 291 bp, Zea mays
  Clone ID: MRT4577_156568C.1
atccggggcggcccaagccttccgtgcagccgtcccgctttacaaaagaggttcgcctggggaaaggcaaaaatggccaactggaggggggtggcaaaaaaggccgggagggttttaacaccaaaaaggcagccttgggttccaaagcccggtttattggtcaggggccccaccatggaaaccgaacctcccatccaatatgatgtgggcaaggatctcaaggggggatactaggtggttgggtccatttacctgcagaacccagttctacatttgtgttcttctagggcg

SEQ ID NO: 62032 - DNA, 322 bp, Zea mays
  unsure (1)..(322): unsure at all n locations
  Clone ID: MRT4577_156569C.1
ggtgggtgggggttttttttttttttngataaaaaaccaaggtttttcctgtgcaccttttccattttaaggtcgatcgtttttttttcccttccttttaaaaaaaaaaaaaaatggccacaaaaaaaaaggcaacctatttttttttaaaagaaacaaaaacttacttgcttccaacaccaaacaaggtttttatttggggtattccttttgggaaaattaggaaaaaaaaccctaaaaccttttatcaatgggggaaaattatcagttttaccatggaacctccccccacaatgctgaacaagcattaacaaaaacaaaa

SEQ ID NO: 62033 - DNA, 306 bp, Zea mays
  Clone ID: MRT4577_15656C.1
atgacggcgccgccgcgggagccgatttctcgtcgtcatgctcgaggctatggagaagacggggcactgattgtccatctcaggatatgcggtctggattggccaaagcgtactcctgtagcccgattcaatcgaggtggttggatctcaaagggacgggcaaaaataggaacaatgatactgtttcggtgtattgagtctgggccctcggatcgtgatctcacggctcgagaatctggtgtagccacccggccaagctcccgcgagcgtggctcagggtgctcaggcatccaatcagatggataa

SEQ ID NO: 62034 - DNA, 778 bp, Zea mays
  Clone ID: MRT4577_156570C.1
agtgcaattcgatctgaatgcccctcgtgacctaccgctaccaggccctaaggaatccctcgccgccgccatcacctcctccccgcacgccgccgaccctcgacgaccccacgcgctcgccgtcgtctctggtctcgccgccaatggctacctcgcgtccctcctcgtcgcccgctacgcccgcctcggcgaacccgatgccgcgcgcggggtcttcgacgccgccgcctcctccccctacgcgacgccgcccaagccgctcctctacaacgccatgctccgtggctacctctccctgggcctcccgcgcgaggccgttgcgctcctccgcgccatgcttgcgtccggctcctgcgcgcccgaccgccacacgtaccacctcgccgccacggcctgcgcgcgcgccccggaccttggcctaggccgccgcttcgaggctgccgccgcggcatgtgggctcgcggcgtccgacctcctggtggccactgcactcatcgggatgcatgccgagcccggggacatgggcgccgccgcagggtcgacggaatgccttgccgggacgctgtggcgtggaacgccgtgattggtgggtatgcgcgcgcggggcacctgtctgaggctgtggagctgtttggcatgatgaggtctgcggttggagcgtgcccaactgaggccacgcttgagagcttggtttctggttatgccgtgttcggttcttggaagggccatggcatgatgcacgccgctgtgattaagtctggcttccagcgcagctctt

SEQ ID NO: 62035 - DNA, 973 bp, Zea mays
  Clone ID: MRT4577_156571C.1
tgcattgcaagccctgaaaactgacacctttaccatccgcagcatattctctaccggcagaaagaacagttcagtgacggcgttggctacaactggatcgatggccttaaatccttcactgaacagcaggtgacggatgagatgatgaacaacgccgcccagatgttcccctacaacacgcccgtcaacaaggaggcctactactaccggatgatattcgagaggctcttccctcaggtgacgttactcagccagcccagcctatacaacgatgtgtgtttgcacttgcagggagtcggtgcggccgaatcgtgagattgattgcctttgcaggactcggcgagggagacggtgccgtggggcccgagcatcgcctgcagcacgcccgcggccatcgagtgggtggagcagtggaaggcctccaacgacccctccggccgcttcatctcctcccacgactccgccgccaccgaccacaccggcggtaagccggcggtggccaacggcggcggccacggcgcggcgaacggcacggtcaacggcaaggacgtcgcagtcgcgatcgcggtctgacgagagtacgtgctcgcgcacctccctgctttctaccgggctgcatcctgcagcagtgcactgtgcgagcacagccgatcagcgccaaataaactggaggataagaacgactggtaagtgtgtgtgtgtgtcgtgcgtgcccaccggccatatcccggtgcggcagcacgtgctattgttacgtgttgtactgccaccagcgtacgtgtctgtgtgtctcgatcatatctgtacgtttttagatttagaagaaaaaaaaaggtatgtccgtgtctgtatgtctggatcatatctgtacgttcttagatttagaagaaagaagaaaaacattatatacgtacgtccatgtctctatgtctggatcatatctgatttccataaaaagtataaatgtccccgt

SEQ ID NO: 62036 - DNA, 333 bp, Zea mays
  Clone ID: MRT4577_156572C.1
ccggccgggaattcttacatatcctttctgcgattactgccagagatagctgtcaaaatgcttccttcatttcttctctcatcgttgctgtgcctttccacagtctcagctctccccaacccaattctggcggagcgtgcagcctgtgactgcaccggcacacgtgatggtggttccaactccaaggaatacatctgtcgtgacgctcgacttggccctttaaaattgcccagaaaactgcctttgagcacctttgtcgaaagctacaatcgtttcggaggacagacaccagccgagggactgcagagatgcaccgatgacagcggagggtac

SEQ ID NO: 62037 - DNA, 324 bp, Zea mays
  unsure (1)..(324): unsure at all n locations
  Clone ID: MRT4577_156573C.1
ttccttaagcagtggtaacaacgcagagtacgcgggatttgtttgtgttgcttagcaggtgttttgcattgcgccagtgctatcatgtgtaatctaatttagtaattgttgtttcatagacaaaacatgatttgaagaatcttgataggttttgttgttccaaccgagggatgaatcattgtttgtcctgtatcgagtgttacaggctttctggtttgctaaaaaaaaaaaaaaaaaaaaaaaaaaaaaaaaaaaaaatattaataaaaaaaaaattattatataaaaaaaaaaaaaaaantactttgcgttgttaccactgtt

SEQ ID NO: 62038 - DNA, 148 bp, Zea mays
  unsure (1)..(148): unsure at all n locations
  Clone ID: MRT4577_156574C.1
acccacgcgtccgggacgatgggcagctcacactctgnccttaagcctgccacgtccaacacacacncggggccagggaccttttacaacactattgtctcccacacatttcccaagctgaatcgcgcttgctacaacatcgatacta

SEQ ID NO: 62039 - DNA, 256 bp, Zea mays
  Clone ID: MRT4577_156575C.1
ctagatcgcgagcggctgccctttttttttttttttgaaaaaacagtgtcttgaggacttccattatcctccctgaaaaaacgggtttctaaaagggttcccttctgcgagcgtctgccctgtgtaccgcaccgatcatttcacgtagtgggggaaaaatataattttgtcaactgggcaccgtccaaacggggacggcgggtatggactcccacaattccctcaacggcgggccgccctgggggttcatcagggc

SEQ ID NO: 62040 - DNA, 647 bp, Zea mays
  Clone ID: MRT4577_156576C.1
ttcctttttttttttttttttttttttttttttttttttttttttgggggggggggggtttttttttttttttttttctttttgtgtgttgttttttccttttgttggaaatggccaccatctccttaacatagcaaccccttcctccataaaaaaacccccaacaccaagggaaaaatccccccccccaacccccccggggggcgcggggcccccccccacgaaaagaaaccaaaacctattttttgcatacaaagaaaaatttatgaaatacaagggccgggacttaaacccaaaaccccggaacggcatggcaaacccccccccccccaaccgggacgcccccagcccaccaaggggggaaaaaaacccaaaaggggaaacaaacccccggaccatccttccacccgccggggcgacccactgctgcaccgcaaaagccacgggcgggcccgaaaactcacccccccaacccaaacgaagttaagccaaccccccccccccaagggcggggggggcccccccgggccccccccccccgaaccgggaaccgggaccccgaaaagagcccccgttttgatcccttcccccccccccaaaaaacaaccccccccgcgcgcggattccccccaaattttaggggggca

SEQ ID NO: 62041 - DNA, 395 bp, Zea mays
  Clone ID: MRT4577_156577C.1
tttttccgttttttccccgctaaccaaagtttatataaattaaaaaaccaatccgcctgggaatggttccgccccataaatccgccccaaacgaacaaagccttaataagaagggattttttcggaaaagagattggggtttatgggggtttccctactagctccggaaaaacattgcagggggggttatgactcagctcccattcaacttaacaggggtaatgctgaccccgttttgaaagaagggccccagcaaatccccagtttacttgcgggctcgcagttaaaatgcaaaacagttttattcctgagggcttgtaattgagcctccccaaaataatccttattcataaaaggaactgccttccttaaaacatactccaaggccgggcccc

SEQ ID NO: 62042 - DNA, 386 bp, Zea mays
  Clone ID: MRT4577_156578C.1
ggctcaactcgtcgacgcaaagcactattcatgggctaggtgctcaaatgctacgtggccaggagacaataaaccaacatggacatcttacagattcacatgaaaaacttttaacggagcagtgaatgctgatcaatgagacactttaaagggttaacgcttatgctcatggaaaaaaaattatctttatcactagtttccttttagattcatggaaaccgacgacgtaactgacacggggattcacttggaagagactccagaggtgtacagacacaaaggtaatggtccggagctgaaatactaggatggtcttgggacgtatagacttcaacggcctttagatgaatggtactcctagcgaggagcaaataattatgaccaat

SEQ ID NO: 62043 - DNA, 466 bp, Zea mays
  Clone ID: MRT4577_156579C.1
cccggggctggaccgtaaacaattgacgtgtataacctagggcacaccgttctggaactctcggctggcttgaagccactcctcatgggaacacacttgcccgacaggtcaacctccgtcaccatccatgcgaccattgcgggacaatttacatcccaatatgcctcatacgccttcccttgtgcaaagagagcctcttcctaggacaaaggtgcctccggggacacaccgatcaaaggccctacatggacgacatactcagataactacaaaccatcaggaccatgctgcccgagggagacgacgttctgcccttgacctacgtgccgggcttgctgcccaattacatgtgatcatcatctaccaccaacaccggagccctctacgcttcgttacatatttttggcagtggacaggcacacagtgtcatacgataccagatagtagctcctcggcaacattgata

SEQ ID NO: 62044 - DNA, 461 bp, Zea mays
  Clone ID: MRT4577_15657C.1
tttttcgtttcacgcgcccggatcattgctcacgagcagggagttctgcaacatagtgttctagatctacatctacacgaaggaggaggtccagaagatgaactcgaaatcatccgcgccgaggaaggaggaacctccagcagcaggcgaaggttgtgccgtcgccgccgcaaacgagtaggatgtctgcctgcactgcagcaaagcagttttagatgactaggtaagtcctccgtttgagccgtagtactctgttttttgttgttgttgttgctgcaacagtggtggcgaatggggttctgactgtggactaaaaggagcaacggatttgtctttgttgaatatctgttatgcattgctaaattcagcagctcggctgctttggcgctctggttcacattctgcagtgatgggaaaaggaaaaagggggggctcatcttatggctgtcttttttggcttt

SEQ ID NO: 62045 - DNA, 706 bp, Zea mays
  unsure (1)..(706): unsure at all n locations
  Clone ID: MRT4577_156580C.1
gtaacgcctgcaggtttcggtccggaattcccgggtcgacccccgcgtccggcacagggtcgcgctcgcgtctgtccttaaggctctcctcggtgtccacggcaccctctttccttgctttgcagcgatcctactgccagaaattcgccatgtctattctcaggatccacgccagagagatctttgactcccgtgggaatcccactgttgaggtcgatctgtacaccgcaaaaggtctcttccgagctgcggtgcccagcggtgcgtccactggcatctacgaggccctagaactccgagacaatgataagacccgcttcatggggaagggtgtctcacaggctgttgagcacatcaataaaactattgcgcctgctctggttagcaagaaagtgaatgttgtggagcaagagaagattgacaagctgatgatcgagatggacggcacagagaataaatctaaatttggtgcaaatgccatcttgggagtgtccctggctgtctgcaaagctggtgccgtggaaaagggggtgcccctttaccgccacattgctgacttggccggcaaccctgaagtcatcctgcctgtcccggctttcaatgtgatcaacggtggttctcatgctggcaacaagctggccatgcaagagttcatgatcctgcctgtggnggcatncagcttccgggaagccatgcgcattggagc

SEQ ID NO: 62046 - DNA, 391 bp, Zea mays
  unsure (1)..(391): unsure at all n locations
  Clone ID: MRT4577_156581C.1
cgctnctgcaacttggcattcttgcctgttgctgggggggggggggcaggagaacaaanagaggcctcagctgatactcgtcggcactctggctgttctcgccatcctcgcagctctcggcgaaggctcctcgtcctggccctgctgcaactacttcttttcttacaacaataaccatccgtgcgttttgtcaaggcgatnacntnccnnncaaccantcccatccttagtgcgtgaactgcctcacagtctncgcacgaattcctcccggcgtgggccatggacccgtcctcacctaccgttgcgactactttctcacaaactcctgccacaccagcttcccttgggcgcccccgccttgggggggggggccctgtctcctccttttttt

SEQ ID NO: 62047 - DNA, 860 bp, Zea mays
  unsure (1)..(860): unsure at all n locations
  Clone ID: MRT4577_156582C.1
cattggggtactcgaggccggccggggggcttggctttacactggggcgggttcccacaccggggccagacgccgccaccgctgtccccgtctacaccgagtcccccccgcgcgatttaacccctcgcctcgctcgctgcctccggttccctacaacgcgcacaccaaacgcgcacgcggtgttcgttcctcggccgctctccctacccacgtccttctccctccacagatctccgcgggccgtgaggttccttgattcgccttctccggggctgccggatctccgcggcggctggggatgggcaactgctgcgtaacaccgaacggagccgccgacgccggcggcggcaagaagcccaaggagccgaagcagaagaagggcaagaagccgaaccccttctcgatcgagtacaaccgctcgacgccggcgagcgcgccgaggctggtggtgctgcgggagcccacggggcgggacatcgcggagcggtacgagcttggagcggagctcgggcgcggcgagttcggggtcacctatctctgcacggaccgcgcctcaggggaggcgctagcctgcaagtccatctccaagaagaagctccgcacccccgtcgacgtcgaggacgtgcgccgggaggtggggatcatgcgccacctccccaagcaccccaacatcgtcacgctcagggatacctacgaggacgacaatgccgtgcacctcgtcatggagctctgtgagggtggggagctcttcgaccgcatcgtggcgcggnggcactacacggaacgcgctgccgncttggtacacgaactatcgtcgaggtcgtgcaatgtgccatagcatggaggatgcacaggatctc

SEQ ID NO: 62048 - DNA, 181 bp, Zea mays
  Clone ID: MRT4577_156583C.1
agagcacgagacgaccagcgccatccatcgcggcaaaagccgagacgacccaggaatctacggacaccgtcgacccccatctactacacgatacaaacgttgctgctggagcccactaccccacacaccgaccaccaaccatggatgaggcgacagttgtggagtacaaggatggaaccat

SEQ ID NO: 62049 - DNA, 823 bp, Zea mays
  Clone ID: MRT4577_156584C.1
ccggccgggaattccggccgggagatttcaatcgcaacagcccatgatgcctcccagactatcagcgctctcgacagcttcggctgttgcgcgaagcgttattcgacccttttctaccacagcccctgctgctgctccccgcgagccgtcctccgcaggagctcacaaccaccgacttgcgaacctcaacaacagcaataatcgtgctagcgggtacagaccacagcgcggagatgctgcttctagacttatagagcgatacaagatgcgtaacacctcgtacacgatagagaagacggcccagatggatttcctcaagaaccaaaagatgtccaacgacttccttagacaaatgcctcgacgatgggaggcaggagatgtctactcgcctcatgacctgagccccgttgagatgcagaaatggaggaagaggtcggtaaagaacaacgacgtcatcgatgcgctcggcatcagccctctcgacatgtacaagaacttctctctcatcgaatacttcacatcatcatctggaatgatcaaccactccaacctcactcgtcttcgacccgtcaaccagcgcaaggtggccaagatgatccgccgagttcaaggaatgggtatctaccccagcgtgcacgcccaccccgaaatgctccgtgaggatttcttctcgcgcaacaagtagatcagtcgtaaataaaggaaaaagaaaaagcgaaaaacgacttgttcatgcgctggcgttctggtgaatgggatgatgtcatgatcattatttttgtggtcttatgtataacagcctcaaactctatgtacatattga

SEQ ID NO: 62050 - DNA, 282 bp, Zea mays
  Clone ID: MRT4577_156585C.1
tcgcggacgcgtgggcttggacaagggggttttgaggaagtatataaagacgcgctggcaacttgtacttaggatacaaatgcaatgaaaggctttacccttaacgtgttggaagcctctgtcattccaaaaaggcctggcccaaccattgtgattattgttgctcaccctccgaagatcaaatacgttatgggggttggagaccttgtccaaagactttagacatacaaggccatgctgctgatcttcacaaggggtactcttatggtacatgaaagaaac

SEQ ID NO: 62051 - DNA, 230 bp, Zea mays
  Clone ID: MRT4577_156586C.1
gtacacggctttgtggagctacgaaggaacattgattttatacgacttaaggccgtgtcttaaagcatggggtgagcgaatgtgcttctttgagctccgtagttatagacttcacagctccaaacgtacttttgtgcaggcttcaggtcaccggatacagttgtacacggggtggattgcatatcgttgatctaggactccttcaggtacacgccctgtaagattatggc

SEQ ID NO: 62052 - DNA, 481 bp, Zea mays
  Clone ID: MRT4577_156587C.1
cgtcagtactcaagagcaactatcggtcttcagtgttcacggggcatccaaaatatggcctacttaaaatatgagaagaaacatccatgcggctcgctcggtggccagcggcccagagactcaactcttcatcgctcacgctcggcagtcagcatggcactcgccgccatctccggtgaccggtgccccgcgacccccgaccccctccctcaaccacgggaccgcccatctaccatgaacaccgggaccaagaaatgactcgaaaccctagctaacaaaagagagaggtacctaccagggagaaggttgccaacacagtagaagttgctggcgacgcggagagccgtcacgacgccggcatgccgctcatcggccggttgcgccgccgccgtcgctcgtcacgcgtatacatgttatcgctcgctctggattcgtttccatacccttcgagtcctggctctgttccatgacctcctctgtc

SEQ ID NO: 62053 - DNA, 943 bp, Zea mays
  Clone ID: MRT4577_156588C.1
ttggagatggcataagcaactccatgttgtgaactgttccctcgcgaccataaagaacatgccatcctatactttggaataaaaatatagtcaaaatttgtataaaaaaaaaaaaaaaaaaaaacaaaaaaaaaaaaaaaaaaaaaaaaaaaaaaaaaaaaaaaaaaaaaaaaaaaaaaaaaaaaaaaaaaaaaaaaaaaaaggagacccccccggaggaggggaaccaagcaacacccgccgggggaaaatgtcaaacctgctgccgcatctgcactcggggggggcgggggaccaggccatcctccccgaggaggagcgccccgtcatcatccgttttgtccataactggaacaaaacctgcatgcaaatggatgaagtgctagcaccagtagctgaaaccataaaaaactttgcggtcatctaccttgttgacatcacaaaggtccctgatttcaacaccatgtatgagctgtacgcgcccgcccacggcgtccgcccacgcgtccgcaagcacatcatgattgatctcgggactggaaacaacaacaagatcaactgggccctgaaggacaagcaagagttcatcgacattgtggagaccgtatacaggggcgcccggaaaggccgtggtctggtgattgctccaaaggactactccaccaagtaccgttactaagaaggcaggcattccccttatgcaatctattggggatgtttacacggacagttagtccgacaggtgatccctaactgtatcttggcataccctagtaattcaagttgctggctggagtgatgcttatccatgtcttggcatgccatagtgaacatgtaaacctgtgatttgaggtgattattcgagtgtaaagaaaccaggattgcgttcgcctatgactatgtgtctagttgtctacttaataagaaacagttattggtttgg

SEQ ID NO: 62054 - DNA, 374 bp, Zea mays
  Clone ID: MRT4577_156589C.1
gagctcactagtcggtggccgcccttgtttttattgttttgtcacctttttttagatgatatgaattcccttgggttgttcgatgattttcagggcaaccaacaagatcgttcctcggacctccaaagagaccaaagacgcggggcactaaggggggcacagagcaccatctgatactctgcagaaagacagggcagaatgccatagaaggctgtcgttcatgaagaacgaacccagtggacacggcatgctcttggttctctggaggcaagcaaacaagaaaccgacaagtgctgtgaggacctgctaggggcgtccttagctcgagcccatgtgggagatcaggacctcctgccagcgaagtcatgagttgc

SEQ ID NO: 62055 - DNA, 592 bp, Zea mays
  Clone ID: MRT4577_15658C.1
gcagcggaatttctttattacaaaagttacaagttacaacaaatttacattatgtttatcagagtgattagaaaagtgattcaaagaaataacctttgaaatgttataaattatttataattttgaaatatatgctagctcaatgacaatcctcaataagaagtataggagaggtacttatatgtataagacggtcgagcccaccggcacttagcaccatccacagcagcacaattctagttcctggaataacactaggttagtgtttgttagatgacgtctggcgatcagcttttgttccgatacttgctccgtctgtccatcttcaggttcgtccatcagcatcacctttcggagtaggtcgtgctttacgacatcttggggtcgactcatccttggtccataattaaattcgacttgaaaccacgaaatcgacgacgcctttcaactctagcatttcaccgaacacatggtgagtgccgcatcgaatcgcacttcttctccatccacatcgagaattctccggcagcgtactgatttgtttcctttcacgcctaatcttctccggattatttgtttttggcatgaacac

SEQ ID NO: 62056 - DNA, 1045 bp, Zea mays
  Clone ID: MRT4577_156590C.1
ttgggaccctcgggccggccggaaaaacccacgcgtccgctgaaggagagcagcccggaggagggggagcaagcagcagccgtccgtggaacaggtcgtcacctgaaggagagcagccgggaggggggggagcaagcagcagccgtcgggggaagatgcctttcggctcgccgataagcagcagctcatcacctgaaggagagcagcccggaggagggggagcaagcagcagccgtcggtggaagaagatgtcgtacctgctgccgcatctgcactcggggtgggcggtggaccaggccatcctcgccgaggaggagcgcctcgtcatcatccgcttcggccatgactgggacgagacctgcatgcagatggatgaagtgctagcagcagtagctgagaccataaagaactttgcggtcatctaccttgttgacatcacagaggtccctgatttcaacaccatgtatgagctgtacgacccttcgacagtgatgttcttcttccggaacaagcacatcatgattgatctcgggactggaaacaacaacaagatcaactgggccctgaaggacaagcaagagttcatcgacattgtggagaccgtatacaggggcgcccggaaaggccgtggtctggtgattgctccaaaggactactccaccaagtaccgttactaagaaggcaggcattccccttatgcaatctattggggatgtttacacggacagttagtccgacaggtgatccctaactgtatcttggcataccctagtaattcaagttgctggctggagtgatgcttatccatgtcttggcatgccatagtgaacatgtaaacctgtgatttgaggtgattattcgagtgtaaagaaaccaggattgcgttcgcctatgactatgtgtctagttgtctacttaataagaaacagttattggtttggaatatcggaactgagacaatggtttcctttcggtatttctattatcaactaccctgctttgctacgaaaaaaaaataaaaatactctccgttgttaccactgct

SEQ ID NO: 62057 - DNA, 461 bp, Zea mays
  unsure (1)..(461): unsure at all n locations
  Clone ID: MRT4577_156591C.1
agaagcaccagagggaggagccacggccgaggagaagcaccaccaccaccaggnancaccaccgcaagccagaggaggagggcgcccccggcgaggncgaccacgagaagaaggagaagcaccacaagcacacggagaagcncggcgagcccggcgccaccgccgccggcgcgcacgcccagcacgagaagcacaaggccaagaaggacccagagaacgagcacgggcaccgggncaaggaggaggaggccgccgacgccgccgcgggcaccgccggcaacgcaaaccacgagcaccacgagaagaaggacgccaagaagcacgcccacaacnganccgacgcggacgccgccccaacggaacacccagccacgacgccgacaaccgcgagccggccaggccaagacccgggccaccgacacccgcacggacgcacgaaccgcgcccgccggaccacggcg

SEQ ID NO: 62058 - DNA, 310 bp, Zea mays
  unsure (1)..(310): unsure at all n locations
  Clone ID: MRT4577_156592C.1
gggggggggggcgcacacacgcgacggccgccgagggggccgccgccgacgacgcggaggacccgcagaaccggcaggaggancccgggggagaagacaacgaacnggagcngaacgcggagncccacngccggagacacgagcagcggaacgggggggggggggggacaccaacgagcacgcgnaccggcagaccggagaaaaggccaaccagcgccgcgcgcgccggcaccagcagcaggacccgaaggaggagcacggcgacacaaagagcaacgaccaaacgccggcagagaaccgccggaccaac

SEQ ID NO: 62059 - DNA, 282 bp, Zea mays
  Clone ID: MRT4577_156593C.1
gttgtcacgcgtgcgacgaggattagatcgcgggcggccgccatgggggcgcacaagtgtgccgcagaactatggaggaggaagcagtcagacaaaatgcgctggacagcagggggtgcgcggctgggagtacaggcagaaaccaggacagggccgccacagcaggcacacccgtcacgacaaggccacgcgcatgcgatgcaggggcaagcaggaatgtggtggataccgagagcgcgggaagcgacccggaacaaagaagactgagaccaaggggatcga

SEQ ID NO: 62060 - DNA, 505 bp, Zea mays
  Clone ID: MRT4577_156594C.1
ttgcgccagactacaggacacagcaacaggggacagaacccagcacgagcaagccttcaaggaggccgccggcctctatctcggacgacacctcgaggacacatacctgtagtctttccaccctgaagcgcgaaaccggcatgatgaaagtaacttatatgtcgtcacacgaattcgaggagagcgcgcgaggatctttttttttggacacctggtcaatgagtatagaccaaaggaaagacgcctgattagaacaaaggataggtgtccgaaaggactggatgcgttgacctaaaaaatactgcatctgaagctaacaacagcaaaaaaggtctgtgctgctctaggagatccatgcatgacggctcgcgcgtggggagaatgttaaacctcatgatgagctgtaaattaaagacagtggggcaatatcaactctgagtgcagttggcagaccttatggtaccgaaccatagaatgctgctaggacagcactacggagatacct

SEQ ID NO: 62061 - DNA, 242 bp, Zea mays
  Clone ID: MRT4577_156595C.1
tttgtttgggtatgcgggagctgattgcttaacggacgacatacagttgggaatctgggattgctggcagcaagactaaacgggtgcataccgatataccggacactaccacgttggggtctatcgaccacccttggggaacagcagtatccaagggtatacttattacgaagactgacgacaagggggacaaagtcaaaactgcctctgtgaaggcgatcttcatgtttatgatccttcac

SEQ ID NO: 62062 - DNA, 483 bp, Zea mays
  Clone ID: MRT4577_156596C.1
atgggcaaggacaagaaaggtcggggttcgtcgcgtcgcaccggcgacaagcgggagcatgagccaagtcctccctcggaggatttcggtgattccgagtactcggaggaggagttttcctccgagtacgagggattgtcggtctatgcttcccccccggcgtcgtccgacgactcggacaattcccaggggatagccgccgaggtgtggacgtacattcggtccatcgagcgcgccggcctcgagggttcggatgagtcggaggtctcctcggacgaggagaactctttcggctcgtccgaggaagggagcggcggcgacgacgacgacgaaggtgacggtagtggtgaaggtgtcggcggcgacggcggcaacaatggcaggaagggcggcagtggaggcagcggcggcggcaggagcgatgacgacggcaagggcggcaacgacagcagcaaggctagcggcaaagcgccactggcttaa

SEQ ID NO: 62063 - DNA, 342 bp, Zea mays
  Clone ID: MRT4577_156597C.1
caagaagacactggataaacacgctttttccactttatacagaaacactagaaatgcgggggtggtgcttgatacgggtcctaagctagctcataacacaatcaaattaaggcgcggattaactccttctgaatgtgcaagtacaaagccttcacaggatgacttgcgtcagacaaaagaagaggaaatggatgatcactgctctcatgttccagttcggcatctgatattcatgcatcatggcattcaacagaagctggagaaaggtaatcgggttgatgatggtaatgatttcctgcgaataactgctgacctagctgaaacaacttaacttcttatcaa

SEQ ID NO: 62064 - DNA, 263 bp, Zea mays
  Clone ID: MRT4577_156598C.1
tgcacagttgtggcagtagtcctgtgtgcagtcacttagaagtcgcccccttggccaaaccccgatttcctttgagagctggtgttgtgaagtaccgtgtggcagtgttacctgtggcctgttcccaaaacctgtgcaccaaagctttatttatatccctccagtccctgctcccatgttgtcccaaaggccatcgtggacaccagagcacactgactggcctggagaagccagcaccactaataaagctgctgtctggctgg

SEQ ID NO: 62065 - DNA, 361 bp, Zea mays
  unsure (1)..(361): unsure at all n locations
  Clone ID: MRT4577_156599C.1
ttcgcgcgcgcgcctatgcgtctcccccctgcccaagaatccaagatctggaactgccaggtgggaggaccaagcttcgtccacgtcgactcctctgcctccctcacctcgctcgcttctaggcaattctccgcagccctcctatttcggtctttctctttggcctcgtggggtgcaaaaccctcgctaatctcgtgccctttttttttcccctctagcttggaatcctagcgcctattctacgaatccccccccnttncccgcctcccgcgccggacatagaaaaaacagtcttcgacgcggcctctaagctgctcaaggccggcatcgcggcgccccaccaggcacccccactggtaat

SEQ ID NO: 62066 - DNA, 495 bp, Zea mays
  Clone ID: MRT4577_15659C.1
ggcacagattacatctattccatccttgcgccgtcggacgttctgaagacggtcatgggcagtaatatacaggcttggtgcagaggcaactaggcagggccctttcatggctcaagaggtccgccttgggatttacagccgaaagacagaccgaagccttgaatttatggattgagtgaacgaggctatgcgatcaccgcttttaaatacacgtccaaattcttgggaaggaacaccccgaactaacggtcgcctatatccatatctatacaatgtgatcttgagaacctaccgaagcgcatatgctcattccaacaacatatctactcctgctggattaggaaataaatatactacttgtgccaaattgtcatgatgtagcttcgcttaagcatattctggaaagaaatgttcagatcattgtcttctgctacaaaaaactattctgcttttgccactgtgtcctcccgtgattgttactgaccatagcactac

SEQ ID NO: 62067 - DNA, 162 bp, Zea mays
  Clone ID: MRT4577_1565C.1
tggagtagtaactgggcggtgatcgcaaaacagaaaaggtgtgtaatgcacatcttagcaaaagtaatgatgacaaacaaggccgggcgcacaaactaatcgtcccaacgaggactgcctgcatgcgtagcaaccagcaagcaatcgaacaggaacatagcc

SEQ ID NO: 62068 - DNA, 471 bp, Zea mays
  Clone ID: MRT4577_156600C.1
agtcgaaaagttggttggaaaaaaagacttagaaacgcaactagaacttagacgtcacgggaaatttatagaggacgatagaaaacaagaaagggggtgatcaccacaaagtgggcctacaacagagccaagaggacagggaggggaggggaatgaacaattggatactaagaacagccttggccggagcagataagtaccactatgtggacgctgaagcctccagcatacaaaatagaggatgggggagctgctgcatatcactgagggacaagggcacactgtggtgtgaacattggggattataggtataagaacaaacgtaaaagaacttttggcgagtatggacaattgatggtggcttaaccagcagggcatgcattattaggaccgacccagagcctacagatcatcagctggaatgaacagcagggtctctggttcatttgggtcaggaagctgctgggggga

SEQ ID NO: 62069 - DNA, 419 bp, Zea mays
  Clone ID: MRT4577_156601C.1
gcaaaatgccataaacactgagatgtatcatgagattatgcatgcacttaaaactgacagcaaggatgtctcaatcatcactgttttaccaggcaatagtgactattacagtagtgagcatgatctgactaacttcactgatattccccctggtggagtagcggacaacagctacgcataatgccgttttactgagggaatttgtgggctgttttatagattttcctaagcctctgactgcagtggtcaatggtccagctgtgggcatctctgtcaccctccttgggctattcgatgccgtgtatgcatctgacagggcaacatttcatacaccatttagtcaactaggccaaagtccggaaggatgctcctcttacacttttccgcagataatgggcccagccaaggcacagagatgc

SEQ ID NO: 62070 - DNA, 303 bp, Zea mays
  Clone ID: MRT4577_156602C.1
tctttctcatctactacatgaatggtgtaatgttgttgatgatagaaagcatgtaatgttcggtggttttcgctatagtgtctagtatttttacgcttgattatttttacaatatgattatttttttgagttttttatttcctttacttcattatattgattatatctatatagttgttttagttttttactatccttttatttttctttctttatattacattttttttattttatttttttttatttatttttatttattattttttttatttacttttatttattcttttatttctattt

SEQ ID NO: 62071 - DNA, 122 bp, Zea mays
  Clone ID: MRT4577_156603C.1
ctttctgcatctgcaagggcggaagctgccccgggcccaatataaaggggtgcgggtgccctgacaagcagggctaacccgagacctgctgacctgcgcacataccatgggattcgttcatt

SEQ ID NO: 62072 - DNA, 530 bp, Zea mays
  Clone ID: MRT4577_156604C.1
cgcgttaatccctaacagaacccagtaaaatattgctaacccttttttttacaaggacccacgacgcctgctggggggcgccttctttgccctatccaccaacgtcgccggaatcaacctccggctttgccagaaattcaaacccagatgccgatcctcataaacacgacacgcttcgggcatacgcactcaagtgcaaattctacaacgcgctagatcacaacaacgacgcgcatccgctaagacacttagttagcatgtacggacacaactactaaaacgctggaatcgtacacaagcgattcaagaactaataaaagagtctgcagcttgacagctacacctatccgaaagggctgtacaaaactctatgcattaaccgaatactggacattaactgttatgaacatactaccaatcagataatgtcagcctacaaatgcttctgcacgcttaacgatgaccaacgtatgcacaccttcgcctttgcgcatgcatagactaaaaaaattagggaagatgacattttg

SEQ ID NO: 62073 - DNA, 157 bp, Zea mays
  Clone ID: MRT4577_156605C.1
gagggcacgcggacgggtgggattgggatacataccaccttacccttatttttatcaacctaacaacaacgactaagaacacgttcaatttcattgcgaccctcgcaccaatcgctaccaccactcatcctcccatcattggacgaacgctgccgac

SEQ ID NO: 62074 - DNA, 296 bp, Zea mays
  Clone ID: MRT4577_156606C.1
gccaccaaaaggaacaatgtataaaattttgggaagaggctccccgccaaaccaaacaaggaaggggccgacaaggggacccctgcccacacacgaatggtttgtcccaaccggccactgtttatctgggggggggggggcgacctcttggaaaacttggcctgcacggagagcggggcggtggtgccggaacacatgagttcccccccgaaaacctggggggccacgggcagggtgaaaaaccgcttggcgggggacgccttttcaaccacctatttggcccgtgagggtggggc

SEQ ID NO: 62075 - DNA, 320 bp, Zea mays
  unsure (1)..(320): unsure at all n locations
  Clone ID: MRT4577_156607C.1
ngcgccggngcggcggagggagaagagnggcggcggcgggccggcggcgagnacaggcgagggcccgagcagaggccccggcaaacgcgcagcgcacacaaacacacaccagcccagcaccgagagaacagccggcggccggcgagaagagccgcggcacgggcgcggggaaggaccggcacaacaccaggancgcccccgagggacgccngnaccaaggcgaggacgcgnncaaggcggagaagacagccggaggcacggcgaacggcgnccgcggcgcggacaccgacagcggcgacacccagaagaaagccccggac

SEQ ID NO: 62076 - DNA, 1684 bp, Zea mays
  Clone ID: MRT4577_156608C.1
gcgtccgtgaaagcgctcccctcgattgggcggcacgtaacccatcaccaccaccaccaacccggacccgtcaagcgctgcgtcgtcccgtgcaaagaccgcgcattccgtgcgtgccgtgtccacgcgcgcgcgcgcggtggcgttaagttgtcgagcgccagaggagcgccactagtcgtcgatcgatttgacccaggcgaggaggcgtaggcgcgtaggggagtgagtctagctagctactggtgttgggtccattattcgctagcttccgacgatggaggtgaagaaggaggccacgaaggcgacgctgccgccggggttcaggttccggccgacggacgaggagctgatcgtgcactacctgcggcggcgcgcgctggcctcgccgctgccggccgccgtcgacatcccggacgtccgcatcctggcgcacgacccgtccgacctgctgcccccaggggggctggcagggttcggcgagcaggagcgctacttcttcacgtgcaaggaggccaagtacgtgaagggccggcgcgcgaaccgcgccacgggggccgggtactggaaggcgacgggcaaggagaagccggtggccgtggcggtccggggcgtgcaggggcagagccagagccagagccaggccgtgctggtgggcatgaagcgctcgctggtgttctaccgcggcaagccgccgacgggaagcaagacggagtgggtgatgcacgagtaccggctggcgggcgccgggctcgcgccgtgccgccgccgccacgccgacgccgacggagacggcgtggcgcgggcgccggccgagggctgggtgctgtgccgcgtgttccggaagaagggctccgccgccgtcgcgaggcggcccggcgaccgcagcgacggcgagggcgacgagagcgcgtgcggcggcggaggaggcggcgggcgcgggttcatcgacttcttcgcgcgcgcggacgccgccgggcgaaggcgccgcgctccgtcgcccgccgtgtcgagccggtggcttgcggacgcgtcgccccagccggagcaggaggccaccagcagaggcccgtgacgagacaagggccggccggctggctggcgtgaagcgatcaagcaaggtaagagagagagagagagggaagcttttgctgcattggcagtacccaatgagggagggtccagtacagtaggtgcaggtaggagcaaagtgaattcgttttagcaacgcgagagagagagaggcccgatagtcagtcagtcagtcaaccagtgcagtatcagttgttgagcgtagatggtgaaactaatgtagcagctcagttgtactcctcccgaccacctgatgaatcctacacaattgtagagtggctgcagcaaaatcacggccatggcaccggagctcctccaaggaacgcaagtccaccagctgctgctgctgctggccatggcggtcgcgcggattgctagtgctaatgttccacaggctgttgattgctgagaagcaagtagcggtggtggtggcgggcagcagacggaagatggcgggtgtctgatactggtggtggtggtagtagtcgtgcgtaatctgttgcctggacttggacttggtttctttaatgcaattatgatgatgaagtgaatgcattctgcgtgctggtgttggaacgccgggcaagaaaaa

SEQ ID NO: 62077 - DNA, 1146 bp, Zea mays
  Clone ID: MRT4577_156609C.1
ggctggcagggttcggcgagcaggagcgctacttcttcacgtgcaaggaggccaagtacgtgaagggccggcgcgcgaaccgcgccacgggggccgggtactggaaggcgacgggcaaggagaagccggtggccgtggcggtccggggcgtgcaggggcagagccagagccagagccaggccgtgctggtgggcatgaagcgctcgctggtgttctaccgcggcaagccgccgacgggaagcaagacggagtgggtgatgcacgagtaccggctggcgggcgccgggctcgcgccgtgccgccgccgccacgccgacgccgacggagacggcgtggcgcgggcgccggccgagggctgggtgctgtgccgcgtgttccggaagaagggctccgccgccgtcgcgaggcggcccggcgaccgcagcgacggcgagggcgacgagagcgcgtgcggcggcggaggaggcggcgggcgcgggttcatcgacttcttcgcgcgcgcggacgccgccgggcgaaggcgccgcgctccgtcgcccgccgtgtcgagccggtggcttgcggacgcgtcgccccagccggagcaggaggccaccagcagaggcccgtgacgagacaagggccggccggctggctggcgtgaagcgatcaagcaaggtagagagagagagagagggaagcttttgttgcattggcagtacctaatgaggggagggtccagtacagtaggtaggagcaaagtgaattcgttttagcaacgtgagagagagaggcccgatagtcagtgcagtatcagttgttgagcgtagatggtgaaactaatgtagcagctcagttgtactcctcccaaccacctgatgaatcctacacaattgtagagtgtggctgcagcaaatcccggccatggcaccggagctcctccaggaacgcaagtccaccagctgctgctgctgcttgccatggcggtggcggattgctagtgctaatgttccacaggctgttgattgctgagaagcaagtggcgggggtggtggcgggcagcagacggaagatggcgggtgtctgatactggtggtggtggtagtagtcgtgcgtaatctgttgcctggacttggacttggtttctttaatgcaattatgacgatg

SEQ ID NO: 62078 - DNA, 486 bp, Zea mays
  unsure (1)..(486): unsure at all n locations
  Clone ID: MRT4577_15660C.1
tttgggctgatttatgtgcttggccggacttcggtctagaaggaatgtcagtcacacgtccaatatacgtaagctgaatgcggggcctggggagtcgggtagaaggaaaagaggtcttcagtcaaagccgctctgtttcgttcgtagggtgtgtgtaatggtcccgattcaatggttcttgcccgtcggaactggaacagccgagaataaagcggtgaatgggcgtgcaatgtgcgggaactcgttgaatagcctgggttaaacttcgaagaaagtctaaaagtgtcgcccgacgagttcgtgcagcaccaggcagccggctaggcaaaggtcgattaagttaacgacgtccagtcggctcccctggacgactagttatatcgggatcgagatatggtttggatctttatggngggtagtagcggggaactccggataacgggtgaaagtttgacttagtaacactgtgcgagcgaagaagggtac

SEQ ID NO: 62079 - DNA, 512 bp, Zea mays
  Clone ID: MRT4577_156610C.1
gctgtgggcgacgagagcgcgggcggcggcggaggaggaggcgggcgcgggttcatcgacttcttcgcgcgcgccgacgccgccgggcgaaggcgccgcgctctgtcgcccgccgtgtcgagccggtggattgcggacgcgtcgccccagccggagcaggaggtcaccagcagaggcccgtgacgtgtcaagggccggccggctggctggcgtgaagcgatcaagcaaggctggcatgaagcgatcaagcaaggtagagaaagagggaagctttggttgcatttgcagtggccaatgaggggtccagtacagtaggtaggagcaaagtgaatttcgtttagcaacgcgagagagaggcccgatagtcagtcagtcagtcaaccagtgcagtatcagttgttgagcgtagatggtgaaactaatgtagcagctcagttgtactcctcccaactactcttttcgtttttttttaatggcgctggataggttaagtttacactattcagctttaa

SEQ ID NO: 62080 - DNA, 1744 bp, Zea mays
  Clone ID: MRT4577_156611C.1
gcgcaaatgaaagcgctcccctcgattgggcggcacgtaacccatcaccaccaccaccaacccggacccgtcaagcgctgcgtcgtcccgtgcaaagaccgcgcattccgtgcgtgccgtgtccacgcgcgcgcgcgcggtggcgttaagttgtcgagcgccagaggagcgccactagtcgtcgatcgatttgacccaggcgaggaggcgtaggcgcgtaggggagtgagtctagctagctactggtgttgggtccattattcgctagcttccgacgatggaggtgaagaaggaggccacgaaggcgacgctgccgccggggttcaggttccggccgacggacgaggagctgatcgtgcactacctgcggcggcgcgcgctggcctcgccgctgccggccgccgtcgacatcccggacgtccgcatcctggcgcacgacccgtccgacctgctgcccccaggtgagtgagtgagcgagtgagtcggcactcgagggatccatcccatctccatctcagactggggctgattggttttgttgctggattggggggcggtggtgccgtggtggtggcagggttcggcgagcaggagcgctacttcttcacgtgcaaggaggccaagtacgtgaagggccggcgcgcgaaccgcgccacgggggccgggtactggaaggcgacgggcaaggagaagccggtggccgtggcggtccaccggggcgtgcagggccagagccagggccaggccgtgctggtgggcatgaagcgctcgctggtgttctaccgcgggaagccgccgacggggagcaagacggagtgggtgatgcacgagtaccggctggcgggcgccgggctcgcgccgtgccgccgccgccacgccgacgccgatgccgacgccgacgccgtggcgcgggcgccggccgagggctgggtgctgtgccgcgtgttccggaagaagggctccgccgccgccgccgccgttgcgaggcggcccggcgaccgcagcgacggcgagggcgacgagagcgcgggcggcggcggcgggcgcgggttcatcgacttcttcgcgcgcgcggacgccgccgggcgaaggcgccgcgcgccgtcgcccgccgtgtcgagccggtggcttgcggacgcgtcgccccagccggagcaggaggccaccagcagaggcccgtgacgagtcaagggccggccggctggctggcgtgaagcgatcaagcaaggtaaggtagagagagagagggaagcttttgctgcattggcagtggccaatgagggtccagtacagtaggtgcaggtaggagcaaagtgaattcgttttagcaacgcgagagagagagaggcccgatagtcagtcagtcagtcaaccagtgcagtatcagttgttgagcgtagatggtgaaactaatgtagcagctcagttgtactcctcccgaccacctgatgaatcctacacaattgtagagtggctgcagcaaaatcacggccatggcaccggagctcctccaaggaacgcaagtccaccagctgctgctgctgctggccatggcggtcgcgcggattgctagtgctaatgttccacaggctgttgattgctgagaagcaagtagcggtggtggtggcgggcagcagacggaagatggcgggtgtctgatactggtggtggtggtagtagtcgtgcgtaatctgttgcctggacttggacttggtttctttaatgcaattatgatgatgaagtg

SEQ ID NO: 62081 - DNA, 148 bp, Zea mays
  Clone ID: MRT4577_156612C.1
attcggctcgaggccatcccacgctggattttctctgcttcacccgtaggatcaccggggccggcctctgatactaccggatcgaccgctaccaactctccttggacctgtacatgctcaagctcatgccacctgggatcctcctcaa

SEQ ID NO: 62082 - DNA, 1111 bp, Zea mays
  Clone ID: MRT4577_156613C.1
cggccgggaaaaaaaaaattaccaaaaaaaaaaaaaaaaaaaagaaaaaaaaaaaaaaaaaaaaaaaaagctcctcgtcaccagtcagaaaacagtgggatcgagttgtttcactgcacgagcacatcctccggcgaccaccggcctccctctccgtcctctagcgaccgaccaacgcgccgagcgaagatgtcgtggcagacgtacgtggacgagcacctgatgtgcgagatcgagggccaccacctcacgtcggcggccatcgtcggccacgacggcgccacctgggctcagagcaccgcattccccgagttcaagcccgaggagatggctgccatcatgaaggatttcgacgagccggggcacctcgccccgaccggcctgatcctgggaggcaccaagtacatggtcatccaaggcgaacctggagctgtcatccgtggcaagaagggatccgggggcatcactgtgaagaaaacagggcagtcactcatcattggcatctacgacgagccgatgactcccgggcagtgcaacctggtggtggaaaggctgggcgactacctgctcgaacaggggatgtaatgacaaccccttcccctggaatgcatgttgatgatgttgctggttccaacttcgttttcagtaataataacaacaaagcgaagaccctcctacctaccctatttgcttgagcggctcttgtccgcgccacaagataccaattgttgcgctgggaatattcagctacgatgacccgctttagttcagtttctttttttttgggggttggttcgatcatttggctgtagcgtgaatcgcttggacaacagactccaattactaagcaaatatttttcttctgcatatatttgaagaaccttgttcaggcccccctttcgaaatgaaatgcgggaaatttttttcttgtttccaatgtcttttttattatgtgaaaaaagaaccgattcatgtgaaataattcttgtatgttttctcttcctgcatttcaaagtaggcctgccgcctgcatgaaaaaaaaaaaaaaaaaaaaaaaaaaaaaaaaaaaaaaaaaaaaaaaaaaaaaaaaaaaaataaaaaaaaaaaaaaa

SEQ ID NO: 62083 - DNA, 849 bp, Zea mays
  unsure (1)..(849): unsure at all n locations
  Clone ID: MRT4577_156614C.1
cctcgaggggccggcccgggaacacanntctaatacttcccccaccacaaaccacactatcgccaacatggcggaaatacttttgggaatcactggaaaggacttcaccatcatcgcagcatccaaggctgcgatgcgaggcgccaccatcctcaagacaaccgatgacaagaccagagctctcaacaagcacacgctgctcgcattctctggagaggccggtgacacagtgcaattcgccgaatacattcaacgaaatgcccagctctactcgatgcgaaacgagtccgacttatccccctctgctcttgcccactttgtccgtggagagctagccaccagcttgcgatcccgaaagccttacaatgtcaacctgcttatgggtggtgttgatcccatcactggcaagccatccctctactggctcgactacctagcgtcgctggccgaggttccctatgccgcacatggatacgcacaatactactgcctctccatcctcgacaagcaccaccaccccgatatcactctccaccaaggcatcaagattctgacgatgtgcatcgacgagctgaagcgccgattaccgcttgatttcaagggtatggtggtcaaggcggtcaaggcagatggaattgtggacatagagttcgacgacgacaaggtggtcaagtgtgcttaagaggcgaccgcaaatggaaaggaaacatgaatntgtattactagatgggtcctggaggccaatgcttacacaaagatggtttcctccccgacggcatattgaaatccaagntacagttgtcttccacaactcactttacgtgcaggctacagtggttgtatagcaag

SEQ ID NO: 62084 - DNA, 315 bp, Zea mays
  Clone ID: MRT4577_156615C.1
gtttccgacgatgagaaggaggaaggccgtcgtcgcaggcgggctagggatccggatgatgagccggacgaccgccgtggcaagcgagaccgggacaaagacagacggcgccaccggcgccggagccctagttcggagtcagggtcctcgcccgacggccgtcgccatcgccgccggcgccgagacgagggttcgaggcggcgggacgaccgcaggcgaaaggaggacgagggagaccagcgccgtaaaagccctgtgaaggagctgaccccgtcactggcttccccaccggcggttctttcggagatgatccct

SEQ ID NO: 62085 - DNA, 346 bp, Zea mays
  Clone ID: MRT4577_156616C.1
ggtcgacgcacgcgtccacccacacgtccgcccacgcgtccgcccacgcgtcgcggtgccctgcaggagtcgctcggcgcgtctcgcctacaaccgacagcgccaggccaagaggggagactcgagatcgtcgtgccgacgccctcgctggctgagcctgagctttggtgcggtgctcctgctatatataattctttttcctcattttctccactctgcctgtaattcctgataatagcacaaacgcaacggagttctgtgttccttgcgacacacaagaatttcaatccagagatgccaaatatgtataatcttgccgcaaaaaaaaaaaaaaaaaaggccccta

SEQ ID NO: 62086 - DNA, 337 bp, Zea mays
  Clone ID: MRT4577_156617C.1
cgcgtcacgggctgggacgcgaagcgcgcggcgtggctgcggacacggggcctggacggcgcggcggtcgcggggcgggtggtgatggtgaccgggtcgcagccggagccatgcaaggggccggggggcgaccacgcgctgctgcggttcctcaagaacaagctggactactgccgcctccacgggatcgagctcctgtacaacaccgcgctgctggagccgtccatggtggcgtactgggccaagatccccagcgtgcgcgccgcgatgctggcgcacccggacgccgagtgggtgtggtgggtggacgccgacgccgtgttcacggacatggact

SEQ ID NO: 62087 - DNA, 308 bp, Zea mays
  Clone ID: MRT4577_156618C.1
ctttagtagtgttaccaatgctgtgaataccggatagtgtgtgttcggtttaggatcacctgtgtgtagatagaagttgtttgacgttttgggctacaatttctaaattgttgctttggatttttccccatattatcttacatctgttattaatttgattccttagtattttgtctcacttatgaagattttaaaacaataatataagtccttttacctcttgtagtctcactatttcaagtttctgctttaaaatacctgataggtacccctttgcgaagacaatgcctctgatgtgtgctggattc

SEQ ID NO: 62088 - DNA, 347 bp, Zea mays
  unsure (1)..(347): unsure at all n locations
  Clone ID: MRT4577_156619C.1
cgnnaccagggggctgcaaaccgcagatcttattctactttcgtttccgtttcctcgccgtttaccgagccttacggaagttatgcacaacctgtcgagagtgcaaatactgagcgtggcacacgaatcgattctttacgattcccaggctgccctgggggagaggaagtaatgcgacacaaacttaatggccgtcaaaggacgcaactcgaacgttgtgattggtacgctcattatctacaaagactcacagactcaaactgagagggcacttaactaagagtcggagctatcatacacgtttacaactgcaagcccattctcctgtcgatacaaggccttcccac

SEQ ID NO: 62089 - DNA, 204 bp, Zea mays
  Clone ID: MRT4577_15661C.1
gggttgggttactttgggggttgggacgcaaaaaccttcttttccggccgaggggcccaaccggaaaataagggaacggcttgctggtgtacgacccatattatttgtttaaagaaacggccttgggtcaaaaacaaaaaaaaggacggaaccgggacttcttattcggccggaaccacgaaataatgctgttgaaaaataaaa

SEQ ID NO: 62090 - DNA, 654 bp, Zea mays
  Clone ID: MRT4577_156620C.1
agaaagtggacagattgagttactgaatttgtaaaaagcacaactcctaaacgatcagacttatggctgtcaaattttaacaccagcaagataataaagttatctaccacttttctatagcacatatctatagaaaatacaatttagttcatcaaacatacaacacaggaaaatcactgcgtgcagtccaaaacagcaattaataaattgcagctcctatacaattcaagaattgccatgttttagagacttgaattattctaacaccttatcatttgttagagttaaattaatcaaatgaggattaacaagtatacttacaaattttactcaagtcatttagtgcactaaaattactacaaccaattaacaacgcattctccacgataatcacccaacaatttgcgttttaaattagacatcacataatcactactactttttacccgcgatcataaccatgcgcaattgggctacaacatcccaaacgggtgcaagaacgctagtttctagttttaaccccatgattattccattaatcattttaactacttaatcggcatcgaccgacttaacattcatctcgacggtccgagcaccacaattcacgaaaatctatctagatatctagcgtcacatagagagcctactact

SEQ ID NO: 62091 - DNA, 487 bp, Zea mays
  unsure (1)..(487): unsure at all n locations
  Clone ID: MRT4577_156621C.1
tttgggctgatttatgtgcttgtccgtcaccaaaataatagacaacgttgtcccagactaaaaggcgtcaaatagagcgtggtccgtcccagccgctaccgtagtcgcgacgtcctcctcggtacccgccggtcctccgccacttactcccggctcggaaccttccgctctcgctccggccaccaccggacggacaccggccatcggaatgcccacttcgcgcggcgcaccctcctcctcgtataacgctgccctagacatccgtgccgtaacggaagagcgggccgtctacttgatagaatatatagtttcggatgaggccacttttcgtgcggagttcgttatggtgaatgaactttcgcatagaagtaggtaggcgatgcctgagtcggcgaatgcggcgaattaggcgactattaatgcgctgcataggaatccttttttgtagtcgatgttcncgcatcataattagctggngttatcgacg

SEQ ID NO: 62092 - DNA, 631 bp, Zea mays
  Clone ID: MRT4577_156622C.1
atttcgcggcggcttagggttttaactcgcttccattctcaaggttagcaggagaccggccatggcgccgtcgcagcccaagtcagggctcttcgtgggcatcaacaagggccacgtcgtcaccaagcgcgagctgccgccacgcccgtccgaccggaaggggaaaggtaccaagagggtgctgtttgtccggaacttgattagggaggttgctggatttgctccctatgagaagcgtatcactgagcttcttaaggttggaaaggacaagcgtgcactcaaggtcgccaagaggaagcttggtactcacaagagagcaaagaagaagagggaggagatgtcaagtgtcctcaggaagatgaggtctggtggtggtggtgctgcggacaagaagaaatagaacttggctagctggtgaattttatccggaagcaaagtcctgtattaccagtccgtacctatagagctatggccattgtgttgacactatctttagcccgtggtttctattttgagaagaccaatctctttaagatttttacatgagtctggtgcctttgtttgattacttggtactctgctgtttattcagttatgtagcttgtctgggttttgtacctgcgattgttat

SEQ ID NO: 62093 - DNA, 1645 bp, Zea mays
  Clone ID: MRT4577_156623C.1
cccacgcgtccggccgcgaggagccagccagccatggtcgtcccagtcccgccgccgcctgtcctcgcttcccacgtggccgtccgggccgcggcctccgccatatcccacggccgccgggtcctccttaacggcgaccacccgccgcaggtcgcggccctcgggcgcggcgactgggtcaagctcatctgcggcgccagctttgaggatgcagctgatgtcaggaatctctcccttgtctacactcttgctggagtggattgcattgattgtgcagcagatgcatctgtggtgggagcagtgaatgaaggtattgaagtagcagcatcaattgtaccaacagttcaaaggccttggctgatgattagtgttaatgatgattgcagagatcttcatttccgtaaagctgagtttgatcctgatgattgcccactggattgctcaaagccatgtgagaaagtttgcccagctgatgcaatatcactaaagcattccatggttgatggagagcgcacactatctgatcccttacgtggtaaatatgagggtggtgtaattactgagcggtgctatggatgtggtcggtgcttgccagtttgcccgtatgacagaataagagctgtgtcctatgttcgagaccctactatgactgctgaattattgaaaagagatgatgttgatgcaatagagatacataccactggaaaaggaactgatatgttcaataccctctgggacaacttgagtgggtccatcaataatgtgaagctggttgcagttagtcttcctgatataggtgaatcaactgttgacctcatgaacacaatatacacaataatggagccccattttaaagggtataatctttggcagttagatggccgacctatgagtggtgacattggccgaggtgcaacaagggagacagtttcttttgccgctcatgtggcttcaatgtcagaaagacctcctgggttctatcagttggctggtggcaccaactcatacactgttgattacttaaagaaagctggtcttttccaatcatcaaattggaattcagggaccgcaacctctgaaatggccagttctcaccaagctttaataggagggattgcttatggtggctatgctcgcaagatcgttggacgggttttgcgcaaaataccagaacagtttggccgtgtgcacatcgaggatcatcctgatcatctactggaggctctacaagaagccatgtcattagtaggacctgtgaagggttatatacccagtcattccaagcctttcatgaaacaagtagatagacaataggaagtaggaaaagcgcaggatatacccttcaacccagttttgggcgaagataaggcgcatcgtactttagctgtgacagtgaggagttcaatgtggtcattgggccaggaatctagtggttgctgtcggtcgctcgttctagatggattatgggctatggaacctggagtgccgtggtgctgcaaacatctcatgtttcattctgaaatctttttagatgtataatacgtagtagttgaattttctgtaaaaaaacatgttgcttggtgtttgcctttccaattggctgataagcctggccaaaaaaaaaaaaaaaaaaaaaagggggggg

SEQ ID NO: 62094 - DNA, 443 bp, Zea mays
  unsure (1)..(443): unsure at all n locations
  Clone ID: MRT4577_156624C.1
gatattcaggaaccgcagctagcgttatccctgaagtctagaatgtgcacctaccataactagactcaactacattcaacagatgatgctatgaataatgtgaagaatcatgctcagaaataagggcccgaggctggaatactcctctggcgaagactacaccgaccctccgacggttgctatgatcgacgaaaacgagctcaacctatgtgtagtgtagctcccgagcttcggcgagcgctacctctcattgctgcttgctcctacatcatcgagaacaaagcngaaagcatacaagcaccagacctacagcacacacgtctgggctccaggcaaactatttcctgatacgcatatctctttcatatcacagaaacataaaggtcatgagccttatgctcgactactacaacatctccatgtcagatggtgacatcaacact

SEQ ID NO: 62095 - DNA, 1644 bp, Zea mays
  unsure (1)..(1644): unsure at all n locations
  Clone ID: MRT4577_156625C.1
attgggtacctcgaggccggccggatccactcccactcggccactccccatgctttccttgcgcaacccagccccggcgccccgctgacctggtcgggtgcgcctccgcagctgccgctccggtgcccccaggccgcaggccgctgtcctcctgtgatgccatggtgatttggagttgctcttcttgtctccatggattcattcccagagcggcatggaggaggcactacccactcttgtctcccaggcctcctgcatcgccgccgcctatccaccacttctcctccgctagacggtccaccaagaaatctgccccaaaggcgccaatgggctcttccattcctgccgcaaaggcgctaatagactcttccagagagcccttctatgtcatccgcaagggggatgtcattggcgtctataagaacctcagtgattgccaagcccaagccagcaaatcggtacttcatccttcagtcactgtctacaaaggctattctctgcgtaaagaaactgaggaatatcttgctgcacgtgggttcaggaacgctgtctgttccattggtgcagcggatgcaagtgacgaattgtttggcgatctggttccctgcccttttcagcaacctgatgagaacacacaatctattttgaaaatgtcacagggacaggagatggaaacaagatcatcagagcatcccaaagttgctgatctggaaccattaccagatagcgaactctcttgtattcttgaatttgatggagcttgtaaaggaaatcctgggaaatcaggtgctggagtcattattcggcggttagatggatctgtgattgctgtactacgtgagggtttgggtattatgaccaacaacgctgctgaatatcgtgcattgatcctggggctaaattatgcttccaagaagggattcaagtatattcgttgtcaaggtgattctaagcttgtctgtaaccaggttcaaggtgcctggcgtgctaggagcgataatatgtctatcttgtgcgatatagccaaggaacttaaggaaacattccttacatttcaaatcaatcatgttttgagggaattcaactccgatgctgacgttcaagctaactttggatgccaacttgctgttgatgaagttcaagagctgtccgtttgaattgccattggcagagaaaacaagacacggtgcttgagagtagactgttaatcaatactaattgacccacgtgatcatatcacagggtgcaaagagctgtttcggctttttccaagagctgtttcgtttttaccggtaaaaagatggattggaaagaggagaaactggtagagagccacaagttctagcttcatgggctctgtgcgctgctaaagtaacaaacaacacgtagccgaagcaggtgagatatgccccaagacctgcaatattttgctgttggtttggttttgtgttgccatgaggattgaggagcttgattctttgtacatgcaattgtgaactgaattgaagtatacttaactcacaaatacatgatttcagaaattattgagggtttattggtttctttcccaaaaaaaaataaaaaaaaccttcccnnaaaangnaagggcggccgccggatagaagcctcgtcgaccagggaatt

SEQ ID NO: 62096 - DNA, 1423 bp, Zea mays
  Clone ID: MRT4577_156626C.1
aggaaatgcaaattttttatgtggctggttgtgcatgatagatgttggacagctgacaggttggcaaaaaggggaatggatcatcccgtctgctgtccgctttgtgaccaggcggatgaaactattaatcacttattggtcgagtgcagctttgcgaagcagttttggttccttttccttcggtctggggacttccaggtgctctgtccctctacaggggatggctgctttgactcttggtgggagaagagtgccgaggtggtgggcaagcctttgtcgggtggtttcaactcgctggtcatattgggtgcgtggtcgatctggaaacacaggaataggtgtgtgtttgatggttgtagcccgaatgttgaggtcgccctttcggcagctagggaggagttgatgtgctggcgtttggctggcgctaaaactctctctttcttccatttagaggagctgtcttaggcgttaatggtggtgtgagtttgtaaaactgttgtttctgttttggggttccccccttttttcttcttaatataaaaatacgcagacctcctgcgtattcaagaaaaaaaaataaacacgtgttctctgcaactattactctatagctaggtaccataacgtgaggttgaaaagatctaggtcgacagctctatagatttgttaagacttctctagtttgatttagcggtcaagacaaggtgttgcttttcagcagccctctgaatactgctcgagtaggaactctcgatttgatctgtaagcaagcatggccagcacgtatagctctagaatctcaagggcacttgggattattctccaggaaactaatccttgaaagcattgttactcaaatttgtttgttacacaggaattcaactccgatgctgacgttcaagctaactttggatgccaacttgctgttgatgaagttcaagagctgtccgtttgagttgccattggcagagtaaacaagactcggtgcttgagagtatactgttaatcaatactaattgacccacgtgatcatatcacagggtgcaaagagctgtttcggctttttccaagagctgtttcgtttttacgggtaaaaagatggattggaaagaggagaaactggtagagccacaagttctagcttcatgggctctgtgcgctgctaaagtaacaaacaacacgtagccgaagcaggtgagagatgcaccaagacgccccccaagtaccatacctgcaatattttgctgttggtttggttttgtgttgccacgaggattgaggagcttgattctttgtacatgcaattgtgaactgaattgaagtatacttaattcacaaatacatgatttcagaaattattgagggtcttcgattctttctcaatttatgtggattggatgagattaagtgaaatttaatcttt

SEQ ID NO: 62097 - DNA, 277 bp, Zea mays
  Clone ID: MRT4577_156627C.1
tttgcgtttttcactccccctttcgttttcggcccagggctcaagcccgccggagaggagtacaggacccaaaccccaactccacaatgaggccgtcgctgatgagatccaccttccagctcctccgccgccggagctactcctccgcatccgggcagcccgagcggaaggtggccatcctcgggtcggcggggtgcatctggcagacgctttctcttttcatgaatctcaacccactggtctccttcctcttgctttacgatatatctggcacccc

SEQ ID NO: 62098 - DNA, 360 bp, Zea mays
  Clone ID: MRT4577_156628C.1
gaaatatctcgttatatgcaatatagtggttgagttcatatgggtgaagtagccgtggcttgggaaacctaggtctaaggtacaaatgatgcgaggagtgcttaggtaaacatgtatgtctaatgggaatggggttcgtgatggtggagtaaacgcgtcgtgtagcagagtttggtttgaggtgtatggtgatatgcctctatggtatgtcatgatttaggcaccgtagtgttcaggatgtagacgttctatttattgtgaattttaggtttaaggcacaagatatgtactgtataattgaatcgattctattttgagacatggtatttaagtgatgtgaatggaagtttagtgttttaa

SEQ ID NO: 62099 - DNA, 827 bp, Zea mays
  unsure (1)..(827): unsure at all n locations
  Clone ID: MRT4577_156629C.1
ctcttcatctcccatgctcgcccacttcaagcactgtctgcagagcgccctcatcctaacatcttttgtgcatacgttttcctttccattctcggccagtttgcaatgcacttgttcttcttgatgtcagctgtcaacttagcatccaagtatatgccagaggaatgcattgagcctgactcagagttccatccaaacctcgtcaacacagtttcatacatggtgaacatgatgatccaggtcgcaacctttgcagtgaactacatgggccacccttttaaccagagtatatcagagaacaagccattcaagtatgctctctattcagctgttgttttcttcacggtaatcacatcggatatgttcagggatctgaacgactacatgaagcttgagcccttgcctgaaggaatgaggggcaaactgctgctttgggctatgcttatgttttgcggttgctatggatgggagcgcttcttgcgatgggcgttcccaggcaagatgccagcatgggagaagcgccagaaacaggcagttgcaaacctagacaagaagcaggcatagcatcttgcattcttttttccatcactgtttgattcttcaccctccgctggccaaggcagcgatcttgtcactagtaaactgatggcatagtcgcactctaatgtgtagtttaggagaattttgtcagactcttgagccctatttgtaggaggatatagggttgatacctactcaacatacatgcctgggtatggagggtcagaattnttcagttccataccttgtgctaatgatgacatgaatatgcatgaacataccattga

SEQ ID NO: 62100 - DNA, 399 bp, Zea mays
  Clone ID: MRT4577_15662C.1
gatgaaaaactggggtatttcaaaaacttagggggcacttataacttttacattactgaaacaccaaacccacaaacaaacattctggcctataaactactgccaggtttcaagccaacatagatgaaaccttgtttcaatgaccttttcccaagaagcaattatggtaacattatcgaagcatatggtccacatataacactcaagaaggaatagcactccaaatcaaaagtggctcacacagaactatcactctactttggcagatccatgatggcagtgacaaagaaccaactccctttgtttgtgacctagacagtcttggccctagaaacctgacccatgcacattggcaagttaaatgttcttgaaattatatccccttgaggttgagcttct

SEQ ID NO: 62101 - DNA, 136 bp, Zea mays
  Clone ID: MRT4577_156630C.1
ataaaatattgatattgacaaggaaaatggagactcaaagctttcttgtcactacagattattacagtactccatccctgcaagcatccgcttgatacccggtctggtcttaggtttccatgtaagttgaacaaac

SEQ ID NO: 62102 - DNA, 355 bp, Zea mays
  Clone ID: MRT4577_156631C.1
ctccagttccccttcaccactccccatctacccactcctacccactcttcctaaatacacaaacaacaccatcaaaaaaatccaaaacattacatacacaatacatgcaaaatggtaaacttttcttctctctcccataacatccaaccacttctaccccattctatattaaacccacctacccttccatcctttccaatcttatatccattcccctatggaccatacaactcaacttcctttctccaccttttacaactccaaccccctcaaatccccctcttacccaccttaaaacgcctttccacccttccccctttccccaactaacaaacttaccaacccacccccccct

SEQ ID NO: 62103 - DNA, 315 bp, Zea mays
  Clone ID: MRT4577_156632C.1
gccgggagccgggatcctgtatagcgtgtcgccgccccctcttttttttaacacagaaaacaaacaccgggcacggttaccattaactggggaaaggccccatgttacatgtacaccggtagtgcagcaagcagtgtaaaagaacactacacaggactacgtttacaacgctttgttcgacagagctaatgcaaaactgaccacgacaatacagcaacaaaatgaaggggggcaacatgagaagacttacactaaacttcaccgtccgcagaaacgcaatatgtctcccatcccaccggtataaacccacgacaa

SEQ ID NO: 62104 - DNA, 140 bp, Zea mays
  Clone ID: MRT4577_156633C.1
cccacgcgtacgctgactcttggtcgcgagatttattactcttcaaacaccactataaagggatcgaggatctaacatgctatcacctcaagcatcctacttttatacccttacttcctgctaatttcctcatgcctatt

SEQ ID NO: 62105 - DNA, 287 bp, Zea mays
  Clone ID: MRT4577_156634C.1
tgactgaagaagcagtccactcccatgtaaccatgaaagagagccagagagctttttgcaccatgcatttttactattattttccaatacttagcaccatttcactaaggaaccttgaatacaaccaggatcctcctttgcatgcgactgtagctgcatttcatgaatagtttgaacccttgtcaatgcattttttgaaaaacgaagataaaaaaaacttcgtgtaagtgactcaaagcatgtaaccttaagatgttgcattccaaactgacaataaagaccttccc

SEQ ID NO: 62106 - DNA, 287 bp, Zea mays
  Clone ID: MRT4577_156635C.1
aaccacatgttctgggtttttgcctaaaacaaattcataaacgggggtgaggggggggagcttgccaacagggcaaataaacatccccccaatgggacaaccgcagattttttaaaaacattggactaaagctcaatcccttttaaaaaacagggtactaataaggtttaaaaacatgggaaaaccctttgaacttgaaaccattaaccaaaaaaagggtccttataaggacacacatttgggggcaaaaaaatccatgaaaatgctttaaactacaacgctttttg

SEQ ID NO: 62107 - DNA, 251 bp, Zea mays
  Clone ID: MRT4577_156636C.1
cttgcgtctgatactgtttttcaaaaccaaaaaatcctttttaatttatttcacacatcctgggacactaagcatcactttttgttgcccagagggcccgccataaaaccacacaaaggagccgttcactgtcaagacggggggctcgttgctccctaacgcaaggaagccccctaggggggccccgccgtaacgtttacttatattatatttcgccgccccatagctccttaaaggacttgaagggcccg

SEQ ID NO: 62108 - DNA, 578 bp, Zea mays
  Clone ID: MRT4577_156637C.1
cacttacttgctagcttataaggctgtgagactggctgttaaacttgcgggcgcgatgtcgagcctcaaattaatgttttaattaatattttttaaaaaaaaaaaaaaaaaaaaaaaaaaaaaaaaaaaaaaaaaaaaaaaaaaaaaaaaaaaaaaaagggcggccgatatgggggacccaatattaggtccaagtttatgcaaccttacatcccacctataaggtctcctaaagtgaaaccaaaggccaatttattacaccgtgtttaataagaaaaccattgggaaacccatgttaatacccaagtaaaacatcttcctttacacacctgttttaacagctaagaggacagcaaaaaggcccctaccaaacagttttccaaacagaatggcaaattgaatgcccaatggaacgccccattaagcgccgcattaatcgcggttactctcatggttacccgtacagttaccagtacactagccaccgctctttcgcctttttttttttcttttttccctacgtttgtcggcttttcccgcgaatttccaaatcaagctctaaatttagggttcccttt

SEQ ID NO: 62109 - DNA, 343 bp, Zea mays
  unsure (1)..(343): unsure at all n locations
  Clone ID: MRT4577_156638C.1
aaaaagaacttccagacctcttcagtacttatacactcattggttagggctctcatgccatagtctaatttggagtactaaagcattgcacgaggcctgcacatcagaatcctgacgcaatgagacacactgattcctcattccctgtggaggtttcagtgtccgcaagatcaacttcatacgatcttgtaaaggtcatctgatcatccanctgaatggaaatccgcttccgatgcctatgagtatgcaactaagggatcattgcattatatcttcaaattctaaacatggtgtcacctgatcatcaccagcgccagatcactgtcaacgggtacaggccaca

SEQ ID NO: 62110 - DNA, 470 bp, Zea mays
  Clone ID: MRT4577_156639C.1
ttgggtacctcgaggccggccggggacaaaatgtcgattacgaagacgaggagagatctcatgtcggcttctccgccggcgaggacgccatgcctccctccccatcttccgccggtgcgggaggcgactcgacttccggatccgcgtacgcttccggctccgacccgaccccggcttggtgggagtacgtctcgaagggacgatgccgcatgcatgaagctctcctccatactgcccgcggagtcctcgcacaacgcgacaaagctgtgcgactgcgaacgcccgatgcgggtgctcctcaggtcgccggctggatataaggtgctcacggacacactacggatgtgagaggacgccgagaaaccatacggtcaatgactctatgacacgctcctctaacgaaacacagtaatcatgcctagacgcggtacttatcctgagcataactgttggtgaccatacatccggcg

SEQ ID NO: 62111 - DNA, 377 bp, Zea mays
  Clone ID: MRT4577_15663C.1
aaaagatttatgctggacagaaacagataggcgtattccagcactccagctttttggcaggaggtgcaactatagctgctgggagatttactgcagaaaatggagtgatcaagtccatctgggcatacagcggccactacaaacctagtgcagagaacctcctcaacttcatgaacttccttgaagggaatggagtcgatctcaaagaagtcgaggtacgctcatcgaccagagaagactacaacgaagatccagtgcctaatgactcgcagaagttcgcttcagctaccatggaaccaacaaatcttccacagctggtcccccctctaaacaccacgcaaggcaatgaaagcgacaatgctcctaagatcaagcta

SEQ ID NO: 62112 - DNA, 351 bp, Zea mays
  unsure (1)..(351): unsure at all n locations
  Clone ID: MRT4577_156640C.1
gaanaaccggggcgaccgaggcgtccgcgaccattctgcaaggatgattagatacttattgatgaagatactgactttggctcaggccgctggacctattgtctcatgccacaccatctcagcagattgccaggatagtgaagatgctcatgattaatatgcccaaattgtgacaagttaatgcttaatgatcatctggttgatttttatgcaaatagtattcttaactgtatagattataatggcgtctaggattccaatgtcatcaaacctttcatgcatgacgatcccatttttactgacccatattttttaaatattcatatagaacgattttacacttaaacaaaa

SEQ ID NO: 62113 - DNA, 375 bp, Zea mays
  unsure (1)..(375): unsure at all n locations
  Clone ID: MRT4577_156641C.1
tttgggctggtttatgtgcttggacttggctcgacgccctcgaagcagccgccgtcgatgagcccgagcataaggacttcgccgacggtctcgcgcttaagtattagggtacttgacattctcccggagacggcctatgatcggcgccttgttctctcggaattggcctcgccggcgttattacttgcgctcatactgagtagcatgagagggatcttctcaagattggtagggacctataggatgtttccgtcttgtcggccgacgccgtgtctaagtctcttaagacgtaagagcatatcggatgtctcgtttttattgctactatacanaccccgaagagcgccccagaacgagccgaggtgtccatataaa

SEQ ID NO: 62114 - DNA, 127 bp, Zea mays
  Clone ID: MRT4577_156642C.1
gcttctgacgggtcattggaatcgatatgcccaaaaggctgattcttagtacagataaatttggtaccactcacggagcggcaactgccatactgaccttccgagggggattccatccacaaacacc

SEQ ID NO: 62115 - DNA, 283 bp, Zea mays
  Clone ID: MRT4577_156643C.1
ggaggaaacaccgtgtctatagcaacatgacacttaaccaggatcaatgacaagaccttctaatatcaactaggtgttaaacgcacgcgggcctaataaaaagtctacaatagcccatgcacttggtggacaagcacaacggaaggtcttctggtgtccatgcccacataaacaccctcggaaattgaggtaaagcgaccaccatgctcttcatagtacccgaaattcttcagcttgctggacaacacactgagttcacagttcacatgggatatgacactat

SEQ ID NO: 62116 - DNA, 908 bp, Zea mays
  Clone ID: MRT4577_156644C.1
aactatcgccagcggtttataaataagcacacccctaaacccctcaccctcgccgttctctgcctcccctcctcctcctcctccccgttgctcgccgccgtccccctccgcctccgcgcacccaggaaagatggcgtcccacattgtcggatacccgcgcatgggccccaagagggagctcaagtttgccctggagtctttctgggatggcaagagcagcgctgaggatttggagaaggttgccaccgacctcagggccagcatctggaagcagatggctgatgctgggatcaagtacatccccagcaacaccttctcctactatgatcaggttcttgacaccaccgccatgctcggtgccgtcccagaccgttactcatggaccggtggggagatcaatttgagcacctacttctcgatggctaggggtaacgccaccgtccctgctatggagatgaccaagtggttcgacaccaactaccactttatcgtccctgaattggctcctagcaccaagttctcctactcttctcacaaggctatcaatgagtacaaggaggctaaggcgcttggcgttgataccgtcccagtacttgttggaccagtctcatacttgttgctctcaaaggccgccaagggtgtagagaaatcattctctcccctttcccttcttagcagcatccttcccgtctacaaggaggttattgctgagttgaaggcagctggcgcttcatggattcagtttgatgagcccacccttgttaaggaccttgaatcccaccaattgtctgcattctctgcagcttacgcagaacttgagtccgcactttctggattgaacgttcttggtgagacctacttcgctgatgttcccgcagactcgtacaagactcttacatcattgagca

SEQ ID NO: 62117 - DNA, 266 bp, Zea mays
  Clone ID: MRT4577_156645C.1
acggctgcacactcagagaataatggttttggtcgaattctggagccctcgttcgtgtgattccgcctcatgagcttgcttctcgtcatcttccttttcctgctgcaagttggttcctctcttgtgaagtataattcatcagcctgaggggttgattagtgaccagtcagatgacatccctgattctgcacctgtgcttgcaattgcaataacagttgatatcgatcgtgcaactaaatgtttactgctaaaaactaaactgctat

SEQ ID NO: 62118 - DNA, 247 bp, Zea mays
  Clone ID: MRT4577_156646C.1
ctcctgattttcttctctgatttctctcgcacaaatttttatgcgttgtcaaatactgtgggcttcatttttcacccgcatagaggtcgttactttctctttcttccccacacacacaatttacctggtagccgtatcttctgtttggtgcggccactgtgattttgaaataagtttctggttgctccacaattggcattcttggcttttttgcccttcattcgcataatgccttcttttttagata

SEQ ID NO: 62119 - DNA, 1428 bp, Zea mays
  Clone ID: MRT4577_156647C.1
gattgcagccagcacaaaatcagctgccatattcagtggcgtcagcactactatttgtgaaaaaatgtatgcatatggcaggaatcttggtctatccttccaggttgtcgatgacatcctggatttcacccagtcagccgaacaacttggcaaaccagcagcaagtgacttggcaaagggaaacctgactgctccagtcatcttcgctttgcaaagtgaaccagagctaagggagatcattgattttgagttcagtgacacggattcgttagctgctgcaatagagctcgttcatagaagtggtgggatacaaagggcatatgagcttgcaaaagagaagggtgacttggcaatccaaaatctgcagtgccttccaagaagtgacttcagaagtgcccttgagaagatggtggaatacaatcttgagaggattgagtagtggattttacttgaatgctccatcagggctccatcaggtttcagtggaggcagaagtaaagacgatagtacccgacgacgtcctgggcaaggccgaggcaaggtgttccattactccgccatgttttatttcatttgtactactgtcgtctcctatggtttaatttcagcagtacaaacggagctcatcctatctctttggttgaagctttcccaaatatgagatttttaaaggtcgttatgatatcaaattattaataatggatctcccaggcttggtaaattagtggttctaaggtattaacactactatttttggtacatctcgatcctgtctcttgtgcattgtccatctagatatgtgagtttgtctatgtcaatagaatcatttgctgaaatgaggacacactatttatctatcaagacacttcgtaataaaggagatgattaacagtggttataaaaagtgcaatataaaccttatatatgtaaaacccactaaagtttttattttatttctctgaggttatattaattagttggttatttctcatctaagctcaataagcacaaacatggtttcagtatgtgcatggtatatcagtacattcttgcatggtaaattagtggttctaaggaatactactaagtgatactggacttccttggtggtctgcgttcatccatccaatatggaggctccaacacatctcttcattatctgtatctggatttatctgtgtaatagcattatggtgctcctaacttccaagcttcattaaacaaggaaactgaaagtgtcagaactgcaattcatatagactagatttttatgatacattgtaactaatgcattggtaagcattactttgaatgtgtgggtttttccaggggttgagtggtatgttgtggtcagatttggcaacaatgtatctgccatcatgtgctatatcgataaattatgatacaatgtggtcagattctaggttt

SEQ ID NO: 62120 - DNA, 262 bp, Zea mays
  Clone ID: MRT4577_156648C.1
tgcggtctcgtgggttgatcgggcgctactggtactacagttaggccactgttcctctgttacccgctaacctcgcgccggagtcgttgcccaccatggcctaccgatccgcagtgctcttgcccgccctactactggccgaagccgtcgacttggcctcggacggcgacggggatgggaagcggcccgaggagcatgcgcggcaccgggtgccgaggatgccggggcaggccttgaacaccagcttcgcgcagttcgacgg

SEQ ID NO: 62121 - DNA, 465 bp, Zea mays
  Clone ID: MRT4577_156649C.1
aaaacataataccacaaattaaataagtctccttagtgattacattatcggcattgcagatatattaaccataaattttaatgcagcgccaataactcatgcgataaaaccgagtaacatggcgaagcctggccacactacacctgctggccccctcctgccgaagcaataacccaatccaccgcttgttcagatgccaggcacaaaagccaagacacaccatcaatcaatcattctaaagagtacctttaatttttaacacttagataaaggctgctgagcgaggtactcgcttggcgaacatacactggataagaccatccttcatgacggccaccacagcatcttgtggttggcaccacgtcactggctaaatcatcatctttcggccctggccggctcgagccacgcatgcatgccattagcttgggctctttgccaacgagccatgcgcaaggcgtgacg

SEQ ID NO: 62122 - DNA, 490 bp, Zea mays
  Clone ID: MRT4577_15664C.1
gtgatgtgttgattaaccccttcccctttaggatttagatttatattattatatttgctgccttatcaccttggttctaatccaggtttctgtttaattatagtgtaaacatgaattcgacattgtcatttgtacgatgatgttagactgcagcgaatattggtaaaccgtagtgcttatttagtgtatctttaacattttttttggttatgtgactgatcatgcatagggaaggtgttttctaacctctcagctatgtaaatttggaaagcaagaactgatacacgagaaaaactacttcagcttgtcctcagctttgcatgcttgctctgattaatatttgcaagacgaaccttatccgaaagaaatccaagctagttatctgttgaacttggtgtaggggggatttacccatgaccagatgaagggcagaagctcacccgccagtaattttagggatggcatagtttggtccctctgggcatgtacc

SEQ ID NO: 62123 - DNA, 582 bp, Zea mays
  unsure (1)..(582): unsure at all n locations
  Clone ID: MRT4577_156650C.1
ccggaattcccccctcgaccccgcgtccgctctccccaaactcatcatcgtgtagttttaggccatctgagggcctttgaatggctctcggcctccttcatttttcatagcatttgtgtagtgtgtgcaaatccatcatcgcatcttcatatctgaagaaatgaaggtgaccactcagctcaagcccatggcctcctcgtcgacgtcgccgtcgccgtcgcggctgccgcggagcgcgagcggcaaggcgcccacctcgccgccgtccagctccaacgcctcgcgccgccaccaccagcagccgccgcgggcctcggcgtcgacgcccgccaccccggcgccgtcgcgccaccacctcaggtcgctgtccatcagctgcatgacgatcaggaccgacgacgactcgccgccgccggccgncaccccacaggacaaggcggcgacggccaagccgctgtcctactactcgtcgatgctgtcgccgaggaagctcatgcagcgcgcgtcccgcgcgttccgccgcagcaagtcgtctcgccggaggaagagcaaggaccacctcatcgtcggcgtcggcggcgg

SEQ ID NO: 62124 - DNA, 358 bp, Zea mays
  Clone ID: MRT4577_156651C.1
cgtaagctcggaattcggctcggactaacaccgtttatcttctggagccggacttttacacactgggctcctgttatacagaaactggcccagtcggaggcaggggcctgtggcgcaaatgcacatgcctggggactgatgttgccggagggcagccactaaagccatctgcctggttcaagtcatgacccagggctataaggtctcacaccctggaaatatgctggccttgtacagatcgtacagtgtagtaaagcttttggtcacacttgcaggcgcactgcctaaccatatcaggaccctgctagaatgctattgctgggatgaccactggtcagctatgtggatggtgtgcaaa

SEQ ID NO: 62125 - DNA, 303 bp, Zea mays
  Clone ID: MRT4577_156653C.1
cacgcgttccgaaatactcacaatttctatatgatgtatgcaaattctacttggggtggggcacccaatcttatggggctcctcttaatttccttcacaaaccggtcatcttttcctcgctaattcgttcggaacttttcacattcaaaaaaggccttgttaagattgagacccaaggcatattcatttggcatactttcatagacatgtttctgaaaaaatcgtactcataaaaccctttgactggctactcacccaattctttctcattgaccgtctattttcccaaaatggtcacctttt

SEQ ID NO: 62126 - DNA, 309 bp, Zea mays
  Clone ID: MRT4577_156654C.1
gttcatctcgctgcttgttgcattcagacaagtttattttgtttcccctttcaaaatcaagagatgaaatgaaatagccatcatttgttgttacagcttgcaatggtagtaaatatgattgggctgctacatgttacaacataatctccttccatcatgttgggagcttggctctgttggctcaaatatctagttgaagaaaacgaatcctcaagaaaggaacaaacaacagatgcgggaaagagagctctagctccagttcaggagccccaactccccgcaagagatggaacgattttcttgccaaat

SEQ ID NO: 62127 - DNA, 292 bp, Zea mays
  Clone ID: MRT4577_156655C.1
tatgatgcggaggtagacctttatataaaccatgcatttaacgtagcgtttttgctaaaatatggatgttggagcaagaaaattccttggttgtacagagtatggagatgaacctaccaagaggcaagaggataataacatgatcgagcacaaggatgaagcaaattgttccaacgaagatgaaactgtcgagaaaccaaagcattcaaacgctgtgcattctaagaaggagaagtccaaaaccaatggttgttgctcttgtggatctgcaaggaagcacaaggcgtcttgt

SEQ ID NO: 62128 - DNA, 133 bp, Zea mays
  Clone ID: MRT4577_156656C.1
cccacacataaaggaacgttagcacaggactcgttctgtagtacgactcataatcatattgctttgggaagcatacccattatcgagaccaagacgatccaggtacgtaggcacgaataccatgattgctaat

SEQ ID NO: 62129 - DNA, 1217 bp, Zea mays
  Clone ID: MRT4577_156657C.1
ctcgaggccggccgggccatttgccttgcttcttgaaaaaccaatccttggattagtgaaaacatagtttatgttgctggcgatagggttgttaccgatccgctttgcaagccatttagcatgggaagaaatctcatttgcgtgtactcgaaaaagcatatgaatgatttccctgagctaattgagatgaagaggagatcaaatactcgaagtctcaaggaaatggcattgcttttacgtggtggttcacagttaatttggattgcaccgagtggtggtagagaccgcccaaatccctcatcaggagaatggtacccggcaccattcgattcatctgcagtggacaatatgaggaggcttctggagcatgctggtgttcctgggcacatatatccactatcattgctgtgctatgaggttatgcctccaccacaacaggttgagaaggagattggtgagcagagggtgatatccttccatggagcaggcttgtcagtaactgaagaaataaactatggagacattactgctcataccaagaatgctgatgagggaagggagctattcacaaataccttgtacaactcagttgttaaccagtacaatgtgctcaaatctgctatctttagagatcgtggagcagctgtatcaaacaatgtcatctcactgtcacaaccatggcgatgaatgtccagtttcgttactgaagttaccttttcaaaagagcaggtgaactatcattgtgcaattttgctgggagaaactcttgaacttaaatctttttgatatcactagacttcatcaatcatggtggagcctgttattgtcatgcagatgctcgctaagaagtctgcaactgttggttggtcaagggtgattggcgattttgcacatacggatccgcagttactgctgcctcaggttgctcagcaatgtgctgctggttgggcaccgaggaatccatcaggttgcatcctttttgcccggacgtcgatttgtgcagttgaagtggtaaacgtttttttatcttgtttcgtcatcatgtatatacgtaggcttgagtcattgttggctccacattttttggagatataaatgcggtaggagttatgagatgtccacagtcggccctcccttgttgaattcctttggatgtatcctctctctttcgtacatgcactcactgaaagtcaatgcaaatatctcgtgtttctagt

SEQ ID NO: 62130 - DNA, 603 bp, Zea mays
  Clone ID: MRT4577_156658C.1
agtggagcagctgtatcaaacaatgtcatctcactgtcacaaccatggcgatgaatgttagctttctcagttttggtccagtttcgttactgaagttaccttttcaaaagagcaggtgaactatcattgtgcaattttgctgggagaaactcttgaacttaaatctttttgatatcactagacttcatcaatcatggtggagcctgttattgtcatgcagatgctcgctaagaagtctgcaactgttggttggtcaagggtgattggcgattttgcacatacggatccgcagttactgctgcctcaggttgctcagcaatgtgctgctggttgggcaccgaggaatccatcaggttgcatcctttttgcccggacgtcgatttgtgcagttgaagtggtaaacgtttttttatcttgtttcgtcatcatgtatatacgtaggcttgagtcattgttggctccacattttttggagatataaatgcggtaggagttatgagatgtccacagtcggccctcccttgttgaattcctttggatgtatcctctctctttcgtacatgcactcactgaaagtcaatgcaaatatctcgtgtttctagt

SEQ ID NO: 62131 - DNA, 206 bp, Zea mays
  Clone ID: MRT4577_156659C.1
cccacgcgtacaaagtccacctccaagttcgccaccgtccgcatacatggcatcgcctggtccttcttgggcatgatctgcgcgctcgtctactgcaccgtcggcatctacggcgggcacatcaacccggcagtgaccttcaggctgttcctggcgaggaagttgtgcctcaccaacgcggtgctgtacatgatcatgcagtgcct

SEQ ID NO: 62132 - DNA, 601 bp, Zea mays
  Clone ID: MRT4577_15665C.1
gccggccgggccgggacctctcctagttctaccaaccatgccacttctgactgattattgtgacgcgccgtgctcgccgcaacgaccgaccacacagaacgacgcatggccgcttcatccttgcaccataccacttctttcctcgggcaggccctgcccgcccgcgccgccgccgtggatgtcggcaggacgtcatcacaatgcgacgcaccgtgccgacggatccccaaaccttatggcaccgcccttaccgccccacgaaccttggaccgttctcctgataaacgccgacaaatatgaccgccatgttactggcggactatatgagaccacacctgcgtgatcgtctcggtcggaacgaagaccttcgatgcagcatccggcgagcgtacagtgtgatgcactcccgaggacggatgacttcgggcgcgtggcatgtccgctaccgctgatactggttaacattgaccttccatttgcagaggacgctcgagtcctctacggagctcaaatgttctcgcaacgactgctgcaatacctggtgaacccccagctgacgctcgcacatagaatcctgtacatctgggcgggccaaacggag

SEQ ID NO: 62133 - DNA, 225 bp, Zea mays
  Clone ID: MRT4577_156660C.1
gaagcgcgctagagacatacacttatacctattctgctctttattatgatgattaaaaaggggaacattagggcgttcttcgcatactccttatagtccaaactctgtatccatccctagttacttactcctttattgattaccatttgattgtttcttccggtttttatcaatctcttaaatttcttcatactttattttattcatacatctttactttatttt

SEQ ID NO: 62134 - DNA, 136 bp, Zea mays
  Clone ID: MRT4577_156661C.1
ccattatatactacatcactctcaaacctattacacatataccataacccatactctttccaaccctcaactcttctctacaacatacatctacacactaactttttccaaatacatcccttcattcttactacat

SEQ ID NO: 62135 - DNA, 424 bp, Zea mays
  Clone ID: MRT4577_156662C.1
ggggaagggcccaatttatttatacaggagccccccaaatggggggggaggaggggatatttaaaaagggttcttaaaaaaaaagggggggggggaaaccaagcaaacgtggggacgggcgtattaacccggtggcattagggacactggcacgacacgaaacgaagaaacatatgtacagaaaccttgtttttgaaaaaatatgtaaaaggggggctggtttaaccaggggccaattggttaaaaattaaaaggccttgtgggagcgctggggggtgtttaacttcggccgcacactggataggggggggggggggaaaaaccggggttttttctattttgttgttggccccctggggggcttccgggataggggggcgcgggctcccgcccggttctaggggggtggggggcccggtggggg

SEQ ID NO: 62136 - DNA, 266 bp, Zea mays
  Clone ID: MRT4577_156663C.1
gggggggccaacagcgaagggctaaagaagtcagcaaatttagtggtgggcccgaaaccagcaattcattaggggagacctaaagaagccaaaaaatcctttattaggggccaagttttggggtacaatggccaaaggctatgggggaaaaaacagggcgtggatttaaagcagggggaggcttgcacaatttaatttcaccaagggcaaaggggcatttgcccccataaaaacaagacccttttgcgaaagtttaacacaatttg

SEQ ID NO: 62137 - DNA, 185 bp, Zea mays
  unsure (1)..(185): unsure at all n locations
  Clone ID: MRT4577_156664C.1
ttccgtgtccgcgttcagtgtgtccgttactncgttgcggctgaggcctggagttgctaacatagaagatagcgtgcgcgcgggagacgtagatggtggttttggaggcgggagtggtggtggtaacattggtgacgtcgacagaggggacggtgattgtgatccatagtctgtatgagtggagc

SEQ ID NO: 62138 - DNA, 990 bp, Zea mays
  Clone ID: MRT4577_156665C.1
tcaaaggatttggtccgtacctttcaggggttggcctactgcaatagcggcgtcgaaattgtccccatcaatcaggtgggagagaaagggcaaccatggttgaattttgcttctgcccggagtagggaatattacctattagctaggtattgggtaacgaattgctgaatttttactcaagacaacgtaaacaaaaattacgaaaagacctaatttattccgattctgtaaagatccatctcaattttttcctcggaactaaatcccctgccaataatgaaggtatctgcaattatttcttgggtaatttttgccccattattccagtttgattgaatgttgttgaattttagttgaattttaaatataactctgtaaaccagagtgaggtgatctttgctgtgggggcaatagtgttactctatggcgttggccaggccatctggggcatttttcaacaacccacccaaccccaaccgttggatgaagtacaggtggaaacgcctgcgacttaattgctctccaatcctaaaaattgtttaaaaagtcccctggctcaccaagttgggggacaattaactcaaaatttcccagtattgcgacagcttttgggaaaaaaattaggttaataattgccaatatggaaaaaaggcgatcgccgtggaaattaattggtcttggcaacggtttaatgatatttctggggaagcaatgcacgaaatgcttgccctacggcaggaagtgtttgtggtagagcagggatgtttatatctagacgctgacgggttggataaacaatcatggcacctgtttggtcgcaccaatgatcaacaattagtggcctacgcacgactgaattttcccaataccagatacccggaaccatctttcggtcgggtgctcacaagtaaagcaataaggggaatgggcgctggcaggaagattgtcgcagcctgcatccagaaaagcttgcgggagtatccaaactta

SEQ ID NO: 62139 - DNA, 223 bp, Zea mays
  Clone ID: MRT4577_156666C.1
gggcgtggtttttttataaaaaaagcccacctctcgagttgaacaacaatttaggggaggaacacaacaactgcactatggaacccaaaaggtttccaggtgagccaaaaaaaaggcccatctactttgcaacttgacccacccacccccccccaaaactgtgtttttactaccaaacccatacgagggggggcttgggaaaaccacccggggggggagggtg

SEQ ID NO: 62140 - DNA, 717 bp, Zea mays
  Clone ID: MRT4577_156667C.1
atgcggatacttgcttatggcttaccttctgatgcggtagacgagtatattcaaattggggaatcaacggctagggaatgccttcatcatttttgtcgcgcaatcattgcctgttttagtgtctggtatttacgcactccaactcaagatgacattactcgcatcatgcataatagtgagtcgcggggttttcctggcatgttgggatccatcgattgcatgcactgggagtggaggaactgtccaacggcatggcgaggtcaattttgtggtcgaaatggtagggcatcgatgatacttgaagcagttgcatcgtatgatctatggatttggcatgcattttttggcatgcctgggacaaacaatgacgttaacgtgctccaccgatcccccgtatttgacccaatcactactggtcgaatgccacctgtcaattacacagttaatggtcatgcgtacaacttcggttattacctcgctgatgagataatgacggcttgcatcatcatgcacaacatgatcgtcgaagacgaagggccatttgctgcaaacattgatttcggagacaactcttcaaggattgattcatctcaaattatagcggaaggccgtgtcgaatgggttattaaccactttgatctacgtcgccaagaaagatcgtgctcccttcaaaatgatcttgtggagcacttatggaatcaccgtggaagtatgtaa

SEQ ID NO: 62141 - DNA, 903 bp, Zea mays
  Clone ID: MRT4577_156668C.1
atgcggatacttgcttatggcttaccttctgatgcggtagacgagtatattcaaattggggaatcaacggctagggaatgccttcatcatttttgtcgcgcaatcattgcctgttttagtgcctggtatttacgcactccaactcaagatgacattactcgcatcatgcataatagtgagtcgcggggttttcctggcatgttgggatccatcgattgcatgcactgggagtggaggaactgtccaacggcatggcgaggtcaattttgtggtcgaaatggttgggcatccatgatacttgaagctgttgcatcgtatgatctatggatttggcatgcattttttggcatgcctgggacaaacaatgacgtgaacgtgctccaccggtcccccgtctttgacccaatcactactggtcgaatgccccctgtcaattacacagttaatggtcatgcgtacaacttcggttattacctcgctgatggtatttaccccaactggcctacttttgtcaaagcaatccgacacccatacgaggaaaagaaagtctacttcactcagatgcaggaaagttgccgaaaggatattgagcgtgcatttggagttcttcaagcccgctgggcggtgctccgtggaccagcttacggttgggatcgtaatcgtttgacagagataatgacggcttgcatcatcatgcacaacatgatcgtcgaagacgaaggcccttttgctgcaaacattgatttcggagacaactcttcaaggattgatgcatctcaaattatagcggaaggccgtgccgaatgggttattaaccacttcgatctacgtcgccaagatagatcgtgctcccttcaaaatgatcttgtcgagcacttatggggtcgccgtggaagtatgtaa

SEQ ID NO: 62142 - DNA, 380 bp, Zea mays
  Clone ID: MRT4577_156669C.1
aaacacacttctgctagatgattcaatattaaacaaatgtagcaagtcaaccagacatgggctgtcgctgaatggatcatttgatctgatacagctaaaggctattattgaacgtgtgtctaagaaatgaattggatagaagattgtcgtgtatgggacaatgccaatcgttgtctccgctgtccctgcaagcgttgtagcttccttgtgtgatgcttatttgagaacatatctgttgtgctcagatcatatcctgagtgcctgtcatgacagctacttttggcgacatcataccatcatactcactgtcaagctttaaagagtgaagatacgcccatggtcctggcaaactagtacatgtgactttgaactttgccaat

SEQ ID NO: 62143 - DNA, 276 bp, Zea mays
  Clone ID: MRT4577_156670C.1
cctttgacccaccatttgtcagggttctgtctccagtcctctctggagggtatgttctgggcggaggggccatctgcatggaacttctcaccaaacagggctggagcagtgcctactccatcagactcagtgatcatgcagatcagtgccacactggtgaaggggaaagcacgagtgcagtttggagccaacaaatctcaatacagtctgacaagagcacagcagtcctacaagtccttggtgcagatccacgagtcaaacggctggtacacaccc

SEQ ID NO: 62144 - DNA, 347 bp, Zea mays
  Clone ID: MRT4577_156671C.1
tcctcctgcctccagatctcgctcgctcggcgccagttgcctcgcagtttggatcatctcatacctcggcgaagatgagggagatcctgcacatccagggagggcaatgtggcaaccagattggcgccaagttctgggaggtggtgtgcgatgaacatggcattgaccctaccgcgcgctacactgccaattccgaccttcacttggagcgtgctaatggcccctacaatgtagcctcctgcggacgctttgacccccgagctgttctcatccatcctgatgcttgccagaatgaacagctctccctatcagtagcccctgttttttttttttttcccccccccccc

SEQ ID NO: 62145 - DNA, 164 bp, Zea mays
  Clone ID: MRT4577_156672C.1
gtcgagccctcctaccagagcgtcgccctcgtcggcggatccaccggcatcgtcggcacctccctgctcgacatgcttcagctctccgacacccccgacgggccgtggaaggtctacgccgtctagcgccgcacgctcccgccctggtccccggcgccctcccc

SEQ ID NO: 62146 - DNA, 297 bp, Zea mays
  unsure (1)..(297): unsure at all n locations
  Clone ID: MRT4577_156673C.1
gnacattccgtccgcccgtccgtccgcttgccccctcctcagagctagcctccaagctcgcaattatataagcatcgtcccttgcaactttccagaacttttgtccccctccctcctccccacctctcgttctctccccccctccgcctgcaccctctcaggagcgcgtgcgcgcgcgcccagatctacggtttcgtccgcgccaacatgagcagcccgcatggcggtctcgacgaccagatcgagcggctcatgcaccgcaagcccgctcgctgaccctcgacgctacagctcctt

SEQ ID NO: 62147 - DNA, 412 bp, Zea mays
  Clone ID: MRT4577_156674C.1
agttaaaacatcattttggtgttgtgaaaatatgtaactatttcagtttattggcatatttgagtttgacccgttgtgtgagtaatctaatactccgcttggatgtcgatattggagaggatggaattgaattgggttgaataccaaatcaggcatgatattgaaatgagatataatttcaattctattgtttggatgtcactgaattggagtttggaattatgcggtctaattctaggcaataccgagggggtgaggctttgtattggaagagggggtttctagttatagtctaatttcagggaattgggcctctgattccaaatctcaattccacatgcaacgaaacaacataatttaggaaagctgattccaattctcaattctgtgattcaatctctacatccaaacg

SEQ ID NO: 62148 - DNA, 322 bp, Zea mays
  Clone ID: MRT4577_156675C.1
gttgtgctggatctattcacgcgtacgtgatctttggacttcgtctctggcgacggctgtctctccataagatcgatttcgagtttagcagaatagcaatgtcatgcgcgctgtgtagcagatctgaatctgtccgaaactctcacttactaagctcttcgctcaactccattagatcctcgagcgcttcttcttcatccgccgcttcttctgctcagaaccctaagactaagacatcgaagcgaagaaagaagaacttgttcgatgtgtctcagttcttacctaactgtggaatcggctaccacatggccaagactcactg

SEQ ID NO: 62149 - DNA, 290 bp, Zea mays
  Clone ID: MRT4577_156676C.1
gtgtggatactatatttgcatggattatttgcagcgggaatggcatttttttttgcagagctaaaccagtttacaaaaagtttccattgtacattttttgggggttttccaaaaaatttgtttccaaaagaatattttttaaaagggttaaattttcttattacttaaaaaaccggcctacttaattttccattcttcaaaaaaaatcgacaaagggggtttacctattataaaaggcgcctccctccctgttttattcccattcacaacaaaacacaaacttaacctgg

SEQ ID NO: 62150 - DNA, 173 bp, Zea mays
  Clone ID: MRT4577_156677C.1
cccccaactataccgccgtatgattagactctcttgacagtctctccatcacgcgccttggagatctatgcgaggacgatgcatccctcttagttgcagcactcaatcgtctgctctgctccaagttagaacgcagagagaccctgattacttgccaggccatacttgcatat

SEQ ID NO: 62151 - DNA, 309 bp, Zea mays
  Clone ID: MRT4577_156678C.1
ccggaagctaagagaaaacccccctcctttttttttgagtttaaaacaacacaaggattttgtttgggccccgtcttcccccacccactgattttttaaaaaaaaaaacccccttgaacgcttttttaaccttccacaccgagaggggggggggggggggggcaccaagggatcgggatcggccctatccggcaagcacaggaaaagcttaaaagcggttctgcctgattacctggccaagaaaaaaccgggctcccgaaggggggtggagagcgcggaactaagctgggcctgggaggacatccgggt

SEQ ID NO: 62152 - DNA, 420 bp, Zea mays
  Clone ID: MRT4577_156679C.1
atgtcaccatttgaagctttatatggcaggaagtgcaggactcctctatattggaatcagactggagaaagacagttctttgggcctgaacttattcaagaagaagaggaacaagtctgtatcatccgggagaatttgagggtagctcagaccaggcaaaatagctacgctgataatcgaagaagaccactggagtttgaggaaggtgatcatgtgtacctcaaggtgtcaccacttcatggaatgaggagattcaaagttaaaggcaaattatcccctcgctttattggaccattcagaatttttaggcgagttagggagatggcctatcaactcaagctacctgatcatctatctgatgggcataatgtgttccacgtgtctcaacttaagaagtgtctccatgtccctgaggaatag

SEQ ID NO: 62153 - DNA, 295 bp, Zea mays
  Clone ID: MRT4577_15667C.1
caaaatctattatattccataacacaatcatagtggtccaattattatatcttaattgccacaacattgtgtataaacattattataattgttcgtcctagcaatgctatgcttttgctagtaactgatgatataatatgcaggtatttaattgttattgatgacatatgggacatctcagtctggaaaatgattagatgtgctttaccagataataatatcgggtacattattgttacaaccacacgcatttccgatgttgctgaaaaagttggtggtgcttataagctaaaac

SEQ ID NO: 62154 - DNA, 302 bp, Zea mays
  Clone ID: MRT4577_156680C.1
tatttttatcccatttgaaatcaacccatggggggtttcttcgtctagcagggtctgaccctcatggccaagatcaagatcgggatcaatgggttcggcaggatcggaaagctggtggccagggtggccctgcatagcgactacgttgatcttgacgtcgtgaacgacccctttatcagcaccgatttcatgacctacatgttcaaattttacactgtgcacggacagtggaagcaccattaggtttaagtgaaagatttttaaaacctcttttttttgtgtaaaaagtagattcttggttt

SEQ ID NO: 62155 - DNA, 1299 bp, Zea mays
  Clone ID: MRT4577_156681C.1
atgttggggcgaaggcatagccgccaccctccgctcgaagccctcgctggtgccgctggtccgacaaagacaaaacgggcagggacacccttcgcccggaatattctggggataacctgggtagctgagggcacatgcgtccttaacacaaggcgctgggcgctcaggagactcaacctgggaatagttgcacatactgaaggagtcactattgatgtggaacctaccttggagcaagaaattcgcaagggtcagattggtgatgcaaaaatacaggagatcaaagatctgattacagaaggtagaggtccagaattcacggaggatgagcaaggcacaatatggttcaaggaccggatatgtgttcctgagattgacagccttcgtgagactatattgaaggaggcccatgattctaattactctattcatcctggtagcactaagatgtatcaggatttgaagcagaagtactggtggtatgggttgaagagagatgtggctgcacatgtgactatgtgttatgtgtgtcaaagagtcaaggctgaacatcaaagaccagctagactactgcacccgttaaagatacccgaatggaagtgggaagaaattggcatggatttcattactgggttgactcacaccccgaaaggatatgattttatatgggtgattgtggatagactgaccaaagtggcgcatttcattccgactaatggccagactgaaaggactaatcaagtattggaagatatgttgagagcttgtgcccttcagcatggaggcagttgggataaaagtctaccatatgttgagttctcatataataatagttaccaggccagtctgaagatgtcaccatttgaagctttatatggcaggaagtgcaggactactctatattgggatcagactggagaaagacagttctttgggcctgaacttattcaagaggcagaagaacaagtctgtataattcgggaaaacttgagggtagctcagactaggcaaaagagctacgttgataatagaagaagaccactggagtttgaggaaggtgatcatgtgtacctcaaggtgtcaccacttcatggaatgaagagatttgaagtcaaaggcaaattatcccctcgctttattagacacttcagaatttttaggcgagttggggagatggcataccaactcgagctacctgataatctatctgatgtgtatgatgtattccacgtgtctcaacttaagatgtgtctccgtgtccctgaagaacagttaccaatggaagagctaagtgtttag

SEQ ID NO: 62156 - DNA, 571 bp, Zea mays
  Clone ID: MRT4577_156682C.1
ttttttttttttttttttttttttttttttttttttcaccttttcaaaactcaagtttattacataggaagagttacatttattacaagtcctgatatactcaaagtgcataacttattacaaaagcaggaaggtagaaatcctccaaagcttgtacataaacctagctagtcctcctccagaactggaaacgccctccagcctcaagaacacctagagtactcctcaccacctttgttgcagaggcggaggtctaaatccctctattaaaccccagttagatggctcccatcacttgatgagcaggcactgaagcagactcctcttcagaaaccacttcttgaattttatcatcttcttctgggaattcggtgaggaacaaggaacgggcacaacacggccgagacaatctccacgaaccctggccatggtgaggttgaaggattgctgttgtggtcaccagacacatgagttggctgtgatgaataagggcagatcgatctagtggctgaggaggggagctaaaactgtcgtggacacacccccgcgtacctgcccgggcggccgctcg

SEQ ID NO: 62157 - DNA, 1102 bp, Zea mays
  Clone ID: MRT4577_156683C.1
acgaataatagcggtctttccttgcttcttcctgatttcttccaaattacaatttggcatcaaaggaggtgaaatgtacaaatcaaggaaataatatctatcccttctcatgaaatgaaataaaaaagaataacaagactgacacctgaccggacttcacaagcagccagctccagcttaaaccagcaacggaactccccaactcatcaagcagattacttgctgctcatcaactggccattcaacacgcccttgaaccctgttgctacgactcttcaaacagatcctgtacagttttagtcacttgctgacttgcctctacctacactcttgatatagacagctccactccgggagtatggtcgtattgcaaatcatggtcagaggtgctgcagcaatgaaccgacatgtcctgaacctccatccaccaaggctacctagaactgcttggctgctgtgtctccccaactctttcaatttcaactgccatgtcagcgggctccttaggtttgctcccgttagaggttcctcttctagttggttttcttatcttgtggaaggatccatggatggaatccatcaccgagccttcaggccactttccacttctatcggttggatccaagttgcttggaccccatgtgtacatgacaaacttccgaaccttgttccaatttcgttgagcgcgttgtttgctcaggattttcagcattctggtatcctcgtcacgaagcttctttattctgccttcacattgagccatgagacagagaaaaaatgcaacactgaaggcatacaggccaccaatactcgcaagaatactgactgggccaagcacattctcattgctgatctccacaatatagtcagaaagataacttatgaagagtgtagtatttataactccatctctagggttgtgcaaggaagcattcaagctgctcagatctgataagatagaaccttgagtgaagtcctgaacaagtggctgcaagagcttcaagccatgaaggtggttgtatatctgaggaaacaattgaattttgagcacattggaatccggccctctgaagttttccccggccggcctcgaggtacccaa

SEQ ID NO: 62158 - DNA, 191 bp, Zea mays
  Clone ID: MRT4577_156684C.1
tcgtttaagcattcgctgaccacgtcgcatcggagccgacacactaagcgcacaggttgacacactgagggagcactgcatggacacccagaacaagccactatgaaggtaaggaaatacaagtggcggcacgacactacatatgcgcgtgataagatgcagaacacagactgatgatcgtccgcatgtca

SEQ ID NO: 62159 - DNA, 603 bp, Zea mays
  Clone ID: MRT4577_156685C.1
agagacacatatttcccagacgaagcccgttcgttctgagaagtttccacgtctccgcgccatccgccctcctggatctgcagtgagtataccgctccaaatggcgcgcctcactcaatcgtacgtgcatgtgccacgctcgcacctatcctagcagcagcatggggtagcaggcacgtagagactgctaagaagctgcgccacagccctacaatactgtgactgcctcgagtcacgcgtcttaaacacagacctctgccacggccggagccagcacaacagaccgaccatctctgtccagccttgagcagataacctgagaaatctgctgcgaggagagtatgctaccaaaatctcgttgttaagctagaagagactatctgatgggagcagattctatcgatcaggcgttgaagacagccgaaagttgaggctagctaagaaggctctgcttctcagacatcaacgacttatgaggtggagcttggaaccgatgaagagaaccactgcttctgccgcgagtcagacttgttagctgtacttgaacgaatttaaccatgaaaatttcggatttacctgggaaatatcttgcccccaatttgt

SEQ ID NO: 62160 - DNA, 956 bp, Zea mays
  Clone ID: MRT4577_156686C.1
taggggccttttttttttttttttttgcaaaacattctttttatttctaaaactgaaggttattacataggaagagttacatttattacaagtcctgatatactcaaagtgcataacttattacaatagcaggaaggtaggaaccctccaaagcttatacataagcctaactaatcctcctctagaactggaagcgccctccagcctcacgaacacatagagtactcctcatcacctttgttgcagtgaagaggctcaagacctttctacccaataaccagttagatagctccatccacttgctgaataggcactggagcaaactccttttcagaaactacttcttgaatttcatcttcttctgggaattctgtgaggaacaaggaacgggcaccacacgaccgagacaacctccgacgaatcttggccatggtgaggatgtaaactgctgctatggtcaccactggcaggaagatggcgtgcaagtttctgaggggcgaagtttggtgactggggagaggtgagtactagcgtgaacacaggaattccagcacttacgcagtggtctcgagctaaaacctttgttgcagtgaagaggctcaagacctttctacccaataaccagttagatagctccatccacttgctgaataggcactggagcaaactccttttcagaaactacttcttgaatttcatcttattctgggaattctgtgaggaacaaggaacgggcaccacacgaccgagacaacctccgacgaatcttggccatggtgaggatgtaaactgctgctatggtcaccactggcaggaagatggcgtgcaagtttctgaggggcgaagtttggtgactggggagaggtgagtactagcgtgaacacaggaattccagcacttacgcagtggtctcgagctaaaacctgagggcaaggggaagctttactgaacccaag

SEQ ID NO: 62161 - DNA, 608 bp, Zea mays
  Clone ID: MRT4577_156687C.1
cacaagcattctttaccttttcaaaactcaagttttacatgttttgaaagaataatatttattacaagtactgatatactcaaagtgcataacttattacaaaagcaggaaggtagaaaccctccaaagcttacacataaacctagctagtcctcctccagaactagaaacgctctccagcctcaggaacatctagagtactcctcatcacctttgttgcagagacggaggtctaaatccctctattaaaccccagttagatggctcccatcacttgatgagcaggcactgaagcagactcctcttcagaaacgacttcttgaattttatcatcttcttctaggtgttctgtgaggaacaaagaacgggcacaacacggccaagacaatctccacgaaccctggccatggtgaggttgaaggattgctgttgtggtcaccagacacaggagttggctgtgatgaacaagggcagatcgatctagtggctgaggaggggagctaaaactgtcgtggacacaggaactacaacgcacacgcagctactttggctagaggttgagggtagggaaaaacttcacataaccaagccctagtgcaactgataag

SEQ ID NO: 62162 - DNA, 807 bp, Zea mays
  Clone ID: MRT4577_156688C.1
ccgggctcgagtttttttttttttttttacaaaacattcttttcatttataaaactgaaggttattacataggaagagttacatttattacaagtcctgatatactcaaagtgcataacttattacaatagcaggaaggtaggaaccctccaaagcttatacacaagcctaactaatcctcctctagaactggaagcgccctccagcctcacgaacacatagagcactcctcatcacctttattgtagagacggaggtctaaatccctctattaaaccccagttagatggctcccatcacttgatgagcaggcactgaagcagactcgtcttcagaaaccacttcttgaatttcatcttcttcttctgggaattctgtgaggaacaaggaacgggcaccacacgaccgagacaacctccgacgaatcttggccatggtgaggatgtaaactgctgctatggtcaccactagcaggtcacggcgtggaaactgacgtagtggctggggaacggatttatatcgacttgaactcaagagctgtgtcactctggtgataaacacggaccagacttaaggatagggagcatcctcactgaatcaagctttataccattggataaggagcaggtgtcaccgagctcaaccacagcatgaggaagagagactccaagggtgccagcaacgcatggaccaatcatacgtggcctgccttcagctccacacacgtttgcatgccctgcccaaggacactgaaccttgctaaactccacagccaaaatatcgcttggcataaaactcaaatatcag

SEQ ID NO: 62163 - DNA, 787 bp, Zea mays
  unsure (1)..(787): unsure at all n locations
  Clone ID: MRT4577_156689C.1
atgggacaaagccctgagtatgaagtgtactttcgcaagtcttacccgactaaggaaaaagactctcaaggatatgctggatttaggaatcaaggagaggcttttagcaagaatcaacttagatacttttgtagaaaaagcttactaaagataacccttaatgcaaaagacaacctctatccacaagatctgagcagggctaagcatttttgtaaatcatattttgatacttcaccagaagtatctataaaggtatggatatcaaggtaggcaatgcatccaataatttccaagcaactcctataaacttaatgctcatttcactagacttaaatgtataaaagtctttttaaaaatacaaggaaggggtaaatgcaccggggcttgcctttgttgcagagacggaggtctaaatccctctattaaaccccagttagatggctcccatcacttgatgagcaggcactgaagcagactcctcttcagaaaccacttcttgaattttatcatcttcttctgggaattctaaactttggtgctcacaaggaatcgaccggagaaagcgtgagttgttcggtcaacgcagaggctgttcacggctccggtctgcggtggcacaactccgttctgggtaacaaacttctcgagatactctgaccatggcgaggtggaaggatggttgctgtggcaccagagtaccagacaatggaatggcacttgatgaactgaacaaagccgacgcggaggctaaggagatgaactcaggcttgtacacacttcnacagag

SEQ ID NO: 62164 - DNA, 330 bp, Zea mays
  Clone ID: MRT4577_15668C.1
acgcgtcgacagacgcgtgggttaaagcatgtgcgggcggatgggctcacgcgtgtgtccacgaacggtcagatggagcgtgggtacgtcgacgactacgtcgacgtctacatggtccggaacgtgtacgtcgagttccgcagcgtcgagctcggcgaccgcgccctgtaggagctgctcggccgcgtctacgcggggttacgcatcgacgaccatgtcgcgcccgtgatggacgtcctggagggcagctactactcgtgccaagacctcagctgcgacttctggcgggtctgcgacttcatggacgtcacgtgcgtccgcttcgacgtg

SEQ ID NO: 62165 - DNA, 292 bp, Zea mays
  Clone ID: MRT4577_156690C.1
atgattacttcgagtattttggaccagacttcagactgcatattagtcgctcaaacatgacaagccagaacactccagaatatatggaggagataaacagcgtttatttgaaatctgcgatgttacacatgcgctggtgttcaatgaagctatccgaagatgctgtcatgaagcagtggtatgggatgggaagacctacagagattctatcggcacaacaacggtactttgagaaatccagatctgagagagtgagagctagatgcgtgcaagaagacaaaacggatagagc

SEQ ID NO: 62166 - DNA, 716 bp, Zea mays
  Clone ID: MRT4577_156691C.1
acaaaaatattcttttcatttctaaaactgaaggttattacataggaagagttacatttattacaagtcctgatatactcaaagtgcataacttattacactagcaggaaggtaggaaccctccaaaccttatacacaaacctaactaatcctcatctagaactggaagcgccctccagcctcatgaacacatagagaactcctcatcacctttgttgcagagacggaggtctaaatccctctattaaaccccagttagatggctcccatcacttgatgagcaggcactgaagcagactcctcttcagaaaccacttcttgaattttatcatcttcttctgggaattctaaactttggtgctcacaaggaatcgaccggagaaagcgtgagttgttcggtcaacgcagaggctgttcacggctccggtctgcggtggcacaactccgttctgagcagcacaagcctctagaattaggaaccccacccccctgagtttcactaatctagggagattaccgaacaaggttcaccccccacacaaacttctcgagatactaaaaacatggcgaggtggaaggatggttgctgtggcaccagagtaccagacaatggaatggcacttgatgaactgaacaaagccgacgcggaggctaaggagatgaactcaggcttgtacacacctccccgccacatgcccaagcctcgtgccgaataa

SEQ ID NO: 62167 - DNA, 726 bp, Zea mays
  Clone ID: MRT4577_156692C.1
ggccgcttttttttttttttttttctaaaactgaagtttattacataagaagagttacatttattacaagtcctgatatactcaaagtgcataaattattacaatagcaagaaggtaggaaccctccgacgcttatacacaagcctagctaatcttcctcaagaactggaaatgccctccagccacaggaacacttagagtactcctcatcacctacaacaacatgggttcgaaaaccctgagtatggagtgtacttgcgaaagtcttacccgactttgttgtagagaagaggctaaagacctttccacccaatacccggttagatggctcctccaactgatcagtagccactggagtagactcctccttcaaacaccacttcttctaggtgttctgtgaggaacaaggaacgggcacaacaataccgagacaatctccacgaaccctggccatggtgaggttgaaggattgctgttgtggtcaccaaacacaggagttggctgtgatgaacaagggtaaactgcactggtggctgaggagaagagctactaccagcatggatacatgaactaccacgtaccagctgcaactttggctagagcatgagggcaggggagggaagctaaactgagtacagtccaaggcaatgaatataggggcaggtgcagtggagctcatccacgcttgatgaaggaggattcctagagtgccagccggacgctggg

SEQ ID NO: 62168 - DNA, 487 bp, Zea mays
  Clone ID: MRT4577_156693C.1
ttaattcggcacgagggtactggggggcgggcggtgcatactaataatatgcgctattgctccactagggctggccattcccggtcaaaatgcactttctgcagaccctcctgtatggcgagcattaaccatgggtcaaccagcgcgcgataagacgtccccggcagctaccccgctggcggtggggggcaccactctctatcgcttctacttctacttcttgaacgggcgagacaactacttatacagccgcgtgcagcgctacttctccacctaggagcgcgtaagtagtccacccggcccactacttagcgtgctatccacgcgatggggccgaactccactgcaaaaccttcctacagctcttggacatggtcaaggcggagaacagggacccgtccacgggcaccgtctagacgcgcacttccctaacatgcggctatgatgtgtgctcctacctggaaccctccatagtgcgggcacacta

SEQ ID NO: 62169 - DNA, 397 bp, Zea mays
  Clone ID: MRT4577_156694C.1
aacaaggggaaaggggaaatttcacttctccatcctggccgggtttaaaaaagggggggggggggttcggctgggtccccccccaaaaaaaatggtttggccccattaagggtccttaaatcatttaaccaactcaattaaagggggacacagggcacacgggaacatggtttttaaatcccataaaacccgatgggactaacaaagggtttcggtttcaggagggaggcgcggaaaagccgccccccccaaaaaaaactggaaggggggctacctttcgaaaaatgggggttcacaaaatgttttacccggggggataatagaggaataaaaaaaacccccgcttttgcttttaagggtaggttgggaaccctattttttcaaggaattttttttt

SEQ ID NO: 62170 - DNA, 383 bp, Zea mays
  Clone ID: MRT4577_156695C.1
aataacccctcaaccaagctagtcaactatacaggcaactgaagcactacaactttgtttattttggataaggccccgcttaaatatggcataaaacaatggatgtcatcattttgtaacttgatataatatatgcatacacagttgcccttgagatcaaaaaaaaaaaagaacaacaacacaaacaacttggagtaacaaaacttgctgcctactctgatcaacagcaaaccaagggcgacaaccccctaggcgcaaccaaccttggggcgtatttggcacatctacatctaacattcaggccagttacctgctggttatcaggggcaaattcttccattcatccgactagtaacaatgaactgtcctgcttatttaaaggt

SEQ ID NO: 62171 - DNA, 325 bp, Zea mays
  unsure (1)..(325): unsure at all n locations
  Clone ID: MRT4577_156696C.1
ggtgcggttgatagctcggatctgctgctggccgatttcgtcttggatgataanananagaganagagaganagagagcgccggtatcggagccaggaagcatccaccagcgatggcgcccggagtgtttccnctcctctgaaaaaaaaacaccccgcacaatacaaagggcgcatgacgctcgacgtctgcacgacctgccttatggccatcacctgcttccacatccactgctaccacaatagcatctccggaggctttacatccactgcactcatatcaggacaaaaacttccagacatgacacccacctgacgatcttcca

SEQ ID NO: 62172 - DNA, 462 bp, Zea mays
  Clone ID: MRT4577_156697C.1
ggctcttgcacattgtccattcattagatatggggcaagcaagcaagcaagaagtgaaggaagacagccatcagctagcatcaccactatcattgttgttactactatacctaccttccactccaaggaagctgccgctctttctttgttcagagaaggggaaaaaaagtaccaaagcaaaggtgaaaacaaactaggggaaagacgaaaaccaaacggggcggcgcggttacggctggtgctatagcctatagctagttttttttttgtttcatgtataccgacgacgactcttccacgcacggcgatcgcctctgacctgacgggcccgagctccctcttccggttggctggctgctggttgcctggttcaagtttttcggagccccccgaagccgtcgccgagccttgccttacattcaccgagcaccgttgggggtttggtgctgaacatactgctgc

SEQ ID NO: 62173 - DNA, 994 bp, Zea mays
  Clone ID: MRT4577_156698C.1
aatggttcaggatttctttgaggatgttggaccactggttagcttacagctaggtggttccgcgatggatgggcttctgaaaatattcaactcgtatgtaaacttgctcataatggaaactggttgttgtaagtccgcggcaactggctgaatgtgattgaggagcatcatctgaagtactcggggaactgtcaggtaaacgacatcctggacattggctgctctgttggagtaagcaccagatacctcgccgagaagttcccatcagctcaagctgttgggctcgacctatcaccgtactttcttgctgtggcggcacaaaaggaagaaaaactgtcacggccaaagcctattcgctgggttcatgccaatggtgaagcgaccgggctgtcttcagattcatttgaccttgtctcccttgcttatgtgtgccatgagtgcccagcacgagcaatcacgggattagtgaaggaagcattcagggtccttcgcccgggaggaacaatcgccttaactgacaattcgcctaaatccaaagtgcttcaggaactatccccagttttgttcactctgatgaagagtaccgagcctttcctggacgagtactacatgctggatttggaggagacgatgagaaaagtgggctttgttaacgtttgctccgtcctgacagaccccaggcacagaacagtcactgcaaccgtgccttactaattgggtcagaccatcaaatcccaagcccggccggtgtacaacaattgactatttgaaattttgtatccttactggtatggttgcacctgtataaagtagagcaatctgagtgaaacaaaaaaaaaaaaaaaagtaatttaccttccacgcatggacattatgaagtccaacactaggactgttatggtcagatgattcagggaaccaatctaaaaaaaaactcatgtgatattgtagccaggaatcactttcatgaaccttaattaactctgaaatattt

SEQ ID NO: 62174 - DNA, 135 bp, Zea mays
  Clone ID: MRT4577_156699C.1
gggcatttcttcaaaaagaattcatgcacataagaactggataacttgtcgtcgtcacaaatggcatgagctgctcctgagacatcgcgtaggctctcgactcgcaatataccttctgatgttcgacgacgtcta

SEQ ID NO: 62175 - DNA, 346 bp, Zea mays
  unsure (1)..(346): unsure at all n locations
  Clone ID: MRT4577_15669C.1
ctataccatctcatgcactcttacctaaacttgtattctctaccacgtccgacctgtttttgtgtttaaaaacccaaaaaaaggttctcggtcagacaatctattattcctccaaatacaccataaaacatcttcttcttttacaacaagtcaacaacacaccgccagcacgaagatacaactccaacacgactacagacncacacggggatggcgctacatncacactcaagcattnacacntattccaaccacacaaaccacctccttctnaaagcctacancancnactactaanaaaaacaacatnnnacacactaatttnacnaatttncctacttatact

SEQ ID NO: 62176 - DNA, 263 bp, Zea mays
  Clone ID: MRT4577_1566C.1
aattggcacgagggtgcctctcacctgcccgcgccgcttccaccgcaccaagataacaaggagaggctatgaagatggccgcgccgtccgcaccggccgcaagggcctatgcgcaggaagaagaaggctgtcacaagacgatcacacggtcgacaagaggctggagggcactctccagagagtaggggtcaacaccattactgcaatccaggcggtgaacatatttacggacgatctcttctatccacttcttgaaccctaaa

SEQ ID NO: 62177 - DNA, 656 bp, Zea mays
  Clone ID: MRT4577_156700C.1
ggccgaggaacttctatattctatcgcttcgtaaacctctctctcttcttcccgcgaactgctcgatctatctgtacggcaaactggagcatccgagcgtccgttataccaatgagaaccgacagcatggcgctcgaattgcactctggggatcgatacaaaaatgccttccatgctcttattgctgcaaaaaacagaagtctcccacggcgaatggaccaagcgattttagagatgctccggctcgcaacaagacccctgaatgtcgaaagatgaaccccctaggtaaactgcctgataagtacactcctgatgcccctgttattgagagtaatgtgtatcgtgctctatgtagctcgcgttgaaggatgacaacctcgtctgtttcaccactgcccatattgcacaagaccacgaccgaccactgtatgtactttgatggaaatcacggagatcctgatgttgcatggaagttgcatgcataactggcggacatcacatatgctcacacgactgacgaaacagctattgcttcattgagcacatcccttggcggtctaagacttgcatcttgccatgaacacatagctgtgttagacattctgctactctaactgacattgaattgacatgcaacctctaccatgtaatcgcac

SEQ ID NO: 62178 - DNA, 430 bp, Zea mays
  Clone ID: MRT4577_156701C.1
ctcgaggccggccgggccgggaacttcacagcagttccagttctagctctagctagatagcaaagggggggaaaatggctccgcttctcgctgctgccagtgaaccacgctgcagcccttcctggtcttaggagccacctgagtaggacccaacaatgaaagtttctcacggcaccacctggcgccttcttctccacagagcagtaagggaaggtgtaaccttagctttactacacgatctgcaatagtatgcacccaaaatggagtacacatgttgagcccctccgaaatcccacaaaggtactggttcccctctagatgcaccttcggtgacgccacttcagagtaccaaattgtgggtgctggcaatgaagatggaaaggcggaaagcaactggaatcacctccgccacaatcgtccggaaaggata

SEQ ID NO: 62179 - DNA, 509 bp, Zea mays
  Clone ID: MRT4577_156702C.1
gcggcgaggcccgacccggcccgactactaacccacgccgcagaagacgggcgaaccgatctcgcccgggtccacgacaggcgaagaacgagaccggggccgcctgccacaggagcgccgcaggagaaggaagaagaggccgtacgcctccgaccctctgcccggcgagaccgatggtctccgagcactggatgtcgcggctggccgccgggaagcactgccacacggaggataccggccacagagatcgggtcacaataggcgagctggagatggtaaaggaggtcaggcccgaggtgcactgaccctaccggtacgacgaccacgacttaggtgccctctgcacacacctgaaggatgtgcgcccgttcgaaacccttgccgcggcctgacctgcctgctctgagacgatcgcataggttgtggcttaccataggacgacgcaacagagatattcttccaagaagcgaagccgggtgcgcagtttcatgattccatgcaggcaagcc

SEQ ID NO: 62180 - DNA, 485 bp, Zea mays
  Clone ID: MRT4577_156703C.1
gcgaaaaaaaaaaaaaaaaaaaaaaaaaaaaaaaaaaaaaaaaaaaaaaaaaaaaaaaaaaaaaaaaaaaaaggggcgggacgttctaaaaggatccaaaatttacagggcgcgtgcttttctataggatccacttttcatataggggcccctgacatcgatttcactgcttctttggtgtacaacgaacttgactggggaagacccctggctttacccagcttaatcggcttaaaccacgatgcccccttagctaaatggcgtaataccaaatagcccttcaccgatcggccttcctaacagttgggccgcctcaatggcgaatgggacacaccttgtcaccccgcattaagcttggaacgccccttgatccctcacattaagaccggtaaatttgccggtcccctaacgcccgcccttttcttttgcttccctccttttgccgcgacgttggcggtttttcccctgaatcttctaaatggggg

SEQ ID NO: 62181 - DNA, 387 bp, Zea mays
  Clone ID: MRT4577_156704C.1
ggggcaacaaccagtgggtttattttcaggaacaggggcagaaattgcagaacaaccatggttttagcagaccaaacgttctgccataggggaataactaacgactcatggccaaaatacaatgaaaggtgttctggagagctaccatcaatacaaaaacctgtgaacaagagcaagccttaactgaagcggactcctacaaattgatctttttattaatgctgacggggcagagtttatattgtttgccacacctcggactggaggcaaattctgaacggaatgtccttagacactgggctttactttgaccagaggtccatgttcacattagcggttccccagtgcacaaaacattagctaaccttgcggggattaaaccgaatt

SEQ ID NO: 62182 - DNA, 162 bp, Zea mays
  Clone ID: MRT4577_156705C.1
tgctctttgactatggcgtgcaagaagaggagagcccctcttgttcgaaagattcacatgtgcttccagtcttggtagataaggttgctcttgctatcttgcaccaccgaattcagcgctgctgtaatgcctagcgtaccctagggacttgtcacgctaacc

SEQ ID NO: 62183 - DNA, 925 bp, Zea mays
  unsure (1)..(925): unsure at all n locations
  Clone ID: MRT4577_156706C.1
cccacgcgtccggccgccgccccgttcagcgtcagcacgaacgcacgcagcgatgatcctccttcccaattcaagccgccgccccgagtgtctagctagcgtcgtgcgtgcgttcatcccctacctctcagctctcatgtgtgcatcctctatccaaatccatcgtgaatcatccctccccaagttgttgtggtcaagccggcggttccaggcaatgtgctaagaatccaagtaggagtgaaagaccaaggagaccaactcaaatcgtcgcactgctagaagcacgttgagtataggatgttcgatgggaggaataaaaaggattttttgaagagaagagacatcgcctgattctccaaggacaaggcggatgcagcaaagtagtgcacagcatctgaacctacatttgatctagtgctagcacaacctcttatttgaatagaaggctaaaggtgaaagaacccgcacagactcttgtgtgacggaaaaatggcaagcggaagaagaagggataaagatgcctcccttaacgagtacgaggaacaacgacttgcaaccatcgcagaaaacaaaaagcgattggaagctcttaatatccctactttgagcaatatgaatcaacatggcggaactaccaaaagaactaagaggattcataacactagtgatgtagcaactgaaggtcacaatctgcgtgcaaggccacaaaagaattgtgttggaaatggaaatgaacaaattaatgaagaccttggatgtgaatcaattggagatttcttatgtgataacgaagattcacgtaacagtgcngaaaagaagaagaaaggaaggggggtcactagattggatgaaatatttgcaagggaagcctaacctgccctaaatcaaagtagaactcaataaatatgggcagcctattggggac

SEQ ID NO: 62184 - DNA, 397 bp, Zea mays
  Clone ID: MRT4577_156707C.1
ggcaacaagagctgctgctgatgctggagaagcagacggaggagggtttttacgccgtaacaatgtaacatgtggagcggcttccatgactcaacttcctcttttcttggttgttccacggactagcgacccggccggtgccaacggcttgaagactaggagataacaagtaggacgatgttgtaatttagctaccacgacgcggtggctctggcttgcgtgtaaagaagtcctccctttcaacgcgactgggattgttgttgctggtaaaattgttgtaggaatatcatctgcgctccatttttcatagagctcatcttttttttgtgtgtgtcactggattttgacaagaccgtaactcagaaaccgagcactgaccgagcgttcatgccacccc

SEQ ID NO: 62185 - DNA, 1318 bp, Zea mays
  Clone ID: MRT4577_156708C.1
gaattttcggggcgacccacccgtccggtttgtccagttcggcctgtccaactcatccctggagctgcctttcatggacgactacctgcagctgcagcaggggtccgtttcctgcagagtgcgtgcgaggcgtggctgcgcgactcacccgcggagcattgccgagagggaaagaaggacgaggatcagcaagaggctgaagaagctgcaagaccttgtgcccaacatggacaagcaaacgaatacgttggacatgttggaccttgctgtggattacatcaaagagctcaaggaccaagtcgaggtacgtacgtatcgcttggtgtgcaaacaaaaataacactatctcttaccatgctaaaaataatactatctcttacctaggcaaaaataatactatctcttaccatgctaaaaaacatggatccttgcagaagctaaaacacgaccaagcaaactgttgttgcctaggcaacatgagctgctgctgatgctggagaagcagacgggggagggtttttacgccgtaacaatgtaacttgtggagcggctttcatgacttaacttccttttttttttggttgttcgggaaagaaggacgaggatcagcaagaggctgaagaagctgcaagacctcgtgcccaacatggacaagcaaacgaatacgtcggacatgttggaccttgctgtggagtacatcaaagagctcaaggaccaagttgagaagctaaaacacgaccaagcaaactgctgttgcctaggcaacaagagctgctgctgatgctggagaagcagacggaggagggtttttacgccgtaacaatgtgactgttaaaccagagctgttgcttcaggagaccaggccgcgggcagaagtgcgtgacatgtggagcggcttccatgactcagcttcctcttttcttggttgttccacggactagcgaccggggtgccaacggcttgaagactaggagataacaagtaggacgatgttgtaatttagttaccgcgacgcggtggctctggctttcgtgtaaagaagtcctccctttcaacgcgactgggattgttgttgctggtaaaattgttgtaggaatatcatctgtgctccatttttcatcgagctcatctttttttttgtttatgtcgaactgcttttcgacgaaactgagaaaccggttaaacacgaccaagcaaactgttgttgcctaggcaacaagagctgctgctgatgcttgagaggcagactgaagaaggtttttatgccgtaacaatgtgactgttaaaccagagctgttgctttaggagaccatgccgt

SEQ ID NO: 62186 - DNA, 252 bp, Zea mays
  Clone ID: MRT4577_156709C.1
acagacataattaaagggcaaattttaatttcaacaacacactgtgacacacacacacacacacacacacaatgcaatttggtcatctacaaattttgacaattttgtgaaacagccctcaaaactttattgttgtgggacccaagcttgaaaccacaggtttctttacctttgccgcaaatcttccttattcatgaccatacatgcggactacaatcttgcccttattgagatccttataggcgccattcg

SEQ ID NO: 62187 - DNA, 654 bp, Zea mays
  unsure (1)..(654): unsure at all n locations
  Clone ID: MRT4577_15670C.1
cctcgaggccggccgggatgagattcacctctctcacctctcgccctaactcaaacccgggatcgagagaaatggcgctcgccaaggccaaggatatccctgcctctcgctcccctcctccgcttcagaaaacttcctgccctttctgctctcctgtgaagcacgtgtgccaaaacctcagaccaagctacaaggacattcagttgcataatcaaagagatggagctgagctcccgaacgccctgtctaactggactggatagacgactgtcccacatagtctatcatgcaatgggaagcatattggcgactgtgatgatactactcggcactgatcaatgatgacaagctgacgcctctgctgactgaggctggagaccatcatccacttctgcctcgaagacaaccatcactgcttgatatgtgtgctaccattccctcgcttacaaataatgatgctttgcaaatgctgaacttgcaaatgctatgtggcagagactgttcgatccctgtgtaaaactccctagacatcagacgcatgcttcgcgctgatgagtgtctgcgacatctacaatcaatcattgctacaataatgtcgtgctccctaggcatcagatgagacagatgacaagntaataacattataatcttatt

SEQ ID NO: 62188 - DNA, 298 bp, Zea mays
  Clone ID: MRT4577_156710C.1
ggggcgacccacccgtgcgcgagtatatcggcgccacgaacgctcgatgaggaggctttttgtgtttcgtcgacggagcactacagcgtgtgggaggtcgaatttaaacaactacgccgccccatcccgggaaagccgagtgtgtgcaaaaccacatggactgatgaggatggtcggcaggctgccatcaccgcagtgttaaccaataagagacagaggcatgggcttgatcaaggacggctcaaaacatgggggaatggaccatgtggtacaggcgactgctcatggggatgtgcag

SEQ ID NO: 62189 - DNA, 2000 bp, Zea mays
  Clone ID: MRT4577_156711C.1
ataactgaagaagtaaaggagttgacaggtggaaccctattatcaagggataaggagtcgattgtattctacagagggaaagatttcctccccccagctgtctctctggcaatagaaaaacgcagaaagctgggcagttctacaatctacaaggccaagcctggcattgaagaaagcatgcctactcaaaatgactctgtactgaaggtatcaagtgatgtctcggtacacgttcgtgaagagggaacttctgtcacagagaatagagctgaatctcttaatactgttgcgaaggatgttgaaaccagattatctcaggccatagcagagaaagcaaaagctgaaaaacttattgaagaactagaaaaggcatctccgctttcaaaggctgaagttagagagactatatcagaagatgagaggtacatgttgaggaaagttggattgaagatgaaacaatttctgctgctaggtcggaggggagtttttgacggaactattgaaaatatgcatcttcattggaagtatcgagaacttgtgaagattatatgcaaagaacaccgccttgaagatgtggaatacgctgctcgaactctagaggcagagagtggcggtattttggtggcagtggaaaaagtgagcaaagggcatgctataatagtatataggggaaagaactacaagagaccatcaaaactcaggccaaaaactttgttgagtaaaagggatgctttgaagcgttccctggaaaaccaacgttgtaagtcccttaaggttcatgtacttaagctgtcaaagaacattgactacttgagggatcagatgaattccagctactatcacaaggacatgcatgatcctagtgtcaactctgtaacactacagcagcaagacgaagaaatgcctgaagttgctcccatgagttcagagcctgaggttgagaagtggacatcagttgagattgatagagccttagatttaacaaagtctggagtccctgtggaagatatgcagagcaaagtctgtttcaacaagcttgaagatgattcttctgcgactgcaggtccatgtctgactgggagttcaattgcagcttcatcctataatctgatcagacatcaaaaccaacgtagctctactgtgacatccagtcctgatggtcgctacgaaggtgcaccttcaaaagtcgtggatgcgccaaaattggatgcggaatctctttctgtatcgcctttgagagccgcaccgctctcgaatcaagaaaggcttgtgctaaggaagcaagcccttcaaatgaagaaaagacctgtactttccatagggaggaacaatgccatcaccggagttgcaaaaaccataaaaacgcacttcaagaagcaccctcttgctatcgtgaacatcaagaacagagcggacgggactccgattcagcagctgatatcggaactcgaggaggcgacaggatcggtgctagtgtcacgagaaaccaacaaagtgatcttgtacagaggctggggcgcagaagtggcccagaaaagctcaagggaaagtagcacagacgagggcgaaaaggaggtcatatcacctcagctccttgaagctatcaggttagagtgtggactgctccctgccgattcgggatagttggtccggataaccttcccccacagatcccgtgtttcgaaaggatcgtacaatgattgcccgcggatagatccgaagctgcataaacgcacgcaaggtgtgaaaccctccctgctcacgggcatagttgtaagagaagaacaggggcggcggcaggggtattcttaggtattccatgggatgcccttttttgtgaaagaaaagaatatgtattgtctatactaaaatatttagttctcctagtgttactggctctcgctgttctgggggaaaattgtttttggaataccctggcacaggctcacagcatcacgtctgcctccgccagtggagaagaaatgggcatgctgtagctt

SEQ ID NO: 62190 - DNA, 872 bp, Zea mays
  Clone ID: MRT4577_156712C.1
gtgttttgagacaataaacagcaaattgtctcaactcgtagtgtcatcctctcgatgagagtaagagtcttgttgcttacacatatgagggtttttatctgtcttaagagaagtacattctggatcttcttgatcgggcctctcttcggacagttgaggctcctatggaactcaatattcatctatgtgccacggatggtgagcatcttgaagaccctaatcattattgtcacattgttgggagtcttgtttaccttggtgtgactcgtcctgactacttgggctagtgattcctcttatcgacgttctctttctgcctattgtgtttttcttggtggttccctcattgcttggaagactataaataggcaatggtttcttgttcgagtgtagaggctgagttgcgtgatatggcccttatgactacagaggttacttggttgcggtggttgcttgaggattttggtgtctctatctgtatgtcgactcctcttttgtctgacagtacaggtgctattagtattgctcgtggtccaatgaagcatgagcttaccaagcatattagtattgatgctcattatacacgagcataggttcaggatggtgttgtttctcttcgatgtgtcctcagagcttcaactggcagattccttcaccaaggctcagcatcgagctcagcatcggttttatatctccaaactcagtgtttttgtcttcttgatccaccttgagtttgagggggtgttagagatatatgtacttgtttatatttctccattgtataaggggttttatgcatatttgtaatctcatgtacctctatatatttgggcctagagccctcataataaatatgatctctattcatatca

SEQ ID NO: 62191 - DNA, 553 bp, Zea mays
  Clone ID: MRT4577_156713C.1
tggacgcttgggttaaaactcaggccaaaaactttgttgagtaaaagggatgctttgaagcgttccctggaaaaccaacgttgtaagtcccttaaggttcatgtacttaagctgtcaaagaacattgactacttgagggatcagatgaattccagctactatcacaaggacatgcatgatcctagtgtcaactctgtaacactacagcagcaagacgaagtaaacatattctaacttgaatgtagtccaaccaccacttagtttattccatgaatacctgattatttgtttgtttcaatataaatggtcaaggaaatgcctgaagttgctcccatgagttcagagcctgaggttgagaagtggacatcagttgagattgatagagccttagatttaacaaagtctggagtccctgtggaagatatgcagagcaaagtctgtttcaacaagcttgaagatgattcttctgcgactgcaggtccatgtctgactgggagttcaattgcagctttcattctataatctgatcagacatcaaaaccaacgtagctct

SEQ ID NO: 62192 - DNA, 205 bp, Zea mays
  unsure (1)..(205): unsure at all n locations
  Clone ID: MRT4577_156714C.1
ggcaaccaacaaagaattacatgcaccaaaataaacaatggagcgggcaaatttttgaggcaatgttgcaacgatgggcccgtttttgctggctttaagcactgggtaaacttttacaaagaaacaaaattgtgaaccaaggcaggtcccatcgtggtggtttggccaggcttaagttaaaagtttcaatnttaaagcgggtttt

SEQ ID NO: 62193 - DNA, 389 bp, Zea mays
  Clone ID: MRT4577_156715C.1
acacaatgcaggcacaagtagagcgaatgaagttggggtaagatataatggacttattctggctgaaagcgaaaccacggtctgatggtaggagaatacgagtgattacttacatatgcgataccactgaataactgcagtggactgatagcagattttattgaccatgaactaagaaggctgaaggacctaccattctgtgggtcaatgagatagtatacatagatcacgctattgtgacccaaataacctatccgcatgtagctattcttagagctatcggaagaggcacatgactctaatacgtacacttccatagggacctacgatttgcgtccaagtctacgacattacataggagatgcagtgtttgcttgcttatgaatgac

SEQ ID NO: 62194 - DNA, 382 bp, Zea mays
  Clone ID: MRT4577_156716C.1
aggagaactaaatattttagtatagacaatacatattcttttctttcacaaaaaagggcatcccatggaacgccgcccctgttcttctcttacaactatgcccgtgagcagggagggtttcacaccttgcctgcgtttatgcggcttcggatctatccgcgggcaatcattgtacgatcctttcgaaacacgggatctgtgggggaaggttatccggaccaactatcccgaatcggcagggagcagtccacactctaacctgatagcttcaaggagctgaggtgatatgacctccttttcgccttcgtctgtgctactttcccttgagcttttctgggccacttctgcgccccagcctctgtacaagatcactttgttggtt

SEQ ID NO: 62195 - DNA, 209 bp, Zea mays
  Clone ID: MRT4577_156717C.1
cttaatactccagaaattttttgttttttttttttttctttttttaatccattttttttacaaacccttgtgtaaaacaaaagcacgacccatgctttattccaaatactcctataatactagggatcaaaccctttaacacgccctgacatttttgccaaaatataaaaatggtgcgttccgggccctgtaggagcacttttcctcct

SEQ ID NO: 62196 - DNA, 172 bp, Zea mays
  unsure (1)..(172): unsure at all n locations
  Clone ID: MRT4577_156718C.1
taaaaaaannataaaaaaatatggagaaattatgggggtgtaccccgatgtgtacctcgaagccggccggaagctagtatcactagtgacgttcgtccaccagagatttcatggccatggagacgtgcttcagagcgagggcgctgcacgaccccgatgataacaaggacag

SEQ ID NO: 62197 - DNA, 654 bp, Zea mays
  unsure (1)..(654): unsure at all n locations
  Clone ID: MRT4577_156719C.1
ccggccatctccgacagcgtcaaggacctgatccgccgaatgctgcggtcgccgccggcggacaggctgagcgcgcaccaggtgctgtgccacccgtggatctgcgagaacggggtggccccggacagggcgctggacccggcggtgctgacgcggctgaagcagttctcggccatgaacaggctgaagaagatggcgctgcgggtcatctcgcagagcctgtcggaggaggagctggcggggctgaaggagatgttcaaggccatggacacggacggcagcggcgccatcaccttcgacgagctgaaggaggggctgaagaggcacgggtccaaggacctcagggagagcgagatcagggacctgatggacgccgccgacgtggacaagagcggcagcatcgactacgacgagttcatcgccgccaccgtgcacatgagcaagctggagcgcgaggagcacctgctcgcggcattcgcctacttcgacaaggacggcagcggatacatcaccgtcgacgagctggagcaggcgtgcagggagcacaacatggccgacgtcggcctcgacgacatcatcacagaggtggaccaggacaacgatggccgcatcgactancgcgagttcgtggcaatgatgaagnagggcatcatc

SEQ ID NO: 62198 - DNA, 835 bp, Zea mays
  Clone ID: MRT4577_15671C.1
cattgggtacctcgaggccggccgggacggacacgtcatgtgtgagatgcactcacggtcggaatgagcgttcaccgtcacagtcacacaagcacgaccacgcacacgcggtaaacacgcgcgcgctcaaacagttcgaaatggcgctcgccgccgccatcgtcgtcgtcttcctgcttcctggccttctcctcacggcgatggcggccacgccgtaccctcacggccgcggcggcgacgctctcgtgggcgcgtccaagaagtacgagggcagctccaacctggtggacctccgctaccacatgggccccgtcctctccgccgcgccgctccgcctctacgtgctctggtacggccgctgggaccccgcgcaccaggcccccgtccgcgacttcctcctctccctctccgacacgtccctgccgcgcccctccgtcgccgactggtgggccaccgccgcgctctacgccgaccagaccctcgccaacgtcacccgccgcgtcgacctggccggggaagccgccgacgagtcggcctcgctgggccgctcgctctcccggctcgacatccagcgcgtgctcgcctctgcggtcgccgcgggccggctccctgccgacacccgcggcggcgcctaccttgttctcacggcgcccggcgtcggcgtccaggacttctgccgcgccgtatgcggcttccactacttcaccttcccgtcgctcgtgggccacacgctgccctacgcgtgggtcgggcacagcggcgggcgctgcgctgacgtctgcgcgtacccgttcgcgctgccgtcgtacatggcccgaagcggcatggcggcgct

SEQ ID NO: 62199 - DNA, 775 bp, Zea mays
  Clone ID: MRT4577_156720C.1
ctcatcacctacaacagcctgatggacatgtacgccaagtgcagcgagtcgtgggaggccgagaagatactgaaccagctcaagtgctcccagacgatgaagcccgacgtggtgtcctacaacacggtcataaacgggttctgcaagcaggggctggtgaaagaggcccagagggtcctctcggagatggtcgccgacggcatggccccctgcgccgtgacctaccacacgctcgtcgggggttactccagcctggagatgttcagcgaggccagggaggtcatcggctacatggtccagcacggcctcaagcctatggagctgacctacaggagagtcgtcgagagctactgcagagcgaagcggttcgaggaggctcgcggcttcctgtccgaggtctcggagaccgacctggattttgacaagaaggcgctcgaagcctatatagaggatgcgcagtttggaaggtagagagagggagagtggctgtgctaagaggtgggcttaggtacagttcgtacggttttctttggttacaggcaactgtcggtttgcaattcgcttgttatatatatatgctcaagttttgatagccacattctgaagcaagtttcgatcagcgcatagtgtgtacctacctatagccacattctgctggtgcatactttttagattgcgacaacctgaagcaagcctgaagaggggcacctgatgttatgtatgtatgtatgtatgatgtgtcattcgttctgaatacaaactacgccattcagtt

SEQ ID NO: 62200 - DNA, 345 bp, Zea mays
  unsure (1)..(345): unsure at all n locations
  Clone ID: MRT4577_156721C.1
tcaacttcctctttncgccttctagaaacacttacacttcttctctccaggtgcaacttgggatcactttcaaaggagctatggtttctccccacctatatttcagcttactactaggtcgacatctatgacattcattttaactcttatctgaattcatacacttaccctttcccctgcggctacctcttccatatcactctcgacnacctccncctctagaaagatattactctcttcccctcatcctccctcttccttaccntcttctacaactccgagtatttctcctactccaangatccgacccacaatccttcccctaccccattctccttcccctta

SEQ ID NO: 62201 - DNA, 296 bp, Zea mays
  Clone ID: MRT4577_156722C.1
atttgtaccgctgtttctagctccttgagctagtgatctcttgacggtttctgcttgctgttctttctggacagtacttgctcggataggaaatttaacatgtggggggaaggaagggtaggtagtaaggctggctccaacaagaccctctaaagggtcctgtaccctaaatttagaggacgaggacgtcctctactccctccaacaacgtcctctaaacggtcctctaaatttagagaacgctgctggatcctctaaaaaaaaaaaaaaaaaaaaaaaaaaaaaaaaaaagaaag

SEQ ID NO: 62202 - DNA, 407 bp, Zea mays
  unsure (1)..(407): unsure at all n locations
  Clone ID: MRT4577_156723C.1
gccgcccgggcaggtgtacaaacttttgttttttttttttgtttttttactgcttttgttttttttttttttttttttgttttggtgtngaacacaggcgctggttaggcggtgggctccgcaggggtgtccccggcattaaaagtcggctctgttgttaagggggctggggggccgactggttttgcccggggctgccgctgcggccttttgccttttgcgccccttgtgaacgcccctttggttcttttgnggctcttccccgattggctggtctggtccctgggccgggcccccgcttggggccggtccggggggttcgggcccctgggggccgctggggccggctttttgggggcccgttttgccctccggggggggggtttccctgggcctggccggggctt

SEQ ID NO: 62203 - DNA, 341 bp, Zea mays
  Clone ID: MRT4577_156724C.1
ggcagtgcatacatcccctaccgaccactgccgagctgggagaacactacttgcgatggtacatactcaacccagccgctgtctctctctatgttaaacgagacccacaggctccgccaccacacgcgcgggagacacagaccacagccgcacccaccgtccatctgaataagaatagtggccccctgacgaggagcaagaagaggttctgatctggaggcgccgagcgaggagctagacactgaacacaaaaacgtggtggagattagtgaaaaggatgaacaccaggacatcgaagttgctcgcccctacaaaagaaaggactgacacggctcatatat

SEQ ID NO: 62204 - DNA, 372 bp, Zea mays
  Clone ID: MRT4577_156725C.1
taaccaaagacgtcatatgctccttaaattttaagaggacatctggtccttagattgtaaaatctcatggcgtatgtttagagggtatcagatttgttttgtccgtggggcttgacgtgtcatgtaacaccaacaaagttgtcctgggtgtcgtgcacgccactggagatgaaccttacatcccatcttcccatccatttgttttaagagctgctggtggtaaagctaattgtgatggatccaagaagacagagaacatgtgattgacctaaggcagtttcagctccagagaagaaggtccattactcatggaaatgctaagagcagagtgaaaagttccctaccctcacattaaggtggtacggttggtgt

SEQ ID NO: 62205 - DNA, 1274 bp, Zea mays
  Clone ID: MRT4577_156726C.1
ctcgaggccggccgggacaaagataagactagtggcttcttctccctaatagctaccttcttcctatcaggctggagttcatcaaggatttgaacctggaactggagcccacaagcacacagaggaggaagaacaccaagactggttcccaacctatccaaggtagaagcgagcaacgttagtgtggtagtaacatggtgactgtgagagaggagatgcgtaaggggccatggacagagcaggaggacattcagctggtatgcactgtccgcctgtttggtgaccatcgttgggacttcattgctcaagtctcaggtttgaggggttggagaactacaacttaggcctcaacaggacaggaaagagctgccgcctgcgctgggtgaactatcttcaccctggcctcaagcatggccgcatgtcaccacaagaagagcgcattatcattgagctccatgctcggtgggggaacaggtggtctaggatagcaaggaggctgccagggcgcacagacaatgagatcaagaactactggagaacacacatgagaaagaaggcacaggagaggaagatgggcatgccatcaccttcatcctcatcctcctcactgacataccaaacctgccttcttgacaccattccagtcattgggatgggcagtggtgacactcacaatggtagctgtgtcaccagcaccctcgagaacacacagagtgtcatggatggatatcccatggatcagatatggaaggagattgaggcaccacatgcacctaacttgctgagtattgctgaagggaaagagaagacgtgcagcagtagcccctgtcatctaccatcacctgtaatgtgggactacaaatgccctgagatattctggaagatgggagatcaagaaatcatgatgtgatggaagatgaaatcaagatgttggctgcacgatttggttatgggcttatggtaaataaggccatcgctattgaaggctgaaggaatacatttatattggtcaggccactcagctatctgcctagcagatttgcagtatttgtacttcctaactatgcttgcattagtatgcagtatttttaaatctagtgtaacactggtggtatgctcataatgtatgtatctatgtagtgtgaaaaatagtttgtatcagtttgtgcaatagtgtggacgctctatatgcatgatatatctatttatctctgttcttgttgtgctgaacgcttctatatgcatgataaaaaaaaaaaaaaaaaaaaaaaaaa

SEQ ID NO: 62206 - DNA, 588 bp, Zea mays
  unsure (1)..(588): unsure at all n locations
  Clone ID: MRT4577_156729C.1
ccgggtncgacccaacgcgtccgaaaaaaaaaaaaaaaaaaaaaaaaaaaaaaaaaaaaaaaaaaaaaaaaaaaaaaaaaaaaaaaaaaaaaaaaaaaaaaaaaaaaaaaaaaaaaaaaggaagaaaaaaaaaaaagaaaaaaggaaaaaaaaaaaaaaaaaagggaaggaaaaaaaacaacgaaaaggggggggaaaacccagaggggggggggccnaaacacaaccgagaaaagggaaaaaccggggggggaccaaacaaaaaagaggggcggaacagccgcccngaccaagagggagaaagaggaaaaaggcacggagagacggcccggccaaacagcagaacaaccaaaagggcaaaggggacgcccaagaaagacgggcaaaaagcgagcggggngaggaggnaacccacagcgggaccgccacacgggcaagccccgaagggcggggaccccaggcaggcgaaaaagcgggggcccccaggagggccggganccacggaaaagcggaaaagggggggcaaaaaaaagggncccgangaagggcgacacggagccccaaccccaaaaaagaagggnaggggga

SEQ ID NO: 62207 - DNA, 270 bp, Zea mays
  Clone ID: MRT4577_15672C.1
cccacgcgtccgatcgcgagcgccgccctttttttttttttttttttttttggtttttttttttttttttttttccaaggcaccactccatttttaataagataaggggttttttacttagcatagcaatgctgaagggaattttggggtccaccacagtggtgccaatttttttttaacatcaccgctcaccaaaattttaataaaagcgtaatagcaacacttgttagcttacaaaaaaactgccactttgttaaaacagagggaaga

SEQ ID NO: 62208 - DNA, 2607 bp, Zea mays
  Clone ID: MRT4577_156730C.1
atgtctggggaaaagatgactgagcaaaagaagatgactgcggagacaaagctaactgaggaaacgaagttgtttgaagaaaagaaagccgcagatccttttatcgccaggtttattgagtctatgtcaaaaacaaacacagagaagattactaaagagatactggaaagtttgtctgaagatactgatgacagtgatagttatgatgtggaaagtggggatgaagattctgaagatcggccctggcgaccaagccatgctgtcttcggaaaatcgactattaaacagagtcatcttgacaacatgagaggaaggtactttcgtgacatgtctatcatgagagttggcggagacaacattgttcctgcccctaaggaaaatgaagttgttatctatcgaagcttttttaaggctggtgttcggttccctttaagcaagtttgtggttgaagtgctgaagatataccagatcttccttcatcagatcacccccgaagctataatgaggatggggatttttgtctgggctgtaaggagtcaggggctagagccaagcgcgaagtgcttctgtagtatgcacgagcttttatatgagacgaaggctactggcaaagcacagtaccacaacaacttcggttgttatggatttattgctcgccccaatgcaagccacccagtgccaacattccggaaaagatggcccggggcctggatggaggagtggttttacgttaaaaatgatttaaaggcaagggaagacatcaaagaaatcatccagcgccccatctggtctcgcttcggcctccgaaggccgaaggtggaaattgatgacgctgttgaagcatgtcagagggcttttagcactgtttgtgcctttattggcacaagggatttgattcaagagcatatatccttcagggtatggccacttgtggaaagctgggatatgccaaaggagaccaccgacgattctagtgatggtggtctggtccgactgaagtataccttcagatttagggagaagtttgatgagccagacgacgactggctgaagtgtatcgaagctactagtgatgagctacttggagcttactccaaggctaaagataatgctttgtccgcagccttcgagggccgggggaagaaaagactgaacaaggtctttgatgcaattggcttcaaataccctgattatcgctacccgctgcgagggcaaggaaaaaagaggaagactgccacttcggccaccacagttgtgtcgaagggcaaaaaggtgaaggttctgacccaccgaccgcgttatattgaaccagccgtggtgcctgaatttgtcgaaggagcctcttcgactgccgaagcaagacaagctgctcctattgcacagagcgttgaagaaccaactgtaatgccgaagacgcctatagtcgagccagtcgaagctaaggttgataaggctgaagagccaaaggttgaagaaataatgaaaataccagaaattctgagccctccaacagaggcaaaactgctgaaggtgcaaaaggcttctgccgcgactcccaagtggaggaggatggccaacatgctggatgctgtgctggagactacaaaggccttgagccctgctccttcaaagaaaattgctgaagctgccaaagcgcaagccgaagccgaagctgggcaagcagaagccgaagctgggccctcaatgcctagtgagatgaaggctatcacacctgaagacgaagttgatcagcaaacttcggatgctgtcatgacaggatggcaagacacaacagagaaggcaaaatctcctgcccctaaagccgcggtcgaggatgctaattatatttatcgtcatgcttcggggaaaaagttgtccgaagaagaaatagctaagagtatgggattcccgaagctggaagatggcctttcgattttgtcgaaggatgatcttgctgacagcctagcatacaaaagtataaagggcttgattcttagtaatgccttgagggcacaaaagaatactaaagatgagagctgtataatggctcttaacaaccttcggtccgaggctaaccgagagatcagcgagtactggaaaaattatctagagaaaaatatcgaagaacttcgcgaatccaaggaaaggtgcttcgagaaatcctcggattgtgtgaagaaattgaaaactagcttcgccaaagtgggtgcctactctgctgaagaaaacttcatacgaggcgaccccgagggcatcgttgaatggataagtggagaagtcgaagccttcgaagaaattttgagtgatcgcggggatgtctgcacgtttttcggtgcgtggggaatttcagccatcttggagaaggccggatgtgatcacattaaagccatagcccaggccgaagctgccttctccgtagattatacgaaggatccatcagctaaagcaactttaatgggcgggaacttttataatgatgtgtgggtgaatggtggccgagaactggcccatgagattataaaaaagagtgaaaaagacacccatgacgctcgagaagaagcaaaacgagctgaagaggctgcagaacgtgaaaggcgtatagactaa

SEQ ID NO: 62209 - DNA, 187 bp, Zea mays
  unsure (1)..(187): unsure at all n locations
  Clone ID: MRT4577_156731C.1
cttctttctagcccaccttttcacggggtntttttcccgtgctatctgccctgcctgaggcccatttcctttcatcggagaggctgaggaaggaggctgtgtctgcacgcgaagctgaggcgcataaccgcgagggaggaccgccctcactagaccccgcgcttcgttcaccacgcaggaatattgc

SEQ ID NO: 62210 - DNA, 259 bp, Zea mays
  Clone ID: MRT4577_156732C.1
agtaggcttcggcacggtcgcgccggccgtggcatcatcgccggcggccaggacgacgagcgtgggccgcccctccgcggtgcacgttcctgcggcgacgaccaaggtcgtcgccgccgccgccggttaaccggttgaagaaaaaggcctgttccacaacaacctccgggccccgttcaaaggagaaccacctgctgaaaacggcccccttcttaacaaggtggggaaccagggcaaaggcgccgccgcccccgcgccc

SEQ ID NO: 62211 - DNA, 561 bp, Zea mays
  Clone ID: MRT4577_156733C.1
cccaagcgcccgggcagcaggcccgcagccaagagccaacgttgccacgcaggagaatatcagtgcgcacagcaactggctctaagcgctctgcgcctccaagaacgcgtggaactccgccctggccctcgccagacgcggcgtgatgcacggcgatgatgggcacgacgacgacgacgacgcatccgccgccgccaccgtcgagaacctcacgtgcctctgcgaagacgtcgacgccctggccgagtcgagccgcgacgatgccgagttcttcagtatccccttcttcgccgcgggtggttcgccgtcgaacacgaacgccatcttgaccggcgcctccgcgtcgtcatccgcgcagctggtcttggccacctccgtcgcgtggcagtcgacggcgtcgtgctgcgcggccacatgcggcggcggaagaggagggctccacgacccgcactcgaacctctccagcgacgccacccgcgacgcgctgcagcgacgacgaggcctcaagcccgactgctgcctctgcatgctggacgacacggccgtgccagcggttgtgcc

SEQ ID NO: 62212 - DNA, 163 bp, Zea mays
  Clone ID: MRT4577_156734C.1
gactcgatgtcgagtggtgctatgatgttcgctgcactggcctgcaacgtctgtgtctgcgtgcatctgcgttatcacatacgcaggcgcgttgcaggtttgctctatggttatcccttgagctgagggggagggaaggagctgtttgcttttgctgtagaat

SEQ ID NO: 62213 - DNA, 438 bp, Zea mays
  Clone ID: MRT4577_156735C.1
ccccatccctcgtttaggatttagggaaagaatgaaacagttagaaaagcattgccgggggggggggcaccaccactataccaaacataaaaaaggggggcaaacagatgcatcacagtatcacaccatgaacgggtgggattttgcttccaaaagtactttccccacaaaaagctgggccccctggggctgaaacagggggaggggctttgttgatcgttttcaacccacccccacataaaggcaagcccatttttggaaatagggggggccgacgtagcctccaaccatgggttttttaacaagggcccaaaacatttttggattggcacaaaggacaactgcagcttcggggttaaaaggacccccgtcgttgggttgcgtaaaaagaaaattcaggccaaaaataacagggttgatgttgaaaacaggcttcca

SEQ ID NO: 62214 - DNA, 309 bp, Zea mays
  Clone ID: MRT4577_156736C.1
attcggctcgagctctagccgtcctttttttgcttttcaggccacgggagaacccgaggggtgataacacatgggacgcgctcatctacggcaattatacccaggaggccagtccgaagccacgttacaggacccatcataacgccatgtacgaactacgtatactgggtcccaggacaagaaaacctgcgcgagtccttcttcgcgtacaaccgtgccacatcgtcgctctactacagttatacgcctgctatgctacgagccaccgcgaaggcgttggacatgtacagaactggaggccttgcagag

SEQ ID NO: 62215 - DNA, 795 bp, Zea mays
  unsure (1)..(795): unsure at all n locations
  Clone ID: MRT4577_156737C.1
attgggacctcgagccggcgggacggcaactggccccgtcggatctgctcttgtcggcgaggtagcgcactgtcggccatgggtggtgacatgccatcacaccgtcgacccgatcgccgcacgccatcagcgtgggaggcctccttcttggaggatcgacagctctccctcgccacgctcgagtttgggctaccgttcgagctcgcttcatcccaggagttcctcgcctacggggcagatgggaagcccatgtcagctgtttactcttccaaggagtttggtcttctgccgataccggagggtccccgctacggtagcatcgagtcctacattcttccccacctcccgctcggagatgcggctgctctccgcgacgcgggcgcgggcggcgcgaggttccgcatcgcgaaccttccccgtcttgaggcaaagctggcggctcgcaacaagcttctgggggtgacacgcgagatggtgcagttccacggctcgctgcagcaactcctgccgcagctcgtccaccaccgagccaaggtcgctggtcttctcaatgcggatgcggacacagaacttggcaagccagctgcccgcctcgagcacttccagaccgaggagatgcaggacatgatgtcgaggtgggagcaggacctgcagcgggctcgtgctgctgccacagctgcaaggcggagactgattctggcggntcacacgccaccatcctcttcgtntcagataatggtcatgcanggcgaagatgttcacgacacattgcttatgcttgcgccagagttgcat

SEQ ID NO: 62216 - DNA, 311 bp, Zea mays
  Clone ID: MRT4577_156738C.1
gtcttaggaagaaggttcagacgacaagggggcgacttagtgcgaggggacgatgcccgcggtcacaaacatatacgacacgtactactaaagagacggccaatgggcaaggatggctggggatagcaccaaagacccccaaccctgatacgggctcgaggaaaccagctagccagtgaccgatactccagcataagaagcgctaaaacagatacactcaccagccaggagcgagaaggacccggtgagcgcccgctaagacaccgggggactctgacggaaggctgaacaggttgcccgcacggaaagaa

SEQ ID NO: 62217 - DNA, 237 bp, Zea mays
  unsure (1)..(237): unsure at all n locations
  Clone ID: MRT4577_156739C.1
aagcgttgcggcctcagcgacaccagcgctggggagaggggcctttctnctacgcagtctcctgcaggttcgccgccatcaggcggcagcagcaacgccgaccatcgcgctctgacggccagattcgcgggactggtgacgagcttaggcctagctatgaggtctgtaatggcgtggagaggggtcncgcaatgcttgccttaccccacagtacgatggcgcgcacatacgatgcga

SEQ ID NO: 62218 - DNA, 345 bp, Zea mays
  Clone ID: MRT4577_15673C.1
ttgttttgtattagaattgtttttattacaaaagttacaagtttcaacaaatctacattatgggaatcggggtgagaacaaaagcgacttagagaaccgaactttggaatgctataaagggtatagaggggagaaatcctcgggagctaaagtggccatgctcaagggagagatcgaagggggcctgggacttatgagaagggcgggcctactggcacttaacacgatgcagaacagcacgggtatagcacctccgatgcagtgaagagccaatgactaatagaataatttgccacatatattgagggtgtcgaccagactacgagaaaatactgcacaaggaga

SEQ ID NO: 62219 - DNA, 187 bp, Zea mays
  Clone ID: MRT4577_156740C.1
catgtgatgatcaaaagcatacaatcctcattaaggtatttcagatacaactacaaaagataacatggaaaagggatttttctcttgtaaactacaaactactcatgtcagctaatattgtaactgaaaaactcacataattgtttctgcccaacatgctatggatgatttttgaatccattgtcag

SEQ ID NO: 62220 - DNA, 1389 bp, Zea mays
  Clone ID: MRT4577_156741C.1
ctgtgcggcgctcgagccggccgttccgaaagaccacaccactccactccctccatttccctcacctcccgcagcagctagccgccagccaacaaccgaaccaaccaaccaacccacagcgagcgagtaaagcgtccaatggtagcgatggcggccgtgcagcagaagcagcagcagcagcgccgcgacgcggaggcggagctcaacctgcccccgggcttccggttccacccgacggacgaggagctggtggcgcactacctctgcgcgcgcgccgcggggcgccgcccgccggtgtccatcatcgccgaggtcgacctgtaccgcttcgacccctgggacctgccggagcgcgccctctttgggcgccgcgagtggtacttcttcacgccgcgggaccgcaagtaccccaacggctcccgccccaaccgcgccgctgggtcgggctactggaaggccacgggcgcggacaagcccgtggagcacgggggccggacggcggggatcaagaaggcgctcgtgttctaccacggcaagccgccgcgcggggtcaagacggagtggatcatgcacgagtaccgcctcgccgaagccggcggcgcccgcgccaagaagtccggcgccggcacgctcaggctggatgactgggtgctgtgccgcctgtacaacaagaagaacgagtgggagaagatgcagcagcagaaggagaaggagaaggagaagaaggcgatggagtcggaggcgtcgctctcgcactcccactccgacacgcggacgccggagtcggagatcgacgacgacccgttcccggagctgggctctctgccggcgttcgacgacatgggcgcagccccagcccctgccggcgtcgtcctgcccaaggaggaggtggaggacttcggcgacctcggcggcgacgactggctcgcgggcatcaacctcgacgacctgcagatgccgggggatgccgccgatttctacggctccatgctcgtctcgccgatggccgccaagatggagccggacggcggcttccccttcttctgagatccttcggcgactccggggaccggatgcagcgcaacgcaaactgtgtatagttcagattttcttcatggaaccaacaacaacaaaaaaaaagttcttgctaatatcttgttctagtggtgtagtgcagaagtagcagcaggcatgattgaagttccattgtagtactgatgttcatcgccacttgatctgtgacaagtgacggcattctttcgtttcttggctgcaaattcttcgttgtccagaatataatttcagatgggtaatgccaattcgggccgtgttaaaaagaaaaaacacatacattctagataaacaaacacgaacaatgagcagacacaa

SEQ ID NO: 62221 - DNA, 736 bp, Zea mays
  Clone ID: MRT4577_156742C.1
gcacgaggccgcctgtacaacaagaagaacgagtgggagaagatgcagcagcagaaggagaaggcgatggagtcggaggcggcgctctcgcactcccactccgacacgcggacgccggagtcggagatcgacgacgacccgttcccggagctgggctccctgccgtcattcgacgacatgggcccaggcgcagccccagcccctgccggcgtcgtcctgcccaaggaggaggtggaggacttcggcgacctcggcggcgacgactggctcgcgggcatcaacctcgacgacctgcagatgccgggggacgccgccgatttctacggctccatgctcgtctcgccgatggccgccaagatggagccggacggcggcttccccttcttctgagatccttcggcgactccggggacgaccggatgcagcgcaacgcaaactgtgtatagttcagattttcttcatggaaccaacaacaacaaaaaaaagttctgctaatatcttgttctagtggtgtagtgcagaagtagcagcaggcatgattgaagttccattgtagtactgatgttcatcgccacttgatctgtgacaagtgacggcattctttcgtttcttggtcttggctgcaaattcttcgttgtccagaatataatttcagatgggtaatgccaattcgggccgaaaaaaaaaaaaaaaaaaaaactcgagactagttctctctctctctctctcctggtgc

SEQ ID NO: 62222 - DNA, 407 bp, Zea mays
  Clone ID: MRT4577_156743C.1
ccatgcccgacctctcgggcataacggccgaggacgcgggcccgcagctcatcacgtcggagacctcggccggggaggaggcggcggcggtcgtgcagccgcagccgtcggcggacgcggcgcggcgcaagcgcaagcggcggcggcagcaggagcagctgagcgcgtcggcgtccttcttcgagcggctggtgcagcggctgatggagcaccaggagagcctccaccggcagttcctggaggccatggagcggcgcgagcgggaccgcgccgcgcgggacgaggcgtggcggcggcaggaggccgacaagttcgcccgcgaggccgccgcgcgcgcgcaggaccgcgccagcgccgcggcgcgggaggccgccatcatcgcctacctggagaagatctcgggcgag

SEQ ID NO: 62223 - DNA, 140 bp, Zea mays
  Clone ID: MRT4577_156744C.1
aactgagtcctttgaatgactgaacggtaggcccactatggcaaaaaaacttcactgtgcacataacgatgactatcctttgaaggatatttgttggaacccgagtactctgatctccacccaacgctaccagcagtaac

SEQ ID NO: 62224 - DNA, 1385 bp, Zea mays
  Clone ID: MRT4577_156745C.1
aagacaacaccactccactccctccatttccctcacctcccgcagcagctagccgccagccaacaaccgaaccaaccaaccaacccacaggccacagcgagcgagtaaagcgtccaatggtagcgatggcggccgtgcagcagcagcagcagcagcagcgccgcgacgcggaggcggagctcaacctgcccccgggcttccggttccacccgacggacgaggagctggtggcgcactacctctgcgcgcgcgccgcggggcgccgcccgccggtgtccatcatcgccgaggtcgacctgtaccgcttcgacccctgggacctgccggagcgcgccctcttcggccgccgcgagtggtacttcttcacgccgcgggaccgcaagtaccccaacggctcccgccccaaccgcgccgccgggtcgggctactggaaggccacgggcgcggacaagcccgtggagcacgggggccggacggcggggatcaagaaggcgctcgtgttctaccacggcaagccgccgcgcggggtcaagacggagtggatcatgcacgagtaccgcctcgccggcgacgcgaagaagtccggcgccggcacgctcaggctggatgactgggtgctgtgccgcctgtacaacaagaagaacgagtgggagaagatgcagcagcagaaggagaaggagaagaaggcgatggagtcggaggcgtcgctctcgctctcgcactcccactccgacacgcggacgccggagtcggagatcgacgacgacccgttcccggagctgggctctctgccggcgttcgacgacatgggcccaggcgcagccccagcccctgccggcgtcgtcctgcccaaggaggaggtggaggacttcggcgacctcggcggcgacgactggctcgcgggcatcaacctcgacgacctgcagatgccgggggacgccgccgatttctacggctccatgctcgtctcgccgatggccgccaagatggagccggacggcggcttccccttcttctgagatccttcggcgactccggggaccggatgcagcgcaacgcaaactgtgtatagttcagattttcttcatggaaccaacaacaacaaaaaaaagttctgctaatatcttgttctagtggtgtagtggtgtagtgcagaagtagcagcaggcatgattgaagttccattgtagtgctgatgttcatcgccacttgatctgtgacaagtgacggcattctttcgtttcttggctgcaaattcttcgttgttcagaatataatttcagatgggtaatgccaattcgggccgtctttagcggtttatgtttggagccttaaaaaaaaaaaaaaaaaaaaaaaaaaaaaaaaaaaaaaaacccccccccccc

SEQ ID NO: 62225 - DNA, 313 bp, Zea mays
  Clone ID: MRT4577_156746C.1
cccacgcgtccgacgactccggattctttaacgatcacaggtagcatctggttcactttgactgagatcatgtccagcatgaactgcaagtgctactgcagctccagctggtcctgcgtcatgtcatgctactgcatcatccataacttgcagacctacttcgagagcagcctcaagaccatggttcttactgtgcataccaccacggccagcaccaccggcttcgaggctggcaccgacgtccgcgcctgccactgcaacacctgcaagtgcggtaccagctgcggctgcttctgctgcatctgcaactgat

SEQ ID NO: 62226 - DNA, 2685 bp, Zea mays
  Clone ID: MRT4577_156747C.1
ggtaccttcgggacccgcccgcattcggagcgcagaacccgcccacaggacaggacacacagagccgagccaccccacccaccatcggcgaccagcagccagccgcgggagcgagctgtttaaagacaccgagtcggagtcggacggaggactggcaggcacaaccgaagccaccgcttctagttctcgggttcatcgccagcaatccagaccacataatgggacagccggtgacgaggaggagggagagggacgcggaggcggagctggacctgccgccggggttccggttccaccccacagacgacgagctggtggagcactacctgtgccgcaaggcggcggggcagcgcctccccgtgcccatcatcgccgaggtggacctgtacaggttcgacccgtgggacctgccggagcgcgcgctcttcggggcccgggagtggtacttcttcacgcccagggaccgcaagtaccccaacggctcccgccccaaccgcgccgccggcgacgggtactggaaggccaccggcgccgacaagcccgtcgcgccgcgcgccgccgccgccgacgcccgcacgctcgggatcaagaaggcgctcgtcttctacgccggcaaggcgccgcgcggggtcaagacagactggatcatgcacgagtacaggctcgctgacgccggccgccgcgccaaaaaggggtggctcaggttggatgactgggtgctgtgccggactgtacaacaagaagaacgagtgggagaagatgcggctggggaagggggcagccgccggcgcaggtcaaagaggaggaggccatggacatgagcacctcccactcgcagatcacccactacgtggggcgagacgcgcacgcccggagtcggagatcgtggacaacgacctgccgttcccggatccggcgatgatggtgcccaagaaggagcgggtggacaacggcggcaacgccaggaccagccaccgcttcgtggatctcagctccgacgccatccagggcatgcagaccggcctcgacctgctggcgccggccggctaggacttgttctgctcgctcctccggagaccaagggacagagggaaccgctaaactgggcatgcggcggtgggccctcacggaatgaactcaggctaagatggagacttgtacatcaagctagatgtcgggcggtattgcagaagctgcagattgagtaattgaagagccgttgtagttgtgttgtcctgggtgcggttttatatgtgggatgtgacgtctttctttcgtgtcataggagcctaacctgcgcccgaccctggtcttggttcagaggtgtctccgactgtaggtaaaaatcacacgcaggcgggcggcgcggccgggcagctcttttcaattccctccatttccctcacctcccgcagcagctagccgccgccagccaacaaccgaaccaaccaaccaacccacagcgagcgaggaaagcgtccaatggtagcgatggcggccgtgcagcagcagcgccgcgacgcggaggcggagctcaacctgcccccgggcttccggttccacccgacggacgaggagctggtggcgcactacctctgcgcgcgcgccgcggggcgccgcccgccggtgtccatcatcgccgaggtcgacctgtaccgcttcgacccgtgggacctgccggagcgcgccctcttcgggcgccgcgagtggtacttcttcacgccgcgggaccgcaagtaccccaacggctcccgccccaaccgcgccgccgggtcgggctactggaaggccacgggcgcggacaagcccgtggagcacgggggccggacggcggggatcaagaaggcgctcgtgttctaccacggcaagccgccgcgcggggtcaagacggagtggatcatgcacgagtaccgcctcgccgaagccggcggcgcccgcgccaagaagtccggcgccggcacgctcaggctggatgactgggtgctgtgccgcctgtacaacaagaagaacgagtgggagaagatgcagcagcagaaggagaaggagaaggagaagaaggcgatggagtcggaggcgtcgctctcgcactcccactccgacacgcggacgccggagtcggagatcgacgacgacacgttcccggagctgggctccctgccggcgttcgacgacatgggcccagccccagcagcagcagccactgccggcgtcgtcctgcccaaggaggaggtggaggacttcggcgacctcggcggcgacgactggctcgcgggcatcaacctcgacgacctgcagatgccgggggacgccgccgatttctacggctccatgctcgtctcgccgatggccgccaagatggagccggacggcggcttccccttcttctgagatccttcggcgactccggggacgaccggatgcagcgcaacgcaaactgtgtatagttcagattttcttcatggaaccaacaacaacaacaaaaaaagttctgctaatatcttgttctagtggtgtagtgcagaagtagcagcaggcatgattgaagttccattgtagtactgatgttcatcgccacttgatctgtgacaagtgacggcattctttcgtttcttggctgcaaattcttcgttgttcagaatataatttcagatgggtaatgccaattcgggcccgtctttagcggtt

SEQ ID NO: 62227 - DNA, 595 bp, Zea mays
  Clone ID: MRT4577_156748C.1
cgaaaatagccaccaaattaaccatctgcaggagtacatctgtagtccctaatctactagtagaacaaataaatgtagacaatgggcaaagagaggtagtgaggaatggccgccttcctccttgaaagcaaccacagaccaaacaccagtctttgcaccttgcatcagatgcccaatatggggaagccaggatcagatctggccctctaggcctgattgtcgctcttgcgatcactgtgtccatcgcgctcctgcaagagcgacccggcctcctcatcagcctgtgtggctttcttctgggcctccttagccttgagcgcctgcagcttgacatgattgtagtagcccacccctaaaaacgcgatcccgtacccgaacaggttgatcggtgtgacggtgtcccggatcacggaccacgagaaggcaatcaacagccagtccttgactactcccgcgacgttcatggtcaacgccgaggtcttgccgaccagcaggaagacggcaaggttgagcgcaaaggcgcagagtgagttcgtcccaaagacgaagaaatccggttggaaggtgccgacggcgcgcagcctgggcagctcga

SEQ ID NO: 62228 - DNA, 1366 bp, Zea mays
  Clone ID: MRT4577_156749C.1
cggacgcgtgggcggacgcgtgggcaacaccactccactccctccatttccctcacctcccgcagcagctagccgccagccaacaaccgaaccaaccaaccaacccacaggccacagcgagcgagtaaagcgtccaatggtagcgatggcggccgtgcagcagcagcagcagcagcagcgccgcgacgcggaggcggagctcaacctgcccccgggcttccggttccacccgacggacgaggagctggtggcgcactacctctgcgcgcgcgccgcggggcgccgcccgccggtgtccatcatcgccgaggtcgacctgtaccgcttcgacccctgggacctgccggagcgcgccctcttcgggcgccgcgagtggtacttcttcacgccgcgggaccgcaagtaccccaacggctcccgccccaaccgcgccgccgggtcgggctactggaaggccacgggcgcggacaagcccgtggagcacgagggccggacggcggggatcaagaaggcgctcgtgttctaccacggcaagccgccgcgcggggtcaagacggagtggatcatgcacgagtaccgcctcgccgaagccggcggcgcccgcgccaagaagtccggcgccggcacgctcaggctggatgactgggtgctgtgccgcctgtacaacaagaagaacgagtgggagaagatgcagcagcagaaggagaaggagaagaaggcgatggagtcggaggcgtcgctctcgcactcccactccgacacgcggacgccggaatcggagatcgacgacgacccgttcccggagctgggctctctaccggcgttcgacgacatgggcgcagccccagcccctgccggcgtcgtcctgcccaaggaggaggtggaggacttcggcgacctcggcggcgacgactggctcgcgggcatcaacctcgacgacctgcagatgccgggggacgccgccgatttctacggctccatgctcgtctcgccgatggccgccaagatggagccggacggcggcttccccttcttctgagatccttcggcgactccggggacgaccggatgcagcgcaacgcaaactgtgtatagttcagattttcttcatggaaccaacaacaacaaaaaaagttcttgctaatatcttgttctagtggtgtagtgcagaagtagcagcaacatgattgaagttccattgtagtactgatgttcatcgccacttgagctgtgacaagtgacgacattctttcgtttcttggctgcaaattcttcgttgtccagaatataatttcagatgggtaatgccaattcgggacgtgttaacttgtttcttgcctctgaacatacaatagcttgttgtgct

SEQ ID NO: 62229 - DNA, 241 bp, Zea mays
  Clone ID: MRT4577_15674C.1
ggacctgggcgcggcggcggctcgacacaaccggcgcgacggcggcttcgacgcgaccggcgcgacggcggcgcacagccccgacgactgaccctaccttctgccttctccccgatgcctacaacaccaagtagagttagggaatgtgaacctcctccctcttgggatccggtaccaactcctaaagatgagctttcatagtgggattttgagcggatcaagaatcagctttgacttgggc

SEQ ID NO: 62230 - DNA, 483 bp, Zea mays
  unsure (1)..(483): unsure at all n locations
  Clone ID: MRT4577_156750C.1
aaagagccaccaaattaaccatctgcaggagtacatctgaagtcccctaatctactagtacnaacaaataaatgtagacaatgggcaaagagaggtagtgaggaatggccgccttcctgtggatcagaagtgtctataaataaatagcaggacaaagttctccagcaaagcaggtgcatatttcctaaaccataaatacttctgatttgctcttcagacccagagttaaagatgtgcaagcaaccggcacacacctccttgaaagcaaccgcagacctaacaccagtctttgcaccttgcatcagatgcccttccggagcaccgagtcagacatgccgccggcgacaccgccaccgccgtcacgccccatgtcgccgccgccgccgctgccgctgccgccctgctggacctcttgatggtggtggtgcagcgggagggggaggagcaggcgttggtggcggcggatctggatccggaggcggg

SEQ ID NO: 62231 - DNA, 137 bp, Zea mays
  Clone ID: MRT4577_156751C.1
attactcttcacctgatgacggtcggccacatcgcctcgttctacaccatgcggtataagacctagatgctcatgcatgcgcgctgccagatcaccgacgcacacgtcaccatgggcgagctgaacacccggtgcta

SEQ ID NO: 62232 - DNA, 1690 bp, Zea mays
  Clone ID: MRT4577_156752C.1
ttggggacctcgaggccgggcggggaatcctcagatccgccccctcctcccccttgcgccgcgctttcacagctctcccgcctccggatccagatccgccgccaccaacgcctgctcctccccctcccgctgcaccaccaccatcaagaggtccagcagggcggcagcggcagcggcggcggcggcgacatggggcgtgacggcggtggcggtgtcgccggcggcatgtctgactcggtgctccggaaggtgctcctctcctacttctacgtggcggtgtggatcttcctctccttctccgtcatcgtctacaacaagtacatcctcgacccaaagatgtacaactggcccttccccatctccctcaccatggtgcacatgggtttctgctcatccctcgccgtcgcgctcgtccgcgtcctccgcgtcgtcgacctccccacatcgccctccatgacgccgcagttctacacctcctccgtcgtccccatcggcgcgctctacgcgatgtcgctctggttctccaactccgcctatatctacctgtccgtgtcattcatccagatgctcaaggcgctgatgcccgtcgccgtctactccatcggcgtcctcttcaagaaggagaccttcaggtcctcctccatgctcaacatgctctccatctcattcggtgttgccatcgccgcctacggcgaggcgcgcttcgacgtgcgcggcgtcgcgctgcagctcgccgccgtcgccttcgaggccacgcggctcgtgctcatccagatcctgctcacgtccaagggcatctcgctcaaccctatcacctcgctctactatgtcgcgccgtgctgcttctgcttcctcctcgtgccctgggccttcgtcgagctgcccaggctgcgcgccgtcggtaccttccaaccggattttttcgtctttgggacgaactcactctgcgcctttgcgctcaaccttgccgtcttcctgctggtcggcaagacctcggcgctgaccatgaacgtcgcgggagtagtcaaggactggctgttgattgccttctcgtggtctgtgatccgtgacaccgtcacaccgatcaacctgttcgggtacgggatcgcgtttttaggggtgggctactacaatcatgtcaagctgcaggcgctcaaggctaaggaggcacagaagaaagccacacaggctgatgaggaggccgggtcgctcttgcaggagcgcgatggacacagtgatcgcaagagcgacaatcaggcctagagggccagatctgatcctggcttccccatattgggcatctgatgcaaggtgcaaagactggtgttaggtctgcggttgctttcaaggaggtgtgtgccggttgcttgcacatctttaactctgggtctgaagagcaaatcagaagtatttatggtttaggaaatatgcacctgctttgctggagaactttgtcctgctatttatttatagacacttctgatctacaggaaggcggccattcctcactacctctctttgcccattgtctacatttatttgttctactagtagattaggggactacagatgtactcctgcagatggttaatttggtggctattttcgatatataatgagcttacagtaatctaaaaaaaaaaaaaaaaaagaaaaaaaaaagcttgtacctgcccgggcggccgctcga

SEQ ID NO: 62233 - DNA, 533 bp, Zea mays
  Clone ID: MRT4577_156753C.1
gcgcggtttttttgcgctgcgacctcgtcgtggacaggctggtggacgtcaccagtcccatgaagatcaaggccggcaactgcaagttcagcttgaagttctgattcattgggttttctgttctctcttttggagcgagttcagttcagagtcgttgcgttggattcttttggcagagtgctggccgtgcacaggtgcatacgtgcagtgcactcccgccaacctcgttggcgttcatctcggccgacgtgtacaggtggtagtatataattgctgttcatctcggccgacgtttagggtttagagagggacaatacgcgtggctagaattttataattctagagttacttctatcaccacacaactgaatgcacaagacgcaacaaccaaatggaaaatgtgtgcctgccaatggaaagcacatcacaactacttttgcagcagcataatggaaaatcgaatcacccactccagagaagcttgaatttacaagcaaaaagggttgtgtgagttcgctctggcaggaatttac

SEQ ID NO: 62234 - DNA, 1831 bp, Zea mays
  Clone ID: MRT4577_156754C.1
ccggccgggaaaatcctcagatccgccccctcctccacccttgcgccgcgctttcacagctctcccgcctccggatccagatccgccgccaccaacgcctgctcctccccctcctgctgcaccaccaccatcaagaggtccagcagggcggcagcggcagcggcggcggcggcgacatggggcgtgacggcggtggcggagtcgccggcggcatgtctgactcggtgctccggaaggtgctcctctcgtacttctacgtggcggtgtggatcttcctctccttctccgtcatcgtctacaacaagtacatcctcgacccaaagatgtacaactggcccttccccatctcgctcaccatggtgcacatgggtttctgctcatccctcgccgtcgcgctcgtccgcgtcctccgcgtcgtcgacctccccacatcgccctccatgacgccgcagttctacacctcctccgtcgtccccatcggcgcgctctacgcgatgtcgctctggttctccaactccgcctatatctacctgtccgtgtcattcatccagatgctcaaagcgctgatgcccgtcgccgtctactccatcggcgtcctcttcaagaaggagaccttcaggtcctcttccatgctcaacatgctctccatctcattcggcgtggccatcgccgcctacggcgaggcgcgcttcgacgtgcgcggcgtcgcgctgcagctcgccgccgttgccttcgaggccacgcggctcgtgctcatccagatcctgctcacgtccaagggcatctcgctcaaccctatcacctcgctatactatgtcgcgccgtgctgcttctgcttcctcctcgtgccctgggccttcgtcgagctgcccaggctgcgcgccgtcggcaccttccaaccggatttcttcgtctttgggacgaactcactctgcgcctttgcgctcaaccttgccgtcttcctgctggtcggcaagacctcggcgctgaccatgaacgtcgcgggagtagtcaaggactggctgttgattgccttctcgtggtccgtgatccgggacaccgtcacaccgatcaacctgttcgggtacgggatcgcgtttttaggggtgggctactacaaccatgtcaagctgcaggcgctcaaggctaaggaggcacagaagaaagccacacaggctgatgaggaggccgggtcgctcttgcaggagcgcgatggacacagtgatcgcaagagcgacaatcaagcctagagggccagatctgatcctggcgcccccatattggttggttctcgatacattcatgatattgctaccattgtcacttacatgtgagagaagtgttttttgttagcttgcattgtgatataagagttcatcttgagaaagacgttatgtttacatctaacgttctttttgttgcaatcgaaaatcaatattgcattgtggaccatgggctactgaagacatatgttttgtttacacaaatgaaatagaaatctgaaaaaaaaatgttctgtgaacaggttaccattagcctggaactgcgacaaaataagaataatcgaaaccaataaagcctagcgttttgttgttctactcggtcattttcgtgtcctaaacttgtaattttgctggaatattgtacagggcatctgatgcaaggtgcaaagactggtgtttggtctgcggttgctttcaaggagttgtgtgccggttgcttgcacatctttaactctgggtctgaagagcaaatcagaagtatttatggtttaaggaaatatgcacctgctttgctggagaactttgtcctgctatttatttatagacac

SEQ ID NO: 62235 - DNA, 271 bp, Zea mays
  Clone ID: MRT4577_156755C.1
accctgtccgcttgccgccgccgccgccgccgcccgactcaccgaagaatataccagcgcgcgcgcgcgtgctctctcctcccccgtatccgcccgatccctcgatccggccccgccgcgatgctctccctgtcgagaacgctcgcgaggcggctcttctccaccgccgccgccgcctcgacgccgctggcgaggaaggcgcagaaccccctcgaggagttcttcgaggtcgagcggagcacccaggacgaccagcccgcgccccactacg

SEQ ID NO: 62236 - DNA, 676 bp, Zea mays
  Clone ID: MRT4577_156756C.1
cggacgcgtgggcggcgttgaccatgaacgtcgcgggagtagtcaaggattggctgttgattgcattctcgtggtccgttatccgggacaccgtcaccccgatcaacctgttcggatatgggatcgcgtttttaggggtggcctactacaatcatgtcaagctgcaggcgctcaaggctaaggaggcccagaagaaagccgcacaggctgatgaggaggttggatcgctcttgcaggagcgcgatggacacggtgatcataagagcgacaatcaggcttagactgtcagatctgatcctggccttcccatattgacttcagcgcccagaagaattcttgatctgttgttgcggcactacgcaactcaacgagatttttgtcgatgcacatgggggaagatcttgagcaactagtgggccatccaaagcgttgtggcttcgaacagaaggcaacaaccaacattctaccagtcctcttcgcgaccgaactgggtgttttggttacggtttcagtaaaatatactgcgttaggatacttttcaaatatgcaaggaatggcctctaagacagggtgaattagacggtctaatttctctctaatttatgatctttatttttcttccggtcaagatctatgcaaagaactaagctattttatatttttattcgagaacgac

SEQ ID NO: 62237 - DNA, 115 bp, Zea mays
  Clone ID: MRT4577_156757C.1
caacgagatggctgtggtatattctataaacctagaagtgcagaactggtgcagcaagaagtaatactggtacaatggatttagtaggaaaaatatgtccctagtggtaatgtaa

SEQ ID NO: 62238 - DNA, 1783 bp, Zea mays
  unsure (1)..(1783): unsure at all n locations
  Clone ID: MRT4577_156758C.1
cgggaagcaaggctctcctcctggctcttgactccatccatcccgatcccgtgcagcttcagcttcagcttcaccgagcgagtgtcacacacacacacacacacacacccagctgaagcacatccccaagatttaaagctccacacagcagctcgcggtggttcgcgcgccctacccaacatttccgaacacaacacaggcatcgtctgcgatgggcgccggcgacgacgacaccaagcccgctgccatggaggtgacctccacctcctcgccgccgtcgctcccctccccggcggcgccaccgccgtcgctgctgcgctccgtgctgctgtcgtacgcgtacgtggggatctggatgagcctgagcttctcggtgatcgtgtacaacaagtacatcctagacccgaagctgtacaactggccgttcccgatctcgctcaccatgatccacatggccttctgcgcgctcctggccacgacgctcgtccgcgtcctccgcgtcgtcgacgtcccgtcctcctccgctcctcaccagcagcagcaggccatgacgccgcgcctctacgcctcctccgtgctccccatcggcgcgctctacgcgctctcgctctggttctccaactccgcctacatctacctctccgtctccttcatccagatgctcaaggcgctgatgcccgtcgccgtcaaactcctcgncgtcgcgctccgcaccgacgcctttcgggtcctctccatgctcaacatgctctccatctcattcggcgtggccatcgccgcctacggcgaggcgcgcttcgacgtgcgcggcgtcgcgctgcagctcgccgccgttgccttcgaggccacgcggctcgtgctcatccagatcctgctcacgtccaagggcatctcgctcaaccctatcacctcgctatactatgtcgcgccgtgctgcttctgcttcctcctcgtgccctgggccttcgtcgagctgcccaggctgcgcgccgtcggcaccttccaaccggatttcttcgtctttgggacgaactcactctgcgcctttgcgctcaaccttgccgtcttcctgctggtcggcaagacctcggcgctgaccatgaacgtcgcgggagtagtcaaggactggctgttgattgccttctcgtggtccgtgatccgggacaccgtcacaccgatcaacctgttcgggtacgggatcgcgtttttaggggtgggctactacaaccatgtcaagctgcaggcgctcaaggctaaggaggcacagaagaaagccacacaggctgatgaggaggccgggtcgctcttgcaggagcgcgatggacacagtgatcgcaagagcgacaatcaagcctagagggccagatctgatcctggcgcccccatattgggcatctgatgcaaggtgcaaagactggtgtttggtctgcggttgctttcaaggagttgtgtgccggttgcttgcacatctttaactctgggtctgaagagcaaatcagaagtatttatggtttaggaaatatgcacctgctttgctggagaactttgtcctgctatttatttatagacacttctgatctacaggaaggcggccattcctcactacctctctttgcccattgtctacatttatttgttctactagtagattagggactacagatgtactcctgcagatggttaatttggtggctattttcgatatataaagagaaaaaagtaatccaaaaaaaaaaaaaaaaaaaaaaaaaaaaagcttgtacctgcccgggcggccgctcga

SEQ ID NO: 62239 - DNA, 1742 bp, Zea mays
  Clone ID: MRT4577_156759C.1
cagggtacccctcgaggccggccgggaaatcctgagatccgccccctcctccacccttgcgccgcgctttcacagctctcccgcctccggatccagatccgccgccaccaacgcctgctcctccccctcctgctgcaccaccaccatcaagaggtccagcagggcggcagcggcagcggcggcggcggcgacatggggcgtgacggcggtggcggtgtcgccggcggcatgtctgactcggtgctccggaaggtgctcctctcctacttctacgtggcggtgtggatcttcctctccttctccgtcatcgtctacaacaagtacatcctcgacccaaagatgtacaactggcccttccccatctcgctcaccatggtacacatgggtttctgctcatccctcgccgtcgcgctcgtccgcgtcctccgggtcgtcgacctccccacatcgccctccatgacgccgcagttctacacctcctccgtcgtccccatcggcgcgctctacgcgatgtcgctctggttctccaactcagcctacatctacctgtccgtgtcattcatccagatgctcaaggcgctgatgcccgtcgccgtctactccatcggcgtcctcttcaagaaggagaccttcaggtcctcctccatgctcaacatgctctctatctcattcggtgtggccatcgccgcctacggcgaggcgcgcttcgacgtgcgtggcgtcgcgctgcagctcgccgccgtcgccttcgaggccacgcggctcgtgctcatccagatcctgctcacgtccaagggcatctcgctcaaccctatcacctcgctctactatgtcgcgccgtgctgcttctgcttcctcctcgtgccctgggccttcgtcgagctgcccaggctgcgcgccgtcggcaccttccaaccggatttgttcgtctttgggacgaactcactctgcgcctttgcgctcaaccttgccgtctttctgctggtcggcaagacctcggcgctgaccatgaacgtcgcgggagtagtcaaggactggctgttgattgccttctcgtggtccgtgatccgggacaccgtcacaccgatcaacctgttcgggtacgggatcgcgtttttaggggtgggctactacaatcatgtcaagctgcaggcgctcaaggctaaggaggcccagaagaaagccacacaggctgatgaggaggccgggtcgctcttgcaggagcgcgatggacacagtgatcgcaagagcgacaatcaagcctagagggccagatctgatcctggcttccccatattgggcatctgatgcaaggtgcaaagactggtgtttggtctgtggttgctttcaaggaggtgtgtgccggttgcttgcacatctttaactctgggtctgaagagcaaatcagaagtatttatggcttaggaaatatgcacctgctttgctggagaactttgtcctgctatttatttatagacacttctgatctacaggaaggcggccattcctcactacctctctttgcccattgtctacatttatttgttctactagtagattagggactacagatgtactcctgcagatggttaatttggtggctattttcgatatataatgagcttacagtaatctacgaactgagtctgactgcctgcgaagtttctgtttattcgtggaccggtcggcgtgttgtgtggatcagctttgtagtactttagtttcataccccgctttgtggt

SEQ ID NO: 62240 - DNA, 645 bp, Zea mays
  unsure (1)..(645): unsure at all n locations
  Clone ID: MRT4577_15675C.1
ggtaccgcggcccctctctcgagtttttttttttttttttttttttttttttttttttttttttttttttttttggacccttacatttttttcatttacccaataaacgggaagcacagccaaacgtacttttacgacgcaggcaaaaaaaaaacatcgcagtcgttattcattgttcccgagcaataccccggaaaccggagggataaattttaggacaacggaaactaattttcaaaaccaaagcgaccccccgggggatgcgttgggcaaaaggaaaacagggggctccctttaaaaggcgcatgcttgatcagtttccattccacaggaggggggtctcggcgatcatgccggggacaacgtaggggtccatgttggaccccggcctggggtcctcaaagaaccccttgccctccctttcggggtcggggccgacgcggatggacccccccgcggttccccaccccccatttgaaggggttgatgtcggcggtctcggggcggcccgggagggggggctcgttgccctcgccgtacgcggngatgtgctccttgggccttttccccagcttgtcgatcgccgccttgatcacctcgtatcccccggcctccctaatcaacttggggctgtaattggggggg

SEQ ID NO: 62241 - DNA, 463 bp, Zea mays
  Clone ID: MRT4577_156760C.1
cccaaaaacgaaaatgggtgggctggcatgggggggggggtttcaacagaggggaaattttttagggaatgggaaggcaaacttggcaaaggttttttgactgggagaaaggggggggggccccccaagaggggggggccgggggaggcattccattaacgggggggaacccaccaaacccggggtaaaggaaggggtttgctgaaggagcaacccccgggggaggctgcggggggggcccaaagggattgggtaaaaaaaaaaggggaaaaggcgggggggggggacccagggccgccattggaacggggggggggggagccacttgatttgaaacgggaaagggaccgcttgccaaaaagggatgggggggggctaacccgaaaaggggggggggcggcatcggccgggggggcccaacatcgaaaagggggcccaaggggagctgggaaaacccaccccc

SEQ ID NO: 62242 - DNA, 1443 bp, Zea mays
  Clone ID: MRT4577_156761C.1
gcggtcagcgaagtagctcggattcggctcagcaatcctcagatccgcccctcctccacccttgcgccacgctttcacagctctcccgcctccggatccagatccgccgccaccaacgcctgctcctccccctccggctgcaccaccaccatcaagaggtccagcagggcggcggcggcggcggcggcgacatggggcgtgacggcggtggcggtgtcgccggcggcatgtctgactcggtgctccggaaggtgctcctctcctacttctacgtggcggtgtggatcttcctctccttctccgtcatcgtctacaacaagtacatcctcgacccgaagatgtacaactggcccttccccatctccctcaccatggtgcacatgggtttctgctcatccctcgccgtcgcgctcgtccgcgtcctccgcgtcgttgaactccccacatcgccctccatgacgccgcagttctacacctcctccgtcgtccccatcggcgcgctctacgcgatgtcgctctggttctccaactccgcctacatctacctgtccgtgtcattcatccagatgctcaaggcgctgatgcccgtcgccgtctactccatcggcgtcctcttcaagaaggagaccttcaggtcctcctccatgctcaacatgctctccatctcattcggcgtggccatcgccgcctacggcgaggcgcgcttcgacgtgcgcggcgtcgcgctgcagctcgccgccgtcgccttcgaggccacgcggctcgtgctcatccagatcctgctcacgtccaagggcatctcgctcaaccctatcacctcgctctactatgtcgcgccgtggctgcttctgcttcctcctcgtgccctgggccttcgtcgagctgcccaggctgcgcgccgtcggcacctttcaaccggatttcttcgtctttgggacgaactcactctgcgcctttgcgctcaaccttgccgtcttcctgctggtcggcaagacctcggcgttgaccatgaacgtcgcgggagtagtcaaggactggctgttgattgccttctcgtggtccgtgatccgggacaccgtcacaccgatcaacctgttcgggtacgggatcgcgtttttaggggtgggctactacaaccatgtcaagctgcaggcgctcaaggctaaggaggcacagaagaaagccacacaggctgatgaggaggccgggtcgctcttgcaggagcgcgatggacacagtgatcgcaagagcgacaatcaagcctagagggccagatctgatcctggcgcccccatattgggcatctctcgatacattcatgatattgctaccattgtcacttacatgtgagagaagtgttttttgttagcttgcattgtgatataagaagtcatcttgagaaagacgttatgtttacatctaacggtcttttttgtgcaatcg

SEQ ID NO: 62243 - DNA, 1489 bp, Zea mays
  Clone ID: MRT4577_156762C.1
atccgccccctcctccacagttgcgcccgttttcacagctctcccgcctcgggagcagatgcgccgccaccaacgcctgctcctccccctcctgctgcaccaccaccatcaagaggtccagcagggcggcagcggcagcggcggcggcggcggcggcggcgacatggggcgtgacggcggtggcggtgtcgccggcggcatgtctgactcggtgctccggaggggggggctctcctacttctacgtggcggtgtggatcttcctctccttctccgtcatcgtctacaacaagtacatcctcgacccaaagatgtacaactggcccttccccatctcgctcaccatggtgcacatgggtttctgctcatccctcgccgtcgcgctcgtccgcgtcctccgcgtcgtcgacctccccacttcgccatccatgacgccgcagttctacacctcctccgtcgtccccatcggcgcgctctacgcgatgtcgctctggttctccaactcagcctacatctacctgtccgtgtcattcatccagatgctcaaggcgctgatgcccgtcgccgtctactccatcggcgtcctcttcaagaaggagaccttcaggtcctcctccatgctcaacatgctctccatctcattcggtgtggccatcgccgcctacggcgaggcgcgcttcgacgtgcgcggtgtcgcgctgcagctcgccgccgtcgccttcgaggccacgcggctcgtgctcatccagatcctgctcacgtccaagggcatctcgctcaaccctatcacctcgctctactatgtcgcgccgtgctgcttctgtttcctcctcgtgccctgggccttcgtcgagctgcccaggctgcgcgccgtcggtaccttccaaccggattttttcgtctttgggacgaactcactctgcgcctttgcgctcaaccttgccgtcttcctgctggtcggcaagacctcggcgctgaccatgaacgtcgcgggagtagtcaaggactggctgttgattgccttctcgtggtctgtgatccgtgacaccgtcacaccgatcaacctgttcgggtacgggatcgcgtttttaggggtgggctactacaatcatgtcaagctgcaggcgctcaaggctaaggaggcacagaagaaagccacacaggctgatgaggaggccgggtcgctcttgcaggagcgcgatggacacagtgatcgcaagagcgacaatcaggcctagagggccagatctgatcctggcttccccatattggttggttctcgatacattcatgatattgctaccattgtcacttacatgtgagagaagtgttttttgttagcttgcattgtgatataagagttcatcttgagaaagacgttatgtttacatctagcgttttttttttgcaatcaaaaatcagtattgcattgtggaccatgggctactgaaggcacctgttttgtttacacaaatgaaatagaattctgg

SEQ ID NO: 62244 - DNA, 458 bp, Zea mays
  unsure (1)..(458): unsure at all n locations
  Clone ID: MRT4577_156764C.1
gaacatgaacggcaaggagctcgacggccgtaacatcaccgttaaccaggcccagtcccgtgacggtgacggtgacggcggtggctacggcggcggtcgcggcggcggcggctatggtggcgggcgccgtgacggcggttatggcggcggtggcggctacggcggtcggcgcgggggtggtggcggctacggcggcggcggcggcggctggagggactgatgtgtgggcccatcctggcttcggccgagttatcttatctatctatagtatcgtgttaccgttcgcttctgtcaccgtgttagtgtccgttctacctttggattaggtgttggtacccctgttgttccctttggttgctcccgctatgaaacgagacgagagaagaatgagcaaggtttttgttcaaaaaaaaaaaaaaaaaaannnnnaanaagtactctgcgttgttaccactgct

SEQ ID NO: 62245 - DNA, 280 bp, Zea mays
  Clone ID: MRT4577_156765C.1
tatagttgtaggagctctgggcagcgtgcgcacacgttggttacctagcttgctgtgctagcctaccatggctgaccaccaccggggcgcgacggtaggtggcgggggctacggcgacctccagcgcggtggcggtatgcacggcgaggcgcagcatcagcagaagcagggcgccatgatgacggtggtcaagggcgcgacggtcgggaccttcggggggtggatgctggtggtgggcgggcttattctggcccggtccgcgaacgtgctgacgggggcc

SEQ ID NO: 62246 - DNA, 333 bp, Zea mays
  unsure (1)..(333): unsure at all n locations
  Clone ID: MRT4577_156766C.1
gtttccttcctgccgagaagaagaacggaatcagggtgctatccacccatcagctctcgtatccgcagcgcccggaatggcggcaccctcccacgtcctcccgttcctgtcccccgccggcgggtgtgccgcctcctccgcccgcgcccactctggctaccgctcttttctcctgcggtggggggncncnnccnnccanncnntcttctttactcncctcnntcncctcataaannanaannccaanancnacntnnanaanctcttctcccccttctccaanacccncnanaacctctctntcntcnaccaactccttacttactnnaacct

SEQ ID NO: 62247 - DNA, 410 bp, Zea mays
  Clone ID: MRT4577_156767C.1
tttttttttttgaatgctacatagaaagatcaagtgtatagttctcaaaagcacacaaaaattcccttaccagaacaaatggtaaggggggggggggggggggaactgaaaatttgcaaccatgtggcgctagaatgtgcattatggggggggggttatactcggacatctgaacaaacaaactctggttacctagctacagatgaacatcagtctatctaccgactggtcctactctagccctcctatgtactccggccggagcgggagcggtgaaccccaaaccccaggtgtcgtgttaagacgatcaacaatgggcacaggggaaccaattccacatgttactaacccactggtcttacagggatggtgcattcccttggtggagattgaagaacgaacagattaac

SEQ ID NO: 62248 - DNA, 605 bp, Zea mays
  Clone ID: MRT4577_156768C.1
gtttcatttcgcggtctgtttgtgccgttggggctagatccgggtcgtggttcaacagatctgcttcgttttggtacagatctgcgttcgctcgaatcgagcatgacgttttcatgtgattatgcaggtcatcaccgaccgggagacggggaggtcccgcggcttcggcttcgttaccttctcctccgagaactccatgctcgacgctatcgagaacatgaacggcaaggagctcgacggccgtaacatcaccgttaaccaggcccagtcccgtggcggtggcggtggcggcggtggctacggcggcggtcgcggcggcggcggcggttatggtggcgggcgccgtgacggcggctacggcggcggtggcggcggcggctggagggactgatgtgtgggcccatcctggcttcggccgagttatcttatctatctatagtatcgtgttaccgttcgcttctgtcaccgtgttagtgtccgttctacctttggattaggtgttggtaccctgttgttcgctttggttgctcccgctatgaaacgagacgagagaagaatgagcaaggtttttgttcgcagctaaaaaaaaaaaaaaaaaaggctag

SEQ ID NO: 62249 - DNA, 187 bp, Zea mays
  Clone ID: MRT4577_156769C.1
gggggggggtttttttttttttgctacaaaacgcactggttaaattgctttttataaatggaacattaataagctacaacaccaccagacaacacgatgccatgggcctcacagcgagcattgggttgttttcgctcaaagctcaacactcttggcggggggcgtgtggccacaatggacacatgtt

SEQ ID NO: 62250 - DNA, 347 bp, Zea mays
  Clone ID: MRT4577_15676C.1
attcatattagttgtataggcaccaaatcaaatctgcaacattaattatctaactgcatataccatgttagccgtcgctggtggttctcgctttcattgctttagtatcaagtgtttcttgtactcagacaggcgtttgctgctgtggttaacaactaagccatgagcagcagctttatccactgcaacatacattcacaattacaacatcattgaccaccacggcaacattacctgcagtagtaactctatcaacatcaggtttacatgcatcctcagaaacatcagcaacagcaacattttgatgttcaattgcaacaacacctacctacttgttttgtcaaacc

SEQ ID NO: 62251 - DNA, 1843 bp, Zea mays
  Clone ID: MRT4577_156770C.1
gctggcttctcctccccctcttaccaagtcctcctcgggttagggttccttagggttttgtggaggggcgatggcggcggctgatgtggagtaccgttgcttcgtcggcgggcttgcctgggccaccagcaacgagtcgctggagaatgccttcgcctcctacggcgagatcctcgactccaaggtcatcaccgaccgggagacggggaggtcccgcggcttcggcttcgttaccttctcctccgagaactccatgctcgacgctatcgagaacatgaacggcaaggagctcgacggccgtaacatcaccgttaaccaggcccagtcccgtggcggtggcggtggcggcggtggctacggcggcggtcgcggcggcggcggcggttatggtggcgggcgccgtgacggcggttatggcggcggtggcggctacggcgcagggcgtctcgtcttccgcttcctcccgctgtgagcctgctgccgtcttcttccgccgccgccgccgtcgtcttcgtccgtaggtagcctcctctctcctgtcctcgcttgatcttatctactagtagtactcctgatgagacgctaagaaatctcgcttatattatgttaaccctgaaaccgaaagtgagtcttgtgcaactgtaaaaactgggacgtcactgaacgaacgatagcctgggttcgttcggtcgtagtggaggatacagcaacatcctcttaagttgaatttacgaacgcagttaatttgtttccctgtgccgttcgctgcgttacgcacaaggatctttactcctggatttcaatttatttattttccccccggccgggagtttgccgctctgtgagcctgctgccgtcttcttccgccgccgccgccgtcgtcttcgtccgtagatcagagagcggggaggaagaaaaagcgatcgatggcgtccaactacgtggacacgacgggcgaggagggacggttccacggccctcacagccacagcaccagcacgaccccgacgggcggcgcggcggcggcggcggcatcgccgcgcaacttccggcgcagcttctcctccgcgtcctccgcgggccacagccacggcggcggcggcggcggggccaagtgcgtgtgcgcgcccgcgacccacgccgggtcgttcaagtgccggctccaccgcaccaactcccagggccacggccacggccacccgcacccgtccccgccggcctcccccgccgcgccggcgcagggcgtctcgtcttccgcttcctcccgcaccgtcgaggccctgtgagtgtccgaggccaaagacgggcgaggcgtggggaaagtgagaagatgatgggatatacttgtcgtgtcagtctgtcagaaggaaaggagtgaagctattattccctcttgttgtgatccgcgctgttttgcctcttcccccctacccgtttcctcccttcgtgctggttgtggttctaaattcctgattgccggccgtcccgccttcttccttgccaagacgagactctcctcctcctgccactgctaccgctgctcctctcaactggtgaactggatcctgatttggggagaaggttaaactggatgcctttccatgtaattaattgcctctctttaccattctacgtgctactagtattgaagtatcatcacccttgttgtgtccttctgtctgtggtgtgatggtcatggactcatggtctgtgtttcttcggtgaagagttcgtacccgtacataaaagatcttcaatcagtggccggtttggtacctgtttggttcaaaaaaaaaaaaaaaaaaaaaaaaaaaaaatcaaaaaaaaaaaaaaaaaagcggcc

SEQ ID NO: 62252 - DNA, 964 bp, Zea mays
  Clone ID: MRT4577_156771C.1
cccacgcgtccgcggacgcgtggggctggcttctcctccccctcttaccaagtcctcctcgggttagggttccttagggttttgtggaggggcgatggcggcggctgatgtggagtaccgttgcttcgtcggcgggcttgcctgggccaccagcaacgagtcgctggagaatgccttcgcctcctacggcgagatcctcgactccaaggtttgcttcgtcctcgctaggtttcattccgcggtctgtttgtgccgttggggctagatccgggtcgtggttcaacagatctgcttcgttttggtacagatctgcgttcgctcgaatcgagcatgacgttttcatgtgattatgcaggtcatcaccgaccgggagacggggaggtctcgcggcttcggcttcgttaccttctcctccgagaactccatgctcgacgctatcgagaacatgaacggcaaggagctcgacggccgtaacatcaccgttaaccaggcccagtcccgtggcggtggcggtggcggcggtggctacggcggcggtcgcggcggcggcggctatggtggcgggcgccgtgacggcggttatggcggcggtggcggctacggcggtcggcgcgagggtggtggcggcggctacggaggcggtggcggctacggcggtcggcgcgagggtggtggtggcggctacggcggcggcggcggcggctggagggactgatgtgtgggcccatcctggcttcggccgagttatcttatctatctatagtatcgtgttaccgttcgcttctgtcaccgtgttagtgtccgttctacctttggattaggtgttggtacccctgttgttccctttgtttgctcccgctatgaaacgagacgagagaagaatgagcaaggtttttgttcgcagctatttttgtccaatgatattgatatgttgttccaaaaaaaaaaaaaaaaaggggcggcc

SEQ ID NO: 62253 - DNA, 981 bp, Zea mays
  Clone ID: MRT4577_156773C.1
cattgggacctcgagccggccgggatatacttcctcttcgtaataaacctatatggaaatataaatatttttcataaatataatcgaaatcaaaattgagtcaaacgggatgcacgttcatttagggacgaagaggatactaaatactagtatatagcgggttagtgtcaaggtagatgtacttgagtatgctgagattcaattaagcatatatatcataaataatgggtatagacagacatttaactatactcaaagagctgatgactcgcatcttgtaaaataattccggatgtttttttaatattatccgttcataatacctgacgcctcccttccccctgtctgtttcgctacagccctgctgaacctgaagccgggctctgcggactacgccctcttcgccaacgcctccaagagtgagtgctctcagctctctcaagtgaacccttcgtatcatcgccagttcgccacccatccagtaacccactggccactgcactgcactcaactaactggcaaccgccgtcaccgttctgttttctcctgcagtcacgccgtcagccggcggcaaccctgcgagcgacagcgccgcgggcagcggcgtcaagctccgggctggggtcagcggcggcgtcgcgctcgccgtggtctccgcgatcgcctcgtcactcttctgatggaccgacctcctctcaaaggagcagcggcggtttttttttaccctcctgtggattcgttctcgtgctgcgttccgctagcccatgtctactctgtactatctcataaaaaaaaatagatccagcctgagacgttgttccctccctccttccctgtaccgtgtttcatgatgacttgtgacaatggatggtttctccttgtgcgtcgcaatttacaagctttttttttgtttgtttgtttgttctggatgaacagagtttcagcgcagtaaacaattcaaataacctagttgttgtgttt

SEQ ID NO: 62254 - DNA, 862 bp, Zea mays
  unsure (1)..(862): unsure at all n locations
  Clone ID: MRT4577_156774C.1
cattgggtacctcgaggccggccgggagaggcttttgcagggtttcatctacatgctgatttaccttttcgcaaccgtgcctaattaagcacatgctttggttaagtgaaaaggcgagttacaacacataccaggaccaacatgatccttgcaagaaaagcatcacaaagatccccaggaagctcacaagttaattacatagcaaacagattgtgactgacgaaactcagcactaaaagaagccacgtacagagagacgctcctgggggacaaactccctagtcaccaccgtgccacttggctcacgtattggcaatcggtaacgcaatggataactaataatgttaagagctactttaggaaccttaaatctcatttaggattagaggggattgaggtagaaatgaactaatttttctctccaatctccttcaatcccgaaggtaatttgagtttccaaactagccttaaatcatttttgtttaagtctaaccataattcaatatcatactagaaatggatacaggtttattcaaattttataccaccggtactcaagtgtgaatcattatcaatactatttacgttatatttcgtgaaccaaacgacacatcaacttcaaagtgatgcacacatagcataattatatgtatattatgatatggatgggataaattatatcatgatgttcttattctactctgaatgtgaatagacttgcgttggcacatacatagacatctagagcagattcaacttattaattatttgtcatttgcacatgccctttcaccgtcatcattaacatctccacttttcttggtactagatattgngcttatcgacacgattccctttgacc

SEQ ID NO: 62255 - DNA, 1696 bp, Zea mays
  Clone ID: MRT4577_156776C.1
gctggcttctcctccccctcttaaccagtcctcctcgggttagggttccttagggttttgtggaggggcgatggcggcggctgatgtggagtaccgttgcttcgtcggcgggcttgcctgggccaccagcaacgagtcgctgcagagatgccttcgcctcctacggcgagatcctcgactccaaggtcatcaccgaccgggagacggggaggtcccgcggcttcagcttcgttaccttctcctccgagaactccatgctcgactctatcgacaacatgaacggcaaggtagctcgacagccgtaacatcaccgttaaccaggcccaggcccgtgacggcggctgtagcagtgcgtcacctacgattctcagtgctcagtgtacctgagctgcattgtagtattcagtgtgacacattgggtacctcgaggccggccggcgtgctgtgctgttcctgtgcctccatccttccgattcccatccccgtcgtcgcttgtttgctgctgccttttcctttccgccgcggcaaaagtgaggagcgcgcgggcgagttgggggagacgaacccgtcataactccctcgcttaatcgcgtctcgtgctcctgcctcctgcgtatataaacgcggcaatcgggacgcccggggaggcgttcgttctccttctccatcccacgcgcgcgcaggccaaggccggatcggcggcctctcagatctcgccggccgccgtgagacagagaccgaagggggggttgaccggtgctcgggaggaagatgtttagcgggacgcagcagaagtgcaaggtgtgcaccaagacggtgtacccgatggaccagctctccaccgacggcgtcgtcttccaccgctcctgcttcaagtgccagcactgcaagtctaccctctcactgagcaactattcctcgttcgaaggagtgccgtactgcaagacccatttcgagcagctgttcaaggagaccgggagttacaacaagagcttccaatcacagtcacctgcaaagattactccggaaaagttggcccctgagctgaccagatcaccaagcaaagctgcaaggatgttttcaggaacacaagacaagtgtgcgacttgtggtaaaactgcgtatcctcttgagaaggtaacagtcgaagagaagtcctaccataagtcatgcttcaaatgctcccacgggggctgcgcgattacaccttccaactatgcagccttggagggcatcctctactgcaaacaccatttctcccaacttttcaaggagaagggaagctacaaccacttgatcaagtgcgcgtccgtcaagcgcgctgctgaagcacagccagaacaaccggcctctgattcctcctcctgaccacgccatttaaacagtgggggtttggaggcgagagagttgggaagcctcctgtttctacttaaaaccgcgtgatgtatgttattccatctatgccccgaggatactagactactactctattttggtatcctctgctgtgctagctggatcatatcagcgaaccatggaattgctgtcattttcaatgaaactgttgtgcatcaagtagtgaaatcttcactgaaatcgggtatcttgcctttattgatcaatatattatctatgttgttttgttgtctttaaaaaaaaaaaaaaaaaaagccctcgcgactagttctcctcgtgc

SEQ ID NO: 62256 - DNA, 724 bp, Zea mays
  Clone ID: MRT4577_156777C.1
ggtacgcctgcagtacggtccgaattcccggggctggcttctcctccccctcttaccaagtcctcctcgggttagggttccttagggttttgtggaggggcgatggcggcggctgatgtggagtaccgttgcttcgtcggcgggcttgcctgggccaccagcaacgagtcgctggagaatgccttcgcctcctacggcgagatcctcgactccaaggtcatcaccgaccgggagacggggaggtcccgcggcttcggcttcgttaccttctcctccgagaactccatgctcgacgctatcgagaacatgaacggcaaggagctcgacggccgtaacatcaccgttaaccaggcccagtcccgtggcggtggcggtggcggcggtggctacggcggcggtcgcggcggcggcggcggttatggtggcgggcgccgtgacggcggttatggcggcggcggcggctggagggactgatgtgtgggcccatcctggcttcggccgagttatcttatctatctatagtatcgtgttaccgttcgcttctgtcaccgtgttagtgtccgttctacctttggattaggtgttggtaccctgttgttcgctttggttgctcccgctatgaaacgagacgagagaagaatgagcaaggtttttgttcgcagctatttttgtccaatgatattgatatattgttccgaaaaaaaaaaaaaaaaaacccgcggcc

SEQ ID NO: 62257 - DNA, 504 bp, Zea mays
  Clone ID: MRT4577_156778C.1
ctcgaccctagttgggtttgcgatacccgtgcgatcgcccatccagtcacattgctgcggttgtgccccttctctgggatcacgggatgcctgcctctcgcgcacacatctgctgctaatatatgcactgttggactacctgcctctacataactgacgtacatgtcacacatgaacttcacatatatctacgcacatgatgcatgactgactagtgagcgctcgcagaacttacgctccgctgggcccactaccaatagaaagacccgcggcgcataatcatgctcgtggaccctgataactgctgccgaactctcacctccattacttctatcttaacatatagagagactatttagaactccatgttatcactgacatagcatggaactgcctgaaattgatatccgctcacaattgcacacaacatgggcgcccgacgcctaaagagctaagcctgccgtgactaatgaccgagctcactcacattaactgcccagctct

SEQ ID NO: 62258 - DNA, 139 bp, Zea mays
  Clone ID: MRT4577_156779C.1
cagcttcctgaggttggcgtcaccagctgcctaaggtttcctggtcagttgaactctaacctcagtaagatgatggcgacagaggataacgtaccgcggacggtcttgtgggaaacatccctgctcaactgccgcccct

SEQ ID NO: 62259 - DNA, 1245 bp, Zea mays
  Clone ID: MRT4577_15677C.1
tgggtacctcgaggccggccgggtcgagcccggccgggcagctccggcccgatcgatgagaggagtcagacggaggcaaggccggggtcggcagcagaggggaggagagagatctcattctccgatccgcccaggccaccatggcggaggatgctacgagcagccacccgtcacgctacgtcaagctcaccaaggaccaggacgcccccgccgaggacatccgccccggcgagctcaaccagccagttcacgtcccgcagctcgaaggccggaggtgtagcgagtgcggtcaggtcctgcccgagagctacgagccgcccgccgacgagccctggaccaccgggatcttcggatgcaccgatgacccagagacctgtatgtaatctagtctctcttttggattggaacttgggcatggtggtctgctgattctgttagcgacaacacatgctgattcaaaatattcattcagtccaaaatgcctgatcaaatgtttgctttgcttagcacttgtatgatctccctgtcaatatctgtatggaatcactaggccgaactggattgttttgcccctgcgtgctgtttgggcgcaacgttgaggctgttagggaggacatcccttggacaactccttgcgtgtgccatgctgtattcgttgaaggagggatcacgctggcgattctgacggcgatatttcacggtgttgatccgaggacgtcattcctgattggagaaggtctggtgttcagctggtggttatgtgctacctacactggcatcttccgccaggggcttcagaggaaatatcatctcaagaactctccgtgtgacccatgcatggtccactgctgcttgcactggtgtgccaactgccaggagcatcgcgagaggacgggacggcttgcagagaacaacgcagtgcccatgacggttgtgaacccgcctccggtgcaagagatgagcatgctggaggaggtggaggagaagggagcagagaagagtgaacacgatgatgtggaggtcattcctctatagataatagggtcggagtccgagtgaggatagcactagcagcatcagatgacgatcacaacttctggtcattcctctatagttagttagttattgatctttcaacaacaaaatgtggtggtgtggcaactgtccatttttattatcccaaataataatactgtactacgttacggcacaaaaaaaaaaaaaaaaaaggcccctagggccctc

SEQ ID NO: 62260 - DNA, 278 bp, Zea mays
  Clone ID: MRT4577_156780C.1
cgagattgatttggttcaaacccataacaggggaaaaaacttttcaagccggctcaatccacattgacccgttcgggtgggaaaaaaccaaacctgacgggtcggaaatgaccgaacaagcctcacttttttttgacccagacccttatggcacaccccaagccacctaaaatggggaccccgggtggtcgctttttcctaaaacttcaggaaaccagaaagagtttccaggcccaaaggtgcccgagggagcggttggtgaccttctcgatacccaa

SEQ ID NO: 62261 - DNA, 405 bp, Zea mays
  Clone ID: MRT4577_156781C.1
ctctagaataaggctaaggcaaactgttcttggcctggatgcaaatggttaatctatggttccaagactaccagatcagattggtttaaggttgtcacttttatagatgagcattcttgcccacctaggagagacaataggttagtaacctccaacataattgcgaagcattatttcagtgagattaaggacaatccaacatgaaaagttgagttgataaagaaagctgttctaacaacatgtgtgagagttttaacaactccatcatggatgctaggtactatccagtcatttccatgtgtgaagccattagaaagaaggttatggtgaggatacaagagaataaggccaaggctgagaagtggacaggaacaatctgtcctaatatcttcaagaaattaaaaa

SEQ ID NO: 62262 - DNA, 506 bp, Zea mays
  Clone ID: MRT4577_156782C.1
tcgagtttttttttttttttttttttttttttttttttttttttttttttaacgctcgtagagttggagactttatttggcttggtttatgtttttattatcggaccatacagaggcgccccacagtttcttattccttaccgggattctatgaattaacaactgacggtctataatctctgagggagtcgccctgccctgtacccaattttattacaccggggggagtttggagagcaaactccgactgctgtaacacatattttttttacgcttaaaacacgcgccgttaacttaacacgacacaatggggacaactgtccctgaccatttgggaaatgatgatccattattgttcaagcacgtaggcgggaaaaaagggttgtgatgataccttactggctgaagacgatggggaaacgcgccaggggacctggttggtactccggaagcggggggcgggatccctggagccgaattacttgaggcgggcggacccatcagtg

SEQ ID NO: 62263 - DNA, 632 bp, Zea mays
  Clone ID: MRT4577_156783C.1
cgggccggccgggacatacaacctgcgtgcgggccggggcccaatcttccagcccaaagttccatcccattgctcgctctgtccctccgttcacaacctcctctacgaccgaacgagcagagcagacccttccccctcaccagctccgggttccagcggcggcggcggcgaagatgatcataccggtgcgctgcttcacctgcggcaaggtgattgggaacaagtgggacctctacctcgacctcctccaggccgactactcggaaggggatgctctggatgctttggaattgttccgctactgctgcaggcgaatgctcatgacccatgttgacctcattgagaagttgctcaactacaacacactggagaagactgagacaagttaagtgagcaagcatatcatgctctgaaagcactactgtttcgtagtatcatatatattgtaggcggtatgttgtttcttctctatcaggattcaggagaggattgttgtgagtgtgaacttgcttttgctctcgagcattcaaggactgacaagtgcatgttgcatctatgctacgatgttggagattttaatcgatataacggctaactaatactcccaaaaaaaaaaaaaaaaaagcggccta

SEQ ID NO: 62264 - DNA, 254 bp, Zea mays
  unsure (1)..(254): unsure at all n locations
  Clone ID: MRT4577_156784C.1
caagcgccgaagcgcccaccggggggaaaacccacgnccgccggaacgggccccgggaccgaagacaaaacacgagcgcgacaggaagcgccnccaagccgcagggaaangccagcnnaaaacgannggnnccggagccagcggcnngccccagaggcgcgagcaccnngnggccgnngagacccaaccggcgccacgcagcgagcgggaccccagccaaagacngagcnggcaggaggaccgggcgagagggc

SEQ ID NO: 62265 - DNA, 416 bp, Zea mays
  Clone ID: MRT4577_156785C.1
attcggctcgaggcgacatcagctcctagatgtacggcgcggggacgacaggaccatggacccggaagacgtacgcaaaagcctggagccaaccgaacctgtggaagaaaacaccggatccacaactgcggaggtccacttctacgacgactctgtgctcaggggtggcagtatcaagacccgcgaacacgggcgacttctttgatcctttgacgacaccatttgtcttgcgagtcccgcggagcacctacgaaagtgtggtacggatacacgtcggcaaccaggtgggatcgaacgtgattggctgcagcgggctgcacaacataagggcacatcctagaagtcagcgactccttagttgacgcggctgtcgtcggggaggaaatagaggtcgggggagagattagcgtgcccgt

SEQ ID NO: 62266 - DNA, 617 bp, Zea mays
  Clone ID: MRT4577_156786C.1
actcctaagggcgattgggttcctcgaggccggccgggagcggaaagtcccatcccattgctcgttctgtcccttcgttcacaacctcctccacgaccaaacgatccgggttccagcggcggcggcggcggcgaagatgatcataccggtgcgctgcttcacctgcggcaaggtgattgggaacaagtgggacctctacctcgacctcctccaggccgactactcggaaggggatgctctggatgctttggaattgttccgctactgctgcaggcgaatgctcatgacccatgttgacctcattgagaagttgctcaactacaacacactggagaagaccgagacaagttaagtgagcaagcatatcatgctctgaaagcactactgtttcgtagtatcatatatattgtaggcggtatgttgtttcttctctatcaggattcaggagaggattgttgtgagtgtgaacttgcttttgctctcgagcattcaaggactgacagtgcatgttgcatctatgccacgatgttggagattttaatcgatataataactgctaactaatactctctgtttctgtcctgaaaaaaaaaaaaaaaaaagcggaaggggcggcc

SEQ ID NO: 62267 - DNA, 1427 bp, Zea mays
  Clone ID: MRT4577_156787C.1
cgaccaacgaggccacgtccgttgcccccccaacgaggcaacgaccaaacccttccccctccctagctccgtgctccagcgggagtccgcggcggccggtcacgacgtctaccccaaccgcgccagcttcaccggccaccaccacgaccaacgaggcaacgaccaaacgtccccaaacccctctccccctgcccctagcctccggtgctccagtcggtgatgttccgcgcgcggcgggtgaatcagtgagttactctccagtcgcggctagctttcaccgtagcgggcaaaggttaattcgggaaacaaagtgggaatctattacactcgaccatcctccatggaccgactacatcagaaggggagatggctctggatgcctttggaatatgttccgctactgtctgcaggcggaatgctcatgacacatgttgatcctcattcgagaagttgtctcaactacaacatcccctagagaagacatagacaacttaagcaagcacatcatgctccagaaacagcaccggctaagatgattataccggtgcgctgcttcacctgcggcaaggtgattgggaacaagtgggacctctacctcgacctcctccaggccgactactcggaaggggatgctctggatgctctggaactgttccgctactgctgcaggcgaatgctcatgacccatgttgacctcattgagaagttgctcaactacaacacactggagaagaccgagacaagttaagtgagcaagcatatcatgctctgaaagcactactgtttcgtagtatcatatatattgtaggcggtatgttgtttcttctctatcaggagaggattgttgtgagtgtgaacttgcttttgctctcgagcattcaaggactgacaagggcatgttgcatctatgttacgatgttggagattttaatcgatataacggctaactaataaaaaaaaaaaaaaaaaaaaaaaaaaaaaaaaaaaaaaaaaaaaaaaaaaaaaaaaaaaaaaaaaaaaaaaaaaaaaaaaaaaaaaaaaaaaaaaaaaaaaaaaaaaaccaaaaaaaaagggggcgcccttttaaaaaaccaagatttaccacccggggctggaaaaataaaactttttttttggggaccccaaaattaaatacctgggccgggttttaaaaaacggggaattggaaaaaccctgggtttcccaaaaaaaacccctttggaaaaaacccccttttcccaaagggggaaaaaaaaaaaaaggccccccccgttgccctttccaaaaaattgccccccttaaagggaaaagggaccccccccttaaacggccataaaaccccgggggggggggggtttcccccaaaggtacccctttaatttccaaagcccaaaacccccccccttttggttttttccccttctttt

SEQ ID NO: 62268 - DNA, 719 bp, Zea mays
  Clone ID: MRT4577_156788C.1
ccggccgaccggccggagcaactaagccaatcggtgcaatacaagctgcgttagtagccgggccggatcttccagcccaaagttccatcccattgctcgctctgtccctccgttcacaacctcctccacgaccgaacgagcagagcagacccttccccctcaccagctccgggttccagcggcggcggcggcgaagatgatcataccggtgcgctgcttcacctgcggcaaggtgattgggaacaagtgggacctctacctcgacctcctccaggccgactactcggaaggggatgctctggatgctttggaattgttccgctactgctgcaggcgaatgctcatgacccatgttgacctcattgagaagttgctcaactacaacacactggagaagactgagacaagttaagtgagcaagcatatcatgctctgaaagcactactgtttcgcagtatcatatatattgtaggcggtatgttgtttcttctctatcaggagaggattgttgtgagtgtgaacttgcttttgctctcgagcattcaaggactgacaagggcatgttgcatctatgttacgatgttggagattttaatcgatataacggctaactaatactctctgtgtctctgtcccaatttataattcgtttgacctttttaaaaaaaaaaaaaaaaaaaaaaaacaaaaaaaaaaaaaagggcggcccggacgcgtgg

SEQ ID NO: 62269 - DNA, 1124 bp, Zea mays
  Clone ID: MRT4577_156789C.1
cattgggtacctcgaggccggccgggagccctatcggtacggattgaagccggtaaatacaacctgcgtaagtagccaggcccaatctcccagcccaaagtcccatcccattgctcgttctgtcccttcgttcacaacctcctccacgaccaaacgatccgggttccagcggcggcggcggcggcgaagatgatcataccggtgcgctgcttcacctgcggcaaggtgattgggaacaagtgggacctctacctcgacctcctccaggccgactactcggaaggggatgctctggatgctttggaattgttccgctactgctgcaggcgaatgctcatgacccatgttgacctcattgagaagttgctcaactacaacacactggagaagaccgagacaagttaagtgagcaagcatatcatgctctgaaagcactactgtttcgcagtatcatatatattgtaggcggaggaacaaaactgtgatcaaagaacaaagaatcaaagagaacgaccgacctatgtacagttgtacacacacacacaaaaatggcgcgcgatccccgcaactgggggatcgagcaggcggcggattcgttcggccgccggccggtcagccctcgaagctggacgagcggctccatctccccctgaggtactcctccaacgacacggcggcggcggcggcgaagatgatcataccggtgcgctgcttcacctgcggcaaggtaattgggaacaagtgggacctctacctcgacctcctccaggccgactactcggaaggggatgctctggatgctttggaattgttccgctactgctgcaggcggatgctcatgacccatgttgacctcattgagaaattgctcaactacaatacactggagaagactgagacaagttaagtgagcacatcatgctccaaaagcactactgtttcgtagtatcatagtgtgttgtatgttgtttcttatccatcaggagagagatgctttgagtgtgaacatgcttttgctcatgagcgtggacttttcatgtgaaattgcatgttgcatctatgccatgacgttggatattttaagtgatataactgtaactgaaacctaatgtatttgtgtggat

SEQ ID NO: 62270 - DNA, 1173 bp, Zea mays
  Clone ID: MRT4577_15678C.1
tagatcaaacaccatttcgattacctaacaccaatgcacatattttacgacatgaaactaataagatacaccatatgcacctgatacacttattccacaattaagaataccaccacaatatcacatatatgtctacctttacatcttgcgtaaatttgtatctaagaactaatcttcaacgcacgactcaatcaattacacaaaaattaagtccacaacacataaatataataaatttaagaatattaaacatccatgttcaccttatgaaacaagcatttcaacaaacacacctacgccatactaaccccttcacttattacgtgcgtagaacatgggtagtcatacccgacatatgcatcactcgatgtagcctttatgtaatccgcattttaaacctgagctttaccacatgatgcgactatatatctatccaatccaactaacggtaatagtaaatcagctcacaaatggatgaatcgacttaaactccacaggaatagcaataatcattggttcacctatttcaccaaacacctggcgtccatcacactagggctttctttactactccaatcccttggtgtttttttgctatcaacatctgaatttctctcccatcagcacccacatatacatccatctctcacataaaactgaatggcaccaccactactacaaaacctacaagacgatacctgcaaggcgtcgaggttgacccaagaagggaggacgcagcatggcgaagcaaataggaggcgatggccaccagacctgggggagcaggagcaaccacagcagggaggaaaatagatgagggtgtcggcataggacttgagggtgttggtgtcacagagctggagagggttagcgccaggacgagttcagccatgggagccgaggaggagcaccagggagatggctggcgagcagggaaaagtgagggggacaagccgcaagaggaagggagcttcctggccgagcactggggagcagcgaggacgagcagaggcgtggccaccatggcggggaggggcgagggagggacggccatggggaggggcgagcacctgggaggcagagagcggcatggctgggaatggaggaccgctggtgtgtgatggggaagggctaggcgatgggtcttcaggaaaataccaagggccccggccg

SEQ ID NO: 62271 - DNA, 2148 bp, Zea mays
  Clone ID: MRT4577_156790C.1
aattcggcacgagggggtagtatacgcacactccgggcggctcgtacgcctgaggtcgcccgctgcagtaggtccgcctttgggctctctggcacctcgaggccggccgggggagcctcgctgccggaaaagactcctcccctcctttctcctccgacctcccccttccccccctccgcggctccgccccgacccgtgacgcctcgcttcgcacccctctcgcatctccgccgcatctccgccgcgatcctcccgactagccgcggctgcctcccctccagcggccaggcagaggatggagggggcaggcaaggatggcaacccgttgaggaattatcggattggcaagactctcggaattggctcattcgggaaggtgaaaattgcggagcatatcagcactggacacaaggtggcaatcaagattctcaaccgccgtaaaatcagaggcatggagatggaagagaaagttaaaagagagattaagatattgaggttatttatgcatccacatattatccgcctctatgaggttatagacacaccggctgatatttatgttgttatggagtatgttaagtgtggggaattatttgattacattgttgagaaaggtaggctgcaggaggaagaggctcgccgtttcttccaacagattatatccggtgttgaatattgccatagaaacatggtggtgcatcgtgatctaaagccagaaaacctcctattggattcaaaatgcaatgttaagattgcagattttggcttaagtaatgttatgcgggatggtcattttctgaagacaagttgtggtagcccaaattatgctgctcctgaggtgatatctggtaaactatatgctggacctgaagttgatgtgtggagctgtggggttattctttatgctcttttatgtggtactctgccatttgatgacgagaacataccaaacctttttaagaaaataaagggtggaatatatacccttcccagccatttgtctggtgcagcaagggatttgattccaagaatgctagttgtcgatcctatgaagcggatcaccattcgtgaaattcgcgaacatgattggttcaaaattcttctcccgcgctatttgactgtgcctcctccagatagtgcgcaacaagtcaaaaaggttgatgaggaaactctccgtgaggttttaggtatgggatatgacaagaacctgttggtggaatcaatccaaaaaaggctgcaaaatgaggcaactgttgcatattacttactcttggacaataggctccgtacaaccagtggctatcttggagctgaatgtcaagaagctatggactcctcattctcaaacatcgcatcatatgaaacaccaagttcagcacgtgggaatagacagcaaatatttatggagtctccagttggcttgagaccacatcttccagctgagaggaaatgggctcttggtcttcagtctcgagcacatccaaaagaaataatgtctgaagtgctgaaagctctgcaagaattaaatgtttactggaaaaagataggtcactataacatgaagtgcagatggagtcctggctttcctgctcaaattcataacaatcataacttcagtgcagggtccattgaaactgatagcctgagtgagaggttaagtttaattaagtttgaaattcagctgtacaaaacaagagacgagaaatacctcctcgatttgcaaagagtcagtgggccacagctcctctttctggacttgtgcgcggcctttctaactcaactgagagttctttgatttctggtgtcagctttccatcagttgcattccttgcgtttcactagaggaatgtctaaatcgctcacaaagctgtaaatagtaatctccagtagattggattttctggagtatgtagatggtaggcatgagaagatgttatgcctggcggcgatcttctgaaccagactgtgtggagtaacttatctcctaattctttacggctggccagctgccggtgaattagatcagtgcttttgctggcataatgtctatctacattaataatttcagctattacaacggttaattaaatgctgtgctgcttacaggccaaaaaaaaaaaaaaaaaaagcggccgggggcccggtacc

SEQ ID NO: 62272 - DNA, 514 bp, Zea mays
  Clone ID: MRT4577_156791C.1
ccggccgggccgggatattccatcatagactcctgcctatctatctagcgagacagagagacgacaagctcagctagctagcatggaatgcagaagcatgaacgcagcatcgcagtgaagacgctcctcgcttctccagctgatgttagctccgatccacgatggcggacgccacatcctgcaggagaatacctccacccctgatgacctgaactaatcaccgagtgacgtttgagacatccggtagataggcatgcatctgtgccgaaacggcgtctacctaccgtgttctacccaactcatgggctggctacgcattggcctctatctgcgtgacgcggcatctgctctatcgctattagaacttggtcttgatgatcacacgaggacgctatgttcggagtgcagcttattgcatgctgctggcgcactaagaagtgtgggctaataaaccagttgatgttcaaggagaacacgaacaactgaggtgttgctgctatgcaggctcttgaac

SEQ ID NO: 62273 - DNA, 470 bp, Zea mays
  unsure (1)..(470): unsure at all n locations
  Clone ID: MRT4577_156794C.1
ccacaacgtcataccaagcgtggaggagcggctcatgttctctggtaagcagtatggagaaggacacacacttgctgactacaacataacataaggaaaggacgctgcttcttgttatactactaaaataacaatgcggggggggggggggaccctaactannaaacatattaccttttatgtggattcttatgacactatactcaaggttaaggaccagtatccaggacatgtgaggcattcctacaaacacaggagggatcatttttgatggtaagctattcagggatggtggcacgctgtgcctactacaacattcagaaggagagtatccttcagttggagttgcatatttagggcggtatgcagatatttgtgaagaatttgactggtaagaatattaaacttgaggtagagacttattataccatagtcaatgttaagttcatgattcatgacaaggagggaaa

SEQ ID NO: 62274 - DNA, 3137 bp, Zea mays
  Clone ID: MRT4577_156795C.1
gaggctggccgggacggcgcctaagagcctctcctctctccccggccgcccgctgccgctgcttgcgcctctctcgcccgcatcgccgcagggttcgcaaagatggcagtgccgctgctgacgcagaagatcgtgaagaagcgggtcaagcagttcaagaggccacacctcgaccgctacaagtgcctcaagccaagctggcgtaggcccaagggtatcgactcccgtgtcaggcggaagttcaagggatgcaccttgatgcccaacattggatacggctctgacaagaagacgaggcactaccttcccaacaagttcaagaagtttgtcgttcacaacgtctctgagctggagctgctgttgatgcacaacaggacatactgtgccgagattgcccacaacgtgtccacccggaagcgcaaggagatcgtcgaacgtgctgcgcaactggacatcgtggtcaccaacaagcttgccaggctccgcagccaggaggacgagtgaaatggccattatttccggttgtgatccgctggtgtgcaagatgttgctgagatccgagattcattctctgccatttttttatgcttatgttagacttttccaatggacaaaattctgttataagcggaagagtgatggcgaggaccatctagtttttgaccggacatcatgaagtatatgcagccttgtgcatgtaatggatctgatggtaatgaatctgtggctccgaagctacatgcatttttctgaggcgcaaaaaaaaaaaaaaaaaaaaaaaaaaaaaaaaaaagtgctctctcagaggtgggctggcttctcctccccctcttaccaagtcctcctcgggttagggttccttagggttttgtggaggggcgatggcggcggctgatgtggagtaccgttgcttcgtcggcgggcttgcctgggccaccagcaacgagtcgctggagaatgccttcgcctcctacggcgagatcctcgactccaaggtcatcaccgaccgggagacggggaggtcccgcggcttcggcttcgttaccttctcctccgagaactccatgctcgacgctatcgagaacatgaacggcaaggagctcgacggccgtaacatcaccgttaaccaggcccagtcccgtcgccccgcgggccttcttctcctcgtcacccccgcacgccccgtcgcttccggcgtcgggctacatcccgcgccgcgagtacggcctggtgcccatggtgatcgagcacacctcccgcggggagcgcgcctacgacatcttctcgcgccttctcaaggagcgcatcgtctgcatccatggccccatcaccgacgacacggcctccctcgtcgtcgcccagctgctcttcctcgagtccgagaaccccgccaagcccgttcacctctacattaactccccggggggcgtcgtcacggcgggcctcgccatctacgacacaatgcagtacatccgctcccccgtcaccacgctctgcatcggccaggccgcctccatggcgtcgctactcctcgccgcgggggcgagcggagagaggcgggcgctgccgaacgcgcgggtcatgatccaccagccctccggtggcgcgtcggggcaggcctcggacatcgccatccacgccaaggagatcctcaaggtgcgcgaccggctcaataagatctatgccaagcacacgggccaggccatcgaccgcatcgagcagtgtatggagagggacatgttcatggacccggaggaggcacatgaatgggggctcatcgacgaggtcatcgagcaccgccctgtctctcttgtgtctgatgctgttggcagtgatccgccaaacctcggtggaggcggaactgaggtgaataaagggacggacgagccatctccagcgtgatggcattgggcagtcacaaggtgcaatccttttttgtgttcctgtagctgtcttattggagttataaggtttaattcgtacatgagggtgaataacttaattttatgtctgctgggctaatccactagcaacactgttgttttgctactttattaattgatctgttgctgataatgagtgctctctggtatgagccctcatcagtggtgatatatgcattgttatagatttgttcgtctgaaatcaaacagtgctgtttaaaggataaaggccacagccttgaaaaattatgttgtattttgtctaaggctaattcagagtgtcatttctgtattcaacaaagattcgaattttctaattatcactgcatgttgtctggtatttttagaattttagcggtgttgtgaatttagcggtatatgatgttaatattttaagttagttgaacagttcatcggtattgtgaaatatctgaataagaggctttctcctacttgttttttttcatagcacttgatagctttctataatgagaagctgatttcatagagttttctaccgagacgggagaactgagtgcagcttgcattttatctctgctatatgggattgagtgttggcggactaagagacgacatatccaacaactaagtgtcgcagagatgcgtatgttgtgttggatatatgggcacacaagattggaccgagtcagaaacgatgacatacacgatcggctagtagtaacgccaattgaaaaaaacttattcaacaccggttgagatggtttgggcatgtccaccagagaccccagaggcaccgctgtatagagacatcataagacgggacaataatgtgaagagaggtagaggtcgaccaaatttgacatgagaggaggcaatcaaaagggacttgaaggaatggattatcccaatggagctgtgtttggatagaggtgcttggaaagaagctatccacgtgcctgaaccgtgattaggtctttttccttttagtgctctcaaaagctttttcccttctctttctttctctttttggtgacatgttgggtttcaactttagcctactctaacttgtttgggactaaaatgctatgttgatgttggaggaactggatactgaattttctgtgtcagaaactaagaagggaccttggcattattatttttaagatagattataaaccatatgtaacattacccaataacaataatcttttt

SEQ ID NO: 62275 - DNA, 256 bp, Zea mays
  Clone ID: MRT4577_156796C.1
attcggctcgagagctgctgctacttcttgtccgacctccgatcgacggtcgactcatgggcctccgtcttcgcccccatccgaccataagttgagaggacgaacattggctccaccatcttctgcgttgctctggccacctggaccaccacctttgactccggaggcgagcggatatttgggccagtgtggaatgagcttgagatgaacaaagacgatcggcatgttcgacgtgtatgaattcatgggatgaact

SEQ ID NO: 62276 - DNA, 186 bp, Zea mays
  Clone ID: MRT4577_156797C.1
ccacgacatgcgccgccaccgtctgcaccacgtgcaacacgaggtggaggaggaggctgccaccgtcccagagacgacagggagtatgggcatgaagcggtaccggttccacttccaccaccacgacgacgaggacgaggagaagaatatggctgcgagggaagcggtcctgcaagctgatgaaca

SEQ ID NO: 62277 - DNA, 567 bp, Zea mays
  Clone ID: MRT4577_156798C.1
cctcgaggccggccgggcttcaatcttcctaatattctctaatatatttattcaatctttgaagcttggaattaatcgttaaatcttcaagatcaaggacgcacctgttgggaagaatgtctccggtcgaaggtccaagttgatgaaatccatgttcagatgaattttcagtacaaggacatcaactaagaccgaaggaagacccttcttcaaatatcttcaggacatgtgaataagccgaaggtgaatggagtcgtagatacgaaagtcaaagcttcattgacaacaaacagaattttagagaagaatagattcaaggagcacctacgaagagaaacatgtgtggcacgcctatgtatttttatgacaatattgtactttatcaaatgtaaaagcaattatatctctctttggaggccatacatagaaccgcggccatctattgagatgtatgagagctaatgaacatatcaagagagttgaagctcatctttagtagttatagacacccaaatgctcaaagaaacattcggtgattagaataaaaaaaaaaaaaaaaaagcggcc

SEQ ID NO: 62278 - DNA, 339 bp, Zea mays
  Clone ID: MRT4577_156799C.1
ttttgtcttatagaaatggttatttttttttttttggaaggaaaacgtcaaaaacaagggaaaggcggggcgcaggccccaggctgggatctaaggacacacttgggatatttaataaggtttaaagagtgacgcgcacacactttcattgcccgtcaatcttggtttattccagacaagacacaacggcctttaaggtataatataaaaaaaagactcggcaaccataatggagcagcgaatcgatccacgatccattccaaggtaaaagggctggccgtgagccaatcttactcaggtccgcgcaatctggagaggagccacagctacggccattta

SEQ ID NO: 62279 - DNA, 265 bp, Zea mays
  Clone ID: MRT4577_15679C.1
cttgccccctcgagtctgattccgaggaataaagcttcagttcgatcctaaaaagttaggacccttaaataattttagtttaaaaatgaataggaataggatccgatcctaatccgattagatccttaaagtttgtagcgtaaaattgaaagctcattaccacccctatgtccatacatcttatcagtgcaagtttgtgatcatgtgatacattaagcaaaaaagtgtctgttaaaaaaaaaaaaaaaaaaaaaaaagaagaaaa

SEQ ID NO: 62280 - DNA, 353 bp, Zea mays
  Clone ID: MRT4577_1567C.1
attcggctcgagtagatacttcagctcctgatcatagtttttggcagtagtttttagagtttaaattccagaaataaacggacgcgagccagggcttgtcctgagccacgtccgagcgtgatcaccgcgcacgacgttcgaacatgacgcggtggagcgcgcgtttggcacccagacctccactcaaacttgttgcgctcatttcctacgagttatggcgcaagaagtggacatggtgggaggctcggacgtcctaacgatgcataacgactacaataaaataaaaacacaaaaaggaggccggcctcctgatttggtctgtccaaaaaaaaaaaatgcataaaaaacctaac

SEQ ID NO: 62281 - DNA, 535 bp, Zea mays
  unsure (1)..(535): unsure at all n locations
  Clone ID: MRT4577_156800C.1
aacccacggcaactcgaaaccaaattatagagacaagggggtctttaatacaggggccggactagcccccagggcaaaaatagcacatgccggggggggtcttatttcactttgggctgggccccaaaatgttcaggggctccacccccccttcatcatccacatgtactagcagctcggcttggaaacggagcaggacccagggttactataaagagggggaaggggagcaatatgctttaaaccctgcaacaccatgtcctgagaaaataatgcagcaaaaacaaagcaatatatggaatgggaaaccctggcaaaaaggggttgggttcgtctgaaacccagatctggggcagatgcattagccaggccagtccacccaaaggccaacgacctcgttttcattagccggtcaagctgtgagggcagtaggccaaaaccccctcctctttggncgggcatttggggcactggctcgccacccttgatgacctccacgggggggcctggacccgtccctttgttccccttgggc

SEQ ID NO: 62282 - DNA, 258 bp, Zea mays
  Clone ID: MRT4577_156801C.1
gggttggggtattatagacgcgggggtgtgcccagaaattcatggtctgtaaccttttggcttaccaattttccttatagagagccaaattagagctggccttaaaaatggacaaagctgtattctgtgtgaaatttatattcatttataattttacacaatatactatccggaaacttaaattgaaaatcttgtgagtgccaataaagggaactaatttaaattaattgtatgattcttaatgacttcattttaaat

SEQ ID NO: 62283 - DNA, 564 bp, Zea mays
  unsure (1)..(564): unsure at all n locations
  Clone ID: MRT4577_156802C.1
atattatatgatacaagnnttaatgcctttcccactttattnccaaacttcatgtccaatagnatagcagnactgagtgtggttccactcttttggccctattctagcaaggttctttaatttnnttatgggcctaaacnnttctgccctaaaagaagagaagctnntgttnccttcagaaagggatnnttagctgnnnagttggcatttcagaaggagnaagnaagnaaacagagnagcagnntgttctttttcaatggggtgagttgccttactaaggggataaactctactgtttggcgaaacctagctctggnagnatnngctgagnaactgacactaagnnagatagaaagggctgtctagnaagaaggnntttctttttgccctttgnatcatttnnttgcacggnntgaggctttgatatgnngttacttgactctcggcgnngttagtaagggcttctttttatgagaagaagccaagnagctcaagaactaagaaagctgtgctcttctaccaaagnngtgcgtattcactgcttatttcttggnannaggtgaa

SEQ ID NO: 62284 - DNA, 207 bp, Zea mays
  Clone ID: MRT4577_156803C.1
ttgtgtgcgtgggtcatggcggacacaactttatgggtaatgggaagctacgatgagttgaaaccatgcgcaggctcaacaaacggtggagtgatgtccttcttgatctcgatactcagcagtgctgtggaaggctgcaggagtctctggcttgtggataggtcagcctgcatgactgctccaaggagggagattgactcctgaagg

SEQ ID NO: 62285 - DNA, 947 bp, Zea mays
  Clone ID: MRT4577_156804C.1
ggccgctttttttttttttttttacaacggaaattctttattacagaatggttacaagttataacatttacaagttataacaagattacaatatatatcatcggagttgattacaaaagaaattgattcaaaaagattacaatttgaatgtataaaacatttataagttttaaaatacatgctagcttaagagacaatcctcgatagagaagctaaagatgggatatacttatataagaaggccgagcccaccggcacttagcaccatccacaacagaacaaacttataacctgggataacactaggttagtgttgttagatgacgtccacttggcgagcatctcacatcctagcgcttgatccgatcatgcaaatcttcaagtttattcatcagtatcccttgcgaagaaacacacgcttaacagcatctcgtggtcgactcagcttgacttccgcatcacgtgatcaactagcgcaccattgcgtgtcgttgtcgcaacattacaaggtccaatcagccatcaggagcaacgagtaatgaggtcggctggaacggcgacttggagcggcggccggcaccggagaagccgagtagggcgcggctaggatggaagccaagcgctggggctgggcagagcgtcgggaactccatggcgagggagctcggtcggccagagaaacgccgggatggggcagggaggagcgcggccgaccatggaggtgggcagctgcgcgctatggagatgggcacacggcacgcaggggagctctggccgtcgctggagctgcagaggagctcgtccggtagagaagcggcgcagggagcaggatacagggcgagcaagggaggaagcagacccgggcttgatagacgcggctgcgcgatacgcttgcgcagagatctaggcgacaaccgccatcccggccggcctcgaggtacccaatg

SEQ ID NO: 62286 - DNA, 934 bp, Zea mays
  Clone ID: MRT4577_156805C.1
gccggccgggccggggtgcagttgtgcccgactgcccgtctcggctctcaaaacaaaccccggctcgcctcgcggaatccacgagtccgccacgccagtgcgcctccaatttctccgcagtccgcagttccgcacccgtacctccccaaccccccagctcaccaccccgagatctcccccgaccggcctcgagatccctgcggccatgtcgtcgtcggcagccatggaagcaatcgacgagctcgtccagctctccgagtccatgcggcaggccgcctcgctccttgcggacgatgacccgtccgacgagaccgcctcgcgccgcccctccacctttctcaacgccgtcgcgctcggcaacgtcggagctggcaagtcggctgtgctgaacagcctcatcggccaccctgtgctgcccacgggggaaaacggcgcgacgcgggcgccgatagtcgtcgacctggcgagggatccagggctcagcagcaagtccatcgtcctacagatcgacagcaagtcccagcaggtgtcggcaagtgcactccggcattcactgcaggataggcttagcaaaggggcatccagtggatctgggagaagccgaagcgatgagatttaccttaagttgcggacaagtacagctcctccgttgaagttgattgatttacctggcatagaccaacgagttatggatgattcaacaatcagtgaatatgctgggcacaatgatgcactattgattgttgtgataccagcaatgcaagcggctgatgttgcatcttctcgagctcttagactagcaaaggacattgatccagatggaactagaacaataggtgtcttaagcaaaatcgatcaggcagctgcagatgcaaaaaccgtttcttgtgttcagtccattttgtccataagggtgccccacgagcagcagctg

SEQ ID NO: 62287 - DNA, 385 bp, Zea mays
  Clone ID: MRT4577_156806C.1
gggcgacccacccgtccgcgaaaaccctaaaccctcgctacccggcggcggctacatgctttttgtcggttcagcaccatgaggccaccggggagaggaggatcgtggttgggaggaggtggcatcgttcgatgcgcggcggccgtgggggcggcggcggcggtcgtgggtttggcggtggtagaggcacaagaggggtcaggggagggagaggatgcttgatcactacacgaactcgagacgaatgtggacctgtgggcttctgttgacttattactgtgtgcagctaggaccaatgcttggatgcacaagcactccggatgcttgattttaccttgcttagttgatacactgtgcaccaatgacctacatggcttagaatacg

SEQ ID NO: 62288 - DNA, 655 bp, Zea mays
  unsure (1)..(655): unsure at all n locations
  Clone ID: MRT4577_156807C.1
tttttctttggaaataaattctttattacaaaaggggggcaagttacaacatttacaagttatagcaagattacaatatatatcatcggagttggttacaaaaagaaagtgattcaaaagaattacaatttaaaatgtataaaatatttataggttttaaaatacatgctagcttaagtgacaatcctcaataaagaagctaaagatgggatatacttatataagaaggccgagcccaccggcacttagcagcatccacaactaaacaaaattataacctgcgataaacactatgttagngttgttaattgacatccacttggcgagcatctcacatcctagcgcttgatccgatcatgcaaatcttcaagttcattcatcagcatcccttgcgaagaaacacacgcttaacagcatctcgcggncgactcagcttgacttccgcatcacgtgatcaactagcgcaccatactaaaccaaataaaggaaacgacgacgattaaaactcaatcattccgtcgagcgctaggtgtgtgatgcgcgagagctttctttattcttctccacccaactgcctcaggtgtttctcctccacaaaaaaatcacacgcataagcacacatatacacacgattagcatttaattaatcggcgtc

SEQ ID NO: 62289 - DNA, 357 bp, Zea mays
  Clone ID: MRT4577_156808C.1
aaacaaaaacaggggggttttgcccccaagactggggcagagcacatcctttgtcctggcataaacgggggggggggggggggggtgcaaatcatacctgggggccccgccctaaaacaaggggtccacacagttaagcccggccctgatcactttgtttggtcccggggggggaggggggggacggtgcccctgaactgcacaggggggggggggggtctccccgcttagcagggcgtaggacctgctgggggggggggggccccctgggccggggggtggggttcttcaggaggggggctcgggggggggggcccccccccccccccctcttgttgtggcggggccccccccccc

SEQ ID NO: 62290 - DNA, 1035 bp, Zea mays
  Clone ID: MRT4577_156809C.1
ttttccaatctcgtagttgttaacacccgcgccatcaatgtcaattttgttgcccgaaaaaaaagttaatagtgctcaggcacgcctttctaaaccttggacctgtaaaacgggccgccccaatttttttctttcaagtttggcctcccactatttttgcctttcggccgcgcgtattttttttttttatttttttttttttggtgtttttttattttatttttttttttttttttcacatgttacaataagtttacattatacaattatcggagtgattacaaaagaaagtgattcaaaagaattacaatttaaaatgtataaaatatttataggttttaaaatacatgctagcttaagtgacaatcctcaataaagaagctaaagatgggatacacctatataagaaggccgagcccaccggcacttagcagcatccacaacagaacaaaattataacctgggataacactaggttagtgttgttagatgacgtccacttggcgagcatctcacatcctagcgcttgatccgatcaggcaaatcttcaagtttattcatcagtatcccttgcgaagaaacacacgcttaacagcatctcgtggtcgactcagcttgacttccgcatcacgtggtcaactagcgcacctgtagaaaatgaggaggacgccggccaaggggatgactgaagatcagggcgccagcagagatggggcttgctgcaggaagggggccaaggagaggcaaccatgggtgatggcaagggagctggactggtgtatgcacggctggagaaagagagcagggactgtgcagttcggcaaggtcgcagcctgggcgagctcgagcaggcagggagttgagggtaagttcgccatgggggaggagcgcgcgcaggggcgagctgaggaagatgaactggggcgaggggaacagggacggccagagaaggcatgcggccatgcgatggccgagtgaggatgagctgagcgctgagcgcgtgagttacagtaggtgcaccccggccggcctcga

SEQ ID NO: 62291 - DNA, 400 bp, Zea mays
  Clone ID: MRT4577_15680C.1
gggagatcgccacagcctgtcctgcccaccttctttatttgttgcagccacatctctcccaaacatctcctttttgaagggatccctcattgatacataaaggtcgcgccctggaagcatggcctcagtcctgccaaatcccctctccctgctgtcccgctctggaaggctcagccctgtgtcacgctcgtcatcagcccagtcagaatcatacctaagccggaccatcggaagcggccccagatcaggcttctgcaccctctcagcggaagtgcggccaccaggtcccaagctgacaccagaggccagcgtctcagtggtccgcgaggttgtcacctgtggccgcatcccaagagatcctggtcgcgcctctggcgtgacgacccggaccccatcagca

SEQ ID NO: 62292 - DNA, 182 bp, Zea mays
  Clone ID: MRT4577_156810C.1
cccacgcgtccgcctttctgttactgatggattggtgaatgcttactactgtatcgtatgttaatatctacgatgttcacgcctgatgcaacaaatcgccgtccttttcctgacgcgacaacctgcaggccccggtgctgatcaaataccccgcggtctgatccctgaccgcgtactcctac

SEQ ID NO: 62293 - DNA, 275 bp, Zea mays
  Clone ID: MRT4577_156811C.1
acgtctggctgcagagcactatagccctgctgttttcccttgccgccttgcgtattgtgtttacggggcacaatatagcaagagctgttgcctacagaggagcaactgccgtatatggcttcatctcgccgtggcttgacatgctcgtgtcagacatgctctccgtctgggccatcacactcagcattctcctctgtggctacagcttatacttccctatatcaatatacaatcctgccgttagtgcggctatagcagctggtggcggatggggc

SEQ ID NO: 62294 - DNA, 531 bp, Zea mays
  Clone ID: MRT4577_156812C.1
gaaaactaacaaagccccgtgggttttgttggcaaacaaaaaggacattttaaaaagcccatagccataaaccctttggaaaatcaacaggggcccggccccctatttttattttgttggcaaagcaaattgccttggaaagggccgaagagaccttggacccaaaaaatcaaaggcccaaatatttgggggttaaaaaaaaacccttccttatgcccgggggaaaagaattaaggcatttttgcccccccctatggccaaggggaataatccattggaaaataaaaggggcccctttattaacaaacaggccccaaaaccggggattggggcccctttaaatttttcccccccaaaaaccttcaatttttttattttggccccccaggttgggccccttgtaggaagggatcccccctgggttgaagtttggaacccaaagcggggggcccaaccaaaaagggccaggaaataattttccggcggggggggggagggtaccttcctgaccagaattgatttcgggggggt

SEQ ID NO: 62295 - DNA, 534 bp, Zea mays
  Clone ID: MRT4577_156813C.1
gagcgggcgcgcgggcaggggctgaaccagctagggccggagcgccgatggaagcacgctatcactgactaaacaagatggcgtctgatcagagccttggtacgaactatgagtatcgctactcacgctaattgaaccaactatctacacgtgacacgacgacttattgggcgaaacaactcttagcatacaatcagctagctaatggctactcatatgaacatcagactccttccattgaaccaatcggacgcacagaaccgcggtgattatttgcagtagcagacatctactaccagctagtcaagtagctgcagcaagccgtgctgacttgttgacacaataacagttgctgcctttctaccagcagtttgcggctaaccccgcagccctcttacaactacaacaattgttgccctttgtccaactagctttgacaaacccagcagactcctaccaacaacacattattggaggtgccctcttttagattgctgattagtcgcgccctaataataaagatttttggctgat

SEQ ID NO: 62296 - DNA, 479 bp, Zea mays
  Clone ID: MRT4577_156814C.1
gccggggctgtgcgctgggactgaccagatggccctctccagccgcgtcgcgcatcggcgggggaggacgagcgcccctaccatggtgactcgagccttctatctctgccggatggccgatgtgctgccaggctctcgactctgcaagtatcgatcggtgctccgcactgatatgtggggcttcctgctcggcatactcatggtcgccatcgtggccgtgtgtttatggtgatccttggtcacgctgacactgcgacagggccattgcgtgatgccgtcagccaggcggccatgatcggcgaggccttgcggccttgcgggggcattggccgaccccgccgcctcagtgatactcgtctgtctggcaagcccatattgtgcactggctgccccttcggcatgggggctcgaggttcgtagtcacaggcatgcccaagattgtcctgtattggaccgtgtgtgcccggcgcacatccaca

SEQ ID NO: 62297 - DNA, 350 bp, Zea mays
  Clone ID: MRT4577_156815C.1
agcggacgcgtgggtaatggtagagatagggtagattcagttgaaaatagcttcaatgctcgtgattgtgattcaaattgctctcatggacaaccttttttcaactttgatgattcacattcttatattcatccattcattcagaaaaagatatctcatcattgggacattactttcaatcagaataaggaagctctgaatcactatatacaagagtcatcatatccttcccttgagaaagtaccaactgattcctccgtagaagtagaaggtacagccgatacaactgcaacaggtcaagttttgaaagcaaggtctttaaaaattcttgagcattcacctgatgatga

SEQ ID NO: 62298 - DNA, 443 bp, Zea mays
  Clone ID: MRT4577_156816C.1
ggagaaaacaaaaagtaccttctttttgggggaactgaataaagcctttttacaacaggccccacgtgggaccttccgaagggagaacttggttttttgcccaatcccccccaggggaaaaccacacttcccggaacggaacgggaaaacccaaacaattggggggaaaaccgcacctccttatttaaaacaaaactaaaagggaaatcctgttggaaatccccttggcggaaaacccgggggggtcccccttcgtgtgagaggggggggggaaaaacagggggaagggaaacccggccggcccgttttggttttgggggcgagggccccttttcatggggacaacccgttttttgatcttggtaaacccccccccaaaccctttgaacccctcctgccccttggggtacgacccccaccccttggggtaaccctggccaagg

SEQ ID NO: 62299 - DNA, 321 bp, Zea mays
  Clone ID: MRT4577_156817C.1
agcccacgcgtccgagttcacccagctctgctccgcccgaggtacgtcgtctatcctcatctggttaacgtacctttcgtgcgctgcgagtcaaagttgcgttttttttccgccgctcgtgcgagtcgagctgaaagggaaaacgttagtcggtcactcaatcgatctgtaacttgtctgcatcaaagagggcaaacatgtccgtccgccacaccacccgcggtcgccgtcgcgcgtcagcggtcgtcggcgtcgctgtctggacgtgcacacagtgaatgaagttagtgtatgttttggatggttgcttgagagagatat

SEQ ID NO: 62300 - DNA, 315 bp, Zea mays
  Clone ID: MRT4577_156818C.1
ttttattttttagcaaccagacttcctctctaggtcatggtgatttatacgagtatcgatgaattcgagctcaagatatgctatcattattacatattcttaatttgctaatactttcattttgttatataaaattcattgacgaacactttaacccattaatccataagtttttcatgtttaccgactactataaacattattggttaccatctaacaatcaccttttggcccattacatttacaaagctgttttaatccaaccttacgaaagacggtcattcaacgacccctctgaaatctatcactcatttt

SEQ ID NO: 62301 - DNA, 489 bp, Zea mays
  Clone ID: MRT4577_156819C.1
gcatcttgctcagagtaaaatcgcattccaccctttggcaacatgtcttctgggccgttgttcatttgagatgcaccaatttcttcatgagatcctatattattcacgaaaacaagtgatttcaagttaggatgaacataagcatgttgtattataatagaatctgacagatagaatcactacttttgttaaaaaaaagacattatttggttgagaatcttaccttttccaattctcttgttgattctaggttatcttcaaaagttgatacgccctgccagctatgtgacccgccatcaggagcaatgaaacttacaggatcaatcacgtctccactcgtcatagcagtattgaatatgggatctaaatagaaaattattttattgttgttgtatcatgtgcgcctgccgccgctagtgaataaaaatttattgttgtgattggagaaattgtggcgggaatgacatcttgacatgttgtttggtgctt

SEQ ID NO: 62302 - DNA, 267 bp, Zea mays
  unsure (1)..(267): unsure at all n locations
  Clone ID: MRT4577_15681C.1
gtgggaacagagagagctcaagcgcaagacatacaattgggcatgttattaatacaaatactttaacagtctggtgccttgttgtacaagttttggataccggaaccttaagctactggcaagcgaccttaaaaatgtggaaataccgggcaaggtgtaaacactgctgaatgagaaattctgggtgagacgtaaaacactgttgatgctacacatcttgatacattntttacttattacgggcaccagacacgttgaatttgaaaa

SEQ ID NO: 62303 - DNA, 395 bp, Zea mays
  Clone ID: MRT4577_156820C.1
aacggcactgcctgctatacgacccggcgcgcgacggggcgagtttgctcatgatttggaacctgaacaagcgcggaggcgtggcgggtgtgttcaactgccagggagtcgggtggtgccgcgtgaccaatcggactctcgtgcacgacgcgtcctcgagcacgctgaccgggaccgtgcgtgccgaagacgcttacttcataacgagcgtcgctggtgacaggcggtgtgtgggacggacattcctgggtgtatgctcaccgcacgcgtgaacttatgcgactgccctgaagcgcatcgctgcctgtgacactatgtccgttccaatatgacgtgtcccatgtgtggccgatacatgctgttctgtcggagctgtcgatcgacaggttgagctg

SEQ ID NO: 62304 - DNA, 551 bp, Zea mays
  unsure (1)..(551): unsure at all n locations
  Clone ID: MRT4577_156821C.1
cggacgcgtgggcgccagacgaccagagctagctctcgccttctccaccagcaacgcaggccaccggtagctgccagaagctcacgtacagagccaagcgaagaagctagcaatggagcacgggtacccctgcaacggctgcggcggcaacaaggagaagaggccgccgctcaagagggggcagctcaaggtgcagatagtcaagactctgctgggcagcctcgcggtgcccgccggagccggcgcagccaacagggagcgcagcttcgggagatgagcaagcttctctgcttctgctacctgaccaagccacatccagatgtctggtgtgtggtgcttcacgcagggattgtgcagactcatgtgtgtcttcccctttgtttagtttggtagttcagtagttgtagggtccgagttttgcccctttgttctcccccttttccagcttacagctatgtcgtggagagcctgtatattgctctatcgtgatttggctggtaatttggcggctaatttatgnnnnnnnnnnnnaaaaaaaaaaaaaaaaaaaa

SEQ ID NO: 62305 - DNA, 293 bp, Zea mays
  Clone ID: MRT4577_156822C.1
gtgaaaggaccccttcggatcatatcatatcaagagttcgaggatgtttacaacgctggggaccaaaatcaagctgtcaatctgggggcagcgcggcaaaaatgggtcccaattcacttagcgggaccggagtcaatcacagggctactgctgttacatgaagatggcgtcaggatctatcatggtccctcgaccttagcgggaatggatacggtgcacaggcaattccctgtgcaaaggcattgctccttaaggagccgaagacatggtacacgacagcccgggggatgcac

SEQ ID NO: 62306 - DNA, 459 bp, Zea mays
  Clone ID: MRT4577_156823C.1
atctttttatttttttttttttttcattattattttattgttttatttttttattttgcaaaaaaatgaacggggcccataaaaaaaaaaaaccccttttacaaaatgacctcccttttgtttaaaaatagtccccaaatccctaaaaaaccaaaatgggccgtaaaaattggggtggaaaaaaaaggggaaaaaaaaattttttttaaaaacccaaaaaaggggttggtttggtttttaatggggcccaaaaacacgttattggggccccaaaaaactaaatgtcccaacccaatttggatctgcctttagaacttacgcttatgccatagttcaaaagggggaaaaaaacttccgatttgaacaaataaaaatacagggggcttaagtggtgaaaaaaatttttatccaaaaaagaaccaaaagtacattttccctctgaaaaaattggcccgggag

SEQ ID NO: 62307 - DNA, 1820 bp, Zea mays
  Clone ID: MRT4577_156824C.1
caggccggccgggccggggattccctctctaccggatcccccccctccctcctcagcttccattccctctcctccgttaattctccgctctccatttattcctttccagttccgccgctccattcccagctccccccaccaagggcaatccctctccgccatccaatacaatcacgcctgcgcacacgcaaccccagctcaagccccaagtccaaaccctaacccggcggcggaagatatggccgacacggggcgcgacgccttccctgacgaggcggagcccgcgttcaccctcgacgagtacatggaggacatcgaggccgtggagctggaggcggatttggtgctgggcggggacgagggcaaggagtgcacctacgccggcggatacctcaagcgccaggccgtcttctcctgcctcacctgcgtgccggatggagtcgccggggtctgtaccgcctgcagcctcgcctgccacgacgggcatgagattgttgaactttggacaaagcggaagtttcgttgtgattgtggcaactcaaagtttggtggtcacctttgcaaactctgccctgagaaagattctgagaattcagcaaatacttataaccataacttcaaaggttcctattgcacatgtgggcggccttatcctgacccagaagctaaggagcaagttgaaatgatacaatgctctatatgtgaggactggtttcatggggatcatattggtcttaactctattgaagagataccaagagatgaggaaggggagccactatatgaggaattgatatgccacaaatgctcatctgtctgccatttcttgaaattgtatccagatacaatttgggcttctggtaagccgaatctggcagtggaaactgatgcaagtgactcgaatgtgatgaaaaaaccttcagggcatgctgaccctgagaaacatgaaaatggtgctcttgttgataatacggttggcgagaagacccttggtgggaaaggattctacaaaagctattgcagttcctgaggaggccaatttgggtagcagttctggcaacaactgcaagttaggagtggatgtgaatacaatgccagctattacagataaaagtgagccttttttcatgtctaaaggttggagggagacactatgcaggtgtgaaacatgcttcaacttctatgcacaacgaggtattgcatatcttattgacaaggaggattctattgaggaatacgagaagattgccaagcagaagagggagatgaaactggagcagcagcaaggagctgagacaaattttctgaattcacttaatcatgttcagaagatagagatgataagtggcatcaatgacatgaagaatgagtttcagtcctttctggagtccttcgatgcatcaaaaccggtaacatctgatgatatacattcattcttcgagaatcttgctaagaagaagaaacagaggttatcttagcttttgtgaccgcatcggaccctacccgaggcaaccgttctgctggacagaggtcctagtttgttgggctagtaaatgtaatgttatcttaggtggtacttactaatcgggccagtaatgttgaattctagctggaacgcggtaatgtttgatgcaccgaagtcgcttgcagtaggttccgatggcccaagccaccaaaaacctgtttgctccatgaacctcaatcctgttaggtgataatataatatacattgtgttgccaccgtgcttttttcttaaaaaaaacagtaaaaaaaagagttccaaaaataaaaaaaaaaataaaaaaattatatataattt

SEQ ID NO: 62308 - DNA, 398 bp, Zea mays
  Clone ID: MRT4577_156825C.1
gaggagaaggctcctggtatcggaatcgcggttctgctcgaggccggcctggccgggaggccgtcccacgatgcgggacgtggtgatcatgcttggcgaagccaagccgcgccgcaagagcagcagcgccacggtggccgccaccgtcgtgaacaaggacaggccggtgttcacgacgtcgccggactccagttacctatagactgcggtacagaagacaacactggcattagcgggcttgtatgtaatcatgccatgtacagtttttaccatagttttgattcatactttggtaattcggcatgtttcagggggaaaggagcttaatgtaaccaatgtttatactttaacaaaactattaggatgcaaaaaaaaaaaaaaaaaaggcccctagggcc

SEQ ID NO: 62309 - DNA, 395 bp, Zea mays
  unsure (1)..(395): unsure at all n locations
  Clone ID: MRT4577_156826C.1
tgtaggttcttcagctctttaggaggttgtttgctctctcttctctcgtgctctgcgtaccgtttggcggttgcgctcgctgagaaggttggggctggtgatgagcctcganaccncgcatcggcgcggaacatgcgcctcgagggctgccgcgcggagttttgatagccttgctatcaagccgggtattagcactccgggcaatgctgcaagccaagcctatagcggcactcacagaggggaaaggtggccagctaataatgagcaagctcaacgggactacttgggcagtcatacatatgatacgggtgacatagaggggcttaccatactgagcggtcaagcttgcaaacagcaagaaatagacactgatttgagccaacaggatttcctaa

SEQ ID NO: 62310 - DNA, 1020 bp, Zea mays
  Clone ID: MRT4577_156827C.1
cctcgaggccggccgggaacgacttcctcgtcggcccctcagtcgacgtcgctgccgacgaccttagtgtgttttccctgaccatgggccatggcgcccctagcgacgacggccgggcacaacaattgaagtcgtcgtcgctaaccgtggtgacccacccctatcagctggggctcatcaattaaagacctcgaggccggccgggacaactcttggcatcagtagcaggagcacaaagtgcagaagcagagccagtcctaactgcttagccaggaaagaagcagagcgtgcttagccatgtactcatccagctgccatgtgatgtccgagaagccaaacggttccaaggcggtgacgctgctgctcaggctgtccacgctggttctgtcgctcatctcggcggtcgtcatggccaccgccaccagcgactgcaccatctacggccacggcggcgccgccaaggtcactatcatgttcaagaactaccggcccttcgttttcctggtagttttgaacatcgcggcggcggtgctggaggcagcagccatctacctacaggtcgtgaagggcgacgacggcgacgaggcgcccaagcttccccggatcatcctggttgtcctcgacgtcgtggtgctcgcgctggtcaacgcggcgacgggcgcggtggtcgcggcggtcatcgcctacggccccgagatcgacgcgtgcaccgtcgcaggtggtggccgattccgcgagcaggtgcgcaggtccgagctcctgtcgatcgccgcgagcatctccgctgtgtccgccgccgtcgctaaggacgtgccgctgcccttctccgtgtggcccctctcgtcggaatcaggcgactactactgatcttggttattatttgtcaggtgatgttgagtactgtgagtgtgaaggctttctgccagcgaaattccaatttatgtcaactgaatgccactacgataagctatccttcgaaaaaatttcagcacaaatcatatatttgatttccatctggct

SEQ ID NO: 62311 - DNA, 636 bp, Zea mays
  Clone ID: MRT4577_156828C.1
ctgagagtgtgaactaccgtatacccgcatcccgctctgctgcgccggcgtcagcacgccccgccgggcacgagggtgaggctgctgagcgtgacgtgcgagcagggagccaaggccggcgctgggctgcacgcgcgtctgacccgcgggcccatgctgcccttcggcggagcggtggccgtggagctgaccaccgctaaaggcgcgcttcacgcgtggagcgcctttcttgcttgcctgctgacacactcagatgatccgtggcatctcatgcctctttaacgggctaaattctggatgctgcagaatgcggtattgaccgcaccgctgccgatcctgttcgctggtgctcaccggcgcgtcacttctgctctacgtcttcgtcatcttgccgccggacctcctgccgatatggaagggacctcaggagtcgccgcaggcgatgccgcgcggcaggatctaagctcagcttctccatttgcatgtgctagaagcttgctttgtactgctagcgccgggcgatccgtcgcaatcgccatggatcatctctctatcttgatgtgacgctgttcataacttgctatgattgccattccgctattgtgtactctttggcatacatacaataattaaaat

SEQ ID NO: 62312 - DNA, 534 bp, Zea mays
  Clone ID: MRT4577_156829C.1
tgacggctcctaacaacggggcggctgcttctgctatagtgggagctgctggctttgaggtgcacactacagtaggagctgctggctttggaccctgaccaagacgtgcaagtgcaactattcaactgatataggtagaagggagagagacaaatggaggcagggataatggcaccgtcatgaacgcaatagcttactgcaggcggtggacgagtttactgaaccgtaatgctggacaatatataagaggactggagtacgtggttgagtggcggcttgacgtacagatgctgaagtgtagggattggtacaactatacattgttcattaattgttacacatatacgtaacttgtcgctatcaattttttgtttaatgatatgttagttcttaattaactaaagggcttgtacatgcatgtatacaatgcacctttctttttgaagaatgcatctggtgtataagtttgttgattgttgctcaacccttcttcgagcaaagtaaaataagcaatgtataactttgattacattc

SEQ ID NO: 62313 - DNA, 305 bp, Zea mays
  Clone ID: MRT4577_15682C.1
aaaaaaaaaaaaaagtttttttaaaacttccaaaaattgggcattttaaaagggcccattttgaaaaaaaaaaaaaccccccccccccaaaaaaattcttaaccaaggggggaaatacaaaggggcttaaacaatgttaccccccaaaaaaaaaccaccttccaaaatttttggggggcggggggggggggcccttttcatttttttacccacccgtccggggacccgggggttaccccgaaaatttcggcccggatcctggaggggtcccattttttcctattagggagcgtttaaaaacttgg

SEQ ID NO: 62314 - DNA, 358 bp, Zea mays
  unsure (1)..(358): unsure at all n locations
  Clone ID: MRT4577_156830C.1
accagtttgagtcgnttttaaaaaattttttttgcagatcctggcttaggggaagatgcttaacaaggttttctcttttctttagaatcttcagattcactcccagaatcacttttgttttaactttgagactgcacgggtggagaaaccttttttttggagaagcttaccannnncattnncctcctcattaacaaaatctctctctcgttgctgtgagggaggggctgttttacttagtactctttccccccactactgaagaatcctcatatcccttctgactctccacagaaccgcttagaagaagacgcaaaactcgacgaaccccgtttcacaacacgcttgagctacgttc

SEQ ID NO: 62315 - DNA, 259 bp, Zea mays
  unsure (1)..(259): unsure at all n locations
  Clone ID: MRT4577_156831C.1
tgcaagaactgttcccaacacacgccgccatcggggggggtttttttgaagggggggggcagcacannnnacaataacacccctcatgcttgccaatacacccaggctgcgctctcctcctcttaaaaaagaataagggctgtgcgcctccagactttctttgactccgtgctctcgggcctcttctgtcagtccgaccaggaccaggaccaaaaaataggttctgcaaccacaacgccggcgcttcccagctttacca

SEQ ID NO: 62316 - DNA, 1551 bp, Zea mays
  Clone ID: MRT4577_156832C.1
ggtggctgaaccggctcattggccgtacgaagaccgtctccgttgattggccatacccattcgtggagaaccacctgtttgttctaactctcactgctggattggaaggttaccatgtgaatgttgatggacggcatgtgacatcatttccataccgcactggatttgttcttgaggatgctactggcttatcattgaatggggacctggatgtgcaatcagtgttcgcggggactctgcccactacacatcctagcttttctccacagaaacatctagagttgttacccagttggcaggcccctccccttccagacgaaccagttgagattttcatcggtatcctgtcagcaggcaaccattttgctgagcgtatggctgcaagaaagacatggatgtctgctgctcagaagtcgtcgaatgttgtggcccgtttttttgttgccctgcatggcagaaatgaggttaatgtggagctgaaaaaagaggctgagttttttaccgacattcatattgtcccattcatggatagccccacgcgtccggttctcaagacaattgccatatgcgagtatggggtccatgttgtatctgctagatacataatgaagtgtgatgatgatacttttgttagacttgattcagtaatggctgaagtgaagaaaatccagaatggtgaaagtctctatatagggaacatgaattatcaccacaagccattacgtgatgggaaatgggctgttacttacgaggaatggccagaagaggattatcccatctatgcaaatggtcctggatatgttatatcctctgatattgcaggttccattctatcggaatttttaaagcataaattaaggcttttcaaaatggaggatgtgagcatgggcatgtgggtagagcggttcaacaacaccagacttgttaaatatgtccacagcatcaaattttgtcaatttggatgcatagatgattattacactgcacactaccaatcaccaaggcagatgttgtgtttgtgggacaaactgcaggctggaaaagcccaatgctgcaatatgagatagcaacattggaggtggtggtactggtaggcgtttctgtggtggtagtgcctatccttattcatgaaggagaacctagaagcccttgaaaataaattaaaccctcgagatgactaacaaattgccatttaacggatttttttggtatagctgaacaggcggtgtttcagctggaaatggaaacagggggaatgggcagcggcctgtaacgactttctgattgagcttgcggcgctcttctttctcgacgtatagaccgagttctgtgagcagtatggaacctgcttgggtcttgatttgtaaatgggacgggtagaaagcttagttaaataactgttactttttggcaccattggctgtggttgctgtcagtcaacccagctggtacacatgagcgatcttggtggacaagaattttgctgtgtaacttctcttaacatggtcataatttatgatttgatcagttggtggaaaaaaaaaaaaaaaa

SEQ ID NO: 62317 - DNA, 156 bp, Zea mays
  Clone ID: MRT4577_156833C.1
cccaagctttttttttttttttttttttgacagggagagatatacattataatgagagaaaagtcattattagacttgttttattcctaaacaatcagtcgtctgctatggcgtgcctacttccttgttgggtacctcggacgagacaaggctgtg

SEQ ID NO: 62318 - DNA, 2132 bp, Zea mays
  Clone ID: MRT4577_156834C.1
tccgtgaccaaagatcgagtagccaagaagaagagagatgaacgccgacttcggcgcgcccaaggagctcgcgggaggcctgcagcagcggcggagtacggtgacgcgaccacaaccatcgatcccacctgtgcccaagccgtcgcgcaggccttcccgcacacctttggccagccgctcgtcagcttcgtcgcgccggccgccggcgccggcgccgttgaggagcgccacccgatcagggtgggcgtggtgttctctgggaggcagtcgccgggagggcacaacgtcgtctggggcctccatgacgcacttaaagcctacaatcctcagagcttgctctacggattcgtcggtggcacggagggactgtttgcaaacaagacgttggagatcacagacgatgttcttgcttcctataagaaccaaggtggtttcgatttgctcggtaggagtatcgatcagatccgcactactaagcaagtgaatgctgcaatgacaacatgccacagtctgaacttggatgggttggtcatcattggaggtgtgacctccaattcagatgctgcacagcttgcggagacccttattcagaataactgtaagaccaaggttgttggtgtgccagtttcattgaatggtgacctcaagaaccagtttgttgaaacaacagttggatttgatacagtatgtaaggttaattcacagcttgtaagcaatgtttgtcttgatgcgatctcagctggaaagtactattattttgttcgtctgatgggacgaaaagcatctcatgttgcctttgaatgtgcacttcagtcacacccaaacatgctcatcttaggcgaggaggtagcattgtcaaaactcacactgatggaaattataagcaagatatgtgatggagtacaagcaagggcagaattagggaaatatcatggtgtgcttgttattcccgaaggacttatagaaagcattccagaaatgtatgctcttattcaggaaatcaatatccttcacaacagtaatgttcctgtggctgagatgtcatcacaactgtctccgtgggcagctgctctgttccagttcttgccacccttcatcaggagagagctgctgctccaccaagaatcagataactctgcgcagttgtcccaaattgacacggagcaactgctggcccatctagtagaaacagaaatgataaagagaacgaaagaaggaaggtacaagggaaggaagttcagttcagtatgtcatttctttggatatcaggctcgaggatctacaccatcaaatttcgactgtgactatgcttatgctcttggacgtatctccctgcatatgattgcagttggattgactggctacatggcaactgtggctaatctgaaagaccctgttgacaaatggagatgtgctgctgctcctttaactgcgatgatgagtgtgaagaggcatttacgtggccctggagcaatccctatagggaggccttccattcacccttctccaattgacctgaaagggaaggcttatgagttgctgcgagagaaggcttcaagcttcctccttgacgacttctacaggactccaggaggcattcagttcgaagggcctggttcagatgcaaagcccatcacgctgaccattgagaaccaggactacatgggtgacattgagatactgaaagagtaccttggcaaggttaggaccatggtgaagccagggtgctcccgggagatcctgaaggcggcgatcagttccatggtgtcggtgacggatgtgctgactgtgatgtcccaccccctcaacgccgagctgcccctctaccatttcaagtgagcgagggcatcagtctggttgttattcctagagtgtttttgaaacagcagaagattctgcttcatggctgccggtcttctttttttttaatttgggtgagaattaagcaatgggttgtactaataaacactgaaacagtacttgatactgaactgagtcgcgtgctagttgtattattggtggcagtattccagttttcaagaggtctctagaatatccaagattgataacactcatctttcagcctagcaatatagtagtagttctttctttaaaaaaaaaaaaaagcggcc

SEQ ID NO: 62319 - DNA, 221 bp, Zea mays
  Clone ID: MRT4577_156835C.1
caaccatttggtcatacatttccacggacaccgggtaattctcaaactagaggttttgttgaatcttggtttaaacagtttgattggttagagtacagtgtacagaaagatgcagcttattgcttttattgctttttatttaaacctccaagaaccaacaattgtaatgatcttggatgaggttagaaatgatgatggatttagagattgtaatgatcttg

SEQ ID NO: 62320 - DNA, 567 bp, Zea mays
  Clone ID: MRT4577_156836C.1
ttccacaaaattcaaattcctttgatgaagtaccaggacctgtcgctgcctagtaaaaaaaaaaaaaaaaaaaaaaaaaaaaaaaaaaaaaaaaaaaaaaaaaaaaaaaaaaaaaaaaaaaaaaaaaaaaaaaaaaaaaaaaaaaaaaaaaaaaaaaaaacctaataaaaaaaaaaaaaaaaaaaaaaaaaaaaaaaaaaaaaaaaaaaaggggggggcgccctccccctttaaaaaaaaaaaaaaaaaaatttttttttaagggggggggataattaaaaaccttagccaaaggttttaggggggggtctccctttttaaaaaataaaaaaattcttaaaaaaacgtgcaaagttgtagttcccctttggtgccggttaaaaaaagggggcgggcctttaaaaaaacaaaattttactgccccatccttggaaataaaaattttttttttgtggcacaaaaaaaaaaattcccggggcggttttaaaaaacaggagggcgggaaaaaaccctggtttcaaacaaattaaaaagccttgaaaaaaaaacccctttttcccggtgggg

SEQ ID NO: 62321 - DNA, 703 bp, Zea mays
  Clone ID: MRT4577_156837C.1
cgctgtgaatcagcagagctgcagtgagagcaagtgagaggatcagaggaggcatccgtgaccaaagatcgagtagccaagaagaagagagatgaacgccgacttcggcgcgcccaaggccttcccgcacacctttggccagccgctcgtcagcttcgtcgcgccggccgccggcgccggcgccgttgaggagcgccacccgatcagggtgggcgtggtgttctctgggaggcagtcgccgggagggcacaacgtcgtctggggcctccatgacgcacttaaagcctacaatcctcagagcttgctctacggattcgtcggtggcacggagggactgtttgcaaacaagacgttggagatcacagacgatgttcttgcttcctataagaaccaaggtggtttcgatttgctcggtaggagtatcgatcagatccgcactactaagcaagtgaatgctgcaatgacaacatgccacagtctgaacttggatgggttggtcatcattggaggtgtgacctccaattcagatgctgcacagcttgcggagacccttattcagaataactgtaagaccaaggttgttggtgtgccagtttcattgaatggtgacctcaagaaccagtttgtttgaacaacagttggatttgatacagtatgtaacggttattcacagcttgtagccatgtttgtcttgatgcgatct

SEQ ID NO: 62322 - DNA, 2504 bp, Zea mays
  Clone ID: MRT4577_156838C.1
ccgggaagtggaagtggactcgaggagcagtctcgctatcgactccgccatctcaactgccacggacaatcgaaaccaacagtgagagctagcctcgccaaaccgccggcgccgcagcatgcctgtacctctcggctctcgctcttatccccacccacctcgctttctcccctctacaagaaagcgaccaccgctgtgaatcagcagagctgcagtgagagcaagtgagaggatcagaggaggcatccgtgaccaaagatcgagtagccaagaagaagagagatgaacgccgacttcggcgcgcccaaggagctcgcgggaggcctgcagcagcggcgggccctctaccagccccgcctcccgccatgcctccagggaccgacggtaagggcggagtacggtgacgcgaccacaaccatagatcccacctgtgcccaagccgtcgcgcaggccttcccgcacacctttggccagccgctcgtcagcttcgtcgcgccggccgccggcgccggcgccgttgaggagcgccacccgatcagggtgggcgtggtgttctctgggaggcagtcgccgggagggcacaacgtcgtctggggcctccatgacgcacttaaagcctacaatcctcagagcttgctctacggattcgtcggtggcacggagggactgtttgcaaacaagacgttggagatcacagacgatgttcttgcttcctataagaaccaaggtggtttcgatttgctcggtaggagtatcgatcagatccgcactactaagcaagtgaatgctgcaatgacaacatgccacagtctgaacttggatgggttggtcatcattggaggtgtgacctccaattcagatgctgcacagcttgcggagacccttattcagaataactgtaagaccaaggttgttggtgtgccagtttcattgaatggtgacctcaagaaccagtttgttgaaacaacagttggatttgatacagtatgtaaggttaattcacagcttgtaagcaatgtttgtcttgatgcgatctcagctggaaagtactattattttgttcgtctgatgggacgaaaagcatctcatgttgcctttgaatgtgcacttcagtcacacccaaacatgctcatcttaggcgaggaggtagcattgtcaaaactcacactgatggaaattataagcaagatatgtgatggagtacaagcaagggcaaaattagggaaatatcatggtgtgcttgttattcccgaaggacttatagaaagcattccagaaatgtatgctcttattcaggaaatcaatatccttcacaacagtaatgttcctgtggctgagatgtcatcacaactgtctccgtgggcagctgctctgttccagttcttgccacccttcatcaggagagagctgctgctccaccaagaatcagataactctgcgcagctgtcccaaattgacacggagcaactgctggcccatctagtagaaacagaaatgataaagagaacgaaagaaggaaggtacaagggaaggaagttcagttcagtatgtcatttctttggatatcaggctcgaggatctacaccatcaaatttcgactgtgactatgcttatgctcttggacgtatctccctgcatatgattgcagttggattgactggctacatggcaactgtggctaatctgaaagaccctgttgagaaatggagatgtgctgctgctcctttaactgcgatgatgagtgtgaagaggcatttacgtggccctggagcaatccctatagggaggccttccattcacccttctccaattgacctgaaagggaaggcttatgagttgctgcgagagaaggcttcaagcttcctccttgacgacttctacaggactccaggaggcattcagttcgaagggcctggttcagatgcaaagcccatcacgctgaccattgagaaccaggactacatgggtgacattgagatactgaaagagtaccttggcaaggttaggaccatggtgaagccagggtgctcccgggagatcctgaaggcggcgatcagttccatggtgtcggtgacggatgtgctgactgtgatgtcccaccccctcaacgccgagctgcccctctaccatttcaagtgagcgagggcatcagtctggttgttattcctagagtgtttttgaaacagcagaagattctgcttcatggctgccggtcttctttttttttaatttgggtgagaattaagcaatgggttgtactaataaacactgaaacagtacttgatactgaactgagtcgcgtgctagttgtattataaaaaaaaaaaaaaaaaaaaaaaaaaaaaaaaaaaaaaaaaaaaaaaaaaaaagaaggggcggaattccagttttcaagaggtctctagaatatccgggattgcctagtaattggcacgcgccagcgcgtgttcttaattataaaaaagttacccaccattttatttgtaaaaaaaaaaaaaataact

SEQ ID NO: 62323 - DNA, 375 bp, Zea mays
  unsure (1)..(375): unsure at all n locations
  Clone ID: MRT4577_156839C.1
gctagctagcgctagaagtctagaagcagctagtagccacgccagttagtttccaattaagctagccatggcggcattgctcagcatgcttctcgtcggcgtagcgctggtgcagctagggatgcacccgagcgcggcgaccatggacgaggacatcgagctcatctggggcgcgagccacacctacttcttcatggacggcgaaaccgagtcgctggcgctgtccctggacgaccagcagggctcttgcttccggtccaaggccatgttcctctacggcaccatcagcatggagatcaagctcgtcgagggcaactccgccggcgtcgtcgccaccgcctacaccatctncgaaagcccgtggtcgtaccacga

SEQ ID NO: 62324 - DNA, 525 bp, Zea mays
  Clone ID: MRT4577_15683C.1
actcttttttttttttttttttttttttttttttcttttttttttttttttttttttttttttttttttttttgtttaaaccctggtccaaaaatgttttaaccttagggttggggggttaaacattcagaattttaaaaaaaggtaaaccggggacccgggaccccgaccaccaaaagggcaaaagccaaaacacggggggccggaacaaggggatccgagcccggggccaacccgggcgcaaggagggaaaaaggcggaagggggggaaaaaaggaaaagggggcacagttccaaacaacaaacaacccggaaccaaaaagggaaaaaccgggggccccgaaggacggaggaaaaaaaaaaaaaaggggaagggcccacggcccactgcccagtgggaaaaccggaaacgccaggggccttaaggaatagggcaacccccaaaaaaaggggggaggggaaaagggcgctgttccgcttcccggctcactgacccccggcgcttggaagttcggctgcggggag

SEQ ID NO: 62325 - DNA, 436 bp, Zea mays
  Clone ID: MRT4577_156840C.1
gaaggagaggctacaacagataagcggatgcatggctcacgatcgcacggagattgctgtagggtacaagagggggcacatactacaatggctaaacaggaggagaagacgaggtaagagatagggaaagcacgggacactgagatccaacctgcttgataaggaacggccgaagtgaactgctgctgcagatcttccagcagctctgctgcgaggacctcatgttctgcgctgtattctgccgctacatgaatgatggcgtgttcaacgagatcctgtggtacctcttgaactgcatgaggcgatgactgggctgcaatgccaaattcacggagtgatcttggaagaacctgtacatacagcacagatagacatgatatggttgaatatgtgaggaatactcctacagacatgaaggagtactatattcagatgc

SEQ ID NO: 62326 - DNA, 388 bp, Zea mays
  Clone ID: MRT4577_156841C.1
gcggacgcgtgggttgcggctgtatgggcctagtctgggcctctcgtggtcggatctctcgagctgcactgccttctgtcgtacttggctcgcgtcacctcataccggggccgactgtcacgcctgtccatccatggcggtgcagctgctagactgctctgctccttgcggacacctgctggtcggcctgaccgacttctgctgtcgcgaaccactccatggatgctccagcgagcccttgtctcatggcgacgcgccgttgagactcccagccgccccagctcggagtcctggtgtcgcgatcgcttccagccggacggaataaccagcgatgggagaacatactgatcgacacagatgatgctatgaacgaactgagatgacagac

SEQ ID NO: 62327 - DNA, 346 bp, Zea mays
  Clone ID: MRT4577_156842C.1
ccggattcccgccagccgcccaggtttagggttagcgctatctggtcgcactccaggccgccgcttctccccgtgcagtctcctccctcccccggccgtgctccaggccaccgccttctcccccatgcagccgcctcctcccgtgcaacctcctccctcccccttgctcagccgctcagctccgcctgtccgccccccgccagccccgcctccttgggcttgctattgctcgcttgttgtccggccgccctgtcccgcactcccgctgtccgcccgtcggcctgtcccactgtccggttgctggtgctcgcttggtgttgccctgctgccccgcctcccactgccc

SEQ ID NO: 62328 - DNA, 388 bp, Zea mays
  Clone ID: MRT4577_156843C.1
ggctatctatctagcgagagagagagaggaaagctagctagctagcatggattgcgggaacaagaaggcagcaagcggtgtgtcggcgctgctgattgtgcagctgctgttagctacgacgactgcgactgaccgtctactgcaggctgatacctgcaccgtgattggcctgcacatcatcgcgagggagtttggccatgcagtgagaggcatcctgtcgggtgaaacctgtgtcttcctaccatgctatacggcagccatggatcgccaatgcattggccaaatcttgatgatgtgatatctgaactagcgctatttgtaatctgtgatgggagaaacacaatgactgtactgtggtgttcaactcattgcatgtgcatcgtgatct

SEQ ID NO: 62329 - DNA, 272 bp, Zea mays
  Clone ID: MRT4577_156844C.1
gtgtgttgttttttcacttgtcccgttcctgggcgtagctgcggcctgggttgaatggggacccgcccacaaggggggggaaagaatcagctggagttcccgggggcaaaccccgcggcgcggggggggggagccaacccccccccccggcgaagaacgcactgaccgcaaaacagtcgggaaacccgcccggccagctgaaaaaaagaaaaccccaacgccccgggagaggcagaaaaccgaccaagccccagggagggggggatcgggaa

SEQ ID NO: 62330 - DNA, 650 bp, Zea mays
  Clone ID: MRT4577_156845C.1
cattgggtacctcgaggccggccgggagtccctctcccgacgccgttcctgattcttccatcttccgttgcgtcgaaccgtcgtcggagataggccgagggtccctgttgtcgccctccgctgcgtctccactgcatcgagagatacctcctcatctctcttcctcgggactgcgccggagcctgctcagctgctgtctccgggattgcattctctgaatccgccgccacgtgcacatactcctaggaatagactctttcttcagggcatcccgcgaaggatcacgctatgggacggtctacagagtgattggaggaagcacttgctctgatgagaacatattgatcagtgatatgatccatcacctaggctcatgtgggttgacattggatgatgtgaagatcgtgtactatcataggtagtactgctcacatgtgactgtgtggtgaggtttgtcttcgaagggaatgattaccaccgcagtgtaggttcatctcctacataatctgctgcacaggattgatgacgataagacgagaaacatgtaatctcttacagaccttcgatgctagaatcgtattactgcaaggagtgccacgaaatgacctcggaatgacatagagcagactttgtggtggtacgaactttga

SEQ ID NO: 62331 - DNA, 145 bp, Zea mays
  Clone ID: MRT4577_156846C.1
tttttggggctggccagggtaagtttttttgctttggaaaagttttcttacgcaggaccaaaattttagttttagacagggcaacagaatccatggactttgcaacagatgcaatcctgcaaaaggtaataaggcagaagtttta

SEQ ID NO: 62332 - DNA, 1503 bp, Zea mays
  Clone ID: MRT4577_156847C.1
gggacctcgccgctctggggtcgaggggggccgggccggggccagcgcgaatccgccgtcctggttgggacggccgcaccgcaccctacctctcgtcgtcttgccgccgatcctttttccgaaacctagctcgcccgcccgacctccgaccttctagaaccttgcctccgaggtgccgccctccccgccccgcctgcgccgcttgctcatcgcttctctccccgcggcggcctcccagatccggttggatcgaggggcaaggtcaagagatggggcaggccttccgaaagctgtttgatgccttcttcggcaacaaggagatgcgggtggtgatgcttgggttggatgcagctgggaaaaccaccatactctataagcttcacattggtgaagttctctccactgtccctaccataggtttcaatgttgagaaggttcagtacaagaatgtagtgttcaccgtgtgggatgttggtggccaggagaagctcaggcccctgtggaggcactacttcaacaacactgatgctctgatttacgtggttgattcactggatagagagagaatcgggagagccagggcggagtttcaggctataatcaatgacccttttatgcttaacagtgtgttattggtgtttgctaacaagcaagacatgaggggagcaatgactccgatggaagtgtgtgagggccttgggctgtatgacctgacgaaccgcatctggcacatccagggcacctgtgctctaaaaggcgatggcctgtatgaagggttggactggctagcgactactctggacgaaatgcgtgcctctggacggttaacctcagcatcatcatcggcatcctgaatcacgtgtaacaggagggacaaacgatttgatcctcgtgatacgcccattgaaggatcatcttgtgattcaggctttgcgcgctttgttttcttttgtgtttccccaattgctgttggctatacatgtgtgctatgaactgggtggtgcatctggcaaggctaggtagtcagagttacagacgccggttccgtggtgacgatgtcagtacggtggtggtgtcgtactcgtctgctagtcggaagcaggcatcatcatccatctcgtcgcttgtgtgtgggagtgactgtaaatactaccactgatgacatggctctcgtggtttcttcgtctgaaactaaagaaacggaatcacataaaaaaaaaaaaaaaaaagcgcgcctagagtcctgactcctgagtggtgacataaccatgcactagttgaactgcaagtctgcaagagacctagtactcgtatgctctgtgtagtgaaacgcaagtgatttgactggagactgaacgctgaaatgcaagtgatttcggtggaggctacggtttgcttgcttgtaagcgggcatgcgcggcggcccttttcctgccgctttggttttgcggccgtttggtatctgtcgagattttgtaaagaaacccaataagataacatgat

SEQ ID NO: 62333 - DNA, 180 bp, Zea mays
  Clone ID: MRT4577_156848C.1
gcagatcaggggcccaaaacctctcagttttatatgacaaccactttgggaaatatgattgacactacaagtccaaaacttttcaacaaaaaacaaggatcctttggcaacagtttagcaggcgaacatgtctgaagctgtttgaattaggccaaaaataccaaaaaatatcacttataa

SEQ ID NO: 62334 - DNA, 678 bp, Zea mays
  Clone ID: MRT4577_156849C.1
ttgggaccctcgaggccgggccgggacagaaaaatcaaatctttctcgcagttcacacacgggtcacggccgggacaaccatggcggcggctgactccactaagctctccctcgccttcgtcctcctcctctccgcgctcgtcgtgctcggcgaggtcggaggaagcatggcagccgactgctcgacgctccggtgcatccagggcggctacatcacctgcgacaactacccggggaagcagctggacgggtgcgactgcgtctgcgcgcccgacaacggccggaactgcgttctccacctccagtccggctccacctacaactgcagccgcagcaacaagggatagctagctagtcgatctcgaccagtcttcgacaataataatgcttcaagctgtacgctgtcgaatagtaacagttgtgctgaaacgaccgggtgatgcgcaaataatttgcaataaaactatttctctgttgtgttttaaagacactttagccttaactactcttctataaatagattccatggttccgcaaaatgctaattgctgaaatgaagactgtagacaattaataagcaaaaatgtaggcgcaaacttcggaaagtcaggcaagcacatctacttcatactagaagcatcaagtccttctacaaaaaaaaaaaaaaaaaaagcggcc

SEQ ID NO: 62335 - DNA, 303 bp, Zea mays
  unsure (1)..(303): unsure at all n locations
  Clone ID: MRT4577_15684C.1
aggctggcgagnagcacctccacgacctttgctttaccccccacgggggcgaaacaacggcgcggcgaaaaaaacccccgcgcagagccccacccgcccccgggcaacgacccgcgcgccacccaccggcagggccgaagcagaacgggcgacgacggcccgcaagagacggggggccaaggcaaggggaccaacccggccgggaccaagagggcggccacacccaccccagccgagccacccaccaaaaaaagagaaaaaaacacaaaacaaacaaaaaaaaaaacaacaaacaaagggcgg

SEQ ID NO: 62336 - DNA, 727 bp, Zea mays
  Clone ID: MRT4577_156850C.1
ctcagctaccgcgaccacgacgccgacgcgagagggcagggaacacagccactcgccgacgagaccccggcgcgcgcgagagaaagagaagagaggaggatcttttgttcgtgaaaaatattggaggcggagggaaggtgaaggagggggatcggagatgaacgtgttccggctggcgggggacatgacccacctcctcagcgtggtagtgctgctcctcaagatccataccatcaagtcctgcgcagataacattgctcctgagaagacccatcaaggaggaatatgttgacttgttgaggttgtcctggaatcagcagtgccatctaaaacgccgccaaatctcaccgggaggcataacgaacagcaaaatatagaggaaaacagataaaagagataatagatgtatttttaatcgattagatgttaggtaccttaatcagctgtattcctctggtacttagtaaccaggttcccggatcgatggcatcgagaaacgggaacatggtacatggtacgctactaaaactaagttttaacactacgggaacgagcttgttcccacgttcccggaaagaggaacgtgccaagttcccagttccctgttactaagctctggtatatatagagaggggtcgtcttatcctagtaaaaaaacaattctaaaacatgttttatatgttttcaatgtcaaaaaccaatatagaagttaatcgattcagaatct

SEQ ID NO: 62337 - DNA, 536 bp, Zea mays
  Clone ID: MRT4577_156851C.1
ctttcttcacactcgactagactagatagctactgccgaaaataaatcgcctcttcttcttgctctcgtctgcctcgtctccgtgccaatggagctgagcgccgtcacctgtagcactgccgctgctccagttgcagtctgggcgccatttgggcgtccaagggagtaaacgactaagtgaagaagcctcacagacaggcgaggcggccggccgtcgagcagctctagttgagccctctcgcaccactacatacgctgttgcatgctttgctgatagctgtgcgcgcggagaatggagatgcatggaggaggcagaagtgctgggtgagagagcgtacgtggggaattgaggagtcatggaccaagatatatacatgtctctcttgctaggtaccttagatgtattcttacattattcttagttctgttgttagtacgtacttcctccgaccatcctggaatattgcgttttatttcattgctagctctcgtgattctggatcatatttcctgcctattgtccccctctggtatta

SEQ ID NO: 62338 - DNA, 739 bp, Zea mays
  unsure (1)..(739): unsure at all n locations
  Clone ID: MRT4577_156852C.1
ccggccgggaccttcgttgcccggacgacctccgtccaccggaagcgagcgcgcgtcgctccggtcattccttctccattcgccctatgcagttgaagaaggacatcttgcgcacccgctccgccgcgtgtgcctcgtcgaactggtccgcgccgaagctctccagagccggcttgtggccgccggtgccggcggacaccaggtagatgccggtgaagaagagcgcctcgtgcaggcgcggcgttcctgccgctctccttccttgcactattttctactctctcatcggggggatgcttatttggtgaactccccgaaatctgatggagcgagcaggtgcgtgccaactgccaacagcagcgtgaccgagggcaggggcagggagacagaaaccgacttatatctttctttactggaaaagagtttgtcgcgttttgttagaattcacgacaatgcgatttctgttatagtagacgtgcttaatgaaactagttcgtccctttgatcaaatattcaaattagtttgctaaagtttggccatgttctgactttgatcacgaacagattttgngtttggtttcacgctagattgcaaaccaatcatgcactgaacctttaggcttatagttgggcctgatccggcgggttttggcccatataactcgcgatgagccaatgaccgtcacttcgactctcccactcctctgtcgcttccgccgacacctgaatcttggcgctg

SEQ ID NO: 62339 - DNA, 332 bp, Zea mays
  Clone ID: MRT4577_156853C.1
agggttgggggtttttttgggggaacaaaaaaacacttttaatttggaatatataactggttattccaaatgaaaaattgtttcggatgaatgctttatcgcgcttaggtcaattcccttgaattacatgacaggtttgcgactacttttttcaccactgttgggcaagggagggagtttgaatacttatgtttgaacacatttgtgtggcctggaacatacaaattcatgaggtgctgttggctcaccagtacactggtttgtatttgctagggcccatctactgttttatttttgcctatgcaagcggacccgggggttgaccccggaat

SEQ ID NO: 62340 - DNA, 326 bp, Zea mays
  Clone ID: MRT4577_156854C.1
gggcgctgttgaacccccattccgccatacgaacggttcactggtgaaaaacagtaagggctttgccaatgtttccccaaaaaaaacaactcccgttttagatccccgggggagccactgatgaatctgggaaggggcaccggttattaccagcctcgaaattggaaaaaggccttttttattacaggcctggaaattttccctccctccctccaacaaatggcaagcttccttgcgttcccttgttctttattattacaggctccttggcataagactggcctctaagtacaactttcctttggcgtcaactcctacaataaaaa

SEQ ID NO: 62341 - DNA, 939 bp, Zea mays
  Clone ID: MRT4577_156855C.1
agcagatccagaaatcattaaattacagcttgaatttctttgatatgaaaaaattcacctcgaatacaaatgtccacaggatacaggaagctccttacaatactactaacctcatttctgtacatgatccccagacctcagtttttttttccatcacaactgttctgggagataggtgcatccacatcctggactggctggatccatcctccaggaaatcctgctatgtgttgaagaccgaattttttgtaaactactactactactaccgtttggcactgcagacccttttgttatttgtggtcacggatgaaagttgagatccctggagcaaggtctcatgtggagatcccccttattcatcagttattctgtgaactcatgcatggcagaacgccatgctgattttgtgacatgaacataatggttacggacgaaataagcactatggtatggttgacgcaagagctacagtcgctttatgtgactttgcctgtttgtctgaacttgcattgttgtcgttgatttcggcctgtttatcgaggcagtcttgttactttttgacagaccctaatgtttttggtttgtttgttgacagattccaaaaactagattaccgaaacaatatgagtggatgaatatgcaggagagtcagagcttctactatggcttctgctaaggctggagcttttacgtacaggggagccactacttatattgaagataggggtaaaaatgtattatgaaatgaggacttgttgcaggagcaatagaagctcgagccattcgtgcaggtgcctccaatctgcagcaggctgtggaatcaaggtgagataattttcagctttatttgtaatagtcttgctcagattcggtagttcatatgcttcgttcctctatgagttgtctttatgataaatataaaagagcagccttttc

SEQ ID NO: 62342 - DNA, 445 bp, Zea mays
  Clone ID: MRT4577_156856C.1
aaaacaattgaaccggccgacaatacattatatattgggggggacatatatatatatatggtcaggggagtaaaaactaattcgacaaaaaaagggggggcacagatcaaaatccagatcaacccacattagctttatagggcaactgatttcggggaattaaattttcaaagggcggccccgccgggctggcacacactaactcacatgcgattatgcgaaggatcggagctaataatcaaactgcgcgttgggggggaatgtcatgccgagggcccaccaccccggcacaaagtttttgatgtacaacgtctggcccgcgggggaggggaccgggaaagaaaacccctgggtgaacaacccccaattttttttccactgcgcgccccaattgggcgttatggggatccaaccggggcttgtcccctttacccacatggactgg

SEQ ID NO: 62343 - DNA, 185 bp, Zea mays
  Clone ID: MRT4577_156857C.1
gcgctcagtcgatatccttgcaggtggcgggtgtacatgttatctatgttggggatggtggcctggcgatgaagtatgatgactttcggtgaaaccgggatgctatgaacactttattgttgttagggaacatggtgtgtggggcaacaggtataagaccttattgaggccacgggggggcgtta

SEQ ID NO: 62344 - DNA, 664 bp, Zea mays
  Clone ID: MRT4577_156858C.1
tgtttgtctaccgtatttgcgtgtgcgtctcttgtttgcctgcgattgaaagccttctctgacctgtctccaaattggcattcctgagcaaaaatcccctgcaacccgacccatggccatgggcaagctcgaggagaggacgcgtgcgttctggacgaaccgatggcttgtgttcgttggggccatgtggatgcagtccatggccggcaccacttacatcttcggcgccatctcgccggtggtcaaggccaggctgggctacgaccagccgcaggtggccgcgctgggtgtcgccaagaacgttggcggctgcctcggcctcctcgccggcgcgctctcggcgacgtggccgccgtgggcgctgctggccatcggcgccgcgcagaacttcctcggctacggctggctctggctcgtcgtctccgggaacgcgccggcgctgcccctctggctgatgtgtgttgttatctttattggaacaaatggccagacgtatttcatcacggcttcacttgttacaagcatccagaatttcccaaagagcaggggcccaacagtgggcatcctcaaaggatttatgggcctaactagcgccattctgacacaagtttatacagtgatgcacactccagaccatgctgcgcttatcctcatggttgctgtt

SEQ ID NO: 62345 - DNA, 1554 bp, Zea mays
  Clone ID: MRT4577_156859C.1
ctcgaggcggcgggaactgtgtgaatcaaagactggtgggtctcggtgcagtcatctgaacctttgacgacatacgtgttatctgagcttggccgggggcacgcccccgaaatctccggcccatgaatttcgtcacgcgagactctagtcccccgcacgggtgacagactgacaggtccgtccgcaaatctgcaacgttgcctcgtcacctctatcctccggtctctcaccgcctaacacggacgccatggccgccgcctctacctcccttccccttgggttgtctcaccaccgcccaaccgaatccggccaggcccacctaccactgaagcgcaaaaccccttccctaaccctccccaacccctacgttctactcccatctgtcggcgtacaaagcattcgccgggctctatctccctgctgctgctccttctactcccttctcctcgccggcacacccagcgccgatgacctggactctgcgacactcccactcccactcgcggtcgcggtagccggcggcggcggcggaggaaagcaggcaggccatggcgtcgtcgtcgtcgtcgaccccggcggccgtccgcgagatgcagaaggatctcgaggtccaggccaacgccctcagcaagatccagaaagacatcgccaagaaccaccaggtccgcaagcagtacaccatccaggtcggcgagaacgagccgggcccgggaaacccgcatctacgttctactcccactcgcggtcgcggtagccggcggcggcggaggaggaaagcaggcaggccatggcgtcgtcgtcgtcgtcgaccccggcggccgtccgcgagatgcagaaggatctcgaggtccaggccaacgccctcagcaagatccagaaagacatcgccaagaaccaccaggtccgcaagcagtacaccatccaggtcggcgagaacgagctcgtcctcaaggagctggagctgctcagcgatggggccaacgtgtacaagctcatcggaccggtgctggtcaagcaggacctcgcggaggccaaggccaacgtcaagaagcgcatcgagtacatctccgcagagctgaagcggatggatcgggcgctcaaagacttggaggaaaagcaaaacagcaagaaggaatcgatattcaagttgcagcagaggatgcaggctgtacaagctaaggcttagacaactgtttgttggttgcaactagtccaaggccatgcttcatttcatcccaattccctccaggttttttttttggtggggaggaatcaggtgtctgatgttctcgtctccacaacgaaaaagaaagaaaaacggttcctagtgaaatactaggctattctgtatgccctagtataaaagtgtgcctctagtagaactgtagaagatgtagttatcagtatctcttttgtattattggcccatgtttacttctcaatcgaatatttatgcgagggatgtttgtcaacgccttaggcttcatcttgaatttatgactttcattgcttgagtgggcccatgccaaaaaaaaaaaaaaaaagcggccccta

SEQ ID NO: 62346 - DNA, 233 bp, Zea mays
  Clone ID: MRT4577_15685C.1
cggacgagccaggcgcttctaggtagctttttttttcaaccagacctaacagggaggggatgatacttacattgttcttttactgcaaatactgaactagccactgtaagccaatggcggcagccttacatgcaccggaatgacagtcctaacgctctctgcctttggctctggtataaccaaaacagggtcattgcaaaccttgctggtccccccacttaggactcacattt

SEQ ID NO: 62347 - DNA, 506 bp, Zea mays
  unsure (1)..(506): unsure at all n locations
  Clone ID: MRT4577_156860C.1
ggtggtggggttttttttttttttttttttttttttttttttttttttttttttttttttttttttttttttttagaaacacccgcccggaaaccatgcctgggtgctgcaaaactgcatagcttaacatgcttatatttgggggcgggcggggggggggggagactctccctttcagccactttggttggttacaaacttggggcccctttggggggtgcctgaaaaggggacagcccaacttaatgctttttgcgagaaaaggggttggcgttcggattccttttcccgcttaacattgcccgggccttgccaactggggggttcagtgacccctttttatcaccactgggcgagaatatgtccccaacgcccaaaaaattatcccccttgctggacttcnncaaatnaggaggaaaaaccctctgaggaagctggtccccacctaaaaagggggtcttagttatggcattttttccaccttggggccttgggagcgaaaattt

SEQ ID NO: 62348 - DNA, 303 bp, Zea mays
  Clone ID: MRT4577_156861C.1
aatgagttctgatccgctgagcgaactccagttgtgccttcaacagatatcgacgctgatgtatacctcagttggtgtgctgcagagggacgccccaactcaaggccacaagcccgaattcctccaaatgcaacgccaactagccctcgacttggccacggccgtccgtaaatttaataaaatcgtccaggaggacctgccaacgcatttcaaaggatatgatccggagggtggtgggtggccagcgtgaacgaaatcaagagatagtgggcagaggctagggagtgcagctggatgatagag

SEQ ID NO: 62349 - DNA, 161 bp, Zea mays
  Clone ID: MRT4577_156862C.1
ccccttaggcaccataaacttgacggggagtcttaaacatcgcttgcacttgcaccagacaccggaaccacaaccaacttgatagaactcgacacacccgcccttaattcgaacagaaggaaacgaccaaacacgatcgagacacacacacacacacacac

SEQ ID NO: 62350 - DNA, 236 bp, Zea mays
  unsure (1)..(236): unsure at all n locations
  Clone ID: MRT4577_156863C.1
aacgattcaagccgcgccgcaggncgaagctggattgatagatagggggcggccccccgacccaccccaaaactacatgacaagggcaccaccacgacggaaggccaaagaaacaccacgcgggagcacccagacaccaaaacgacaaggcccaaaggagagagaccacagtgcgaaccgggagacaaagtggacacgaaaaagaacacgaacagccgccgcaaaaacggaccggc

SEQ ID NO: 62351 - DNA, 224 bp, Zea mays
  Clone ID: MRT4577_156864C.1
ttttaaagggttcaagcttaactacctcatttttccaacttattagcttttttaaattgtccctaaatttaaataaattgcccgtattttaaaaacgtataacttggaaaaacctggggatccccaatttaaatccctttgaagaaattccccttttaccaagttggttaaataccaaaaagccccaaacgattggcctttccaaaaatttgccaacctaaatt

SEQ ID NO: 62352 - DNA, 342 bp, Zea mays
  unsure (1)..(342): unsure at all n locations
  Clone ID: MRT4577_156865C.1
agaaggaacagttttttgacaagaagccccgggcgactgccngccagtggcggggaagccaggcggtcgttcgtgcggtcgccgggggggactggttcgtctccgggggcgctgggctgcggctggtgtggagtttgaagaaaaatttctgaaaactcgggatgacctggcaaggttacgaagtgatgggagtctgatgttccagcangtgcccatggtngagatcgacgggatgaaactggtgcagaccaaacccattctcaactacattgtctncanntccancctntnttggnnggacctgntggagagagccattgttggcatggccctggccgggcg

SEQ ID NO: 62353 - DNA, 353 bp, Zea mays
  Clone ID: MRT4577_156866C.1
aatggggtcaaaaaaaaaattgcccgaatcccctttttttgatttttttcccaccgaaagggtggggcccctggggctccaaccccaaattttggtctggggttaacaaaaatgggcaaaaactttttttgcccttgccattttatgaagcgcttcctttttgggaaggggcccccccccccctttggggggctttactaattgggaacttaatttgaaagcccttttttcccccggccccttttgggatgcttttaataacccacgaaggggagggggccttccttgtttaaaacctttttaaaagggaactttccggggggacccttttttattacggctgggttttaccc

SEQ ID NO: 62354 - DNA, 396 bp, Zea mays
  Clone ID: MRT4577_156867C.1
attttttttttttttttttttttttttttttttgggcgtgggggccctttttttttttttttttaaaaagaaaaacacaaaaaaaagcaaagagaaaaaaaaaagggaaggaaccaactaacagaaaaagggggaaaaggaagaaacagaagaaaagcccgagggacaggaacacaaaaggaaaaagggaaacgaaaacaaaaaaccagtgcccccaatccaagtacaccgcgcagcaaaaaaatggctccccgggggggaaccaaaaacagaggccgcggttgggggcaaactggggggggattgaacacgggggacccacagcgaaaggcctttgcgcgagaaaaggggggcccttacgagagtgaaaaagagcccaaaataaaacataacgag

SEQ ID NO: 62355 - DNA, 285 bp, Zea mays
  Clone ID: MRT4577_156868C.1
tcggaacaatcccttccactcccctcccctaaacccctcgccgcccgcggggctcgccggccggcgcccctccaggcccccactccctccgcgtgggcgcgatgccaacggcggtgccgacgcccaaggcggtggtccaccagcggttcggcgccaaggcgcggtacacggtcgaggaggtgcgggaggacgtgggcggctgcccgggccttgtgccgcataccaggaacgtttaccgtttcgctctcgtcctactggtctctatctgtatgttcctctctggta

SEQ ID NO: 62356 - DNA, 2144 bp, Zea mays
  unsure (1)..(2144): unsure at all n locations
  Clone ID: MRT4577_156869C.1
gtatcccctcgaggnnccggccgggaaaaaaaaacttaaaaaaaaaaaaaaagtcatgtactaaaccccaagaaaacatgcaaatcacactccagttgcttgcctggtctctccaactcaccctttttcaccttcggcagtctggctccatccgtctcctgcactgaccttttcctccacgtttccggcaactgcaagcaaccactgatccagcccgttctgtgtcccggcgaatggtgacgaaccaggacgcggatgcggcagcgccaggggcaggggcaacggtagatccgatgcggctagcatcgcggtggcgatcccggccagagtggaactgcgcgtcggcggagctggaggctgagccgtccgagctcaacaccgtcaacagctcgggactcttctccgtcgtctctaccgacaagttatcggtaaaatacctcggcagccatcaccacggccacgacgtcggtgtcgtgcaggccgaccgtcccgcgccgacgcgccgagccgtgtactacttcgagatgggcgtcaggaatgctggatacaaggggcagacatccattgggttcacgagcgagagcttcaagatgaggcgacaaccgggctgggagacaaacagttgtggataccatggtgacgacggccatctttatcggggtcaagggaaaggtgaatcatttgggccaaaattcacatctggtgacataattggtgctggcatcaactacttgtcacaagaatttttcttcacgaaaaatggtactctggttggagccattccaaaagaaattaaaggcccactatatcctaccattgcagttcatagttacggtgaagagttgactgtaaactttggaaaagaaccattctgttttgacgttgagggttatattcttgaagacaaaatgaagcagcaatcagtgtctgataaattgaacttggagacggacatcagtcattggattgtccgctcatatctcctacattatggataccaagatacattaaatgcttttgatatggcaaatgcaactgacccccccaccaatcgccaaaatggtcatgcagaacctcccgaaacgtatggtcttagccacagaaaacttttgcgtcagcttatcatgagtggagatattgactctacattcaaaagacttggggagtggtatccacaagtgataaaggatgagaaatcggttatttgcttactactccattctcaaagattcatagaatatatcagggctgaacaactggaagatgctgtgcactatggtcgtgctaacctggcaagcttcttgacacacgaagcttttgagtggctgctgaaggatagtgtggccctgctggcgtacgagaagcctgcagaatcatgcttgggatacctgatgggctctccccagcgtgaattcgtggcagacgcagtgaacgcggctgtcctgtcgacgaaccccaccatgaaggaccctgagagctgcctctactcgtgtctcgagaggctactaaggcagctcacagtttgtagccttgagcgacgtgcattcaacaacgaccaaggagatgcattcttactccacaaagaaatgcaaaactatgaaaggtctaggcgctcatagcctcataggcatcaggattgttgcgcttctgaagtaaactcggttcgggtgttagacctcctcatctgccgtttgaagggacgaagattcaatgacaagcacgtatccttccctttgcaggtctgcagcgcccctcagctttcgcaagggtgagcaccgaattgcatggacacagctcaggcgcttcgggaggtgttctaacctctctgtaatcagaaaactcacagtgagataaagccaacgtttcagatttcccctattttgttggttggctaatatgctgtttgacactatgaatgctaaaaagtaaagacgcttcaatgtaaaaaaaaaaaaaaaaaaaaaaaaaaaaaaaaaaaaagagaggacccttgccttgccttgctgccctgtttttctgattattagcttgggttatatgttttctgctgggtcatttatcatcaaggatagcgatgtatttttcgaataattgcgtcgactgtatcaatctgtggacaaattgttccggaaacatacaaattt

SEQ ID NO: 62357 - DNA, 351 bp, Zea mays
  Clone ID: MRT4577_15686C.1
aatgatcacgcaccatcacaacggggcaaggggggggtggacacaatatgcttgttgacatccccaaccatgggaaacctgcataggccgggaggaccaaatgaccgggagcgccaacgctcggcctgtacagcagaaggtgacctacacaggatcgaacaggccgcacagtcgaatgctgcagcataaacctcactacaccgcgccgtggaagggactatgacccctaaaaaaggcctggcgcaccatcgatgctaaggaaaccgtaagctcctaactaccctaagcgggagcacaactgtgctgacgggacgcctaccgtgggaacaacggacttgagcaacagatgat

SEQ ID NO: 62358 - DNA, 241 bp, Zea mays
  Clone ID: MRT4577_156870C.1
ggtacgactcacgcgttcggcatgctcaacttggtgctgcgttttagggtggcatgcagatcttcttgaacgctatgtctagcaagacgagtagtcttgacgtgtaatcttcagacaccattgacaacgttaaggccaagatccatgacaaggttggcattccaccaaaccaacagcaggtgatcatcttcggctagcagctagatgaaagtcgcaacttttctgactacaacatccataa

SEQ ID NO: 62359 - DNA, 1977 bp, Zea mays
  unsure (1)..(1977): unsure at all n locations
  Clone ID: MRT4577_156871C.1
agctcggcccccgtccatcctggttcccgcgatttccttcgtgctagggtttagtcgggatcggcgttcgttttccctaatttcggtgaattttccgcttctttttaatatactgtttcttccttctcggcggtggataggcgaatggtgacgaaccaggacgcggaggcggcatcggcggcagccccggggccaggggcgacggtggacccgatgcgcctagcgtcgcggtggcggtcccagacggagtgggaccgcgcggtgccggagctggaggctgagccggagccgtccgagctcaacaccgtcaacagttcgggactcttctccgtcgtctctacggacaagttgtccgtgaaatacctcggcagccatcaccacggccacgacgtcggtgtcgtgcaggccgaccgccccgctcccacgcgccgggccgtgtactacttcgagatggccgccagcaacgcgggatacaaggggcagacatccatagggttcacgagcgagagcttcaagatgaggcgacaaccgggttgggagtcaaacagttgtggataccatggtgacgacggccacctttaccggggtctagggaaaggcgaaccgtttgggccaaaattcacatctggtgacataattggcgctggcatcaactacttgtcacaggagttcttcttcacgaaaaatggagctccggttggagccattccaaaagaaattaaaggcccactatatcctacaattgcagttcatagtcagggtgaagagttgactgtaaactttggaaaggaaccattctgttttgacattgagggttatattcttgaagagaaaatgaagcagcaatcggtgtctgataaattgaacttggagacggacatcagtcattggattgtccgctcatatctcctacattatggataccaagatacattaaatgcttttgatatggcaaatgcaactgacccccccaccaatcgccaaaatggtcatgcagaacctcccgaaacgtatggtcttagccacagaaaacttttgcgtcagtttattttatttgataaagcttatcatgagtggagatattgactctacattcaaaagacttggggagtggtatccacaagtgataaaggatgagaaatcggttatttgcttactactccattctcaaagattcatagaatatatcagggctaaacaactggaagatgctgtgcactatggtcgtgctaacctggcaagcttcttgacacacgaagcttttgagtggctgctgaaggatagtgtggccctgctggcgtacgagaagcctgcagaatcatgcttgggatacctgatgggctctccccagcgtgaattcgtggcagacgcagtgaacgcggctgtcctgtcgacgaaccccaccatgaaggaccctgagagctgcctctactcgtgtctcgagaggctactaaggcagctcacagtttgtagccttgagcgacgtgcattcaacaacgaccaaggagatgcattcttactccacaaagaaatgcaaaactatgaaaggtctaggcgctcatagcctcataggcatcaggattgttgcgcttctgaagtaaactcggttcgggtgttagacctcctcatctgccgtttgaagggacgaagattcaatgacaagcacgtatccttccctttgcaggtctgcagcgcccctcagctttcgcaagggtgagcaccgaattgcatggacacagctcaggcgcttcgggaggtgttctaacctctctgtaatcagaaaactcacagtgagataaagccaacgtttcagatttcccctattttgttggttggctaatatgctgtttgacactatgaatgctaaaaagtaaagacgcttcgcatatgccccacaaaaaaaaaaaaaaaaaaaaaaaannnnnnnnnnnnnnnnnnnnnnnnnnnnnnnnnnnnnnnnnnnnnnnnnnnnnnnnn

SEQ ID NO: 62360 - DNA, 1114 bp, Zea mays
  Clone ID: MRT4577_156872C.1
cgaaaaatggagctccggttggagccattccaaaagaaattaaaggcccactatatcctacaattgcagttcatagtcagggtgaagagttgactgtaaactttggaaaggaaccattctgttttgacattgagggttatattcttgaagagaaaatgaagcagcaatcggtgtctgataaattgaacttggagacggacatcagtcattggattgtccgctcatatctcctacattatggataccaagatacattaaatgcttttgatatggcaaatgcaactgacccccccaccaatcgccaaaatggtcatgcagaacctcccgaaacgtatggtcttagccacagaaaacttttgcgtcagcttatcatgagtggagatattgactctacattcaaaagacttggggagtggtatccacaagtgataaaggatgagaaatcggttatttgcttactactccattctcaaagattcatagaatatatcagggctgaacaactggaagatgctgtgcactatggtcgtgctaacctggcaagcttcttgacacacgaagcttttgagtggctgctgaaggatagtgtggccctgctggcgtacgagaagcctgcagaatcatgcttgggatacctgatgggctctccccagcgtgaattcgtggcagacgcagtgaacgcggctgtcctgtcgacgaaccccaccatgaaggaccctgagagctgcctctactcgtgtctcgagaggctactaaggcagctcacagtttgtagccttgagcgacgtgcattcaacaacgaccaaggagatgcattcttactccacaaagaaatgcaaaactatgaaaggtctaggcgctcatagcctcataggcatcaggattgttgcgcttctgaagtctgcagcgcccctcagctttcgcaagggtgagcaccgaattgcatggacacagctcaggcgcttcgggaggtgttctaacctctctgtaatcagaaaactcacagtgagataaagccaacgtttcagatttcccctattttgttggttggctaatatgctgtttgacactatgaatgctaaaaagtaaagacgcttcgacatatgcccctggt

SEQ ID NO: 62361 - DNA, 621 bp, Zea mays
  unsure (1)..(621): unsure at all n locations
  Clone ID: MRT4577_156874C.1
ggcgcaggacgtgcagccgcaggagcgggggcgcgcgccgngagtattcgtgaaggcgcaggtgggcaaccagatcctcaagacgtcggtggcggcgcccacgcccacgctgagcccgcggtggaacgaggacctggtcttcgtcgtcgccgagccgttcgaggagcagctggtgctgacggtggaggaccgggtgtccccgcgcaaggacgacctgctgggccgcgccgtgctgccgctcacgctcttcgacaagcgcctggaccaccgccccttcgtgcagtcccgctggttcgacctcgagaagttcggcgtcggggcggccatcgagggcgagacgcggcgggagctccgcttcgccagccgcgtccacgtgcgcgcctgcctcgagggcgcctaccacgtcatggacgagtccaccatgtacatcagcgacacccgccccacggcgcgccagctgtggaagccgcccgtcggcgtgttcgagatcggcatcctcggtgccgccgggctgcagcccatgaagacccgcgacggccgcggcaccacgnacgcgtactgcgtcgccaagtcgggcagaattgggtgcgcacccgcaccatgatcgggcagtttcgcccc

SEQ ID NO: 62362 - DNA, 410 bp, Zea mays
  Clone ID: MRT4577_156875C.1
attattctctttttttttttttttttttttttgggttttttttttttttttttgggtttttttctttttttttttttttttttttttttgggaaaaaacctatcccccttcctaaaaacaaattaacaaggcccaaagggaaacaaataccttttcccccatttttgtcttgcaaaaggggaaaatccaagaaggccccaaataaaaaaaaaaaagggcccaggttaccaaagctcaacagttcccccaaaaacagcaacccccccaaacaaaacttggaaagaaaaaaaccagggtttgctaaagcaggcccaggaccccacaattttttcttggcacaacccctggcccccttgcccccgggggggtccttttttcccaccggccccctgggtccccccggaaattcc

SEQ ID NO: 62363 - DNA, 606 bp, Zea mays
  Clone ID: MRT4577_156876C.1
cggacgcgtgggtgtgcgtggagtggcttggcatagcgacgcacggcgcgccagaggctgcacacggccctcgaggcgagcacgtgtgcgcccgggatcatgggcaatgaaaggcgagcggaacaacggaacgaatgacggaagagcgcgattagattccgtcggcgtccttgaacatgaacgtcacgtccttgcccgtgagcttgcggtacacggacgagaagctgtcgagcttgtactcgaggctcgtggcgtccttggagtcaaggaagcacttaacgagcttgctgccgtcggtggcgacgcgcacgcgcttgccggtgatctcggtggggaacacgaggtcctcgaggatcgagtcgtgcacggccgtgagggtgcgcgagcgcgggcgcggctgctgcacgcgcgagcggcggctcggcttgccgaggatgcggcgctgggcgatgaacagcacgtggcggtccgagaacttcttctcgagctcgcgcgtgagccgctgctggatcttgtggtaagccttcagctgcggcacgggcacgaagaccacgatggccttcttgccgcccttcacgtcgacctcgcgcgcggcgctgaactgca

SEQ ID NO: 62364 - DNA, 501 bp, Zea mays
  unsure (1)..(501): unsure at all n locations
  Clone ID: MRT4577_156877C.1
ttggnatcctctaaacggccgggcttgttttttttttttttttaaatattttttttttgtttttttttttttttttttttttttttttttttttttaagaaaaaatttttaaaaaattaaaaacaacaccagcataaataaaaccctttttaatttaccccaaaaaaaataaaatgggttttgaatagggcctaataacaaancaaacaccaaaccaaacccaataccaacttttcaatttaatccaaacaaaananttttaanccaaaanttnnatcaaaaatttcctccccccacccaccaattttaaanntttttttcttttctctnnnaccccnaaacccccnncnngggaccccgccattccccccccccgtatttccngacccgtcccttggggcgtaccacttttcccttttggggggcccgttagagcctggcggaacctttgccattttttttttcttggggaaaaatgtgtcctttttttttttcccacaa

SEQ ID NO: 62365 - DNA, 631 bp, Zea mays
  unsure (1)..(631): unsure at all n locations
  Clone ID: MRT4577_156878C.1
cggtaccgaaaatctcccgggtcgaggtgcttcgcctactgccaaagcgcatcgccgcgcccttacgacctcgtcatgcaggaccaagcagactgggcccgcctccccgtcgtgggggncgcggcggggggctgtggcgacgccggcggcctcgcccgtgattatggggctggtatgcgacggcgtcttcgtcttctctttcatctataataacggcaaccccgggggcggggccctctccctcgttcaggcagttacccacttcntctaccccaccatccttgacctcctcagctccttgctccttgaggccctcttcnccttcaccctcagcgaccccaagttcctcctatcctcctccccttccttgtgccccctttctttttctctcgcttttcctttcttttgtttttgtttttttttttcctcttctatttttctttttttttttttttcttctctttttttttttttttcttcttttgttttcttttcttttctcgcttttattttttttttttattttttttcttttttttcttttttttttctttctttctttttttttttatttttttttttcttttttttttttttttctttttttttttccttattgtttcttattttt

SEQ ID NO: 62366 - DNA, 420 bp, Zea mays
  Clone ID: MRT4577_156879C.1
tcggttaggaagaggaggagggcaggatgtcgcaccgtaaggtcgagcacccgaggcacgggttcctcgggttccttaccaggaagggcttctcccggcaccgcgggaaggggaagtgatttcccagggatgaccccaagaagccttggcatctcactggcttccttggctacaaggctggcatgactcacattgaccgcgagggtgagaagcccggatccaaactccataagaaggaaacttgtgaggctggtaccatattgaaacccctcctcttggcattggtgggctcgtggcatatgttaagactcctggggggcttcggacacttaactttgtttgggcccaacatgttaacgaacaagtgaggagaaagttctacaagaactggtgcaagagcaagaagaaggctttcacaaa

SEQ ID NO: 62367 - DNA, 1920 bp, Zea mays
  Clone ID: MRT4577_15687C.1
atggatcctaagggcaagaggattatgatcaatgacaaggagaaggagaccctcaacatcgacgagccaaaaggtgataagcccaccgactcaggctcaaacaacaagaggaagcatgggaagaagaagagggatgaatacaacaaggttagtggcttggacaacgccaagcaaatatgggacaccgtcaagatctctcatgagggaaacaatgttacaatgatcactaagatggaattagtggaaggcgaactaggaaaatccgccatgaaaaggggagaggatccaactgaaacatacaacaggctcaagaccctaatgaacaaggtacaccaaaatgtcgcccgaggaaattcttggcaaatttgtaagcgggcccatgatggtgaaagaagcaagcccgttgcactcaaggcaacaaccaacacggagatgctaccaaacaaggtagcacatgtggaggctactaggcttaatgaggaagaaatggcacttgtgataaagcgcttcaagactgcattaaagggatgcaaggactaccccaacaagaacaaatcaaggggaaagcgctcgtgcttcaagtgtgaaaagaaagggaagaaggagaagaagaagctctataggaagacaaagggtgaagcacatattggtacgaaatgggactcgtactcctcttcatccaaccctgacgatgaaggacttgctgcttccgccttcaacaagtcctccctcttccccaacgagcatcacacttgcctcacggcaaagcggaagaagaatagattgctagaaaaacaagaggatctactttatgaggaacatgataaagtagtagaagtaaaaaagtctcttgctttagaagtcaagaataatgaaatgctggcttttgaattatcttcttgtcactccttaatcactagcctaaagagtttaaatgatgatttaaatgctagaatagagaaaaattgcaaaaatgaagtagaaaaggtgaaatttgctagggatgcttttaccattggtagacatctcttcattaaggatgaacttggtttccaaaagggaacaaacaaccataagagccaaaaggaccttaacttcacaaaggagaagggaaggcacctatggctaataggagaaaacatgttcacctcctatgttaagaacaaagattctcatgacatgatcatctttggagatgtgaatcaaggcaaggataaatctgaaacccaagaaactctcaagcacttcttaagacaacatatcttgaggaggaaggcatatagagtattcaacaaatcttcgggtttagttgaagtctctagtgacgttgtatttgatgagactaatggctctcaaagagatcaagttgatcttgataatatagatgaacatgaggctcttatggccgccatgaggactatggggataggtgatgtgcgaccacaggaacaacaagtgcaagatcaatctttttcctcaacaatggtgcaacctacaactcatgatgaggaacaggaggagctcaacaacttcaaaagaaatgaagtatggagtctggtgccacatccaaagcaaaacattatgggcaccaagtgggtgtttcataacaaacaagaagagtatggagtggtgacaagaaacaaagcaagacttgtagcaaaaggttatgctcaagtcgcaggtgtggattttgaggagacttttgctcttgtagctcggcttgagtctattcacatattactagcctatgttgctcaccattcctttaagctttttcaaatggacgtgaagagcgcgttcctcaatgggccaatcaaggaggaggtgtacgtggaacaacccctggctttgaggatgacaggtatcccgaccatgtatacaagttctctaaggtgctctatggacttaagcaagccctaa

SEQ ID NO: 62368 - DNA, 145 bp, Zea mays
  Clone ID: MRT4577_156880C.1
cgccctacaacagtgtatgctccgccctgctgtatttcttcacgaggccggcgccctactccatgggctgaggcttgagttgatctcgtcaccggcgacaagcacccatcattgctgtagaaatgactgatgctgaggacactcc

SEQ ID NO: 62369 - DNA, 805 bp, Zea mays
  unsure (1)..(805): unsure at all n locations
  Clone ID: MRT4577_156881C.1
cctcgaggccggccgggagtcgtgttgtggccggaagagacagacacgcaaacgagaggactcgagagagattccgccgccaccaccgccggctcagatgccgccgccgcagtcgggcatgaccctctgccgccttcccaaggccacccttggccttcccctttctctcccctctttgctatatcgtcccagcctgtccctcgccgcacgtcgcaccaaggccgtctccgccagggcctcctcctcctctccatcaccggactcttccttcggttcgcggatggaggattccgtcaagaagacggtggccgataaccccgttgtcatctactctaagtcatggtgctcatattccatggaggtgaagtcactcttcaagcggatcggtgtgcagccccacgtcatcgagctcgacaatctcggttgatgttcttgtgcagctgaccgctaatccctttcaggagctcaaggaccacaactacaaaaggtattagaaaggctgactggacagtctactgttcctaacgttttcatcggtggaaaacacgttggaggctgcacagataccgtgaagctgtatcgcaagggggagctagctagcatgctgtcggacctggatatcaacattgacaactcatgacaagctatgttctgcaaggattgggcgagacttgggcagcactgtattgagtttctttttttaacatgtgcgatgacnaacactggtgtcatttacacattttcgtttggtactccgattaaatcattgaatttgaccacccgtaaanaaaaaaaaaaaaagcgg

SEQ ID NO: 62370 - DNA, 378 bp, Zea mays
  Clone ID: MRT4577_156882C.1
aattaaacttaaagcatcatataattttccccaaattacaatataaacccagtctcagaacatgctagaattaatcaaaaggggcgggttacatcgcctacgtttacaggaaagcacgtttaaaaaggggggaccattatcccaacggggttcaaccatggggcaggagaagctcgccatcctggggcccaagatgcccctacttaaatctctgcctaattttccggcgctttcttttgagcctacccatccttttttttttccacttggcccgcattgcgtcggaacaggatggagcgcgcgctcgagctacctgtccccctgattggggcggctgagtacttgtgagttggagcccacgcgtccgcggacgcgtgg

SEQ ID NO: 62371 - DNA, 1590 bp, Zea mays
  Clone ID: MRT4577_156883C.1
atcttgattaagaaaacaagagacataagccttcgatgtgtggaacctcaatttaatcaacatgccgctcaagcgagagaaccaggtacaagggcctgtttaaggctatatagagacttgtcaagtttgcataaaaaatgaatgtgttgtatcctcgaaacccagcggctgcttcatatacacatcttcatcaagaacaccatacaaaaatgcattttggatatcaatttgccgaagagaccaattacaggagacagccaaagatagcaaccagcaaatagtagtgggctcgaatatcatacatgtttttttcaggtccctttcctcattcttcactttgccaactagttatatggccttgcagggcctgtatgttcatagttccttttgatattcttctttgtcaccatcagctacgaatcctaaagcaggcaaatgcactaccagttgaacagtagctttgaattattgcatatacttgttttacttgtaccagacatgatgcattcagcatgctcgtaggcacaaaggattttgcgtactttttattcctatctgttttgagttcccacatgaagttggccatgtcaacatatctaaatgtaccctcgcgatgcttgtgttttactaagccgcatgaccttaaggggatgtgttttatttttgtaattgtttcctactgggaaacgagaacagtgtagtaagtatatgtagtgattctatataattttttcagggttgatggttcttgtgcaggcctcgaggccggcctggcgacagacacgcacgcgagcggaggagagtgttgtggccggaagagacagacacgcaaacgagaggactcgagagagattccgccgccaccaccgccggctcagatgccgccgccgcagtcgggcatgaccctctgccgccttcccaaggccacccttggccttcccctttctctcccctctttgctatatcgtcccagcctgtccctcgccgcacgtcgcaccaaggccgtctccgccagggcctcctcctcctctccatcaccggactcttccttcggttcgcggatggaggattccgtcaagaagacggtggccgataaccccgttgtcatctactctaagtcatggtgctcatattccatggaggtgaagtcactcttcaagcggatcggtgtgcagccccacgtcatcgagctcgacaatctcggagctcaaggaccacaactacaaaaggtattagaaaggctgactggacagtctactgttcctaacgttttcatcggtggaaaacacgttggaggctgcacagataccgtgaagctgtatcgcaagggggagctagctagcatgctgtcggacctggatatcaacattgacaactcatgacaagctatgttctgcaaggattgggcgagacttgggcagcactgtattgagtttctttttttaacatgtgcgatgacaaacactggtgtcatttacacattttcgtttggtactccgattaaatcattgaatttgaccaccgtatatatgcaatttgctagaaaaaaaaaagaacgagctcgcaaaacttctttacctttcaattttt

SEQ ID NO: 62372 - DNA, 281 bp, Zea mays
  Clone ID: MRT4577_156884C.1
ggaaacaaaaattttccgggccacaaccaaatcggcgtagcccaaaatttagattttttaagcatacttttttcgcaaacccgtttgggttaaaaaaagctaaaacatggccgtatccccaagcccaaatttgcttttaaaccatatccctcctggaaaaaatcccggttttatttggaccccccccctgggagtttttttcgcataaaattccaaacaagaggacttagggccaacccccaaatttggtgggacccatttgcaaactttattggccccgg

SEQ ID NO: 62373 - DNA, 412 bp, Zea mays
  Clone ID: MRT4577_156885C.1
tgttcattacaatgctattatggatgctgttcaagaagttctccctgaagttagacatcgcctttgcctgtatcgtattatgaaagatgtagcagagaacttgaaagaacatgcagagtttaaaacaataaataaagcactgaagaaagtaacatatggatctttgaagataccagagtttgaaatggagtggaagaagattatcgaagagcatggacttggaggaaacgagtgcctcagttccctttatgagcaccgccaactctgggcacctgcatatctgagagataaattctgggcagggatgtctatttcacagcgaggggagtctatttcctcgtactatgatgggtttgtgtacccaaaaacttctttgaagcaattttttagtaaatatgagatgatattagag

SEQ ID NO: 62374 - DNA, 432 bp, Zea mays
  unsure (1)..(432): unsure at all n locations
  Clone ID: MRT4577_156886C.1
tcgcccacgcgttcgcccacgcgtccgcggacgcgtgggctcgccgtcgcctgcccgggcctcgtcgagctcgacctctccaatggggtcgacctcggggacgccgcggcggccgaggtggcgcgggccatggcgctccggaggctgtcgctggcccgctggaagccgctgactgagcgccnctnggatgcgttgtcgtngggtgcacggagntgatggagatgtcgattaagtggtgtcttgggattacggatctggggatccagctgcttgccctcaagtgcacgaagctcaccaggctgtatctctcctacaccatgatcacaaacgctagcttgccttccatcatgaagctacccattcttcactagttgacactggtggggtgtattgccaccgatgatgatgctcttggtagccctgagagagaat

SEQ ID NO: 62375 - DNA, 485 bp, Zea mays
  Clone ID: MRT4577_156887C.1
aaaacccggtgcgcgagccctgtgcggcgcgcatcgtcaacgcacatcttgacgtaagtaacaacacttcaaatgagaactcaccacgccgtagaggacaaaggaccctgtcaccggaacatggcccatgggttaaccgatcactaacggacggcagaaacccacaagaatagcgcgcacacacgccaacccgaaggggatcggcttaaaactccgagccgggacgggtcgctgaagctaccggaggaagaacggaaactcccaccggggcctaagcaagagaggtatctagtggggaacgctccgcctgccctgatcctcgaatcagaccaatgtatgttacaaccagctgaagatcactggcacatgccgccttttccggagccccctcatcctcccttgacaaattctatgaccgctttttgtccactaccagcgcgtacttataaccgtatcactgctgcaacgctgaacagcctctggcc

SEQ ID NO: 62376 - DNA, 237 bp, Zea mays
  Clone ID: MRT4577_156888C.1
ctctaggtgggatacgaacgcggtgtggacataaccaaggatcctgagggggacagtagtgtgccaatatcaccgggggcataaagacggcatatagtctgcacaagacccaataccgccgctacagaaatgatgctaaaagctgatcacagagctgccatcgccgctgtatcttgccgatgtccatgacaacggcacagcatggtttgaacttgaaacctacagtgacgcttacgt

SEQ ID NO: 62377 - DNA, 432 bp, Zea mays
  Clone ID: MRT4577_156889C.1
gcgttattttacaggagaaccccgtccccggggcgcaggcgtcgttaggttccgtgaccgcggtccaatcctgccacagatgccctccctgctcccctgtgggcgtgggcgagtagtatgcatcacggctagcggtgcagccccccggcgcgggcccacaggtgcgcaagtggagcccacgggcaccatcggctccgctgtcgcgtccaggcccgctccgcacggcggccggggggcgctgacctcggccggaggaggcctcggcgagctactgttcctgggcggcggagggcgcctctgagccgctcctggatctcaccttcttcctttcctagcagttagtgcgttctgctaaccccgccggaccccggacgagttctcaccccgagagtgactgaccgacctaccgggatggagatgaagctgaccatc

SEQ ID NO: 62378 - DNA, 235 bp, Zea mays
  Clone ID: MRT4577_15688C.1
ctactgcgctgcgcagaccttcacgtccgccgccgaatccgagactctgatgacggactcaccgcatcgcacagagcacatcagactcgggtccggatccgcgctctgctctacgacgctccagtcatggcaggaatggcacccgagggctcgcagcttgatgctaagcactatgatcctaatctgcaggagctgctgagcactggcgagactgatgagctcttcactagatatg

SEQ ID NO: 62379 - DNA, 490 bp, Zea mays
  unsure (1)..(490): unsure at all n locations
  Clone ID: MRT4577_156890C.1
acgcctgcagtactcttccttaattcccggaaggacgcgcacncgtcctcttaactctttcacttnaanatatttctatttcttttcaacttgaaacaccataagagggggaaattcatgtagtgcggaggatctaatatttatatatccattcaaccataaaccataatgatgtaatggtcagctttcatcaatatcctgatcaatataaaactgttgatatggtttagcatattcactcgtctatccataggttaactgcattttccaagaacttggcttcaatttataataacatctcattccacccttcatatttttttaatactgtaaatgatcttataatattttactactatgacttctactcttttccacacaattatttttcatattatcccacccctaccttattctttaatacgatcatcaacctatcaatcattttctaaaattttttttaattccatccatttatttctttttaaaa

SEQ ID NO: 62380 - DNA, 390 bp, Zea mays
  Clone ID: MRT4577_156891C.1
gaaagggggggccgggtctgtttttaaggggggggggtttggtggcggatcaaaaaattaaaaaaaggggcggaagggggtcaaaaacaaaaaggacccccggccttttacggggacaggtttttacttacaaaaaaaaaacagccagggccaaaaaggaaagctttaaaaaccccctgggggaaaaacggccccttggggattgggggacaggttttttcaaaaagggaaaaaaactgcccaagggttgaaccccacaaataaagggggccggtgcagccctaaactactcggaagcccacaacccccatggggcggggaatttttgaagaaaaaaattttgagtccaccatgtcttaaaaaaagcttttttgcctcctggaaacccag

SEQ ID NO: 62381 - DNA, 881 bp, Zea mays
  Clone ID: MRT4577_156892C.1
aattcggcacggcaacagagctcccccacacccacagcggggtgaagcgaatcgcatcaaattcgaccgaagaatcgcgccgctcggcccggccaccatgagcttctcgtccatgagcaagcagcaggtgctggacgccggtgacggggagggggaggaggtcatggagctcatcccgggcctgccggaggaggtggccgagaagtgcctcctccacctgcccttcctctaccaccgcctcttccgcaccgtctcctccacctggaaccgcttcctcacggacgccctggccaagccactgctgttccctcacgcggcgggggcggggaccgcggccacggggtcggtgcccttcctcttcgccctcgcctttgaccccatgtcgcggcgcctccagtgccaggcgctcgaccgtttctcgaggaagtggctcctgctcccgccggtgcccggcggcgccgcggccgggtcgttcgcggtggtggggctcccccgccgcggccagatctacgtgattgggggcgtcgaggagggcggcgacaaggcggtgacgagcgtggcggtgtacagcgccgcgcggaacggatgggaggaggcggcggcgatgcggacgccccgcgggtacatggcggctggggaggtgggagggcgggtggtggtggccggggaggacggcgaggccgaggtgttcgacccggatgccgggcggtggtcgccggctgcgccgcgccggggcgcggcggtggcgtggtacgacgcggcggcggcgggtgggaagctgttcgtgacggaggggtgggcgtggtcgttcgagcgcgcgccgtgcggtgccgtgttctacttcgtcacggtcttttgttgcgagatggttcgcggtatgc

SEQ ID NO: 62382 - DNA, 608 bp, Zea mays
  Clone ID: MRT4577_156893C.1
ccggccgggattccccatcaccaagccgaaccgagaccgagagagcttccccacacccacagcggggtgcagcggatcgcgccaaattcgaccgaacaatcgcgcgccactcggccccgccaccatgagcttctcgtccatgagcaaacagcaggtgctggacgccggtgacggggagggggaagaggtcgtggagcttatcccgggcctgccggaagaggtggccgagaagtgcctcctccacctgcccttcctctaccaccgtctcttccgcaccgtctcctccacctggaaccgcttcctcaccgactcccctgccaagccgctgctattcactcccgcggagggggcgggggctggcgcggggagcgcagccatgggctcgttgtccttatcgctgcccttcctcttcgccttcgcgtttgaccctgtgtcgcgacgcctccagtgccaggcgctcgaccctttctcgaggaggtggctcctgctcccgccggtgcccggcggcgccgcggccgggtcgtttgcgggggtggggctcccccgccgcggcgagatctacgtgattgggggcgtcgaggagggcagcgacaaggcggtgacgagcg

SEQ ID NO: 62383 - DNA, 244 bp, Zea mays
  unsure (1)..(244): unsure at all n locations
  Clone ID: MRT4577_156894C.1
cggaatcgggcgggaacgccaccacgcgtgcgaacgtcgtgggcgcaactacctgtggcattattcagtgaccccttccgacgaagatacccaatggcgtgtcgttagtagaaaaacgccctgcttgggatttctaccagtnntggagtnncatcaaaccagctananccatttgcacctttgaattgtttggggtgaaatgcccttgggagaaaagaggggtcaccaaagaattggggagtca

SEQ ID NO: 62384 - DNA, 329 bp, Zea mays
  Clone ID: MRT4577_156895C.1
atcccgattggaagggcggctaataacggcaagagggcgacgaaaatggctccaacgaccgccaccaaggacgacagcggctacggcgacgagcgccggcgctagctgcatgcgctcgacgacactaatctgggggtgaaaggtctggtggactccggcggcaagttcatcccgtgcatcttccagcacccgtcggaagccctgagcgacataatttctccgtggactctgacgccgtctgcgtcctccggcgacggcatcacggtggtggacctctcggtgactcagctcgatgacctagacgagcatgtgacgtatgcgggccggac

SEQ ID NO: 62385 - DNA, 124 bp, Zea mays
  Clone ID: MRT4577_156896C.1
atatggatattagagagtaaataagtatataagagcaaagacaagggtaaccagattctaggggaattcaaggagccagagatagcttaaacatataaagaactgaaaagggtttttttttttt

SEQ ID NO: 62386 - DNA, 269 bp, Zea mays
  Clone ID: MRT4577_156897C.1
cgcagatcccgaagcagcgctgggagcgtaagtgcgggcagagcactgcgccgtttgggaacgcacactttggaggagacagtgcggtggttctggaggctgggaagtccaagaccagttggctcgcatctgacttcagtgaagttccttatgacttcccctgacattgcgtccttatcatgggggcacatgaaagtaaaaggctctaatataacctataaggactgcacagtatagccaaggggtagtcggacttgggattggagaga

SEQ ID NO: 62387 - DNA, 954 bp, Zea mays
  Clone ID: MRT4577_156898C.1
gagaagttttactctgatgtacagtatccaaagctagaggaaatgggagagtacacaacctgtgttggtttgacttacagtcagggctgcatatggttcaaagagcggaggagaaaagagaggagggagatgggagccattggtccttagatggaaaggcaatttagtgcactgtaggggatgaaagtaaagttatatcacaagttctgttccccaagaattatatcctgagcaaaattttccgcaaggatgttccacctctgatagtgaatttgaccccctcccccaaaatgcacatggttgtaacagagacactacatgacatcattcctagaaccaaagaactatgaagaagagaaagatcactgagtctactagccagagatctgaagtgtatgtggatacagatcaatgtgagctgcaattttgtgaacgtgtaaagctggcaacaggaacagccgaacaggaccacgtcaatggaagtgggagcagccgccgccggcaagctgaatgcggagctgtttcagtggttggcgttcggccgcgtgatcccgttcatggagtttgccaagcgcctggcggcgaggtggccgcgccgtcaccttcctctccatgcagaggaacgtagccagactcccgcccgtcatggagggcctgcctgcccgagggcgccaagttcacggccgacgtgccgtcggagaagcactgttagcaacaatacaagaaagacgtcagaagctcaccagcactgaagatggagcactgaagatggaaaagctgaccaacaatactgacggtgtcacaccaacgaagcggtagaggcgaggcaacacatgagtatttgggcccgaatgggtcgtgtatttggtcggactggtcggtagtttataagctctctctagtattgtaagaaggtatcgaagaattaatgaacagacaaagacgctggttctc

SEQ ID NO: 62388 - DNA, 815 bp, Zea mays
  unsure (1)..(815): unsure at all n locations
  Clone ID: MRT4577_156899C.1
cattgggtacctcgaggccggccgggatcgcgacttcccacactccgtccaaatcaaccttccagggcagttgcgctccgcgaatcgcgaatcccactggacccttccctacgcccgagtacacgcacaatgggtctttttattctctcggaaacctcggcgggttatgtccttctcaagtccaaggacaagaagctcttgggcggagacacaaaggattcctcgagcatcgccgagcagctgaagctcaagaagttcgccaagtttggcagcgccgtcgatgcgcttgagcaggctgccgctcttcacgatggcaaggtcacgcccatgctgtcgtcgctgctggacgaattgaaggatgagaccaaggctactttggctgttgccgaccccaagctctccaatgcgattgctcaactcccaggtctttccctcaagaccgtctcagactcctccacacaggatgtattccgtgccatccgtgaaaacctgtcttcactccttcccgacctacttccctctgaggaagccgcgactcgcctgggtcttgcccactctctgtcgcgacacaagctgcgattctcccccgacaaggtcgacaccatgatcatccagagcattgcttctctcgatgtcttggacaagcagctcaacacctacgccatgcgagtcaaggaatggtacggctggcacttcccagagcttgccaagatcttgaacgacaacctggcctactcgcgtgtcgttttgaagatgggcttccgcacnaatgctcgcaacagcgacctctccgacattctgcctgaagaaaatga

SEQ ID NO: 62389 - DNA, 394 bp, Zea mays
  Clone ID: MRT4577_15689C.1
gccccgacggtgcgggatttggcgacactatggcccccgcaggaggctcctcggtgactcctgccggctcgcccgtcaccgaaaatagcacagccgcatatggctccgacatcatcttcgtagacatcgccggcgctgtggcagaccccgcccaactgttctacacatccggaagtggatctgacgagctgcagctgcacctgagccgctctgctgttgctgatagacgccctctgtttgctctgttacacgatccattggctatttatttattcgttcggttggcatatataggtctgatacacagatcaggatgtgtaatcctatcaatctcttgaacgggagttgattatatgctgcgcaagcaaacatatgacactgcctaaaacaaaaa

SEQ ID NO: 62390 - DNA, 427 bp, Zea mays
  unsure (1)..(427): unsure at all n locations
  Clone ID: MRT4577_1568C.1
acggcaacatacaaaccacaataatctaccaacttnttcacccaaaatattttccctggtgatgctttttttactctctgcacgcgctactacaacaaccattttccaaaaatgctcacaagctcctataactttccttcttcccccatacctctcaccaacattctattatgtatgtgaaaacccaatacttcaaccctacacgatccaacaagcaatcacagctggcatcttacctttatcaccctttttcctccaacattcatcatacctattacatcaattacctttatttcatttatttacacacaacatcatgtcacaacaactacaacaactttttctaacaaaccattctccctacatctagcaacatcattttcttccatccaaccaactaccttcatataacttttactttatattt

SEQ ID NO: 62391 - DNA, 658 bp, Zea mays
  Clone ID: MRT4577_156900C.1
ctctttcctcacgcaactactcccactactcacgctactacccctgccctaggccacgtccaacagcctcccccaatccgtcctttggcttcgctggcgacggcggaggctggtgaaggcaggaattggtgagcgctccaattcggggattggcggaggctggtgcgcgccacggcaggaattggcggcggctggtgcgctccagttcgaggaatcggctgcagctcacagaggacgcacggcgtgtgtttccttgccctcggttgtaaggctgcaccaaatctgggccatgttttcacttgtctgagtactgctgcatttcatagcagtttccttatactttagttcaagtaaccttgtactagttcttattgtttctgtagttagcagatgtatagttcctctgatttttgtaactagatattcatagcagtttccatatacattattttacatagcatcctgttaggtgtttttcagaaactgcattgcagacacattgtccatagttgtgggatacttggaggtagtggtagtaatgtcaacttttacatgacttgtttttatacgatgtctaaatacttgcagacacattgtactttgtttgaagttttagagatgttagtaaaacaatttttcctcattgagttgggctctg

SEQ ID NO: 62392 - DNA, 2377 bp, Zea mays
  Clone ID: MRT4577_156901C.1
cgcccactcctccggctcttcttctccaccggcaccagtccaccacctcctgccaccgcgcggccccaaccaaccactcctcgtcagcacctacctctgcaacaacctcctcgcctactacgccagcgtgggcgtgagtcgtggttgcttccgcgaggcgcggtgcctgttcgacgacataccgtacgcgcggcggaacgcgttcacgtggaactcgctgctgtcgttgtacgccaagtccggccgcctccctgacgcccacgtcgtgttcgccgaaatgcccgaccgggacgccgtgtcctggaccatcatgatcgtcgggctcaaccgctccggccgattctgggacgctgtgaagacattcctggacatggtcagtgaagggtttgcgccgtcgcagttcacactcacgaacgtgctttcatcgtgcgctgcgatggaggcctgcggggttgggagaaaggtccaccccttcgtggtcaagctggggctgagcagctgcgtgcccgtggccaactccgtgctctacatgtatggcaagtgtggggatgctgagacagcaagggctgtgtttgagaggatgcaggtgcggagtgtgtcaagctggaatgtcatggtatcgctgtacacccaccaggggaggatggagcttgctgtgtccatgttcgagaacatggtagaacgaagcattgtctcttggaacaccatcatagcagggtataaccagaatgggcttgatggcatggcattgaagttcttctcacgaatgctgagtgcttcttccatggagccagatgcattcacggtaaccagtgtcctatcagcttgcgctaaccttcgtatgctgaagatgggaaagcagatgcactcttacatcttgagaactggaatgccgtgcagcagtcagattatgaatgctctcatctcaacctatgcaaaatccggaagtgttgagactgcaaggaggatcatggaccaggcagtggtcgctgatttgaatgttatctccttcacggctctcctggaaggctatgtcaagcttggggacacaaagcaggcaagggaaatcttcgacattatgaacaatcgagatgtcattgcctggactgctatgattgttggctatcatcagaatggtcagaatgatgaagccatggagctcttcaggtcaatgatcttgattggcccagaaccaaacagtcatacgcttgctgctgttctcagtgcctgtgcaagcttggcatatcttgattacggaaaacagatccactgcaaggctatcagatccttgcaggagcaatctgtctctgtcagtaatgccattatcacagtgtatgcaaggtcaggcagtgtgccactggccagaagggtgtttgatcagatttgctggcgcaaggaaacgattacatggacatcaatgatcgtggctatggcacagcatggtttgggagaacaagccgttgtcctttttgaagaaatggttcgtgtcggcgtgaaaccagaccatataacatacgtcggcgtgctttcagcctgcgcgcatgctggttttgtagacaaagggaagaggtactacgagcagatgcagaatgagcatggcattgtgccacaaatgagccattacgcgtgcatggttgacctgcatgcccgtgccggcctgctcacagaagctcacgaattcatccaacggatgcctgttgcgccagatacagtagtctggggttcgctccttgcagcttgcagggtgcgtaagaatgcagatttagcagagctcgcagcagggaagttgctgtcaattgaccctcacaacagtggcgcctactccgccctcgccaacgtctactctgcctgtgggaggtggaacgacgcagcgaggatctggaagctgaggaaggacaaaggagtgaagaaggagaccggtttcagctggacccatgtacgaggcaaggttcacgtcttcggagcagacgacgtcctgcatccgcagagggattcgatctaccggaaggccgctgaaatgtgggaggagatcaagaaggcgggatttgtccccgacctgaactccgtcctgcacgacgttgatgacgagctgaaggaagagttgctgagccgccacagcgagaagcttgccatcgcgttcggcctcatcagcactccggaaaagacgaccctgcggatcatgaagaacctgcgggtgtgcaatgactgccacacggcgatcaagttcatctccaaattcgtggatagggagatcatagtgcgagatgcaacgaggtttcaccatttcagagatgggtactgctcgtgtaaagattattggtaggaaacctggtctgggatccttttattcttcttttgaaaagagatttattaactg

SEQ ID NO: 62393 - DNA, 233 bp, Zea mays
  Clone ID: MRT4577_156902C.1
gcgactattattccacctgatgctgcttagcccgcagggttcgcttgccacgacggaggccagatccaacccctgggcgtccgtcatccttgcatgtcccgacctccctcttaggaacacgagcaccgaaatgtgcccataatttccgacaaccctgcccctagcttactttaactccaccaccaggcgatgccctagacttaagtgaatgggctctcttctctccaggactg

SEQ ID NO: 62394 - DNA, 1386 bp, Zea mays
  Clone ID: MRT4577_156903C.1
ttgggaccctcgaggccggccgggtaatcattatttccatgaggcaaattcgatccctcagttgacagcatttagtttttgtccgttagtatttggacccagaggttgtgattcaaaaagtgaagtatcattttcaaacactgaaaatattgtatctggttggaacaaggatgtaatggtgcttttcagcaactcttggtgtgggttttgtcagcgagcagagctggtggtccgtgagttacaccgatcatttaagagcttttcaagctattcagattctgtatctagaaatgctcaagatgtccacaatgaagagaaaagtgaagaatatgtgatgaagggctttcctgcaatttacatgatagactgcacatcaaatgaatgccaccatttactaaaatctgcaggcatggaagaactttatccggcattgttactcttccctgcggagaacaaaagtgcaatagcatatgaagggggaatgtcagtgtctcacttaatcgaatttttggagtctcatgtgagcaattctcgctatctattggaatataaaggatttatgtggaagaagagaatgacaccacagcacgatgcaccacaggcaattcagtttaaagtcagtgataaaggtagcggcaatgttggttctgagttaccaagtcatccaggtgtcgttacaggatccatccttactgccactaagaagctcgggaccgcagttccatttgataatgccaaggggctcattgtgtcagctgattctcatgaaggatttcatggcttgatcatccacaagcgattaagctggggggtcttcaaggatttggaaagctcgatggagcctattaagcatgccccccttttttatggtgggcctgttttggggcagggttatccccttgtaagcttgtcaaaagtatccttggggggggacatgcaagtcataccaggggtttattatggcaacaaagttgccccaacccgggtagtcccccggatcaagttgggggagcaatctgtcaatggcctgtggtttttcctaggctactcgggggggggaaaccccccccttttttatgagctaactaaaggagcatggcttgtgagggttaaaccgattgagcatttgggctggccgaaaagtttaaagggttttgtggccccccccccccacctgtttttttaggaaaattcagttttttttgcccaaatttgcccctttgccccccctgccccgggacattgtattgagcttttttttggaacaaaacagcccggggtttttttccccaaaaaaaaaaaaaaaaaaaaaaaaaaaaaaaaaaaaaaaaaaaaaaaaaaaaaaaaaaaaaaaaaaaaaaaaactcgagagagggccgcggtacc

SEQ ID NO: 62395 - DNA, 3732 bp, Zea mays
  unsure (1)..(3732): unsure at all n locations
  Clone ID: MRT4577_156904C.1
gcttccccctgaaatagctaaatttggccttataaccgaaaagatcattgttgccttcactggatgttgttaatgaaggcaaccaggatacatggtttgttcatcacacatcnatatgggatgcaaaacttgttcagttattgcgaaagatggcgatgatctgagaagtatagtgcaatcccaccataatcttggcattaaggaggttagtgctgatgaaagtagtagagaggctatcttccccagaaacaggccctctgtagttctatttattgatagattatcccactcctcaaaagtcagagatgaaagcaaattagtcctaaagttactaaggcagtatgtgcaaaataattacccatttcatgtcagtaatggggttccaagtagcagtacttccaaagcacgctcaaaagctgtcccttctttgaggaatacaggtatctcagatgcctattctcaaacagcaaggttgagtgcttgggcttctaagcttatggcacttggggacaaaatgtcagttatggtggttaatgatggagatagtatttcttacaaaagttctagccaaggtagtggtgctaatcctgtatatgatgttctcactaagttgctagacaaggcaagaccagggcataagccaaagaaaacaagaataagtttagtttcacgagatgttggcctaaagatgttgtcagatcattctgaaatcaaagtggttaagtctctatcagttgaagagagtgaatacaaaagaactgatgatgcatctgccactacagctaattccaatgatgatattactgaagcttttgtggatgaaaacacagcaaaagagactgaatatatcaatgatggacaagtaccaagtatacttgagaaatcttcggcaacttaccctgatgaacatgatactgctcgtgaatttaatgatacagaaattgaggacaaaagcataagtgaagcttcagatatgagtgttgatcttaaggaagatgcccccaataatgcagatagtagtagtgaggttggaggtatgctgcataaacacataatggagaaaacagttacagaagcttttcaaattttggaacatgatgaaagaaacttgtacactgaccaagaggaatcagtatcatcaaacgagcaagttgatggatcttcattcctgagtaaaaaaatcagtaaaaccgaagatgcaatttatgaaaacacattcggtctatctgaaggattagaagaaagtgatagaagatgtccccatcatgcaacatgtagctcttcctgtgttcctgtaagagatgacacagactttactgatcaagtaacttcaagtatatctgattaccgttttgctggtgctttctacttctctgatggtggttacagactcctgagaactttaactggtggatcaagaattccgtccctggtaataattgatccagttgaacaaaaacattatatatttcctgaggaaagcgagtatagctatgcttctttacaaaattatcttgacagttttaggaatcgaagtcttccttcatattaccgtggtacctcatcagctataagttcaaaggagtttccaagaccaccttttgttaatcatgatttccatgaggcaaattcgatccctcagttgacagcatttagtttttgtccgttagtatttggacccagaggttgtgattcaaaaagtgaagtatcattttcaaacactgaaaatattgtatctggttggaacaaggatgtaatggtgcttttcagcaactcttggtgtgggttttgtcagcgagcagagctggtggtccgtgagttacaccgatcatttaagagcttttcaagctattcagattctgtatctagaaatgctcaagatgtccacaatgaagagaaaagtgaagaatatgtgatgaagggctttcctgcaatttacatgatagactgcacatcaaatgaatgccaccatttactaaaatctgcaggcatggaagaactttatccggcattgttactcttccctgcggagaacaaaagtgcaatagcatatgaagggggaatgtcagtgtctcacttaatcgaatttttggagtctcatgtgagcaattctcgctatctattggaatataaaggttagtggataaacatcttgtgactgcattggttctacttaaaatatttgaatttgcttatagttctgtaatgtgtgttagcttacactttacaacactattgtttcttagaagttgtgttaatcttctcatacatgaaagtactaagtatcaaccttgctcatgtgctgtttacctgtttggcataccagcctagtttaccattcttatctagactggcagctgcttggctgtggattacgttgttctagacgttcctagacgttccccaaacctgaagtgccaccacactaaggatatgtgctgtttggttcggcacatgtggttcggcctaatatataatctgtaacaaggatcgggtacgggttgtgcaatgctgataccacattaccgcccacctcccagctttgtctgattatgcccgcggactcccttctcctgttctcttctcacaactttgtcctctccactcaacttgcggatctcacattctcgcccctatgttccgtgtgttgccagcctgtttgttcccagccaacctgttacctttgttgctagccaaacacaattaaggaaatgcaagatgttaaaaattcgaaccaaacgaattgtattttgccttacactgtgacagattgcactgcaacctgattacattagcagtacgactcccaggaccgaaccaaacagcattagttaaaatgtcacatgcatgttctgaagcttattttcttcttggtactcaggatttatgtggaagaagagaatgacaccacagcacgatgcaccacaggcaattcagtttaaagtcagtgataaaggtagcggcaatgttggttctgagttaccaagtcatccaggtgtcgttacaggatccatccttactgccactaagaagctcgggaccgcagttccatttgataatgccaaggtgctcattgtgtcagctgattctcatgaaggatttcatggcttgatcatcaacaagcgattaagctggggtgtcttcaaggatctggatagctcgatggagcctattaagcatgcaccacttttctatggtgggcctgttgtggtgcagggttatcatcttgtaagcttgtcaagagtatccttggaggggtacatgcaagtcataccaggcgtctattatggcaacatagttgccacaagccgggtagtcacacggatcaagttgggcgagcaatctgtcaatggcctgtggttcttcctaggctactcggggtggggatacaaccaactttttgatgagctaactgaaggagcatggcttgtgagtgtgaagccgattgagcatttggactggccgaagagttgaaagggttctgtggacctcacgcctcagctgtttctttaggaaaattcagttcatcttgcacatatctgccactctgcccacactgcaccgtgacattgtactgagcttttttttggaacatagcagcactgtgttttcataccattcaccccgtactatggtcacatattttttatacatagtacttttcttatagtgaaaaaaaaaaaaaaaaaaaaaaaaaaaaaaaaaaaaaaaaaaccgagaaaggggccggta

SEQ ID NO: 62396 - DNA, 395 bp, Zea mays
  Clone ID: MRT4577_156905C.1
cgttgctgtcggtggaaccccgcagccgcctccctacgcccgcccgcctgccgcgaacgccgcaatccactcgccgcgaacgtcgcctccccctctcctaaaaccagcccccgccgtaacccgtgcccgaccgtcaccgccagcgcgtggcgttgccctgtttccgtaggtgccactgggccaatccatggcgagcccctccatcgttgtatcgatggcgtgcgatctctactaactattaagcgcttaatgtagactgcccccgcccccgcacccgcctcggtccgcccgacctccggaaacctcgcctccgcaaacttccgtgagagctatgtccgccgcaaaccttgccgcaaaccgcccgcccgcccgtccgcaaacctccccgacagcaa

SEQ ID NO: 62397 - DNA, 350 bp, Zea mays
  unsure (1)..(350): unsure at all n locations
  Clone ID: MRT4577_156906C.1
tacgaggtcggaagcacgcgtgcgtagaactcgtatcctctaaaatacacccacnacattttaatccttctacaacaatcactcatcaattaccaccagcatatttacaaagcttatgctccttgctctttacacattccttcaaacgcaacaattttccctcaaagcacacaagctcctataacttgaccacatgccccataccttccatcaatgatacacaaaattatatcaaaaccaactggtgcaaacttattttctccacctcactaatgaaaacagcgacctaccctcttcacccttctttaaacaatcaacaaccctactatttttacagcaatatacaaacc

SEQ ID NO: 62398 - DNA, 648 bp, Zea mays
  Clone ID: MRT4577_156907C.1
cctcgaggccggccgggcacctaagtgcccgagactggtaagacaaggggtattcagataatcaagaaaccacggtgcggctgaggcctgaggcagtcctcttcgtcgttcacccaaaaaaaaaaaaaaaaaaaaaaaaaaaaaaaaaaaaaaaaaaaaaaaaaaaaaaaaaaaaaaaaaaaaaaaaaaaaaaaaaaaaacctccccgggcccagaccaattaactagtttcttcaaactcaaacaagggtcgttggggggaaaaagggaacagctaacaggcttgggggggaaggggggggaccccccccggggggccaaaaagtttcgggggggccagcccatcggaacggggggggaggggacggacgaaaaggactaaaaggggcccccggggggggcggtttttgagcccggggaggtcaaggccggggcctttaaccggggcggaatcgccgagtttggggccaccttccttttccttaaaatttccatccccacgggaagggggggtcccaaggccccccccaagggggcccccgggggaatccaggggatcgccggggccttcgggggaaggattttcgccctcggtaaagggaccgggggaatttccggggggaaataaaacccgggggggaccttcgg

SEQ ID NO: 62399 - DNA, 360 bp, Zea mays
  Clone ID: MRT4577_156908C.1
aggaaacaaggcattaacataggcgctcaaaacattcaccaaacttattagccaggaagtttgggcgagccaagttgggttttctaggacaaacttaactacaggcaataccacgctggtttgaaaatattttttgggttttcccacacattaactcctccaacaagcccaaaaggtgagatggttctgcaaaacccggttggccattcccgggggggggttgccagccccctacaagggaatggcagatttttttagggcacccgtgtatgttaaaaccttttccacatgagatccggataaagagggaaaattggctttcctttggcgaatggggttggggggcttggcccaattccc

SEQ ID NO: 62400 - DNA, 435 bp, Zea mays
  Clone ID: MRT4577_156909C.1
tagtcagagaacgagcgcgcacccacgcaacttgatgtgtattgtcttggtgagagatcgctagctcgatgtttagacaaaaacatgtatgtattgaacggtaactcatgatgacattgtaagagggcgccagcgataagcgcatcgtgctggaataacggtaacaactgcagatgtggcaagaaggttgcaaggctcacaccagctagctggatgaatgctactagttgctcatgctgctaataaaccggagacttcatgtgctgtcagttggatgaatggaagacatagctcagggtacgcactagatagctggctgaatggctgctgttgatgatgcagataagacactgatgtcaatgcatctagttgaataaatggatgaaactgctcatgctataagtaggctgcagggtttgctagcacaagctgatg

SEQ ID NO: 62401 - DNA, 310 bp, Zea mays
  Clone ID: MRT4577_15690C.1
gcacctcgtagctcgatcggtcggaggagctgggcccggctcccagctttagtcttccgaggcgagggggagctgagctgcgaatggaacgtccagcattgcagagcggtagatccgcatatcgcgcgcggcgggttcaagaaccccttcgagaagaaactagataccgaccatgtgaagaaaaaggaaaaaaaagagagagagaaggctggttactaagacctttcgatgggtgataggggtggaactactgtgtgtggtgattgttgtcgtcttaaaaaaaaaaaaaaggcgcgcgctagtgagctcg

SEQ ID NO: 62402 - DNA, 603 bp, Zea mays
  Clone ID: MRT4577_156910C.1
tcgacccagcgtcctgggggaggagggcaccggcgttccgcggagacgacgttctggctgatggccgctggatcggaactggcctggctggcgctgtgcttctcatgtaaaattagcatgcaacgacaaatgaatgttacataagaaactacaataaataaaagggtgtttggtttgagaaaaaaaaaaaaaaaaaaaaaaaaaaaaaaaaaaaaaaaaaaaaaaaaaaaaaaaaaaaaaaaaaaaaaaaaaaaaaaaaaaaaaaaaaaaaaaaaaaaaaaaaaaaaaaaaaaaaaaaaaaaaaaaaaaaaaaaaaaaaaaaaaaaagggggggcccttttaaaaaaaccaatttttaccccccgggttgggaaaataaaattttttttttagggcccccaaaaaaaaaataagggggcgggttttaaaaaccggggatggggaaaaaccctgggtttcccaaaataaaaccctttggaaaaaatcccctttttccaaggttggaaaaaaaaaaaaaggccccccccaatcccctttccaaaaagttgccccccctaaagggaaaagggaccccccttttaagggggcaataaaaccgggggg

SEQ ID NO: 62403 - DNA, 356 bp, Zea mays
  unsure (1)..(356): unsure at all n locations
  Clone ID: MRT4577_156912C.1
aagccatctttgcattgttcctcatccgcctccttgctcgccgcagccgcctccgccgcgcgcctcctccgccgccgcggactccggcagctttatcgccagagtccctgaactctcgctttctttttaatcccctgcatcggatcaccggcgtgccccaccatgtcagacgcagccgtagacaccagctccgaaatcaccaccaaggacttaaaggagaagaaggaagttgtggaagaggcagaaaatggaagagacgcccctgctaacgggaatgctgagaatgaggaaaatggggagcaggaggctgacaatgaggtagacgaagaagagagnaagggtggggaggaagagga

SEQ ID NO: 62404 - DNA, 510 bp, Zea mays
  Clone ID: MRT4577_156913C.1
tcggccgggccccgccttccctcgcatgagagctaaaacagtcgtcgcagccgtgaggagaaggcaaaacataacctcaccaccgccatcgacgccgaggtcgacatcgcaaggtcgacattgcagtaagccgccgccgtgaaccaagacgggcaagtgactgaagacctagaggctcagcaggtggaaaatactaagcaggagctcgttgaaggtaccttcggactcgggttaaaagcatatacaatgcgaagagcatgatcgtgacgaaggctggtgttgctccgaagctacgagcaagggagcttcggctaagtggcggaaaaaggaaccgacctaaaggggaaaaggctatttagtccttgttggtttatccatgagtcaatagtaaatataaagggcatgaatgtaaatttacacaggctgcgccctatatctataaatagatgaacagtaccttcgttctgttcacgctgacttgtactcaaaaaaaaaaaaaaaaaagcggcc

SEQ ID NO: 62405 - DNA, 152 bp, Zea mays
  Clone ID: MRT4577_156914C.1
gaaacgttttttatgaatcttattaggccaacccaccactcttgaaaagaaacttggcttacaggcgccaaactttcgaagcccaatagaaagttgctacaaacaactaaagttacagacttacaatttaatccctgtgacagagtaatacg

SEQ ID NO: 62406 - DNA, 224 bp, Zea mays
  Clone ID: MRT4577_156915C.1
gaatcagacagttctgagatgcaagtcacggagcatagtacaaactcagcacagaagcagaactagacatgtgatccagacagccaagatctgagatctgacggtagatatctgatgaaatcattttacgcattccttctcagtaatagctgacaaatctgatgagaacgatctcaactcgagagtttcaattatgctattactccgtccaaaatccgtctaac

SEQ ID NO: 62407 - DNA, 1989 bp, Zea mays
  Clone ID: MRT4577_156916C.1
atggcgagagttcgttccactactagggtgacctgtgacggagaagaggctgaaaccacagagactgctccgatttctgaagtgatgagacaatcgggattggttgtgatagagggggctactgacgaagatgcacctgctgccgaagctgaacaggctgacatcgaagaagatgatgctgatgaagaagaagaagattacagcactctcatgccatccaaacccagtcacttggactttggaaaatctaccatttctaaggctgatatgcctatgatggtgaagctaggatacttcggagaagctgagaagaaactgatacgagaagaaaccactcctacaccgaaaaaagatgaggtgacaaaggccagacaagatggtcttcatgagaattttggttgttacaactttgcctaccgcaaagatatgaagactccggtggttagttatcgcaccaagtggccaactggttggaagaatgagtggttttatgttaaagtcgatgagaagaagagggagaagctgaagatgttggtactgagcccgccgagtttgagctacgggttgactaggccgttgtgccgcatggtgttggggtcaccatgccgagaagctgtgtcagaattcagggtggtagccgagcaaatcgagactagagatctagtccaagaatatctggcctataaggtattcccaacgctaagtgaatggaacatgccgaagctaaaggggacaaaggagaagaatgaacttgtgcgactaccttataagttcaaattcgagaaacagttcaaagggccatgtcaagaatgccttcgcacccaaccgaagcgaaggttgaatcgggtgatggatgccctaaactttgaatatcctgattatgagcaattgaacaagggtgccgaagggcaaaaaagaaaaaagattgttagtgttctgagcagacaagttgctagaatggtgaaagaagatgaagaaattctgaagaggagaaaattgagccctgagccgaaggtagctgctccgaagaagaggaaatctgcggctccgaagccaaaaacaactaaaatagaggaagatgctccttcaacaccttctactaccgacgtggaagaaattctaaaggtaatgactaaatccttgcctatcaagctaagtccactggggccacatctgacgaagcttttacagaagaaggaggagttttcggcagccaagaagtctgatgggccaaaaaggcggaggattattactgtgattgaagctattgaagaaacaccaccgccggcctcggcgttaaaaacaccagctggtgaagatgctacagctaccgaaggtacccccgccgaagcagcaaatgtcaaagctgatacggccgaagccacgaatctggagagcatgttttttgatattgataaaatgcttttgaatatggccgtggaagaagctgctacagctgctgaagggaccctggccacagtgcctagaaaagggaaggagatcgccgaagatacttcggaagaaaaggacttcaattttcaaaacataataggtcaaaagttatctaaggctgaaaaagaggagctaagagattatgcttcatgcggctatcaaccaggagcgttgctcttcggcggtattgacgaccaaatcttaggatgcctccgagaccgaactggagcgaagagtatgctattaagtaaagccttgaggatgcaacaggaccttgaagacaaaaaacatgaggttataattgaaggcttagagagcaaaataagagatcacgaagctgctcttgagaagaaggattttgaacttcaatcaatggagggcttactggcgaaagcccaagctaaaattgccagattgaatagtgaactccttgcaaagacagaaagcttcgaacaagaaaaacagaaatttaatgcgaagttcgaggctgaagtcgaaaaaagctcaaatttacagaagacattgaaggagctttag

SEQ ID NO: 62408 - DNA, 197 bp, Zea mays
  Clone ID: MRT4577_156917C.1
ggatcggcgacggcgaaggtgaagatctggacaatggcggcggcggcggcggcggccattacaagcacgttggctacaagaacattgatgtcgaggggaacctgaatgcctctcagtgcggcggggagtgccgtcggcggtgctccatgacgcaccactattatccgtgcctcttcttctttatcaagtgctgctcc

SEQ ID NO: 62409 - DNA, 513 bp, Zea mays
  unsure (1)..(513): unsure at all n locations
  Clone ID: MRT4577_156918C.1
ccgggncgacccagcgnccgcccacgcgtccgcccacgcgnccgccgggcgcgcggcggccggcggcgagcccncacccaaccgagcaagccgaggaggaagcgagcgcgcgaaagnaccaggaggaggcacgggnacccaggggcgcgcgancnccacggngggcaagagganccggggcacggggcaggccagggagcgcgcgcgganccaccagccagggcggccaccgcgacgaggaacaggnnncaaggcancgnacaancangaagagnggngagaaagagccaagganccagagagangngnnngnngcncccagngcagcagncannggggaagnngagaaaggncanggancgncaagcggggacgganccananngagaggngangncaacagcaancaaannggancnggnaccaananacaagacaanncccnnngacaggnnncaaaagccaacacnnagcgggaaggnccncccaaccaaaannggaagcaacgggaca

SEQ ID NO: 62410 - DNA, 298 bp, Zea mays
  Clone ID: MRT4577_156919C.1
ggaacctatccaggactgcttgggccatagtacactgccaggaaagagcacgttcaataccatatcgagcgaacgcctcaccacagagaaggctaccgtaatccaataccccactgcacaagggtattgatgagcctacaacactgagatggaacaaagccgttagcacaaatgatagaagctggcacatggtgctcccctctaacgagaagaatgaccgaaaaaaccggatgaaagtcaccaccacagaggggaccactaccacgaggacgcgttttgtgggcacctatagccactc

SEQ ID NO: 62411 - DNA, 2124 bp, Zea mays
  Clone ID: MRT4577_15691C.1
atcgaggatcgagatgcctactcatcaagatatattagtgaatatggtggtacctacaatatgaaccctaagatatcagattttggtatcgcaagagggaaccaacaggaagcaaacactaaccgagttgctgggacgtatggctacatgtttcctgaatatgcaatcaatggacctttttcagtcatgtatgatacatatggccttggtgttattgtgttggagatcatatgtggtctgcaaatcacttcgactcactccacgagtttccctggcctattagcttatacatggagcctatggaatggtggcagggcaatggatttggttgactcatacctactagaaagttgctcgacaagtgaagctctgaggtgtatacacttaggactcttgtctgtacaagacagtccacacagtagaccatccttgtcattagagattttgctggagactggtacgagtcgtcctagtccttggccaaattttgttttggatggtatgcgttctgcaactggtcactaaaacctccatggccacatctacgtccacgacaagaatttatctccctcgttatttggttgctgcaagcagtcagttgtctgccagtttgtatgaggtgatccaacaaattgtttcagtactcctgctatcacagtgaagggccacaattcctctgcaatggtcatcttgctgttgatctgaggttgtcgaaaagtacaagatattggtacgcatgggttcggatcaaggggttccaattctatggccaagccagtggaatattcaccaggtttgctatggttctatgcacacttgaggaagcttattcaccattcatagtcaacactaccagcggcttgggggcaagccgcatttcaagcggtggggattgtcagcatactgtcatgtggggcctcgacagattggcaatgggtcacctccagctacaaaagagggagctgtacaggaaagcaggcatcgaagaatcattttgagaacctagactctatcttccaactactgctcatcttcttcctcccttctctcatgtactcggattctctcccttctagaacacgacagctattgtgcttctccaatctacttctcttgctgctaccctccctaaactcctctctgattgtaccagattatatgcttagcgttttcatgctattgagttgagtttgtcagattagtgttgttaacaagtggtatcagaggatcgattctcggaaccctagcaccatggatttctctaccgagatctctcagtccactcagttcctcgtccaagagatccgtaagatgttcgacgcggccgaggctcggcttgactgccgcttcgccagactgatgcagtcgaaccgtgacgcggtgagtccactgcctcctcttctcgtcgtcgacgagccgaaccgcgtcgtggcgagctcgtcgccgcttcctcccgtcgtctacgagccgtaccgcgacgaggccatggcaggagccgacgccagggcgcactacggcgggtacctgccctgtgagagaggaggcctcgccacggcgtggcaaccgggcgacctcttcggtagaggcgtctactccgacgagcagcgcttcgaggagcccatcagcgccgacaactgtggggccgatgcaaggcgagaagtcgcgctcgcggcgcgtgtgcttgccgccgacacgtgcgcagccgggatcctcgacggcgctgcgccctttgccgccaccagcgagaagcagatggcacctgtggcatcaccttcgccgttctcatttctgaccacaacatcagcggctcgagttgcagtcatggagaccaccaccagcaactcgccacccaagtgttcggcaaaatgcttgaacgtctcatcgacgcccaatctggcgttgggcgacccagaggagccggagaatatcgtcgcgtcgaagcccgtcgtggacaaaccggtgactagcgccaacaccaagacgttccagcacgagatcaaggacctggcagtcaacgtctatggcaagtggctgaggctcgggatctactctgaggtcaggttccagacctgcacaagggccattccgggtcccttagtcacgaggagcaggacgccaagacct

SEQ ID NO: 62412 - DNA, 393 bp, Zea mays
  Clone ID: MRT4577_156920C.1
gctacatgtccagatacaggaggtggtgcaggtgcagctcacgaggttcacgtgcggcggcgtcattgtggggttcaccgcgaaccatgccgtccccgacggtcatgccaccagcagcttactcgtcccatggcgccgcaccatgcgcggtttcccgatcggcctgccaccgccgtctctacaccaccacccagggctcttcccgccccgagacccgtcgttctttgagttctagcaccgccgtgtgtagtaccgtccgacgccgactgcatcatcatcatcgacatcccacctcgtcacagcccacggtcagacaacccaccgccactacatcttgatccactaagcgcacttcaccggggaattcatcaccgcgctcctagccaaggcatc

SEQ ID NO: 62413 - DNA, 761 bp, Zea mays
  unsure (1)..(761): unsure at all n locations
  Clone ID: MRT4577_156921C.1
aggtatcttcctttgtgtcatttgctgctgacacacatcagaggtgagtgaggtgagaggcatccctccctggtccctgcccactgcccattgccactggcaacttcactcgactgcttgtgcgagaagaaaggctgcgcgcttcctttccttggcctcaccctcgcccttggcttgcctgcttccatgtttgaacacacaccagccagcagctcctagctagagagagagagagagagcccttccctagcaatggaggcggttcccctgctgctcctcctgctcctcctcctctcctcccctctcgcgccggcgccggccaacggcctcctctcacccaagggcgtaaactacgaagtgcaagctctcatgacgatcaagaactacctcaaggatccccatggcgtgctcaagaactgggaccaggactcggtggatccttgcagctggaccatggtcacctgctcgcaggaaaacctcgtcactggcctggaagccccaagccagaacctctctggcctgctctccccgagcataggcaatctgaccaatctcgagatagtgctgctgcagaacaacaacatcaatggccgaatcccggcagagattggcaggctcacgaagcttaggacgcttgatctctccagcaaccacttctctggcgaatccccggctccgtgagccgcctcagagacctccagtacttgaggctcaacaacaacaccctgtncggcgcatttcccttcggcgtcggctaatct

SEQ ID NO: 62414 - DNA, 489 bp, Zea mays
  unsure (1)..(489): unsure at all n locations
  Clone ID: MRT4577_156922C.1
taggggcgatggggtcatcgagncngccgggctcgacggctgccgacaaaaccagaccatcaaacaagtgccagcgccctctcgcagtcgccgcaatggagagcaccttcatcatgatcaagcctgacggcgtccagaggggcctcattggtgagatcatcagccgttttgagaagaagggcttctacctcaaggccttgaagcttgtgaacgtgcacaacgatgccgcgtggaggcataggactgtgttcatccagttctcgatctaggagatgggcatcatcatgaaggacttcgaccagccagggcacctcctgccgacagtcctggtcctctatcctaccaactacatggttatccaaggcgagtgtgatgccgtcatgcgtgggaagaaggcatcttgtcctatcaccgtgaagaagacagggtaggtcctccgcggttgtgatctacgtcgagttgatgactcctgtggagtgcaccttgctg

SEQ ID NO: 62415 - DNA, 351 bp, Zea mays
  Clone ID: MRT4577_156923C.1
tttaccgccttcttctttcttcaacacgaggaattggaattccccgaggaataccacactcattctctttggcatcaggataggcctaacaagaaaacaaataataccaatacatatgtcaacatttttgcctccgtacctctcgaaaatgaggaattggaattccccgaggaattcccatctcactcccttgggctacatgataggcctaataagaaaacagacgattccaatgcatatatggacatggtgcgccatgccacttctcgaaaatgtggaattgcgaattttcccaaggggatcccccagagtatacctgctggcctgcaagcctgtctatcccgttagcga

SEQ ID NO: 62416 - DNA, 424 bp, Zea mays
  Clone ID: MRT4577_156924C.1
ttccaagcacactgcgagctactagggggaagggaaattaaattacactgctacggtacgagccgggggtgtctatgactaattaagcatcgatccatgacatgagaattcgtcgatacacgccacagcagcaagtagaaggggaagaagaagaaggcaagcgaaaggggaaggaggagggattgagtcttagcagcagctgcatcattacttgtcgtcgtcgatccgccgatggcgatgaagcagcaagcgttggttccccttccatgtccggatcgaccgagtccggtacggcgacggattcgatcgatcagtacggggcgacgcggccggcgccgcctcctgggttggcccagccgtaggcgtcaagcgggagagggaggcccgtgatgaggccgtgggggagcctgtccgcgagcgggtg

SEQ ID NO: 62417 - DNA, 369 bp, Zea mays
  Clone ID: MRT4577_156925C.1
aaacagtctcctgccacgtcggcgactcaggcacaccgccttcaatccaccgtcagtacatgcggtccagttcatttcagtggttcaatgaggcggacatgttcatcagcgtgcaacggtctctaatccagggacaatcctcgtggattaccttaactttggcatccgtcccgcgagtgacactcgagtggacaaacaatgtaacaaactagtcatcgatggctccctttaatttcatccatggcattcctggtttgtaaccaaatgttccaatttcatctccgacgccaatgttaagctggaatgcaaggaatttggtcacggcaagctcaaacgcttcaacgaacgggttaccgaacggaaagggac

SEQ ID NO: 62418 - DNA, 848 bp, Zea mays
  Clone ID: MRT4577_156926C.1
ccggccgggaaggcctgtagtggccgcgacagtttttcattccagcgacgaaccgtttttcgcaaatcgcatcatggaaaaggtcaagaagtcaaaggtcgcccattgggccacaagctcgctgtcgagagcgagcctggtctcaccacggcccagctcatgctgtacaaccacgatctgaagcctgttgaacctgagcgccgacaatggggcgcatggaatttcgtcggtttttgggttgccgactccttcaacatcaacacatggatgatttcttccgccaacattgtcgacgggctttcctggtggcaatcatggatttgcgtttggctcggatactcaattgcggcttgctttgtctgcatgacaggtcgtatcggcgcgacatatcacatttcgtttcccgttgttaatcgcgcgtctttcggcatttggggtgcgctatggcctgtgttcaatcgcgcagctatggccagtatctggtatggtgtgcaaggatggattggcggaacatgtgtgcgcctgatgatccgagctatctggaacaattggcgaaatgccgacactcctggaggaggaggcattgccaatggcatccccaattctggcaccaacactgtcgcattcgtctctttcttccttttctgggccggatccctcccgttcatctatccgccggttcacaagattcgccatttgttcaccgtcaaggccttctttgcacccactgcaggaattgcctttttcatctgggcgattgtacgagcaaagggactgggtcctatcgttaagcaacctaatgaagccaaaggatctgagctgggctggctcatggtcaaaggcatcat

SEQ ID NO: 62419 - DNA, 413 bp, Zea mays
  unsure (1)..(413): unsure at all n locations
  Clone ID: MRT4577_156927C.1
cagaatgccgggctggggtanaagtggtggtgggaactggggtagaggccctattggtaattgaggaacaacagaatgggtccggcagttggccgtggaatcgggaatggcatggttgcgccgccacccccgatgctgcctcanggaggcatgctggggcaggggtttgatcctggttatggcgccatgggaacgatgggtggtgggtttggtaacttccctgttggaccaagtgctgggccgtttcctgggatgatgcagccatttcctccggttgttgcaccacacataaacccggccttctttggtcgtggtgccaatggggctggtggggtggggatgtggcctgattccggcatgggggcttggagtgtggaagaacaatcaaatttatgggatgatgcagtgtctga

SEQ ID NO: 62420 - DNA, 135 bp, Zea mays
  unsure (1)..(135): unsure at all n locations
  Clone ID: MRT4577_156928C.1
atgccgcagatgacatctacatgcggaatggactggcactattattggcctcaangtaccgtccatgagggacgcatctaccagctgaagttgttctgcgacaaggactaccctgagaagcaccatcagttcgat

SEQ ID NO: 62421 - DNA, 277 bp, Zea mays
  unsure (1)..(277): unsure at all n locations
  Clone ID: MRT4577_156929C.1
gggtaagggttgatattgaattaatatgtactaagaaagccttcccaacaaatttatttggaaataaaagataggccgcagcatagcataagaaccaccctccctggtctgttttgttctgggggggggccctcccccccacgtctattgctgttttttttttaacccangggcacgaaccagaaggcagnnggttgaaagctccctcgccttggcgccagcaaaaaaaacttctaaaacatgcctacgggtgaaccccattccatacagccggtgg

SEQ ID NO: 62422 - DNA, 250 bp, Zea mays
  Clone ID: MRT4577_15692C.1
gaaataaatgaacctgaaggggctcggaattccactgccgaagccatgacttcatttcgcaggcagaggaacgagtttcctacggagttaatgaccaaaaaaaattccatctgtaactgtagtctttaatcaatcccctacccccacgacgagaattactcctccacaagcgtccaactccaacacgacatcaaatttcagtcttcccagattcccctccgtcacagaaccactaagaaggaaccgcttg

SEQ ID NO: 62423 - DNA, 140 bp, Zea mays
  Clone ID: MRT4577_156930C.1
atattcctcaatgctggctctttctgcaccgtctgctgacggccacgttctggtgggctatgccacgctcgcgtcgatgctcttgcgcgtcaacagtctcgtccatggctactcctgcatccgcttctagattctggatg

SEQ ID NO: 62424 - DNA, 707 bp, Zea mays
  unsure (1)..(707): unsure at all n locations
  Clone ID: MRT4577_156931C.1
agaaagagtccgtaaacaactcccggccatggcgaccgcagaccgggtcgccgccaccttcctctcctctttccccactcaccatccccgccccttttcctccgtttccctcgtgacaaaccctgtcctacccgtctcccttcgggccgctgtcacaggtggcccacggctcgcctcccgtctccgggtccaccgcgtcggcgccgccgtcgcccagcttcccaccacgaatccggaggtagcttctggggagaagaagatcagatggtcatcaagggctgtgcggtcttttgcgatggcagagctggaggcccggaagatgaggtaccctaccacaggcaccgaggggctcctcatgggcattcttgttgaaggaactagtggcgcagcaaaacttttgcgtgctaatggaaccacacttctcaaagtgcatgaggaggcagcgaatgttcttgggaaatcagaaatgttttactttagtcccatgcggtcttttgcgatggcagagctggaggcccggaagatgaggtaccctaccacaggcaccgaggggctcctcatgggcattcttgttgaaggaactagtggcgcagcaaaacttttgcgtgctaatggaaccacaacgagcccttgattgggctgtcaatgaaaaattgaaatcaggtgaggatggagaaagtaccgncaatcatttgctactggggata

SEQ ID NO: 62425 - DNA, 745 bp, Zea mays
  Clone ID: MRT4577_156932C.1
ccggccgggctcctcctcctcccccctttgctgcacttctactcggcccctttcactgcccgtgaattgctgagcttccgctccttcgtgctttgctcctctctcctgcagcttcaacccccaactctctctttcttactcgcaccaaaccagcgacatcgcttttttgtccacctttccctgtcgccgccgccgccatgtcctactacaacgacccttcctcctcctggcccgctcccgggcgccagccgtcgtgggagcagccgcagcccccctcccgctctggagcgagttcgactgtcaaccgcgaagaggccaatgccttcgccaaccagttcgaggaggtggaacgtgcttcggagaatcttaacaaaagtggcattgggaaaggctttggtcctcccccaatgtacaacaaccgccgcgagtcgatgcccccaatgggcgcccctggtcctgtccctgattacaaccaaccgcgcatgggcggcccacaacgccaccattccgtgagcgagtacgacggagcccgcccccactcggcatccaacgtgcagggctactatcagaaccagcgcttcgccccccgcccaaacgatgccgaccaaatgcagcaggcaaagcgccgcatggcggcccagcgcgagcgtgagctacgtaactatcatcaagagcagcaatatcacaggaatggtttctgggtccaaatccgaccgctcgatgagtcccaatgcgaatgcgatga

SEQ ID NO: 62426 - DNA, 198 bp, Zea mays
  Clone ID: MRT4577_156933C.1
gtgaagatccccagttggacataactctttttattacgtgcaggcaatcaccacaaagtgtgtggggtttggctgcagtgcacgctattactccatggctgatggacagagctacgtcgagaagcatctttttggatatccaaaaagagctatcctttgacgaccggttcaaatccgactcaacccagatgacttaat

SEQ ID NO: 62427 - DNA, 867 bp, Zea mays
  Clone ID: MRT4577_156934C.1
actcagccagcccgctctatctctttcctctatccaagccagaaaggtagaaaccccccggaaacaatttccggccatggcgaccgcagcccaccaggttgccgccaccttcctctcgtacctttccccctccactcaccacctcgccccttcctccgtctccctcgggacagcctctgtcctacccgtctccccaccacgcatccagaggtagtttctggggagaagaagatcagatggtcatcaagggctgtgcggtcttttgcgatggcagagctggaggcccggaagatgaggtaccctacgacaggcactgaggggctcctcatgggcattcttgttgaaggaactagtggtgcagcaaaacttttgcgggctaatggaatcacacttctcaaagtgcgtgaggaggcagcgaatgtgcttgggaaatcagaaatgttttactttagtcccatgcatccaccattgacagaagctgcacagcgagcccttgattgggctgtcaatgaaaaattgaaatcaggtgaggatggagaagtaaatgccaatcatttgctactggggatatggtcagatgacgagtcagctggtcataaaatcctgtattcgctcggatttgacgatgtgaaagccagtttactggccaaaacgactgacgaggaggctgcaatgagtcctagatagcaaagggagcacctaatctgttattcaacttacaagagatgtgttagggtcaaatacgatatttgtactctcgcgattgccatgccggtgcctgtaaaaacgttgcggtttgtttgccacggtgaatgcttgtgttcctttgtcaaaaaaaaaaaaaagggcggccgccaccgcggtgga

SEQ ID NO: 62428 - DNA, 1154 bp, Zea mays
  Clone ID: MRT4577_156935C.1
gggaccctcgaggccggccgggatttttcgatcaaacatgccctattgccctgtatctatcctctgtcgaagccggagaccccagaaagagtccgtaaacaattcccctcccggccatggcgaccgcagcccaccgggtcgccgccaccttcctctcctctttccccactcaccatcccggccccttttcctccgtttccctcgggacaaaccctgtcctatccgtctcccttcgggccgctgttacaggtggcccacggctcgcctcccgtctccgggtccgccgcgtcggcgccgccgtcgcccagctccccaccacgaatccggaggtagcttctggggagaagaagatcagatggtcatcaagggctgtgcggtcttttgcgatggcagagctggaggcccggaagatgaggtaccctaccacaggcaccgaggggctcctcatgggcattcttgttgaaggaactagtggtgcagcaaaacttttgcgtgctaatggaatcacacttctcaaagtgcgtgaggaggcagcgaatgtgcttgggaaatcagaaatgttttactttagtcccatgcatccaccattgacagaagctgcacagcgagcccttgattgggctgtcaatgaaaaattgaaatcaggtgaggatggagaagtaaatgccaatcatttgctactggggatatggtcagatgacgagtcagctggtcataaaatcctgtattcgctcggatttgacgatgtgaaagccagtttactggccaaaacggctgacgaggaggctgcaatgagtcctagatagcaaagggagcacctaatctgttattcaacttacaagagatgtgttagggtcaaatacgatatttgtactctcgcgattgccatgccggtgcctgtaaaaacgttgcggtttgtttgccacggtgaatgcttgtgttcctttgtcagctggatttgtcatcagctcataggaaaagaaaagaacttgtagggtccagtgggcctgacgagcccttcaattttttttgttcactttgcagcctgaatcctaacaggcgagaatttcatctgaactgtgatattacacagaactcttggtttctagagactaattttagtccctccattttaaaaaaaattggttacaaga

SEQ ID NO: 62429 - DNA, 991 bp, Zea mays
  Clone ID: MRT4577_156936C.1
ccgtaaacaactcccggcctggcgaccgcagaccgggtcgccgccaccttcctctcctctttccccactcaccatccccaccccttttcctccgtttccctcgtgacaaaccctgtcctacccgtctccgggtccaccgcgtcggcgccgccgtcgcccagcttcccaccacgaatccggaggtagcttctggggagaagaagatcagatggtcatcaagggctgtgcggtcttttgcgatggcagagctggaggcccggaagatgaggtaccctaccacaggcaccgaggggctcctcatgggcattcttgttgaaggaactagtggcgcagcaaaacttttgcgtgctaatggaaccacacttctcaaagtgcgtgaggaggcagcgaatgttcttgggaaatcagaaatgttttactttagtcccatgcatccaccattgacagaagctgcacaacgagcccttgattgggctgtcaatgaaaaattgaaatcaggtgaggatggagaagtaaccgccaatcatttgctactggggatatggtcagataaagagtcggctggtcataaaatcctgtattcgcttggatttgacgatgagaaagccagtttactggccaaaacggctggtgaagaggctgcaatgagtcctagagagcaaggagagcacctaatttattcgtcaacttaagttggtattgtgcactagctgtatgcacttcttggtgcctcgagacgttgacctgaagaggctgcctctacaaactttagaacttattatcgagatgtgttaggtcagatacgatatttgtactctcacgcttgccgaggcctgtgaaaacgttgcgctttgtttgtcacggtgaatgcttgtgttcctttatcagctggatttgggaactgctcgtagaaaacaagtcaacaacaacaaaacttgtagggtccagtgggcctgacgagtccttaaaaaaatttgttcacttgcagcct

SEQ ID NO: 62430 - DNA, 1295 bp, Zea mays
  Clone ID: MRT4577_156937C.1
cctcgaggccttccgggaaaaaaaaaaaaaaaaaaaaaaaaaaaaaaaaaaaaaaaaaaaaaaaaaaaaaaaaaaaaaaggtactcgaggccggccggggtccacactactcagccagcccgctctatctctttcctctatcgaagccggagaccccagaaagagtccgtaaacaactcccggccatggcgaccgcagaccgggtcgccgccaccttcctctcctctttccccactcaccatccccgccccttttcctccgtttccctcgtgacaaaccctgtcctacccgtctcccttcgggccgctgtcacaggtggcccacggctcgcctcccgtctccgggtccaccgcgtcggcgccgccgtcgcccagcttcccaccacgaatccggaggtagcttctggggagaagaagatcagatggtcatcaagggctgtgcggtcttttgcgatggcagagctggaggcccggaagatgaggtaccctaccacaggcaccgaggggctcctcatgggcattcttgttgaaggaactagtggcgcagcaaaacttttgcgtgctaatggaaccacacttctcaaagtgcgtgaggaggcagcgaatgttcttgggaaatcagaaatgttttactttagtcccatgcatccaccattgacagaagctgcacaacgagcccttgattgggctgtcaatgaaaaattgaaatcaggtgaggatggagaagtaaccgccaatcatttgctactggggatatggtcagataaagagtcggctggtcataaaatcctgtattcgcttggatttgacgatgagaaagccagtttactggccaaaacggctggtgaagaggctgcaatgagtcttagagagcaaggagagcacctaatttattcgtcaacttaagttggtattgtgcactagcttttatgcacttcttggtgcctcgagacgttgacctggagaggctgcctctacaaactttagaacttattatggagatatgctaggtcagatacgatatttgtactctcacgattgccgatgcctgtgaaaacgttgcgctttgtttgtcacggtgaatgcttgtgttcctttatcagctggatttgtgatcagctcatagaaaaagaaaaaaaacttgtagggtccagtgggcctgacgagcccttcaaattttttgttcaatttgcagcctgaatcctaacaggcgagaatttcatgtgaactgtgatattacacagaactcttagtttctagagactaattttagtccttccattttatttcaaaaaa

SEQ ID NO: 62431 - DNA, 373 bp, Zea mays
  Clone ID: MRT4577_156938C.1
agtttctgatgtttaccgacctatcatacgcagacaagaaagggtttttctaatcgactactgccggacaaacaatagacccacaagggcctgattacgcccattatacaggcacaaacctataatggtcagccagcaccatcagacatgctgactgaattatggagaaatcacgcgccgcatcggctgaggtcacccaatgtttcagttaaccggcagaggcgctaatgccttagcgctgtgcgtcacggaatacatgacatggcatcatgccctagtggtctgcttggcgggcttgcccataccccgttcttgagaggaagaagaactggccgacgatcatgaagttcaccagaagctgcaccgtggacct

SEQ ID NO: 62432 - DNA, 2460 bp, Zea mays
  unsure (1)..(2460): unsure at all n locations
  Clone ID: MRT4577_156939C.1
ttgaanctgatgagctacttgctcgtgttcttgtgtcaggctttatagatggtgaaatgaaggtatatcgccctgatgttgcccgtgttggagttgattcacagtctcgtgctgcacaagttgtttcagttgaaaggaggacagatcagcttttactgatgggtcgtgaagacgtaattgggtggctacatcagctgaaaggccgtgagcagcaggtatcacaggagatttcctatctttaaagggaactccttatggttgcagcggctggtagatccccgggttcagtaggtgtagatcctgatgttcttgctctaagggatcgtaaccgtgatattcttttgcttaaacttgctgcgtcagttgaaagcagggataaagtattggtggagaggtcacggctgctgatattagaaagcaggttcggtcttggcagcaacttcaatatggaagatgctagggctagtctggaagccagttttgccaatgaagctgagattgtttttacaactgtgtcaagtagcgggcgtaagttattttcccgcctgactcatggctttgatatggttgttattgatgaggctgctcaggctagcgaagtaggagtccttcctccattggctcttggtgcagctagatgtgtcctggttggtgatccacaacaactccctgctactgttattagcaaagcagctggaactttgctttacagtaggagtctattcgagaggtttcagcaggctggttgtcctaccattttattgtcagtgcaatacaggatgcatccccagatccgtgaatttccatcaaaatacttctatcaaggtcgccttacagatagtgagagtgttgttaaattacctgatgaagcctattacagagatgcacttatggcaccttatatcttttacgacatgtcacatggccgtgagtctcataggggtgggtcatcttcatatcagaatattcatgaagcgcagtttgcattgcgtttatatgagcaccttcagaagtttctgaaagctaatggtgccaagaaggtttctgttggtataatcacaccatataagttgcagttgaaatgccttcagcgggaattcaaggatgttatgaatactgaggaagggaaggatatctacataaatacagttgatgcttttcaaggccaggagcgtgatatcattattatgtcttgtgtccgtgcttcaaaccatggtgtaggttttgtcgctgatatacgtcgtatgaatgtagctctaactcgagcaaggagagctctatgggttgttggtaatgctaatgctctcatgcagtctgaggattgggcatcactaatagcggatgcaaaggccaggaaatgttttatggacctggatagcattcccaaggacttcttacccatgagggttccatccaatactccaggtaggaattcttccaacaacatccggaggactggtggtggacctagaccaagacgcttggacatgttctcagaaccaagggctggtatgaacatgaggcctgatgaatatgagcgtctgaattctgttccaagaaatggtagctacaggaatttggatgattttgtccaccctggagatcgctccagggataatatgcagtttggacatcctaggaggccaaatgcttctaatggtaggagagaagtctaagtagtgttgctatcaataactctggtacagcatggaacattgatgaagagctctgaacagtccaagattcagcaaggtgcagatgcatgttctgaagatcagttgcttgtgcattagattccttgcaacctttggtgggggtggtcacaataaagcattgctgtcagcggaggatgtgcgaatctaccatgttgtgacctggatcgagacacattcatgataggtgattaaaggctcatgatgtcaggtggaagaaaggctgctgtagccctcagtgttatgaactttgcaggattttcttttttagatcgaagctgtctgctgtgttttgacgttgcagtccttgctttagccagctccatctttccgtatatatgtacatgcatgggcatttccattttgctgctgcgatcgttgcatgccaggagaaagctcactggttctagatgaggataggtctccagcattgttgcctgattgttgctgcgatcgttgcatgcttgatatgtctggtaggatcagtatgctaacataggcaacgcttctgtatcatattcatatgacaaattccttctgtatacagggtcgagatctagagagaaaaaaagttcattatttcattcagctcatgttgttcccctttgttcttgttaattttttctgtgcatattgttgtaatatgttaccatgtttgtagcactgatatttctgtttatcagtggcatgatactctgcttgtatgttgatctacggatagttctggcactttgcagagtgttgtctt

SEQ ID NO: 62433 - DNA, 684 bp, Zea mays
  Clone ID: MRT4577_15693C.1
cctcgaagccggccgggtagctagggccactaattaagacccatgcatggctgttgaactgcaagctaagtagtaaacacttgttgtgttgatgtgctcacatgtcgtctttttttttgggtgaaggatggatgcatgtatcagatcacttgttgtttaattaatgccatttcagtctttgtccaataaaaaaaaaaaaaaaaaaaaaaaaaaaaaaaaaaaaaaaaaaaaaaaaaaaaaaaaaaaaaaaaaaaaaaaaaaaaaaaaaaaaaaaaaaaaaaaaaaaaaaaaaaaaaaaaaaaaaaaaaaaaaaaaaaaaaaaattttttttttgagccccccccgtttgcccctttttttttaaaagggaaaatttttggggcccccttttttaaaaaaaaaagggggaatttccccccccccccccccccattttttcccccccccccgaaaaaaaaaaaaaaaaaaggcccccccccaaaagggcaaaaaaaaacccccttttggggggggcccccccccccccgggggccccaaaaggggcccccgggggaaaaatatcccccccccaaaaaaaaacctcccccccaaaaaaaaagaaaaagccccccgggggttttgaaaaaatccccccccccggggaaaaaccccaaaaaaacctgaaaaaaattttggacccccccg

SEQ ID NO: 62434 - DNA, 254 bp, Zea mays
  unsure (1)..(254): unsure at all n locations
  Clone ID: MRT4577_156940C.1
gntcagctgacgtctcttccccccaggatccatcgatcactcggacaggataagacatgtgttagatattagatctattttaggctgataagatgactttaatcattaaataaaatgtgggggagggcaagcagttcttccagcctggtttgaccttcctgtgttggaccataggcaaaaaccttgctgtttagatgctgctttgttacggcctgatccctaacatcattcaaagcaggtctaaagggcaagga

SEQ ID NO: 62435 - DNA, 118 bp, Zea mays
  Clone ID: MRT4577_156941C.1
gggcatgcaggtggtctgtttgcccggggtcaaggtagaccgttacatgcatgccgcccctatcagctctactactccagaagcttgagtccattgtgccggatgtatcatgcaagga

SEQ ID NO: 62436 - DNA, 632 bp, Zea mays
  unsure (1)..(632): unsure at all n locations
  Clone ID: MRT4577_156942C.1
aattcggcacgaggttcccttccaaaaaaaaaaatctccatcggcctggccagccacccacatacagtaacagtagccatccccaagtccacctctagtccctcctctacccgtctctctttttctcaagagctacacgagagagagagagagagaaaaggaggggagagaggcacacaacgctgctgtgctgcacacacaaacaagtagcagtagtggaagaagcgaagggatcggaggaggagaggagaggaagtgtggccggtgacagacagaagagaagaagaagaacaagaagagatgatggtggtggtgaaaagagacggggatgatgcagcacaggcggtggcggcttcagtttgagcagctgcgtgcagaagctgagccaagaaagcaagcagcagctgcaaccgcttccagtcccccccctgactctcccagccagccgccagcaggctcagtcgcccaagcagcaagcaccaaagcgatcgatcgagctgctctccgtccgtgctggtccccctcgcgcgcctctgcactcccccctctctctctctctttctctgatccatccacccaattcgccagctccgccgccaccctanctagctagcagctagagtacanaagcg

SEQ ID NO: 62437 - DNA, 294 bp, Zea mays
  Clone ID: MRT4577_156943C.1
gccagtccagaggcaggtggtgaagcgtgaggagctcttcatcgtcagcaagctgtggtgcacgtaccatgagaaggccctgggccaagcccgaggacccttctctcctggaggatcccaggatcaaggcgatcgcagccaagcacaatagaactacagcccaggtcctgatccggttccccatgcagaggaacttggtggtgatccccaagtctgtgacaccagaacgcattgctgagaactttaaggtctttgactttgaactgagcagccaggatatgaccaccttactca

SEQ ID NO: 62438 - DNA, 328 bp, Zea mays
  Clone ID: MRT4577_156945C.1
gggcgtcagcttcagctatccgcgaccgcgacgatgggtctgatcgtggccgtcacggtgccagctccggccggcgtgcgcgtgctcggcaggggcgccgcgcgcgtgacgccgacaccgtggacggttgtcgtgggcccgagacgcttctccgagcggatgtccgtcgagaccaccgacgccaccagcaccatcgacgtgggcggcctagatgaccacgcgctggaggctacgaactccaagacaggtgtggcggtcatgcttggaggtggcgccggtacataggctcttaccgctaaccagactgcagtccaagcccgcggtgcca

SEQ ID NO: 62439 - DNA, 339 bp, Zea mays
  unsure (1)..(339): unsure at all n locations
  Clone ID: MRT4577_156946C.1
ttttttttttttttttttttggcaaaaaggcgaaaagatattatttgatgggactggggagtattgggcaagactatacctatttactttaaatattgaatttgtaaatatttatttttacttaaatactcgatgtattcgtacgtattatggggggttcctatttgttaggggattcggttcaggataacgnaagttcgcacctaattggggtattcgtgcgtgctacataggtgggcgattggctttcattttataaataatgtacgggcagggacagaaagtttgagcaaagaggttttacaatgcattaaaaagggcgtttgggttttaagtggg

SEQ ID NO: 62440 - DNA, 639 bp, Zea mays
  Clone ID: MRT4577_156947C.1
gttgtaacgagagcccattgctacaggaggtgacgagggaggaggcggagtatgaggaggacctcatgatagtggcggacgagatgacaagaggctcgtcgtcgtcgccaccacaaaattagctttgtgtagattgattgtaggtgagaaagacaaggagactatttagtttctcatcattcatctatctcttagctagctacttcatcattgtccatatgaccgattctacgattgaaatgagaggaataggatagattgtcaaagtcactcatcaaatatagtgcaaaacaacaacgatatcctgtcgtggacccaaacaagtaggagtaagccccgctcgaataattacatcacaatgcatgtgcattgtactagtgttccctttatttgaaaccattctcctctcatccttaacaaatgtgattttagggaatatacaacccaattaaatgaggggtcttttgaggggtctatgggggctaagtgaaaaaaatctacatgactctctatatacattgtgccttgattgcatttatgatctacatacttagggttatatgttttatcatgtagtcttttagttgtcttttgtactaaactaatctatatcctgcattatatgaatattacaaacct

SEQ ID NO: 62441 - DNA, 1209 bp, Zea mays
  Clone ID: MRT4577_156948C.1
gccaagatgggatggatggggaagattcatggagccgattacatcgaagattccgctgatggtgatagaggggaaccatgagattgaaccgcagggtcacggtggagaggtgaccttcgcgtcttacttggcacggttcgctgttccatccaaggagtctggatccaacaccaaattctactactccttcaacgccggtggcatccattttatcatgctcggtgcctacatcgactacaaccgcacaggagttcagtactcgtggttggaaaaggatttgcagagggttgatcgacgagtcaccccttgggtcgtggctgcttggcacccaccttggtataacagctattcctcgcactaccaagaattcgagtgcatgaggcaagaaatggaagaacttttatatgaatatcaggttgacattgttttctcaggacatgtacatgcatacgaaaggatgaaccgagtatttaactacacattggacccctgtggcccgatttacatcggcattggagacggcgggaacattgaaaaaattgacatggatcatgctgatgaccctggaaagtgtccctcaccaagtgataaccaccctgaatttggtgggctctgccatctgaacttcacttctggccctgccaagggcaaattctgttgggaccgacagccagaatggagtgcatacagagagagcagttttggtcatgggattctagaggtcctgaattcaacatatgccttatggacatggcaccgtaaccaggacgcatatgcagagaacagtgtgggagaccagatctacattgtacgacagcctgacaagtgccttctgcagccagctagtgcgtcgtctctcaattgatagccccattggaggatgcccttctctagtgagtagtaacagctccggtgggtccattacaaatggccagctctcctacaaaatgtttgtaattatgtgtgtagctttaatgtgaaagagttaggtggtctgagcagtactcatctcctttttaatataatactttagggttgttttactctcggcgggtcgaattttttttgtgtagctttaatctgcacagttgaaggaacatttcataccaccattacttttcttgattttataattgtagagcggcagaatgcaagatgcaccttactgaatattatactgcaaggtttgttgagtctttttttgtgttt

SEQ ID NO: 62442 - DNA, 471 bp, Zea mays
  Clone ID: MRT4577_156949C.1
cccacgcgtccgcccacgcctccgcgcaagcgcaacagaagcatactacgccgctacgcgctgggcggtgccgcacagctatagatagctagcagtgttgcatagaaatggacagcgccagcagcctcgtggacgacaccagcggcagcggcggcggcgcgtgcacggacaagctaagggctttggccgccgccgccgcctccgcctcggggccaccgccggagcgcatgggcagcggagccagcgcggtcgtggacgcggccgagccgggcgccgaggcggactccggctccgccccggcctccgtcgccgccgtcgcggcgggcgtgggcgggaagctgccgtcgtccaggtacaagggcgtggtgccgcagcccaacgggcggtggggcgcgcagatctacgagcgccacctgcgcgtgtggctcggcaccttcgcgggcgaggccgacgcggcgcgcgcctacgacg

SEQ ID NO: 62443 - DNA, 610 bp, Zea mays
  Clone ID: MRT4577_15694C.1
aaaaaacagagtaatcaagcctactaatgcattttggccaatttcatatttttgtaaaaaaaacggcccaaaaatgggaaccgaagccacaattgtatatgaaccgtcaccaaacagaaaaaaaaaatgtttacatcaaatgaaaaaagacccaaaagggaagcctatgaaaaaagcccaaaaaaacgccagtatttcaaactaaaaaggccaataaaagcaaaaaatttttaaaactaaaaaccagagaacagacatcgaaatttccctttaaaaagaaccaacagttccaattacaaaattgaaacatattaatttaaagaaagtggaacccaaaaacaagaaaatgtaagcaaaaagtgaggtaagtaactttaaaaaacaaaaaaggggaataaaaaaagatggaacaaatggaacacagtaaaaaacaaagaacaaccgcaaaaaagaaatcaaaaccaaggggtaaagccataaaaaggtataaaaatatacaaagaaaaaaattaataaaaatcaaaaccaaaaaaaaaaagcacaaatttaaaaaaggcaatttccatacaaagaaaaaaaaaaaaaattttcgaaaaaaataatattgatc

SEQ ID NO: 62444 - DNA, 2539 bp, Zea mays
  Clone ID: MRT4577_156950C.1
cccacgcgtccgcgtcgcaaccacggctgatagtttgtacgttgccgtcacgtttgctccagtttcgccatttattttcttatcatataaaaaaagagaacagatgattcccatggagaatatgctctccaaagttacaaccctattttttaaaggatttctatattactgaagaaaattagtttatttatttatggaaaaaatagaaattattaagcaaaatgggtcccaaactatacctggtcactagtgtagctggtaatccgccattccgcgcgagatcagtagggtgcgcgtgctggtgctggctacggccatggcgacgcccaccagcaccgtcacccgcggcggcaacaggcattggcattgtacccaagtgcttccactgctgttgctagtaccactatgcttcgcgcttctggttgagagcggcggcatccccacgacgctggacgggccgtttccgccggccacgcgcgcgttcgaccgcgcgctgcggcagggcagcaacgacgtcccgctcacggatccgcgccttgcgccccgcgtgcagcccccggcgcccgagcagatcgcgctcgccgcctccgccgacgccgactcgctctgggtctcttgggtcacgggccgcgcgcgcgtgggctcctccaacctcgcgccgctcgaccccgccgccgccggcagcgaagtctggtacggcgagcgcagcgccgccgacgccgcatcctatccgcacgtggtcacggggtccgccgaggtgtacagccagctgtacccgtacccgggcctgctcaactacacctctggcgccatccatcacgtccgtctccgcggcctgcgccctgccacgcgctactactaccgctgcggcgacagcagcctccccggcggcctcagcgacgagcactccttcaccaccctgcccgccaccggcgccggatgctacccgcgccgcgtcgctgtggtaggtgaccttggcctcacggggaactccaccgccaccgtcgaccacctcgcccgcaacgacccatccctggtcctcatggttggggacatgacctacgcgaaccagtacctcaccaccggcggcaagggagtcccctgcttctcctgctccttccccaaagctccgattcgggagtcctaccagccaagatgggatggatggggaagattcatggagccgattacatcgaagattccgctgatggtgatagaggggaaccatgagattgaaccgcagggtcacggtggagaggtgaccttcgcgtcttacttggcacggttcgctgttccatccaaggagtctggatccaacaccaaattctactactccttcaacgccggtggcatccattttatcatgctcggtgcctacatcgactacaaccgcacaggagttcagtactcgtggttggaaaaggatttgcagagggttgatcgacgagccaccccttgggtcgtggctgcttggcacccaccttggtataacagctattcctcgcactaccaagaattcgagtgcatgaggcaagaaatggaagaacttttatatgaatatcaggttgacattgttttctcaggacatgtacatgcatacgaaaggatggaccgagtatttaactacacattggacccctgtggcccgatttacatcggcattggagacggcgggaacattgaaaaaattgacatggatcatgctgatgaccctggaaagtgtccctcaccaagtgataaccaccctgaatttggtgggctctgccatctgaacttcacttctggccctgccaagggcaaattctgctgggaccgacagccagaatggagtgcatacagagagagcagttttggtcatgggattctagaggtcctgaattcaacatatgccttatggacatggcaccgtaaccaggacgcatatgcagagaacagtgtgggagaccagatctacattgtacgacagcctgacaagtgccttctgcagccagctagtgcgtcgtctctcaattggtgatttgatttgatgacaaaatttctgctattatgtattaattaatatatattcatatccattagattctaagttgttcactatcttggttatttgttttagatagccccattggaggatgcccttctctagtgagtagtaacagctccggtgggtccattacaaatggccagctctcctacaaaatgtttgtaattatgtgtgtagctttaatgtgaaagagttaggtggtctgagcagtactcatctcctttttaatataatactttagggttgttttactctcggcgggtcgaaatttttttgtgtagctttaatctgcacagttgaaggaacatttcataccaccattacttttcttgattttataattgtagagcggcagaatgcaagatgccccttactgaatattatactgcaaggtttgttgagtctttttttgtgtttattatcgatttattgtaaggaggcaccaatctttgttttattgttgtataaagaaatgtgaaacaatagcatttggtt

SEQ ID NO: 62445 - DNA, 449 bp, Zea mays
  Clone ID: MRT4577_156951C.1
aaaaaaccaagaaacgggaattccagttcccaaggggggaacaagaaacccaaaacaaaacgggggaaacccaaaaaaagcaggggcccccggggggtcaaaaaccccccccaaaacccttaaaaaaaaccgggggcgaaccatgaaaaacaaaaccccccccccaaacccccccccttttattcaaacccaaaggaaccgcccccgggggagcccaccaaaacgggggggggggggcccaacccccccaaccagagagatcttggggaggtgtccccaaacagggaccctaacccccttggggggggaccccggggggggcccccccctcttgaggggcttgagaacgtccatgcccctaacaacctggccaaaaaaacctgcttgccccaaagccaagggggcggaacgggccaaataaaaaaccggaaccccttgggggggggccc

SEQ ID NO: 62446 - DNA, 552 bp, Zea mays
  Clone ID: MRT4577_156952C.1
tgctgctacagtgacaaaagtagccacagaagaatctgagtgctcagagggcctcaggcctgaggaggcccgtggtgtcttgtatatcaaccttgccatgactgctgcagtgcagggaaaagttgagcaagccaactacatggtcagccgtggcctggcgatgttgcccaacaaccctcgagcagtgctagcatcggtttacatagacctcttgcaagggaagtcccaggaggctgtcgtgaagttgagacactgtaggaatgtgagatttagacccggtagcatagcagccagcagctgagcatagagaagcctcacttttcatggtttctgtagtttacaattaccatcatgatatttttggacgctgaccccaatgtggatgatcaaagatggtaatgttcctcctgtgtaccatacataagaaatgaactgtagcactgcccttttagcttcaggggtcaaatctcaaatgtgttgtaactgtaccggtttaatttgcctctctttggactgaagagaggtcaagtgatcaaaaacgtttcctatgct

SEQ ID NO: 62447 - DNA, 367 bp, Zea mays
  unsure (1)..(367): unsure at all n locations
  Clone ID: MRT4577_156953C.1
attggaaaacaatgttatatcttcctaagaaaggtgttctaggggcaaaaaacaatgtcctatcantaaaagaaaaaaagtaccaggtgtacatgagttgtataataatatcaatgaaaatataaaagttaaaatgcaatattatatatggagaaaaataataaaaatgaaatagaaatacaaaagtaattaaagatagaacaaaacataaaggaaaatataaataacacaaaggagaaaaagcatgtaaagatatggatactactcaaacaacctaaaatatactatagagcatctctcatgtactaggtaaataattaaagatatacaaattatataaaacaaaaataaacacgtaatagagaaa

SEQ ID NO: 62448 - DNA, 605 bp, Zea mays
  Clone ID: MRT4577_156954C.1
attggtacctcgaggcggccgggaactctattcccattatgttctactcctgagcttttctcgtcgttaccgactagccaatggaatccgtcatcatcggccatggtctccagcgcgactggagaaggggggaaggtgaagaagggagcggccgttcgtaaggtcctcggcacaacgaataagtccctgcccaggcccgtgaatgccgcactccatatccacatcggacgcatcaggtgctacttgaagaatggccgttacccgcatgatggcttcaccggggcccacgtctacctcaacgctgtctacgaatacctcaccgataatgttctggatgtctccttcaatgctgacagcgacgataacaatactcgcattattctccgcctcgagcttctcggagacccagaacgacgactatcttgggataatgtcgctcacccagtctatcactcaatcattggtgctctccaatataaaacctgttctgctgccaaagaagactacacacaaggtatccatggtgtagagcaagaagttgaagacctccgacaaggtcgtcaagatccccaagaaaggatagactgactgtctgaagtgatctg

SEQ ID NO: 62449 - DNA, 105 bp, Zea mays
  Clone ID: MRT4577_156955C.1
gaatgcggacgactagtcagcttgacagaagtattgatctagacctgtgtcctaaactgtgttccgcccttgtgctgcagacttatgctggtcaaagcgatgcgc

SEQ ID NO: 62450 - DNA, 630 bp, Zea mays
  Clone ID: MRT4577_156956C.1
ggccgcgggttttttttttttttttttctacaaagcaacagtttggatatatatagtagctaaaagtatacacaagtcataagaaatttatccttcaccactgagaacccagcctcggcggtatcttcatcattaaaccgatgtgacattcacaaagtaccgcttattgcaccttgctggcaacaaaatcagcagcagcgccagcatccttgctgtaggtaaggtggtcgggtgtgatggcagcagtaccggcgcaaacaccatcgcctgcgtggcagataatcttgaccctgtcagccgggacgccctggatggcctgtctctggaaagggtcgccgaagttgagaacggcagcaaccttggctgtggtctcagcaggaagagccctggcagcgttgtgcaccagcatggctccctgagagtatccagacatgacgatcttggtcttggggcacttcttaacagcctccgtgacaaggctcgccatcttctcagagccggccttgtcgcccatctgcataataccagcaatgctggcgctgtagtcaacgccctgaacggcgagcttgtcctggccaatcttctcgccgagggccttgaagaagggaggtcctgcaactgtgccgacgt

SEQ ID NO: 62451 - DNA, 341 bp, Zea mays
  unsure (1)..(341): unsure at all n locations
  Clone ID: MRT4577_156957C.1
acgcctgcaggtaccgctcctnaatggccggggggagcgcacgcgtcctacaccaacgggcagggctaccagatgggccacctcaacgtctactaccatttggggcgggtgcgttagcaacgagaggtganccagatccttcctgtgtatgtatgcatccatgcatgcaggcaggcagatgcatagacctacgtctttgtaaaacgcgtggccttacttgagatgaataaaacgcaacatggagcggcttgcaactggcgcaaggacaggtactactggtactgattaaataaacaggactggaatgataggaataaactatttaaggctcggtcggtttg

SEQ ID NO: 62452 - DNA, 323 bp, Zea mays
  Clone ID: MRT4577_156958C.1
ttttctcttttttttttttttttcttttttttttttgggtttcttttttttattcaaaggttctttcatcttactttttttcttgattgatttcattggacgctctttaaaaaaagccgggggcccctgacccttttagaaacccccaaccccccccggagggcacagccgggcgcttgtcaccaaaaaccggaaagaaccccatgcccttccccccccagaaattcccaggggaaaccccgccggctgaaaaccctgagggggccccccccccccccaaaaagagcaccccccttaggatagaaaaggggaggcccccctca

SEQ ID NO: 62453 - DNA, 423 bp, Zea mays
  unsure (1)..(423): unsure at all n locations
  Clone ID: MRT4577_156959C.1
cgcgctggcagtncnacantatggtttccaaagaattcggcacagcgtaacctgcgcgcgaggggtacggcctcacggagactacagccggattctgccgcgccgtcggggaggaggaaagcgcgcgagtgggatccgtggggcgtctctcatggggcgcccaggtgaaggtcgttgatccggagacgggggcagccctgcctcctggcgtggcaggggagctttgggtccgaggccctttcgtgatgaaaggttaccttggcgacgacgattccacgtctgagatcttggacagccaaggatggctgagggacaggagatctctgctgacatccgaccaggatgggattccnncttncatcgtaagaccgtctccaaggaatttgatccaattacaaaggnnaccagtgcctccttgcagag

SEQ ID NO: 62454 - DNA, 433 bp, Zea mays
  Clone ID: MRT4577_15695C.1
accgctctacaggctatctggcgatcacaatgctgagcattcagacccacatagggcgcagcttgctgggcatgccgcatcataatgctattctatctgcctatttatagtcatatttgacatcgtggaagtcttcggggtagatgttggactgaaaagctctcagtttcaggctttcagcctctcctttcttagcactcgtccaagttaagcatcaggagaaacgttgataatctcagaaccaggttactaattacctaactgaagatcatagcatgattccagctatgactcgatgtattaactgacatccttacctgcgaattaacaggggcaaccaatttccaactcaatttataaccttttctataataaagaaaccagtgatgcacattgtagttcacagctagcacttatgatacgcacatgcact

SEQ ID NO: 62455 - DNA, 355 bp, Zea mays
  Clone ID: MRT4577_156960C.1
atgcacgcgtgggaagctcgtaattcggctcgagctgtatggttctccatttttttggggggtgagtgagggcactaataggggggcgtgcaaaggttctgtgggtctatcggctccgtcactacaagcacgtaaactgctatgcacaacaccatgatgagcctgtgcatatgaaatgcactgctcctgtgggatgtatgcaacgagccaatgaacctgtttctctgatactacagggacaaaaaacacagaccctgataaaaagccggtgaaagtgctctactgcggtaactgacacacggacattcaccagggaataaaccacctgaaggctacaaagtatcctatggtccct

SEQ ID NO: 62456 - DNA, 323 bp, Zea mays
  Clone ID: MRT4577_156961C.1
cagacagtccattgtcgaccacaaagcaggtttgtggaaagcttggaaaactatgtaggaatgtgatacctgcacatatactgtttgagttagctcgcaataacagagaagtccattcaaacgtcgacgggaattctgatctctttccaggtctatcgttatcttctatgtagatcctgcaaattcttgccttcgttaggtcttgttacgattcctgatattcctcatatcttagtagatcggcctaaagcgatatagtaagatgactaggaagttacggtcgtcattgtgcaatggctgggtatgaatttcttgatcatgat

SEQ ID NO: 62457 - DNA, 355 bp, Zea mays
  Clone ID: MRT4577_156962C.1
acataccccattaagtttttaccgtttcaccggaaccccacaactgggcggtatgggggtgtcttctgattacaatttatataatatttaacgaacattctgtaacactcaaatctaccctttcaggatctaataaggaaacacccaagaggaacaaggaaaactgtcaatggtaatccacaccaaggaaagatcattgcacaaaggtcaccaacaatatggcaaacattgccaacccacaagatgccgttcccctgcgctggaccttaacccctaggacgtgttctcagccccccctggcaccatcgccttagcggcgatcacagctataactgtaagcagctgtctggtccac

SEQ ID NO: 62458 - DNA, 288 bp, Zea mays
  Clone ID: MRT4577_156963C.1
ctataaaatcactgaagttgaactttccttctgctgcctcctcccttcaggatttgagtgctgcaggtggcagccctctacatcctactcttgtgtcaaggtctaatattcctgggtccccagaagctgatgtgcacttgagaaacttaaatggcgcatcttctcctcgtagtttggccaatcagaattctcatgtgcatgcaaaccgtcctggtcatgaggtatcgacgagtcaaacttcagaaaatgcaaatggttctgcaccagatgtttcgagggtatctctcg

SEQ ID NO: 62459 - DNA, 181 bp, Zea mays
  Clone ID: MRT4577_156964C.1
gtgagttgctgcctcctctggggtggggcagggaagagccagtgtcaggggtggggggagtagaaaattggcttgaagggcacagggacacttctaatgaggcgtgctaccctcttccagagtcaccttgatgctctatggcatccttcctcctgtcatctgtaacttctttgttttttct

SEQ ID NO: 62460 - DNA, 803 bp, Zea mays
  Clone ID: MRT4577_156965C.1
cctgcgtgccacaacacacaacagccgccgcgcacgcgatcgacgacgacggccgccggatagttagctcctccttgcagctagcttctctagctaataattctagctagccaccaccacctgctgccttagccagagacaaagagagagccatggccaccgtgaacgccacgacgacgacggcagggtccggcaagcagaccgacgcggcgccgtcccctccggcggcagcggcggcggcgtgcagaagcctctccggcgccgacctggccctcagggtgctcctgttcgcggtgacgctgtcggggctcgtcgtgctggccaccgccaagcagaccgtgcgcgtcccggtcccgcagattccagggctcgtcctctcgctcccggccaagttcaaggactcgccggcgctcatttctatgcagctatcatggcttcggcgaccagctcagcgggtggtgtagcgtggatcgggctcaagggcaactcacacaccaactggaacaagatctgcaacatctacagcaagttctgccgtcacattggcagctctgttttcctgggcctcatcgcctccgtcgtcctcgtcctgcttaccatcctcaacgcccactccttataccgccgcagtcgctagttaaggaattgatgaatatgcatatatgcatgggatgtgatgagtgacatggcatctattttgtattgcagcagtagtctctgcaatcgaacaatgtagagcgtgagctgtatcctgtactgcatggtagaaaattgtgtgcttttaagattaaaaattacttcct

SEQ ID NO: 62461 - DNA, 441 bp, Zea mays
  Clone ID: MRT4577_156966C.1
gtcgttcccgtcccgataggctacggggacgacgtcggcggagcgcgcctggcgccggcggcgatcccgaaccgcgtgctcttggcagacacgaatggcctggcatgcatcggcgccatgcccagtggtcatctggccttcgcgaattggtggagcaagcacttggtccttatcaacccgatcactggcgcgcggcagagcgtccaagtggaggagccacgtcggagtctagttctggcagcagccagcggcggtgactccttcatctccgtgggcaccgatgagctcacactctggcggcgggctggcgacggcggtggcgaggagtggtccaggtggacggtaccggcggcggccacgcacgggatcatcaacatcgcatgggcggccgtctgtggcggctgcttctacatactggacgacgacgggcacgtgttcgtg

SEQ ID NO: 62462 - DNA, 304 bp, Zea mays
  Clone ID: MRT4577_156967C.1
tttggagattttaagcccaccagccactgggcctcatgccatattaatggggccatagacaataacaatcacctccgacgcctggcccctgacaccattgacttggtctactacccgcatttaatgcgcaaccacctcgataggtactaatgtacgctttaactcaccctccacaacaaacagtgtaactatctttcccacacgcaagacataaagcgctctaccaaacttgtcaaacgcacctgacgtcaatccaaagaaccaccggttcagtctcataataacaaatgcaaaatatcccccc

SEQ ID NO: 62463 - DNA, 1011 bp, Zea mays
  Clone ID: MRT4577_156968C.1
cctcgagggcgggcggggaaaccctacagccgctgcgcacgcgatccacgacgacggccgccggatagttagctcctccttgcagctagcttctctagctaataattctagctagccaccacctcctgctgccttagccagagacaaagagagagccatggccaccgtgaacgccacgacgacgacggcagggtccggcaagcagaccgacgcggcgccgtcccctccggcggcagcggcggcggcgtgcagaagcctctccggcgccgacctggccctcagggtgctcctgttcgcggtgacgctgtcggggctcgtcgtgctggccaccgccaagcagaccgtgcgcgtcccggtcccgcagattccagggctcgtcctctcgctcccggccaagttcaaggactcgccggcgctcatatatctgctcgtggcgctctgcgtgacgtgcttctacagcctgctgtcgacggccttcacctcgcttaagctcctctccggctcatctcccagcaggactctcttcctccttgttctgttcgatgtgttctatgcagctatcatggcttcggcgaccggctcagcgggtggtgtagcgtggatcgggctcaagggcaactcacacaccaactggaacaagatctgcaacatctacagcaagttctgccgtcacattggcagctctgttttcctgggcctcatcgcctccgtcgtcctcgtcctgcttaccatcctcaacgcccactccttataccgccgcagtcgctagttaaggaattgatgaatatgcatatatgcatgggatgtgatgagtgacatggcatctattttgtattgcagcagtagtctctgcaatcgaacaatgtagagcgtgagctgtatcttgtactgcatgttagaaaattgtgtgcttttaagattagaaattacttcctaaatcaatcattacatgaataaaggataaatcacgtataccaaaaaaaaaaaaaaaaaaaggcccctatgccctcc

SEQ ID NO: 62464 - DNA, 537 bp, Zea mays
  Clone ID: MRT4577_156969C.1
ctctctgtctctctagggtttttgattttagccgccgccgctgctcatctcacatccctcgggttgacgcctgccccacgccgatcaataaaatgagcaacttctcacccctttcccccagcgcaggactaccatgccgcgagggtcacttcatcggcgacctctaggtgaatcgttgactccaagaatacccccgacatgaaggtgatccccatccggatcaccctctcatgccaggagagtcaagaaccggcacaaggtgggagcagatctggctaaggggatgcaaggacaagattccgaggtaaagggggcctggcaggacccctagtaagattctcccctgcaccacccgctaatcgcccttgaggtgaaggaacgagacgtgcgtagccgctttgagttgccgatccttaagaggacgatcgacctgtgcatgctccccacagccgctgaaacgcactcctccaatcaccatagagccgcaagtccaccgccagtagacctttgcaaacatgtaacgacgatactgatatt

SEQ ID NO: 62465 - DNA, 208 bp, Zea mays
  Clone ID: MRT4577_15696C.1
ccccgcctggccgtctcttatttacatgcgcgtcgggccgggtggacatagctgcttgccgccgacacccgcaggcgcaatggccgtcgcccacgcgccgccgcgacgcggcgtgtttcttgtatatgttctgtgagcgcttcatgcctgagtgatcgctgactcagacttctgcttagtggctgatctcttttttttgggggggggg

SEQ ID NO: 62466 - DNA, 324 bp, Zea mays
  Clone ID: MRT4577_156970C.1
agattgctgcaccaaacgctactggtactggacattttaatccattgtaacctaacatgtttcgacatggatacagtagccttccacactggactacactggagcaggcgtaccattggaggccacacaattcatgcaaacagatcctacgaaggggtgggatgctgcactgccaatttgccattgttcacatccacagctcattagctcactaaactcctgcagttaaggggcactgcgtcacttggccgggtgttcatacaacaggggcaaaaatgcttgctcccgaaccaaatgccaggaagttttcgagacatggggagc

SEQ ID NO: 62467 - DNA, 860 bp, Zea mays
  unsure (1)..(860): unsure at all n locations
  Clone ID: MRT4577_156971C.1
cctgctgtaaagaaagcatcctactgttgaagatggcaaagtttctagcaatggggtatcgacagctacatcaacagagaaagaagacagcaagactgataaaactgctgctgctgagcagactgtagaacctgaagcaactggttccaacggcaaagcagaattagccaaaaatcctccagttagtcctgcaaagaaggcaaaggatgttcatactaatgaaccatcgggaacaaatgccgactcaccacgtgctgctgatagtatcagcaacgatggagcatctgattcccctgttcgtggagataaagccaataacagacattcttggggcccatcttttgatcatggtgatgataatgactccctatggaacttcggagataaggatggtgagaatggtgattcagatctattctttgggccaggaggtcttccccccataaggacagggggttctacatctgctagtgcttttgtcaaggagcagaaaccgatgtttgattctgtcccaggcactccaatggagaagccgttctttgattctgtcccaggcacgccgctgcagaaatccgtctttgattattccgtccctagcacaccgatgcagaattcatccttcgactactctgttccaagtacaccgatgcagaagtcgctcttcgactcttctgttccaagtacaccgatgcaaagatcactctttgattcttctgtgcccagcacgccgatgcagaaatcactgtttgattcttctgttcaagcacaccaatggggaattcattctatgactctttcccgagcaccccaatgcagggnttcactctttgattctggtcccaggcagagtggaatctcct

SEQ ID NO: 62468 - DNA, 299 bp, Zea mays
  Clone ID: MRT4577_156972C.1
acctttgggctgatttatgtgcttgaaaaaaaaaaaaaaaaaaaaaaaaccaaagcccaatgaaacaaaaaaatatggatccgtacgtgtgcgtacgtaaggctatacacgcctctccgtgatattccagcctccccactcggttattcccccctaacgtatcggttgggaaaacatactggtcctataggcaaactttcccggcctttacatccacccggttagtcggttccattgtccctaggtttcggttgactgttgccacggatagccgtgtcggtctccctgaaaacgggatt

SEQ ID NO: 62469 - DNA, 571 bp, Zea mays
  Clone ID: MRT4577_156973C.1
ggccgcttttttttttttttttttctttttttttttttttttttttttttttttttttttttttttttttttttttttttttttttaaatcaaaagcccccccaaattaaaataaaagggcatggggtaccccaggtttaaaatctaaaaccggaaatttaaaaaaaaccaccaaaccccatttaaaagaaaaaaaaaaatctttccttccaagggccagttaaaccaacccccctaagcctcccataatcccccccccccaactttggcacatttttttaaactagctttcctttaaacaatagcctaaatttttaaacaggcccttttttgggaaactccccttccaccgccggtaaaacgggtttaaaaaaaatttttgaagttttttcgaattttaaaacaaccccataagggtgggtggggaaaacccatttgccccactgacaaccagttgaaagggcctttgtgggaggaccaatcttcaaaactttgtctttctttgggaaaacccccataacactcacagggctcccttcctggaggaacccttttttaaggcccattgccc

SEQ ID NO: 62470 - DNA, 349 bp, Zea mays
  Clone ID: MRT4577_156974C.1
cccattcgtgcgctcttgtacatgccgaagcttacccgacattggcatgcaactttattttcttggttcaaaatcgaactaccatagctcaagggaatccagcgagacatatctgcgagctgcgcctgttaagtaacgtatcagttagctaacgtatatcctgatgttcaggatgatattgatatgaataaaaaatatagcacaaataaactggtggttctataaaataaaatttcatgggctacgtacggttagggacgacaccaggcccgcattagggctgctaataataagacttcagcttctgctgatgaggcagagaacatggttaactgaaatgcacatgaaa

SEQ ID NO: 62471 - DNA, 804 bp, Zea mays
  unsure (1)..(804): unsure at all n locations
  Clone ID: MRT4577_156975C.1
tcctcgcctcgcctcgcctcgcttatacgcccgcccgcccctgccgatccatccacccaataaagcgcctgtttcctctctttttcgatcggtgtgctagggtttgggcgcgcggaggcgtcgcattccagggtaatcattggttcgacgggctagggtgctttctcacccggggaacggaagcgaatccagacgatggagaagaagaaggtggcgataccgctggtgtgccacggccactcgcggccggtggtggacctcttctacagccccgtcacacccgatggctacttcctcatcagcgccagcaaggatacaaatccaatgcttcgtaatggtgagactggcgactggattgggacttttcaaggtcataaaggagctgtttggagctgttgccttgacaggaatgctctgagggctgcatctgcttctgctgacttttcagctaaagtatgggatgcacttactggggatgagctacattcatttgaacacaagcatatagttcgggcatgtgccttctctgaggatacacaccttttactcactggaggcatggaaaagattttgcgtgtgtatgatatgaatcgtcctgatgcagctccaagagagcttgacaaatccacctggttccgtccgaactgctgcttggcttcatagtgacaaactatattgagttcctgcctgacatgggtggaagtaaggcttgtggaatgttagaactggaaaaattgtcaaactcttgaanccaagcttctgtccctagtgcagagtaagccaggatggcagttcatccctact

SEQ ID NO: 62472 - DNA, 1776 bp, Zea mays
  Clone ID: MRT4577_156976C.1
tagctctctctctctcccgtgaacgacgacgtcgctaatggcggtggtttattacctgctgctggccgggctgatcgcctgctctcatgcactagcggcaggcacgcctgcgctcggagacgatcgcggccgtccctggccagcctccctcgccgcgctggccttggacggcaagctccggaccgacagcaacgcgacggcggcggcctcgacggacttcggcaacatcacgtcggcgctcccggcggcggtcctgtacccgtcgtccacggccgacctggtggcgctgctgagcgcggccaactccaccccggggtggccctacaccatcgcgttccgcggccgcggccactccctcatgggccaggccttcgcccccggcggcgtcgtcgtcaacatggcgtccctgggcgacgccgccgcgccgccgcgcatcaacgtgtccgcggacggccgctacgtggacgccggcggcgagcaggtgtggatcgacgtgctgcgcgcgtctctggcgcgcggcgtggcgccgcgctcctggaccgactacctctacctcaccgtcggcggcacgctgtccaacgcaggcatcagcggccaggcgttccgccacggcccacagatatctaacgtgctggagatggacgttatcaccggccatggggagatggtgacgtgctccaagcagctgaacgcggacctgttcgacgccgtcctgggcgggctggggcagttcggagtgatcacccgggcccggatcgcggtggagccggcgccggcgcgggcgcggtgggtgcggctcgtgtacaccgacttcgcggcgttcagcgccgaccaggagcggctgaccgccccgcggcccggcggcggcggcgcgtcgttcggcccgatgagctacgtggaagggtcggtgttcgtgaaccagagcctggcgaccgacctggcgaacacggggttcttcaccgacgccgacgtcgcccggatcgtcgcgctcgccggggagcggaacgccaccaccgtgtacagcatcgaggccacgctcaactacgacaacgccacggcggcggcggcggcggtggaccaggagctcgcgtccgtgctgggcacgctgagctacgtggaggggttcgcgttccagcgcgacgtggcctacgcggcgttccttgaccgggtgcacggcgaggaggtggcgctcaacaagctggggctgtggcgggtgccgcacccgtggctcaacatgttcgtgccgcgctcgcgcatcgccgacttcgaccgcggcgtgttcaagggcatcctgcagggcaccgacatcgtcggcccgctcatcgtctaccccctcaacaaatccatgtgggacgacggcatgtcggcggcgacgccgtctgaggacgtgttctacgcggtgtcgctgctcttctcgtcggtggcgcccaacgacctggcgaggctgcaggagcagaacaggaggatcctgcgcttctgcgacctcgccgggatccagtacaagacctacctggcgcggcacacggaccgcagtgactgggtccgccacttcggcgccgccaagtggaatcgcttcgtggagatgaagaacaagtacgaccccaagaggctgctctcccccggccaggacatcttcaactgatgatgatagcccatgcatgttttagtttcttgggacaataatgtgaataattcccagctagcggctattaattaatctgtatatagattgatcactgcactgatgtatgtcaaggtcattatttacgttatggt

SEQ ID NO: 62473 - DNA, 349 bp, Zea mays
  unsure (1)..(349): unsure at all n locations
  Clone ID: MRT4577_156977C.1
gcgtacgcagagccagagcaagggaagacgacccagancncgccacgcgaacacagnnagancgagggagggagggggagnganagccangacggagcngnncgacacggacgagaccagccaccgccaccagcaagaggggcaggaccgccgcgccgacggagacggcgaccggcggacggccggacaccacgcggcgcacggccacggccacggacgcgaacacnggcncggcggagggggcggagcgccgggggacaacgnggagagcccccgcgaggacgccnncgngcacgacgggccaggccncnccaaggccgacanccaggggacgcnggaggaggaccgg

SEQ ID NO: 62474 - DNA, 1979 bp, Zea mays
  Clone ID: MRT4577_156978C.1
tgggtacctcgaggccggccgggcccccctgccccacactttagcccaaggaggccggcctcgcctcgcctcgcctcgcttcatacgcccgcccgcccctgccgatccatccacccaataaagcgcctgtacagatccaacccttaggatccggatcgccttaccccccccgcgacgatttgcgcgattcgattcgattcgattcgattatcctccgattttccccgttttttgtaggtttcctctctttttcgatcggtgtgctagggtttgggcgcgcggaggcgtcgcattccagggtaatcattggttcgacgggctagggtgctttctcacccggggaacggaagcgaatccagacgatggagaagaagaaggtggcgataccgctggtgtgccacggccactcgcggccggtggtggacctcttctacagccccgtcacacccgatggctacttcctcatcagcgccagcaaggatacaaatccaatgcttcgtaatggtgagactggcgactggattgggacttttcaaggtcataaaggagctgtttggagctgttgccttgacaggaatgctctgagggctgcatctgcttctgctgacttttcagctaaagtatgggatgcacttactggggatgagctacattcatttgaacacaagcatatagttcgggcatgtgccttctctgaggatacacaccttttactcactggaggcatggaaaagattttgcgtgtgtatgatatgaatcgtcctgatgcagctccaagagagcttgacaaatcacctggttccgtccgaactgctgcttggcttcatagtgaccaaactatattgagttcctgcactgacatgggtggagtaaggctgtgggatgttagaactggaaaaattgtccaaactcttgaaaccaaggcttctgtcactagtgcagaagtaagccaggatggcaggttcatcactactgctgatggctcaagtgtaaaattctgggacgcgaatcactttggccttgttaaaagctatgatatgccatgcaatgtggaatcggcttcacttgaacctaagtctgggagtaaatttgtcgctggaggagaagatttatgggttcatgtatttgatttcttcactggtgaagaaatagcttgtaacaaaggacatcatggtccagtccactgtgtccggtttgcaccttgtggtgaatcatacgcatcgggttcagaagatggcaccattcggatctggcagcttagcccggctaatgctgatgacaatgaggtggccaatgcaaatggcaagacaactgctggggtaaacgaagttacaaccaagatcgaaggcttccacattcccaaggaggggcagaccgaggggtaggatctcatgtgttttgtggtgcttgtggttcttattgcgaggagattgccatcagagctgcagtggtcattcagtttccctctgcggagtcatcatgtctgcgatccaagggtatcctggcttcatgagtcatcatcagcactggggaaaaacaagcaagcaaatggtggtgggtttttggatggggccctcgctttgatagaacatagcaattgtagcgtcaaaaataaacaagagttgggtagtttaggtaccgtgtttgcgttcattaaagtgaagtattctgtatcaccacaggtaaccttgattgtggtgactatttttttttggtttgcctcaccgtgttccagtcccctaaaaaaatacttgaggccttcatcgttggaacaccgaccttcaaagctgtagaccacttcttgatcctgaggtagttctggagcgtcatgcctatcaaatgacagatttctgttcagatggcttgagctctctagaacatgctcttgtggtggctctctactaaacatgctcttgtggttgcttccccggtattgaagaccaggacccgccgatacccgaatcatgtgttattgtgtt

SEQ ID NO: 62475 - DNA, 114 bp, Zea mays
  Clone ID: MRT4577_156979C.1
acagcatgcgtcgaggcacccccacgaagctcggaatacggctggagcgcacacggggccgtgagttctttaaagggccaggaaccgtgctaagggcggggtggttgcagccga

SEQ ID NO: 62476 - DNA, 655 bp, Zea mays
  Clone ID: MRT4577_15697C.1
gtcgtaggaagaagcagcaaattaactaacctggaatggggacaacataactgcaccagaaactcagtagtacaagaaacggcaatcctgtcgtgggaaaatgcagtgctacaacgaagaagaatcacgagagagactctcgcaacaagggtgcacgctgaggagctggcgtgtgagattttagtgatacacgctgcactgatcaatggtcatgctggttggatggagtaatctgtgctccactgctgctgtcactggcgagaagccgaggaaacagacggcggcggcggcttgtcgccattgccgctgccgccgttgtgctcctcgccgccctgtatcctggtggggatgcggatcccggagaagccggtaccgggcgcgaacccgatggtcggcccgccatgctgctgctgcatcgggttgtcggcttcgacggtctccggccatcctcgctcggagggctggttactggactgaaggggtcccctctgggagaagaactggctctggccgccaagcgccgcctgctgcgacacgttgagcaggtagccgccagtgctcccgccgcctgggtcgggcgcgttccacggcgccacgcgctggctctgcgcgtgctcggcccacgcggcgccgcagccgaacgagtagctggcgg

SEQ ID NO: 62477 - DNA, 2170 bp, Zea mays
  unsure (1)..(2170): unsure at all n locations
  Clone ID: MRT4577_156980C.1
actgacaaaaatctctatataagcacagtgtccggcatcttggccccttccccacccttcgccctttcaaggaggccggcctcgcctcacactcccgcccgcctccggcgattcatccacccaataaagtatccaaccctaacgatccggatcgccttaccccgcgtcatccacgcgaattgattcgattatcctcggattttccccgttttttgtgggtttcctatcttcttcgatcggagtgctagggtttgggcgcgctcggtgggcggcgtactccagggtcatcgttagttggacgggctagggtgctttctcaccgggggaagggaagcgaatccaaacgatggagaagaagaaggtggcgatcccgctggtgtgccacggtcactcgcggccggtggtggatctcttctacagccccgtcacacccgatggttacttcctcatcagcgccagcaaggacacaaatccaatgcttcgtaatggtgagactggtgactggattgggacttttcaaggtcataaaggagctgtttggagctgttgccttgacaggaatgctctgagggctgcatctgcttctgctgacttctcggctaaagtatgggatgcacttactggtgatgaactacattcatttgaacataagcatatagttcgggcatgtgctttctctgaggacacccaccttttactcactggaggcatggaaaagactttgcgtgtgtatgatattaatcgtcctgatgcagctccaagagagcttgacaaatcacctggttctgtccgaactgctgcctggcttcatagtgaccaaactatattgagttcctgcactgacatgggtggagtaaggctatgggatgtgagaacaggtaaaattgtccaaactcttgaaaccaaggcttctattactagtgcagaagtaagccaggatggcaggttcatcactacagcagatggctcaagtgtaaaattttgggacgcgaatcacttcggccttgtgaaaagctatgatatgccgtgcaatgtggagtcagcttcacttgaacccaagtctgggagtaaatttgtagctggaggagaagatttgtgggttcatgtattcgatttcttcactggtgaagaaatagcttgtaacaaagggcatcatggaccggtccactgtgtccggtttgcacctggtggtgaatcatacgcatcgggttcagaagatggcaccattaggatctggcagcttagcccagttaatgctgatgacgacgaggcggccaatgcaaatggcaaggcaaatgctgcagtgaacgaggttacaaccaagctcgagggcggcttccacattcccaaggagggacaggctggggggtaggacctcatgtgctttgttgtggtgcttgtggttcttattgcgaggagattgcccatagggctgccacggtcattcagtttctccctgcagagccatcaacacctgtttgcgatccaagggtatcatggcttcaagagtcatcaccctggtaactggggaaaaaccatacccctcgtaagcatggtggtgggtttttggatggggccttcgctttgatagaacatagcaactgtagtgtcaaaaataaacaagagaatacaacttgggtaggtatcgtgtcttcggtcattaaagtgaagtattctgtatcgccgccagtaatttttgtggcttttgatgttggaacgccgattttcaaatcaaagctgacgaccacttcttgatcatgaggcaatatagatagagtcatgcccatatcaaatgacagatttctctgccctaggaaaaacgaccttcaaagctgaagaccacacattgaacctgaggttgagttggagggtcatgcctatcaaaaaaaaaccccacacccttgactcactctcatcgatgcgctgaggactggctcctacctccagctcttccancctgagcagctcatcagtgggaaggaggatgccgccaacaactttgcccgtggtcactacaccattggcaaggagattgttgacctgtgccttgatcgcatcaggaagcttgccgacaactgcactggtctccagggcttcctcgtcttcaacgctgttggtggaggaacgggctctggccttgggtccctcctcctagagcgcctgtctgttg

SEQ ID NO: 62478 - DNA, 242 bp, Zea mays
  Clone ID: MRT4577_156981C.1
tacttactacgacgcacgacggcgcggacaattgctggcacgagcacgagaacccgcgccgcgcaccacggcagggaccagtgcggcgcgtgcaggaaggagctccggacgaaccaggcgcacggcggccaccgcgccagcgacaagagaggaaagggcgggagcgtgccggagccggagccgacacccagcgcgcacgcgaacaaggaacgacgggccgagaacggcccgaacggaccacg

SEQ ID NO: 62479 - DNA, 420 bp, Zea mays
  Clone ID: MRT4577_156982C.1
gaacaacattataattaatataatataaataagtgacattcaatatatcatgaataagcagtggcaaacaaggcgtacagaagtggaggctaaatctaaactaggataaaagggcccgcagtagtgttaagcctaactgttatatgagttagagtctccgcactggtgtgcggccacgaaagtttgaattgtatgctgagggggccgggtacaaggggggggggaaacgtgggcatggggggaagcgccggggggcgggggggtgggggcggagcggccggggggcggcgaggggggggggggggggtgggaggctggggggggggggccgggggggcagggggggggggggtggggggttgggtgggttggggggggggggggcgggggggtggggaggggggggaggggggggggggg

SEQ ID NO: 62480 - DNA, 349 bp, Zea mays
  Clone ID: MRT4577_156983C.1
gacatatccgcaaaatgagggagtatgtgatacaatacaaccgcgtacaaacagtaaatacaacattggtcgtcaacacgtcatgacgacggagtagaagtgaacatcgtccatcacagtcacagcatgacctcggcgtcggacggcaaccgccggaagaagctcatcagcgccgacggttccttccgcctcagcaacggatgcctcatcacgtagaccccggtgacagacaccagcgccctgaatggcaccgcgtatgtcacgacggtgagcgcggccaccacaacgagcgcgatcactgtggcgcgggcatccctccacgccagcagcgcgtgcacccgctcgccct

SEQ ID NO: 62481 - DNA, 131 bp, Zea mays
  Clone ID: MRT4577_156984C.1
gcggaggcgaggcgatggtggcgcctgttacggagaagcagtaccgatgctctcaccaggtgtggcccgcgaggcggtctgcctactggagtaaagacaggccgtgccagatctaagccaggaacatgatg

SEQ ID NO: 62482 - DNA, 303 bp, Zea mays
  Clone ID: MRT4577_156985C.1
tacccgcagctcccatcctctcgctcgccaggagaagcaaccgccgctgctgctgccgcgtccacagaatggggggtttcgtgaagactcataagatcaatgcgtattgcaaacgttcccaaattaatggcaaccgaaggggctgagactacagagcctacagggtcaggataaggttgattaaccatgacaaaaaccagtacaacacacccctatacatatttgttgagcaatttacaaacaaggacatctatgaccaaaccatatctgctagtatagcgatagacaccggttcatctattc

SEQ ID NO: 62483 - DNA, 257 bp, Zea mays
  Clone ID: MRT4577_156986C.1
gttaccaagagggggcattggtttacacagatttagaaggttgaatccaactcgtatgggtttacacagatgcagtttggaccaacagttgacggaactgagagtgcaatgcatattaagccgtcttgaacacccatatgttagcaggtgataccattagtttacaaaaggctgcatcaatacacatgcctgaaaaaggcttaaccaagtgattcatactgtcatggctgttatttcattcaaaaattgcgaagccc

SEQ ID NO: 62484 - DNA, 274 bp, Zea mays
  unsure (1)..(274): unsure at all n locations
  Clone ID: MRT4577_156987C.1
aatgaaatggccaacaaaggattccacaccgataagatgtaacggggtgtaacttgagagtcttgattaaaggaggataaaattcgaggaggtagtaccaggtggttcataaactgcaagattcaggcatatcactccagacagtactctacaatacagtactgtttagggcatggcagaaatggganaacagatgatgctattgatgtgcttgctgatatggtgtcatgatggtgtatgcctgatgaatcgacctacataatactcatagaag

SEQ ID NO: 62485 - DNA, 313 bp, Zea mays
  unsure (1)..(313): unsure at all n locations
  Clone ID: MRT4577_156988C.1
ancantgntaacaacccaganancggggttttttttttttttttttttttttgttttttttttttttttttttttttttttttttttttttttgggttttaaaaaggaggagtggataactaattggagacaaggaattggtttacacagtattattaaaaaccttaacgggggggggggggggggctcaacgaacagggccccaaaaacttgcccaggaagaaaccttatttttcgggcgcccaagacacaaaacccgggtcccatatacccctcacctgaaaaggggggacctgggagccctggaaggggg

SEQ ID NO: 62486 - DNA, 473 bp, Zea mays
  Clone ID: MRT4577_156989C.1
gcaaaccgaacaggaccttgaattggaaatcctcgaaccccagtccaggggggcaaggggcaggggggcgaaggcaaacgggcccgcacccccaccgggaacggaaaaaacaataaccccgccggggcaggggcgcaaaagctgggggggcggccggggaacaaaaagccaaacccccccaagaccaaaaactccaaccccccgaggggggaaaggcaaagaaaggccaaggcccgggcccaaaaaccccaccccccgggggcgaaatggtccccccccaggggggggttgggatgggcaaaaaaaaaccagtccccgtccccccccttggccaaaaccaaaaaaggtcccgggccggggcgggaccggttgcccttgaggaccaggaccaaaccgtaggcgtaggcgcatggaaaccggacacgggggggggggaggccacgggaaacccggacgggcccgggggggcgccc

SEQ ID NO: 62487 - DNA, 640 bp, Zea mays
  Clone ID: MRT4577_15698C.1
cgtacgtctccatccctccctccctcccccctcttcttttcttcgagctcttccgcctcctccacgcggcctacaccacctccccctcacctcccgccgtgcgccccgatccctcgccgcgacctgatgtcgtcgaggactggatcgtcggaggcacatcgtgggtgtgtgtgtgcccttcgcacccatgcggcgtaagctgttgacgagctcgcctgccaggggagaaggaccacctgcaccggcacgcgattcaccgtgcgaggacgccgccccagctgccgccgtgattgcctcttcctactctggctgcgagcaccagtaagacgggggatacaggcagcccaaggcctctgttctgggcgattattgggcgccccctgtagccatagtttgggggcagcacaagggtgcctcgctgccgtgcgacgctaggagactaagttatggttgttatcactatgtgtgagacagcagaagcttacgttggtagcacgatcaaaaatgctgggggcacagtgcctggctactggaatgactaacagaggcagcccacaaaggatgctggggtgattgctggccttaatgtgctgggtagtatcaacgagcccacagctgcagacattcgcctatggtcttg

SEQ ID NO: 62488 - DNA, 1565 bp, Zea mays
  Clone ID: MRT4577_156990C.1
tacgtaagctcggaagtcggccggggcagtgagtgcactagtacgctacgcacctttccttcgtgtaataactccagctacttcctgtctagtgtctccgtcgaccgtcgctgccagccagccacagcaagctccgcacgaccgccggtccgccgcctaccagagcgagctcatctctcagccgcgccggggggcctcctcgtcacgccggcgcagcccgcgcttcgttccaccgtagtttgcccggccgtgctggggcaaaaaaaggtccgggcccacgtgttcccagacggagcgagaggacgtcgatcggtcaggccatcagggaccagaccagacaaagccaaaggggccgcggatcggtaggcggccggcgcggatcggaggaagaagggaggaggaggccatccagttggagtacttggagaggtagcaggacgacgatgcttggaggccgtcccctcttcgtgctcttcggctcctccatcgtgcagtacagcttcagcaacggcggatggggcgccgcgcttgccgacatttacgcccgcaaggctgatgtcctgctaagaggatatattggctggaacacaaggcgggctgttcaagtgatggacaaagtgttccctaaggattcagcagtgcagccgtctctggtaatagtttactttggtggaaacgactcaattgatgctcattgttccggtctcgggcctcatgtgccgctagatgagtacatagggaacatgagaaagattgcagaacacctaaagagcctctccgagaagacacgggtccttttcctgagctgcccgcctctgaacgaggagatgcttcgaaactcaaccagagtagccatactgagtgagatcgtccggaccaacgagacctgccgcctgtactctgacgcctgcgtggctctgtgcaaggagatggagctcaaggtggtggatctctggcatgccatgcagaagagggaggactggatgactgcatgcttcacggatgggctgcatctgtctgaagaggggagcaacgtggtggtggaagagatcctcaaggtgctcaaggaggcggagtgggagccgtgcctgcactggaaggcgatgcccacggagttcgccgaggactcccccttcgacctcgtctcctccagcggcgacgccaccgtcaacccgtcggagtggacagtccacaggagaataccatgggactgactgaccttgtttctggccttatccctgggttggctccatgtctggactggaccaggatgcgtttgttctctgttgtgccttgatggaactggaatggctgggcgttgaagggactgtgtcataccaccatcttatctatttcatcagactatgagtttatcttctggaaggcatggcacccggagttggccagggactcccttcgattctgtttcctcagcgtgaccgcacgtgaccctcggagtggacatccacagaaatacatggactgctgactgttgcgcctgattgactcatgctgatgatgtgcatgcttgtctgctgatgatggacgatcagacctagatacat

SEQ ID NO: 62489 - DNA, 1007 bp, Zea mays
  Clone ID: MRT4577_156991C.1
taggggccttttttttttttttttttcggtaaactgtctaccgctttattttactgttatagtagcttcatgttattgtttttatatagttaagagatatagctagttaagtattctcattgcatctaaaaaaaacggctcattctattatcaaaacacacaacttgaatggccatatctccgaaacatggatgcatcctagccaaccttgccatcaatccaaacacacaacacaccataatcatggggaaaacacaacattgaccaatcaatcttcgagacaccgaggtctgatcaaatagataagatgacggtatcatattgtcccttaactctggtcctccattgttattcttgagcatcatgattcgttccaattccatcaaggcagaacaaatgcatgcatccatccatccagccatggagtcaaatcaaggccgcaaacaagtcagtcagttccattgtattttcctgtggattgtccactccgacgggttcacggtggcgtcaccgctggaggagacaagatcgaagggggagtcctcggcgaactccgtcggcattgccttccagtgcagggatggttcccactctgcctctttcaacaccttcaggatctcttccaccacaatgttgctcccttcttcagacagatgcagcccatccgtgaagcacgcagtcttccagtcctccctcttctgcatggcatgccagagatcaaccaccttcaggtgcatctccttgcacagagctacgcacgcgtcagagtacagacggcaggtttcgttggtccggacgatctcactcagtatagtactgctggttgagtttcgaagcatctcctcgttcagaggtgggcagctcaggaaaaggacccgtgtcttctcggagaggctctttaggtgttctgcaatctttctcatgttccctatgtactcatctagcggcacatgaggcccgagaccggaacaatgagcatcaattgagtcgtttccaccaaagtaaac

SEQ ID NO: 62490 - DNA, 1188 bp, Zea mays
  Clone ID: MRT4577_156992C.1
ggtcggcgagcgcgccgtcagggcgctcgacgtctgcaacgcggcgcgcgacggcgtggaccaggcccgccgctgggagcgcctcgcggggctggcggcctccgcactgctggcgcccgccgaggggcaggtgcacgagggccagctctggcgcgcgcggaaggcgctctcggacctttccctgctcctcgccgacgatgccgccgccgcctccgcgggcgccggcggcgggctcgcctcgttcctcgcgtcccaccgcaaccgctccttcggccgcgcgcgggcgtcgccgtcccgcgcctcgccctccgcgcacttacgctcgctgtcgtggagcgtgtcccgcacctggtcggcggcgcgccagctgcaggccatcggagccggcctggccgcgccgcgcgccaccgaggcctcctgcggcttcgccgcgccggcctacgccatgggctgcctgctccacctcgccgcctgggcgctcgttgccgccgtgccgtgcccggaccgcgccgccgcgctgcaggcgcaccacctcccggccgcgccgccgcgcgccgcgttcccctgggcgccgccgctcctcgcgctccaggaacgcctcgccgaggaggggaggcgcaaggaccgccgcagctcgtgcggcctgctcagggaaatccacgcgctggacaagtgcgcgcagcggctcgcggaggccatcgacgccgcgccggtcccgcttaccggcgagcgggaggccgagctgcgtgaggctgcagcggaactcgccgcggcgtgctccgccatcaaggacgggctggacccgctggagagacaggtgcgggagctcttccaccgcatcgtgcgcagccgaatggcgggcctcgatccaccgatggccaatgcagattgagctctattcaagatcatcatcgtcttgccttcgatctcacagtgtggcggtgctcttgtgaattgtgatcagctagtggaaagtataaaatgtgtgtccttctgtaaaggattacacaaagaggaaagggaaggtgtcatctttgggtaaagatgattccttattcccatgttttgatgctgcatttgctgtatatccttgtgttttttgatagtgtcacgtctgtgcgcagctaaaaaaaaaaaaaaaaaaaaaaaaaaaaaaaaaaaaagaaaaaaaaaaaaaaaaaagcggcc

SEQ ID NO: 62491 - DNA, 375 bp, Zea mays
  Clone ID: MRT4577_156993C.1
cttccgagttctttgaggatgcttggctgaggtaaatgaggtagaggccaatggtgagatcactgaggctccagtcctttatgcttatcttacttctctggaggtcgcttaggatctcactaaatgtacgagtgcttgcagggatgttttccacacgaccagaagctgcattcagatagtacaactttaaccactttctaattgtgtggcatatcttaattctgaatgtgcagctataaatttgtgtagcaaaggaaataaacaacataatgtatcccttgaggtcgtccagggatccacggcttattgaactaaagcaggaacgaaaaagcagcttaacttctcaagtatggctgcaaattgtcaaatcccact

SEQ ID NO: 62492 - DNA, 765 bp, Zea mays
  Clone ID: MRT4577_156994C.1
ccgggccaagtataataaaatatctgagagagatggcaaatttgtatattctgttaatgtgttgcggggagctactggccgtggtaagagtcggaaggctggaggcttgacgataatccagttacctaaactacatgaagaatatggatctgttcaggaagcacaaagtcgagttgcagcttttgctctatatcaattttttgctgaccttccactacgtcaactgcttactgagccatactcatcacttattttaagatggcaagaaggtgaattgtcatctacatcaagggtgctggatacagaggataggcgaagatctggctttgtagatatgttattgaatatagatgcagatacaattccttcatctgaaatagaaaattctgatactgatgtcatatctatggattctgggaatactgaaggcagcaaatctgtgaatgagaagagacagactaccatgacgagttgtatgggattgaaatcagcagagcgtgcagagagtgcaattttgaaaaagcagttggaagataaaaggaagctaccaaattacttgaaaatgctggaagcaagagcttctctaccaatagctagacagaggcaacacttcctacagttgctgaaagagaacgatgtagttgttgttagtggagaaactggatgtgggaaaacaactcaggtacctgtgaccaatttctttgagttcttccccactatttgtcatgctccgccacatggtttccttcttgatgccaattgaca

SEQ ID NO: 62493 - DNA, 190 bp, Zea mays
  unsure (1)..(190): unsure at all n locations
  Clone ID: MRT4577_156995C.1
gtctgggnaacctttcaaactctgtcngttgtttttgtcccggggggctgccttgttctcgccatcttcgtttctgnggtttggtcncgtgtgctgtcttgcccctccctcttctttctcnggcattttgcctggctgggggcgctggcgctcactntcacccatgtcctgctggttttcttggccttcg

SEQ ID NO: 62494 - DNA, 536 bp, Zea mays
  Clone ID: MRT4577_156996C.1
ctcgagccggcggaagaacctgactgtagctcggagatgcgttcacacaacagcgtactgatatcctcccctttccgtccatcgctccatggaatgccaccatgaacttccacatctgcccccttgccacaagaggaacagaagacacggaggaatcagatgactgaccacagaatggtggccaatgatgcaccaacaccatccttccaggtccagtggcagagtggtctgacttgaggagtgcaacgccatatcgtccgtctacaagatggacgagatagcgcacaaggagagcttctcgatgaagtgaggcggtatactgttccgtcctcggttaccatcagctccgtacctacactcactgctacgagacgtatggccagggaaatggtgagcacaggaggaagtctgtcctgagctgacatcatgagcacacacctagtctggttgatcacttcggagcataccctgagaggacgacaagagccgcctcgagggcacgacactgataacgcacggatgaagcggcctcagat

SEQ ID NO: 62495 - DNA, 297 bp, Zea mays
  Clone ID: MRT4577_156997C.1
tgggtgaagtgtattggattgcccacgacatattccgtctaccatggactttgagacatgtgctggaacaggtcagaaagtttttagatcgaacaactagtgaaatagttgtgctagattttcacaggttcccaattggtttcaaatcaccaaattcatcggaaactaaatttagattccaaaacatgtttaatttagttaaggaaattttaggacctcatattgttaaaagtacgagcagtctttacaatgtaaaagtatcaagtataatggataaacaaagcagtaaagtaatca

SEQ ID NO: 62496 - DNA, 280 bp, Zea mays
  Clone ID: MRT4577_156998C.1
tattaagaatggcaacagtcaagaagtacatgatcattagaactgctgcggtgaagaaagaacaaacctaagggaattctatggaacatattacatcaagcattgttcaaatatccttggcttcaactatctagacaacagcccttaacaaggaacaagaataaaacaacaagttattagcacgtgtcatctcaggactctagactctttgcttgggctacatgagaggcagctgatcgagtgaagcatatgtacagagccggagcaactcctctcccag

SEQ ID NO: 62497 - DNA, 141 bp, Zea mays
  Clone ID: MRT4577_156999C.1
caaagcggcattgcgtagagaggttctgctttcataacagcatgaaaatggtcattgttcgggtcgtgtgcctgggtctttcagcttccaacgcctcttcaaagcatatatccctgcccctgcgcagggctgtatggcttg

SEQ ID NO: 62498 - DNA, 187 bp, Zea mays
  Clone ID: MRT4577_15699C.1
ttccggactcctagtgatcactgtgcacacgctatacaaccagtcccgtatcttcctctctccactttccctccggtgcacgtgatggttgtgggacccatagaccatggtgtaaactgaacaccagaaattgatttaagtacacgtaaatgacatttttacatgtaattgcaaatttatttttggc

SEQ ID NO: 62499 - DNA, 163 bp, Zea mays
  Clone ID: MRT4577_1569C.1
ggctgctgctcctgtagaaccatcattcatgttctatgctaccccatgggcgggggcgtaacatagatcatgaatgatggtacaaccagagcagctgccctgacgctcttgaagccccgggtataccggaccgctacacacagtcgtaccagcatttaaaata

SEQ ID NO: 62500 - DNA, 479 bp, Zea mays
  Clone ID: MRT4577_156C.1
cggcactgacataacattaattgcgcgctggcaaaacatgcctatggggaaagagatgaacagtcctacccataccacctagttcctcagtactataacactaggagcgacggctcatagatcgctcactccgtaacataggaccaattaagcggaggagcaaccctcctaacaagagacagcaatacacttaggcacgggtcatatatctagacgtacatattctagaaaagagcatgcgtgcgttgtatgtcacctcaagggcacatcaaacatggtctcttaactgcccattcatctagtgcgagctagcgggggccgttcatggtctcgatcttggagagccacacgtaaacagtgggggcagttgctctgacctccacctaagaggttgttgcccatgcccttggtggccaggttgcttcacgggtggaagactctgcaccacacatttgcggtgcctggcggcgtccctgacg

SEQ ID NO: 62501 - DNA, 1112 bp, Zea mays
  unsure (1)..(1112): unsure at all n locations
  Clone ID: MRT4577_157000C.1
ccggccggngaaaactaaaactcttatctttccctctacgcactcgcgatgctccctccagtcaccgcaccgacccatccgcctccgccctgggaatcgacgaccaccactagaccgccgccgccacctcctcctccttccggcgccgagtccgaggtgccgccaaagaagcggaagctggagggggtggggtttcagcgctcgccctattacacgatcagagaaaccgttgcaaatctccgcgtccgcttccttcaggtttgccaaggaactgattcagaaaagaaagatactgctgtaggaatcttgaatgagatgaaatctgtgatggaattatccaagaaaacacggcttgatctgtccgcttctgctgaacctgtgaaaccgttgaacaaacatgcagctagagctcctgaggataagcgtgttgggaaagttctgtctgcagagaagagtttagttcctccgacaagcctgggcctggctggacattttgtgcacaatacaggtgggggtgtaccactcaagcctgataactcagacaccgcagcacatgggttaccggtgaagattaggaagtggcccggactaagtaagataacaggttttacaaagcgacagggtggacttcctcaaggttcttatgtcatcggtggatctcccattggctggaattttcttgtgtggcctggaagcaaagcagtctactatggtttgaccaaagcagagtggttggctcgtcaatctgcaaatagaaattcgaacatgctgtcccagtgatctaacagctacatggatcgatctttagaagataacatagtattccctaatccctagttattgtgatataagtagaaccaaatagtacatgacgccccaggaaggtaacctctgacaccagagcatggtagcttggtaaggtactgaggtatattggttttgttgctcaataggggtaatcaacagtaaatactagataatagatatacggagaattttggtactgtaaactggatgggccggccaagtgtccatgttatgtcttctgttcagaagtggatacgaggaagaatttaaacacatgacagcgcattagcgccgatgcacacttc

SEQ ID NO: 62502 - DNA, 634 bp, Zea mays
  unsure (1)..(634): unsure at all n locations
  Clone ID: MRT4577_157001C.1
cgaccgacccatccgcctccgccctgggaatcgacgaccaccactagaccgccgccgccacctcctcctccttccggcgccgagtccgaggtgccgccaaagaagcggaagctggagggggtggggtttcagcgctcgccctattacacgatcagagaaaccgttgcaaatctccgcgcccgcttccttcagcggttcgtagttcatactcttccttaggcgggtgcccatttgtggttaaaatttaacggtctgatgaggacaagtacgtactgatacagaatgaaaattgaagttcctgggatgtatgtgatcttaactgatcaggtttgccaaggaactgattcagaaaagaaagatactgctgtaggaatcttgaatgagatgaaatctgtgatggaattatccaagaaaacacggcttgatctgtccgcttctgctgaacctgtgaaaccgttgaacaaacatgcagctagagctcctgaggataagcgtgttgggaaagttctgtctgcagagaagagtttagttcctccgacaagcctnggcctggctggacattttgtgcacaatacaggtggggggtgtaccactcaagcctgataactcagacaccgcagcacatgggttaccg

SEQ ID NO: 62503 - DNA, 461 bp, Zea mays
  Clone ID: MRT4577_157002C.1
ggaacaaagtcacatagagcagggagtcaggagctccaccagttgatttgaagtgtgcatcggcgctaatgcgctgtcatgtgtttaaattcttcctcgtatccacttctgaacagaagacataacatggacacttggcccatccagtttacagtaccaaaattctccatatatctattatctagtatttactgctgattacccctattgagcaacaaaattaaagactgagtatcccaatatacctcagtaccttaccaagctaccatgctgtgtcagaggttaccttcctggggcgtcatgtactatttggttctacttatatcacaataactagggattagggaatactatgttatcttctaaagatcgatccatgtagctgttagatcactgggacagcatgttcgaatttctatttgcagattgacgagcccaaccatttgttttggtcaaaccat

SEQ ID NO: 62504 - DNA, 1123 bp, Zea mays
  Clone ID: MRT4577_157003C.1
cattgggtacctcgaggccggccgggatcccatttactagttgtggttttacgtcccgaatgttagatttttaacaacttgcttgcgtagtgtaccagcgcatttaacaagtgcagagcaggagtggcaaagctcgtagtacatcacgagtgctccaaacaaatagagttttccttcaccgagccagacccagaagaaggggagccggaggtagaaagaccagagaagatggcgaccaccgagccggcggcggtgaggctggtgggctccttcgccagcccgttcgtccaccgcgccgaggtggccctgcgcctcaaaggggtgccctacgagctcatcctggaggacctggccaacaagagcgagctgctgctggcacacaaccccgtgcacaaactcgtgcccgtgctcctccacggcgacagggccatctccgagtcgctcgtcatcctcgagtacgtcgacgaggccttcgacgggccgcctctcctccccgcggaaccccacgcgagggcggacgcgcggttctgggcccacttcatcgaccaaaagttcgcgcggccgttctggatgtcgttctggacggacgacgaggagcgcagggaggctatggcgaaggaggccaaggagaacctggctctgctcgaggcgcagctcagggggcagaggttcttcggcggcgaggccatcggcttcgtcgacatcgccgcctgtgcgctggcgcactgggtcggggtcatcgaggaggccgccggggtggtcctcgtcggcggcgaggagttcccagcgctccgcgagtgggccgacgcctacatcaacgacgccaccgtgaaggcgtgaagcagtgcttgaggagccgcgacgagctcgtcgattacttctcctccaggaaggagatgtacttgctgcgagcgagggccactccgcgcagctgatctggacccatgtttccttccgttcgcaataagccaataataaagactagtttggtaacccatttttctaaaatgaaacattcagttcagtcgagctagctctaagaccccggacgcgtggcagtagggggagtttgaaatcagataggaagggaataatggatttatggagggaaaaaaaaagagag

SEQ ID NO: 62505 - DNA, 368 bp, Zea mays
  unsure (1)..(368): unsure at all n locations
  Clone ID: MRT4577_157004C.1
aaccgcccatcctttatattactatttacccacgccgaataaattatatatttatgctacnaaacacaacaatcattcaattcaaatccatattcatcaacaataacatcatccaatttcaacatcatgcaccctccccagcaaaaatacaacctcatttaactttatatacacgaacaacacttactatattacaacttaaaaattctaacattataatttaatctaacttacctccaaaactcacaccatttatgtgtacttaaacactttcttaccactttctcagcttgtgctctaaacattaatgatttaatcattctaatagatccacaaaatcctaacaacatttggctttactattatta

SEQ ID NO: 62506 - DNA, 2387 bp, Zea mays
  Clone ID: MRT4577_157005C.1
gccggccggtccgggataccttctaaggaaggcccacacaggcagttgtcaccctcaaatcggataatcaggtctacttctggaaatgataatgttaattctaggagtccgtttgataatattcagcagaagaaattagcagcacatggagccaatgcagcgcgaaggtctttcaaagatttcctcagtacattgacaagaaccaaagaaagtatatcgcgcgcgacacgtcttgctatggaatgtgctaaatttggcattgctggtgaggcaattgacattatcgttgaacatctggaaaaggaatcaaatttgtataagagggtggatctcttctttcttgtagattcaataacacaatgctcccgcaatcagaaaggcggagctggagatgtatatccctctctcattcaggcagttctacctcgaatactctatgctgctgcacctcctggaaactcagcttgggagaatcgaaagcaatgtctcaaggttttgaaactttggcttgaaaggaaaacactttcagaatatatcatccgtcaccatattagagaaattgagactatcaacgaggcatcatttggaagttctcgccgtccttcaagaacagagagagctctaaatgaccctttgcgtgacaatgaaggaatgcttgttgatgagtatgggagtaatgctggttttcagctacccaacttaatttgcacaaaagtacttgaagaagaggaagaaaactcttctgaaggcaagagcttgagctttgaagctgttacacctgaacaggatgccccatataatgatgacaatgaagaatctcaaatgcctgttgagaagcatcaccatattctggaagaggttgatggtgagcttgagatggaggatgtagctccaccatctgatattgaggcaaccaccaagtgccaaccagagcaaagtgacaccaatcgtgcaccatctgaccaacgcccttcagatgctggccctccacttcctgtggaccggcctccatctcctccgccattgccatcatctcctccacctgtccccgttcctcagagtgcacagatgcagcctaaattacaaatggcatctgatcccatggcgccacatcctcaaagagctacatatagtgttcaaagtcaacaacagcattctattgcagagcacccaggtaacatgaattcttctgttgcaccattgccacccccaccgtttaacagttcaggatatggagggcaacaaaatcagataccacctcccccaccaatggcaccactcaatcctcctggtccccatggcagtttccctgctcccccagcaccttaccatgggaacaactatcatcggcctccaaccacatccatgcctaacgagggatatcatcagcaaccaccaccccctccaccgcctccaaatcaattcccttctgtgccaccagaacaccaacataggccacatcactggggtaataactgtccaccgtatcccgagagatatcggtacaatggacatgatcgaggtaatcacagacatgatagaaggcatcatggacatgacagacaacaccattatgatgatagaggataccactacgatgatagaggatatcactatgatgatagaggccattactttgatgatagaagacatcattttgacgatagaggacatcactttgatgagagagctattagggggccaatgcacaatgatgccgctgaccagggaagatattcttttcctccaggtcctcctcggattcctgaccattttgaagctccaccagccccaatgcactatgggcgaccatcagatcctccgccaaggccttgtgcaggctggtctaggccgcctaggatatctgataactattctccctcgagacattctgtggagcctccagtttcacatacagctggaggtcatggtggatggagacctagataacctttttcggtatcgaagcggtgctctgatgctttccttggtctgtgggggcttaacctgtgggagagtctgtctggtgtctctgcttcaggttgaaggcacccacggaggaggagcactccaggaaagtgggagctggtacctgcctccttgtacagatgtatctcatggattctacggcggtcgggctgcctgaactgctgtttgtaccctagtaggggtttagactgcgcgaccacacgcagagctgagttgtaggggtgtagggtgtcttctatcaaccgatcgtagtcttagattgtactgtttgttagtgcaacagtcctcgattccattgctgaattcctcctggccagctgctctgatgtcttgccgaaactgtttgagcacagcgtacatatatgcctaaaaaagagagaaatataaatcattttgcc

SEQ ID NO: 62507 - DNA, 575 bp, Zea mays
  Clone ID: MRT4577_157006C.1
cccagcgtccgccccgcgtccggaacagccaaacacagctcccaccacggcgccgccaccacctccagccccaccgccacggcggccggtgcaaccctttccgtcgcacccattgcgtgcgcagccgccctcctccccaccgctcggctcctgcgcgggcgaatgggttactcatccgccgccgccgccgccttcgccgtccttcccgccccctccccatcgtcctccgacgactccgacgacgccaataccctccctaccaaccccatcgtggagccggaagtagcctccccgcaccaaactccgcctccaaagctgcagcagctggagcgcggctgcaacttggcaatgacgccgctggggcgcgccggggacgtcgaccaggtcgtccacctcttctccgacctcatgctctccacctcaagcgccggcgtcccgcccagcgtgctctgctacaacacgctcctcaacgcgctcgtggaggccggccgcgcggtggaggcccgcagcgtgttcgacggaatgctcgcggcgggcgtggcgcccaacgcgtcgtccttcaacatcctcgtcag

SEQ ID NO: 62508 - DNA, 272 bp, Zea mays
  Clone ID: MRT4577_157007C.1
gcctaatcctaacgagctctgttcatcagccatcacattattcgtctctaagcaatggcctctcaaagaagtggcagcttgttagtcctagcccaagcctttgccatttgcatactgatcccatgctgctcctccagcaaagaagccatggagctgttcgagagagcgtgccactgcttcgataatcccaatatatacagccagtgcgcggaggagttcaggctaaacgcggagggcgcgttccacgtgcagtagatcgtagtggacgcgta

SEQ ID NO: 62509 - DNA, 299 bp, Zea mays
  Clone ID: MRT4577_157008C.1
gagcctcactttctgcggccgccctttcttttttttttttttgtttttttttttttttttttacttcggcactaccctaccttcagaaccaattccaagagttgcgaactcaagatttccgaaactttttcacctgggttaccaagggcaccaacaagaagacaccgcgtggcgggaaaaacaccagggacccgatcatggtgctatggccccttaaccaaaaaggaaaccgaccccgggatcagatgaacccgggcccctccccaatggaaccaatgacaaggccaacaacgaggaac

SEQ ID NO: 62510 - DNA, 341 bp, Zea mays
  Clone ID: MRT4577_157009C.1
aaaagcaacagacattggaggcgttgcaaaagaattacgccatttttattcaatgcaaaggatgcagcatgacacgtttatttttggaggaggattactcaggaaggaagcgtacggacggtttggaatggaattggtgggaagcgtttaacccgaagcaagctacattgtttttttttgggctgttgttgtgttctagctaaaatgctatgcaggactagcggttgagtatttttacaagcaaacagaacggggaagggaaaatagttgtgcaaccgttgggccttgtgatgcaacggccagtgccgtacgcggagcaaaccgacacgaaacgggcacgg

SEQ ID NO: 62511 - DNA, 608 bp, Zea mays
  Clone ID: MRT4577_15700C.1
ttctcttctctctcgtgacaactgatactttgccgccactcctaccaggtcttcgtcggtggcttcatcagtcgccaggtcttctacggcccatcccccggtcttcgtccttctctcctccggtgactatcacccaccagaggctgctaactccttagaggaacacggccatgcctggaggcgcacgaaatgggtcgaacgaagcggtgcaggcgaaggggatgggactggatgcattcaccgccacggcgctgctgccttgctgcgtcaaggctagatctggaccgcccgatgtctgatgacaagtggcctgtgatcgggggagctccttgtgttgccgacccacactcgcactgttatggagatgcacaggctcgggattacaattgcctggtgtgatcggtctagttatgttcctggacagtggagaacatactcgtactcaagcggaaatccactcctacgcacgtatacaccgtggaactgttgacatcgtgcaccatatgcagaacgaccatgtgctcgctgatattgtgcgtatgcctgatagagaagctagtgctacctcagaagtgcctactcatctccctatgatgtaccctacatcc

SEQ ID NO: 62512 - DNA, 356 bp, Zea mays
  Clone ID: MRT4577_157010C.1
cggctcgagtttttcactaaaagggggacgcgatgaaaattccaggtcatagggcacacaaaaaagccaagaacaacagacagaatacacgttaacacgagcaccgctacaagctccaaacaaaaaaaatgagtccagaggaacaacatataatgatcttcacaacgcaaaccatttaaagcctgcttgagaataccgaaatactccctcctttatttcttcctcgcgcgcgaaccgcgtaatctcctccccttgcgggtcttgcctctaagcaccgggggcgtcctcctcctcactcctcagcaaatgggcaggggcttgccgtcccactcattgaggcagacaaccatggggtg

SEQ ID NO: 62513 - DNA, 388 bp, Zea mays
  Clone ID: MRT4577_157011C.1
ctcacgcgtccgactgtggcggagcacggatgcaaaggacgaggaacagcaacagacggcggggcggaggagcgggatgccactcattgcttgcaaccatggttaggggattgaagaagcactagaagaggctgaatgcgctcaagaattggatgctcgacaagatttgacggagcttttgctatccaagccattttctggacctcacaagctcagggagtgccttactgtgatcctcatcatcaggaacaggctcaagtatgctctgaactaccgtgaggtcatttgtatactgatgcaacgccatgtacttgttgattgctaagtcaggactgacaaaacctactctgctgggatcatggatgtcatttccatacctaatacaatg

SEQ ID NO: 62514 - DNA, 774 bp, Zea mays
  Clone ID: MRT4577_157012C.1
aacttgcctttaatccgtacaggtttataatgttctacaatatttttgtttgatgaattgcagctggagccgtccaaacagctggctttaatcctcagggaatcaaccttaggttatacatctcaaataatatggtttatatatgcatagacaacaattaggtgtttgcatagaacaatatagccataacaagcctaaattcgcctgaacaaatctagcatttgtttccatgctgaacattatgtcgggggcagcagaaacaagtgcagagagcacagaaacaagtcctcgtcacagttgcttcgaaggggaagggaaggtggggagcttatccgctttgacattgggcttcggattgggcctctgcggcgcgttcctggggttggtaaaccaggtggtgtagaggaactgcttgtgcgggccgtcgtggtcgcagatgagctttagcttctggcgctccctcatccaccgcagcatgatcttcatctgcctcttgcttgccagacctcgaagcccgacatccttgacgtggtcccagacgtcggagacggtgagcgggccgtgctcccggacggcgtcgaagatggcgcgcgtgatggactgcgcctgctccggcggcgccgtcagctcgatcggcgccatcttgggcttccccttcttcgccgcccaccgcaccgccgtcgcgaacatcgccgcctgctggctggtctcgctgcgtacggtggccctcctgaatggctgaaatcctccctctcggctcctgcgtacccaatg

SEQ ID NO: 62515 - DNA, 560 bp, Zea mays
  Clone ID: MRT4577_157013C.1
cgccagagcacttatacgactaactataaggaaagctggcacgcccgcagagctccgatcctgtattacgggcgcgatccacgcgttcgtttgattctacctgctttaactactattctaaagcttataataaaccaactgacatgatgggagtgcggcatgcgctgactcacattgccggatgtcgattccatcaacgcctgccatcctactaggggttgctgttgacattcccaacgaccacggtgtgattaccctccaaggggcactcctgaacgtcatcaacatgatgaccatcggtaaatgtcccaccgccaataaaaaatacagacgctagctcttttgcacagaagggttcatgcaatgccacatactgagctgatgctgcatgcatgttacctacacagtctatccgcacgattgcagctagactagcacatccatgcgcgtgacaatcatgcgatactagctgccgccagattgacagtaactgcagcattaggagcaccccgatcctgtgccattgcgcctaatatatgaggcataatggcacaccaacg

SEQ ID NO: 62516 - DNA, 306 bp, Zea mays
  Clone ID: MRT4577_157014C.1
gtccgcgatgttgcggaaggcaaggtggtcccgctcgactgcacgctgctgatccggctatcggccgcaccgctggtctgttaccgcacggcggatgacgacatccacgtgtccgtgccgttcgacctgctcgacgacgatgacccgtggatacggaccacggacatcactccaagtggtgcgattgggcggtgcggtgcgtatagaatcacattctcgccgcggttctggccaaagatggaacgcgcgctgacgtacatgagggataggagggtggcgatccttgattgcgttggaaggtggggg

SEQ ID NO: 62517 - DNA, 342 bp, Zea mays
  Clone ID: MRT4577_157015C.1
ctgagaacgaggaggaataggaggcttataccttatagacgcaccgccttatctctgtgatatgaactctggatgtgttgagacactcatactgtagccttttaagggatgagttttgatgtttaaattggtcttctgaatgtttttaagcgtgctgggacttctcatgtgatgcttacataatcgagtccaagaattgatggttctaaaaaaaaaaacaaagataaaaacaagcaaacatagaacattaaaaatatgcaaatcataacttccctgacatacggccaggtatctatgcaacaatgaaaaaaaaaaggggggccctttttaagggtccaagtt

SEQ ID NO: 62518 - DNA, 138 bp, Zea mays
  Clone ID: MRT4577_157016C.1
atgaccaagaccgaaggccccaacacagaccatgaggagtatctgcaggcgtacgtccgaaggttcctgcgactgagagctcaagcgcctacagtgcccaatgagattgtcattgagggcatgatcaaggggctctga

SEQ ID NO: 62519 - DNA, 611 bp, Zea mays
  Clone ID: MRT4577_157017C.1
acagaaaaatcttggttagtttctaaactggaatttgcctcaatatacaaatacaaggtacagaaaagaagtaatttacatctaattcagtccagtgtttgaaaaaaacttgacgtataggtatgccacaacaattgaaaataagcacagctgagagctgctatactagaagtaataaaggttatagaatgaatgccagacagactcatcttcgacatctgccatatgttcatagcgcatgcatcctggaagtgcagcaaccttgttccagtctggaccttcccccttctgaaattgctcgtctaatgcttgatggcatccatccaatacaaaagttctaagcgatacaggaagacctctctctggtagtgacctcagaagacggcaatcctcaataatcagaatcccaagtgcacagaaggaatccataccaggcagcaattccaacttagagcagtttgcaacgataagcttagtaagggagacaaggccttgcaactctctaagtgatgatagtgcatcacaagattctatgaccagttccttcaatcttgtctggtaatcagcactggacaaacgcataacttgagggcaacgtctcaaatgcaatt

SEQ ID NO: 62520 - DNA, 416 bp, Zea mays
  Clone ID: MRT4577_157018C.1
accggcaacaaccggacaaaaaagttcttatttcaaatcccctcatttcgcatttacaaaaacaaaggccaaaaagtccaaaaaggacagtgcccccaacttatgggaggaaaaaaaagggggggttggaggagggcaatggccccattttaattccaaatttcaactttttaacctcgaaacaattggaaaaccaacttgacttgggacacaattttaattacaccaagcgggggcggctactgagggggggggaaggaacaaaaaccttcctggatttagggccatagggggggggggactatggcccccctgggttccttttgaacttaagccacgggtgggaaccctttggattttatgccctcaccacattacatgaagtggtttaacgctttttttttttctttaccccc

SEQ ID NO: 62521 - DNA, 206 bp, Zea mays
  unsure (1)..(206): unsure at all n locations
  Clone ID: MRT4577_157019C.1
gggttcgtgaggttctccggggttcggtttcgtggcttagcntnnnaactgtggggggacggccacaatatgcgtcttttttcatgcacgtgcatgcgtgttggtgctttatgtgcagtgcacacaaactggctagcttttttttagtaaagaataaacccatggtacggtgggagtgaatagtctagtgcgtccactccatttaa

SEQ ID NO: 62522 - DNA, 342 bp, Zea mays
  Clone ID: MRT4577_15701C.1
cttcattgtgctggttttttttagatccgaggtaggaataagttacatgtgacataatgcgagcatccaataaatgatggcggaccacttgtccgggtacattgccacatgcaagaattcactttacctgccttaactatgttgcacatgaacaagtttgccaacaacataatgacatatgccttgtaacggctgcacatccttggaattgcagccttagttggatgtcactttgtgaacacatgcacctttgatgtgtatcaggatactctcccgcgttctttaattgaaaccttctgaagcccttaatacataatgggtgggatgaaactgtattatccc

SEQ ID NO: 62523 - DNA, 461 bp, Zea mays
  Clone ID: MRT4577_157020C.1
tttccgatttttcttcttgtaccgctgatcctgtagctcctacacattaccttgctgtcctggcttgtaactctgctaggtttcatgagaggaatggtactccatacgtatggtggaatactagcaatacttattcctgctctggctgaatctttatgattattgttcacaaagaatgcaatgaattggtttgctcacccttatctggcgttcctaatgtgtgtgcctacttcattgattgtgctattgctgacaaggcttacatgggggctatcgctgcaagcacacttttggggtgctttcagggctgtattctttaatatctatggcctacacactagctgggctgagtggacgttttctaacatttgtaaataccatgtccatgcttcttggacgatttatttctagaatctattaggcaacattgtggccaacaatcacctaggccgtttgatgcg

SEQ ID NO: 62524 - DNA, 614 bp, Zea mays
  Clone ID: MRT4577_157021C.1
cccctctcgagttttttttttttttttttttttttttttttttttttttttttttttttttaaaaaacgggggtttttggaaaacttttaataatacaaaaacaccacctggaaaataaaagtccacaatttatccttccttgccaaacggaaacagaaaatagggtagttggggaacacctttttccaaacaaaaaaggagggacccacattcatttgggggggaaagagttttttattgatccccaagaaaaccttttgggcaaaaatcgaaacgggggttaagaaaaacgggggcaacccaaaggggcggccaataaggccgtcgaaggggccccaacggccgggggcctggttgatctggggatcccagaaaagctgcaatttaaaccggccaaaggcccaaaacccgaaggggcccaaagggaggctccaccccgccttagggcgctcgcaccgttctttatttttgaaaacatgctcccgccaaacctggtcgcccttgcccggtccctccataaaacggaggatcaaattctccgcaaagcccatgataaaacccatcgccgctttggggcgcccttttccccttttcggggaaactgggaatctgc

SEQ ID NO: 62525 - DNA, 202 bp, Zea mays
  Clone ID: MRT4577_157022C.1
gatttacacaatggtcataggtgggttttgtagggctggatcaatgtcagaggctctaagagttagggatgagatggttggctttgggatgccggcagatgtgggaacctacaataacccggtggaatgggcccggaaacagccaaaggttgcttgacgccgagaaacttttgaatgagatggccggagaaaggggtaacac

SEQ ID NO: 62526 - DNA, 526 bp, Zea mays
  Clone ID: MRT4577_157024C.1
gggcaaaagccccactacccattggtatggaaaaagaaattacaaaatataccctcctttttttttcaccccaaaaaaacaaaaaaggggacgggggtttttaaaaaaaaactacattgggaaaatctaaactagcaaacaaccacataaagattaaaaaaaatctaaattataatctaaattataaaatttaaattataacccaaattatataatctataagcggaaacaaacacacccttaagggtgaatttcactcaacaacccgggggattttacttttggttattccccaattaattcctttttaggttcttacaaaaaaagggaaaccccctacacaggtcttggggttaaataggggggggagctaaaacgaagggggtgacccaactagcatgcatgtttgctctgaactgagtcgaaaaaaccaatcaagcggagtccttgaccatgctgggggaattggaaagtttgtccaaaaaacggccccaaataaagaaacccccgtaattgtccccctttt

SEQ ID NO: 62527 - DNA, 463 bp, Zea mays
  Clone ID: MRT4577_157025C.1
ttgccagcgcttgttttttctttttttttttacagctagtaatactatattactgtttacggacctaaacagtcgttttgagagtttagggagcgacttgacacagatgtacaagtttagggatcgtcggcgtactttactctatattatggatgattatttaaactaacagccatagacaattggacatgagatgaattattttttcagggaaagtgtttgcactgaacctaaatcagtacatagatagatccagtaggtggaaaaatacagaacgtagtgttacggtccacattaaacaggtagctgatcgaaaacttggaatggaagccgaagaaatcgtaagcgatacacaacgcaaaccctggagacacgaaatgcatggccggcgaaaattgcaatccatgtatcgtcgtgcccacgggaggatcagagattcagaaaggctggttgttgcaaaagg

SEQ ID NO: 62528 - DNA, 173 bp, Zea mays
  Clone ID: MRT4577_157026C.1
ctaattatgaaccaccacaaaacaacagcgctattttgctattagatacatccacccccacctctgagaagactaccatccacacaagcccatcatgtcttgcatacgtggtacaacctcttacacggagagcaacacgagaaaggcaaagaacatcgtgatggaggtaccaa

SEQ ID NO: 62529 - DNA, 312 bp, Zea mays
  Clone ID: MRT4577_157027C.1
tttgcccttcttgcgcgtggtgccctttttagagctcagaaatgcgtgcattatgccacaatgctcacttgctcctagtgccattataccacagttcctccgaccagttacttcaatgggctccgaacacctagctgcgcaagcctacaggctacaacaagcgcttgcggagagcgttttacaacaaccaattaaccaattggaacagcagtccttggcacatctaaccatacaatccatggcagcacaggagcaacaacagctcctaccatctctgagccaactacatgtggggaaccctggcgcctactt

SEQ ID NO: 62530 - DNA, 252 bp, Zea mays
  Clone ID: MRT4577_157028C.1
tagcaacattagaaagcactaatacgtgtacccaactaatgggcagcccaacatatttttgcctcccttatgctccctgggtctttcctgcagtgctgctacgggcgacattttcccggaatgctcgcaagctcctatagcttcccttcttcccccgtacctctcaccagcggtgtcttcggtatgtgaaaacccaattcttcaaccctacaggatccaacaggcaatcgcagctggcatcttacctttatc

SEQ ID NO: 62531 - DNA, 287 bp, Zea mays
  Clone ID: MRT4577_157029C.1
agtgagtcgtattatacaatacgacaccccaagccgcacagcacagacccgggcttcgccggcgcggtagccagagcaagacatggacgggaggacgtacggccacgagaccaccctgatggtggctgctgcagcaccttctggaagtgcccagactgcgacgccggctcgcgcggcgatctcgcacgtcctgccgctgcgggcggcgggcatacgcgcgggttgcttcgcgaagcggccccgtcggcgcgcatccggccggcgttaccgtggccgtagcgcgctgt

SEQ ID NO: 62532 - DNA, 329 bp, Zea mays
  unsure (1)..(329): unsure at all n locations
  Clone ID: MRT4577_15702C.1
gtgcgcttcgctggtgcggttgtcgtgtccgtggtggggctccgcctgctgcggcttcttccgtcggggctctttcgtctgtggtcgtctcccggggctgtgtgctgggcggtggtgtgcgctgtcctgtctgctgggctgccgtgcctgtcgccgctgtggctgggctgctgccgtgcttgcgtctctgtcnttcgtcttgcgtcttgccgtggcttggttctcggggctcgtgcccggtttgtcgttgcgggcttcctgcgggtgtctcggcgtgtgcggggtccgtgcgtgccgcggtcggtgggggtgggtgtccctcggggtgt

SEQ ID NO: 62533 - DNA, 324 bp, Zea mays
  Clone ID: MRT4577_157030C.1
ggacccaaacacaagggccaaataaattcatccatggaaaatcagttttaaacccaaaactaaaatggcagccacaaaaaaaaactggtgggaaaaaacaggcccctaaaaagagcaggcaatgccaacaaattttatgtccaagcttaagataaattcaaaaattaagatccccaccgaataaagcaaaattgcaaaacaaacaggggatcaaaattctgtctgggttttctaaaaggaaaaattatagccctcaaaatgttaatggcgaccattttttatgcataaaggggggaccaaaattctggctgggtttcctaaaaa

SEQ ID NO: 62534 - DNA, 2825 bp, Zea mays
  Clone ID: MRT4577_157031C.1
ccggccgggccggggtcccattccacggttgcgtctcctttgttgtggtctgcgcagggcatgtcgtcctgagcagtgagcactaggcaggacacggatgaaggagcggaagccggcatcctcctcctccgctctggtccggatcctcgcggtctgcgcgtcccaggcaaaagattatgggagatgcatagcagcaaaggtccctgagattgaacataatatgtgttccaaggagtttctagcactcagagcatgcatgcagactgtggttaagaacaaggcttgaggctccatatttataggaagtttgatactaatctcttttggtaattgctgcggatttttgatccttttctatttttcagtcatcttaaaaagtagaacctcattttcttggctaaacaatcagtagagcctaagcacgcaagagacaaagaaaatgttgggcaatcagatacaagggggcttgggcacatctggggcactgtctcatgcttatgttcagcatcctccgctgcgatgtgacataccagacactcagggtctgttctatgatgatgcaaataagttccttatagctccaactgctgatcggatattgtactggaaaacaattctacctactccatctggacctccaaactctgatccagttaatgaaggacctgtcttgtcagttcgatattcgctggatcataaagttattgggattcaacgatccagacatgaaattgagtttagaaatagggaaacaggggagacttgtagcaaaaagtgcagagctgattcagaaactgtacttggctttttctggacagattgcccaacatgtgatgttatacttgtaaaaacaagtggtcttgatcttcttgcctacgagcctcagccccatgcttttcacttggtggaatcgaagaagttcaatgtgagctggtatctttacacacatgaaagtaggctgattctacttgcttctggaatgcaatgcacgatgtttactggctatcagttttctgctggtgggattgtcaaaataccgaagtttgagatgatgatgtctaaaagtgaagcaaacaacaagcctgttctagctgcagatgatgtttacattgtaacagtctatggtaggatttattgcttgcagcttgacagagttagtatgtcattgaatctatatcgcttttaccgtgatgctgttgtacaacagtgtactctgccaacatactcaagcagaattgcagttagtgccgttgacaacataattatggttcaccaaatagatgcaaaagtagtcatgctttacgatgtgtccctggattcttatgccccagtttctgcaccacttccactgctattgagaggactgcccatcaatagtagacaagtatctcagactgcggatagccagtctagtgcatacggtggaaccatctatggagaaggttggaacttcctcattccagacctcatctgtgatgctgagaatgggctcttatggaagctccatttagatctggcggctattgctgctagtagttctgatgctccttcaattttggaattccttcagagacgaaagtctgacccaagcatggttaagactctatgcctagctatagttcggacaatcatcctggaaaggaggtcagtgcccacagttgctaaggcgatggatgttgtccttgattcctacacgcgtttgatgaaaatgggaggggcttttcctggggttaggcgaatacatgagcaaaatcagcagtcaggtagtcagcctattgatggctcccatgtggtttctcaggaatccagtcctggaacaacagttagtcctgctgtgaacccagaccacggaagtgaggctgtggatatatatgtgcagtcaaatccaggagttgagcatacaatagacaggggattactaaatataaacatatcttctgattctgtggacaatacatctgatgctgtcgacaaacgacagcaagctgtaggcgaagctagccgaccattgtcttcaggcacaatgacgcaacatggacaacatgctggaaccgtggcaatttctccaattgagatgttccagtctgtctttacacttgttgaagatgaaatgatgggtgatcctgcatatcttattgctgtcatcatagagtttctacggagtgtctcaaaggctgggcttaaggctcctcacaacctttatgtgatgacggcgacactactagctcgtagcaaccgttacgctgaaatagcattgtttgtgtcaaacaagattcttgagccgtgtaaagaactggcaatgcaacttatggagctgggtctgcagcacccgccaacgaggaagctgggcatggacatgctgagggagcgaggcctgcatcacgactacgtgactgcgatgctgcaagatgggtactacttggaggccctgcgctatgccagaaaatacaaggtgatcaccgtgcagcctgccctatttctggagaaagccctggcgaagaacagcgcccacaacctggctgcagtgctgagcttcttctgcgagttcactccgagcttcaaggccacatcggactttgtcagataccggcatattctgtctgaaatggtttgaacagctttccgttgtgcaaacttgttgtcccgaaatgacttggcacgtcctctgtaacaagcaacgtcacctcggagggtacttttatttaattcttttggtccctcttgcagaaaataatattttattgttgtgaataaaaaaacgttgcaattaccgatgaaaaaaaaaaaaaaaaaagaaagaaaaaaaaaaaaaaaaaaggccccta

SEQ ID NO: 62535 - DNA, 152 bp, Zea mays
  unsure (1)..(152): unsure at all n locations
  Clone ID: MRT4577_157032C.1
cnagacagatcttattgggccttttttaagaggattacggactagccccattgcaaccaggagcaccaaacctaggcaaacagcttccaattgatgggatgcaaaataagttatgggggcacgaccaaatacatacactaaaacctacctaa

SEQ ID NO: 62536 - DNA, 828 bp, Zea mays
  Clone ID: MRT4577_157033C.1
ccccgcgtccgggacacatgctggaaccgtggcaatttctccaattgagatgttccagtctgtctttacacttgttgaagatgaaatgatgggtgatcctgcatatcttattgctgtcatcatagagtttctacggagtgtctcaaaggctgggcttaaggctcctcacaacctttatgtgatgacggcgacactactagctcgtagcaaccgttacgctgaaatagcattgtttgtgtcaaacaagattcttgagccgtgtaaagaactggcaatgcaacttatggagctgggtctgcagcacccgccaacgaggaagctgggcatggacatgctgagggagcgaggcctgcatcacgactacgtgactgcgatgctgcaagatgggtactacttggaggccctgcgctatgccagaaaatacaaggtccttggctttgctttgattcgctcttccccctttcaccttgcatacgccgatgactgacgcgaggattcgcccaggtgatcaccgtgcagcctgccctatttctggagaaagccctggcgaagaacagcgcccacaacctggctgcagtgctgagcttcttctgcgagttcactccgagcttcaaggccacatcggactttgtcagataccggcatattctgtctgaaatggtttgaacagctttccgttgtgcaaacttgttgtcccgaaatgacttggcacgtcctctgtaacaagcaacgtcacctcggagggtacttttatttaattcttttggtccctcttgcagaaaataatattttattgttgtgaataaaaaaacgttgcaattaccgatg

SEQ ID NO: 62537 - DNA, 860 bp, Zea mays
  Clone ID: MRT4577_157034C.1
tgttttgtttccagtccccacctcctggttcgcggccggcccctcgaatttcgctgctcttccacgggatattccacggttgcgtctcctttgttgtggtctgcgcagggcatgtcgtcctgagcagtgagcactgggcaggacacggatgaaggagcggaagccggcatcctcctcctccgctctggtccggatcctcgcggtctgcgcgtcccaggcaaaagattatgggagatgcatagcagcaaaggtccctgagattgaacataatatgtgttccaaggagtttctagcactcagagcatgcatgcagactgtggttaagaacaaggcttgaggctccatatttatagggagtttgatactaatctcttttggtaattgctgcggatttttgtcatcttaaaaagtagaacctcattttcttggctaaacaatcagtagagcctaagcacgcaagagacaaagaagatgttgggcaatcagatacaagggggcttgggcacatctggggcactgtctcatgcttatgttcagcatcctccgctgcgatgtgacataccagacactcagggtctgttctatgatgatgcaaataagttccttatagctccaactgctgatcggatattgtactggaaaacaattctacctactccatctggacctccaaactctgatccagttaatgaaggacctgtcttgtcagttcgatattcgctggatcataaagttattgggattcaacgatccagacatgaaattgagtttagaaatagggaaacaggggagacttgtagcaaaaagtgcagagctggatcagaaactgtacttggctttttctggacagattgcccaac

SEQ ID NO: 62538 - DNA, 375 bp, Zea mays
  Clone ID: MRT4577_157035C.1
cggacgcgtgggcggacgcgtgggcggacgcgtgggcggacgcgtgggcggacgcgtgggttacattgtaacagtctatggtaggatttattgcttgcagcttgacagagttagtatgtcattgaatctatatcgcttttaccgtgatgctgttgtacaacagtgtactctgccaacatactcaagcagaattgcagttagtgccgttgacaacataattatggttcaccaaatagatgcaaaagtagtcatgctttacgatgtgtccctggattcttatgccccagtttctgcaccacttccactgctattgagaggactgcccatcaatagtagacaagtatctcagactgcggatagccagtctagtgcata

SEQ ID NO: 62539 - DNA, 377 bp, Zea mays
  Clone ID: MRT4577_157036C.1
gccggatctcaaaggtataccaaacttatgtatcgcgagcttgcagacttttttaattgtgttactcgagatacattaaattgagtcgactggccacaacgtttacaactgggaaaactggtgaaaaccctgcaatttcctaacttagtcgcctatgccccatatccccatttggccaaatggcgaaaaggccaagaggcctcgacctttcgacctttccaacagtttgaaaggctaatgggacaatggctctagccctgtattaagcccttaagcggtgggggttacgtggatactgaccattacacttgtcaacttgctagcgccctatcctttggtttttttgctttctttccttgctttttcgccggttttcc

SEQ ID NO: 62540 - DNA, 1473 bp, Zea mays
  Clone ID: MRT4577_157037C.1
ttgggaccctcgaggccggccgggaatgtcccagatggcattggatagagaagctaacaccaatttcataactaatgttgaggaaaacagtaaagacgagctcgttggtcaagaccaagaatgtgctgaagaaagtaatatctgcaatcaagtggcggaatcaatggcattccatgaaaaggaaacacaaggtgaaactgaagaaatggaagagcagaagaacatccctcgacattatgaagttgaggataataatgagactaatgaactgtctcctacatttgcttcttgtcagaataacttcagtttgcaagtggaaaaaggaatacaaatttacaatttagataccccgccacaagatgaagtgttgatcgatccacccgataaagggaagacagttgattcagagttatcacctaacatcaaagcagaagatgctgttacaatagaagaggaaaagcttggccagtctagctcatttaaaatacgtgatctcaacctggttggtagtccagaggttgccgacatgcgaggtgaccctcgtttaggccaaagcttcactgctggatgttcagtggacctacaagataatcaacaaattgaccttggaacagctcttggtaacaatccaaataatactgatacatgtaccccatttctgttgggaaacaaggcagttcaagttattgatatcgaagatgactcaccaattgaagctggtgcttgtgacacttcaaagtcaaaaggtgagatggtatattctagcatggagggctcgatgaaccctctggcaaacaacgatgctctacatggtatcccagatggttatagccttgcaatttcagattaccttggtgctgatatgtcatgctaccaatcaatacaaacagaacttcaaggtgggatgaacctaaatggttcagagggcataactgttatggatgattcaatatacagttctcttggtgacataggttttatggaggtttgggaccagcaacctcaagactatgagaagttcttctgaggcgctcgtatccctgaaactgttctggagttcgactgataaatagaccagttacacttgcataggcagaaataaaacacctgatcgtgcctataaactggaaacccgtatacttgtgcgccagcagcagctctttcacttgtatgttccaggccatgcatattggggcttttgtacgggtgcatcctacgcgaagcactttcccttctgtaataccagggtctgcgtcggcagctcaaagagcagatattcgtatgaaacagttctttgactccctgccttgcccgacagcggtgtaaaaagttgtcgtatagctgccacgtaattcaaaggaattgacctaagcacgacatagtattcgtctgaaacatgtcttcatttataaacagttctatattccgaaatagaattgtttatttgttatatctatgttcttgatgcgctgt

SEQ ID NO: 62541 - DNA, 223 bp, Zea mays
  Clone ID: MRT4577_157038C.1
cacttacactcctttaaccataatcccccacaccctatcttcccaccactcaattctaaccaaccacaattaccaattatatcaatcaatccatcctctaatcctctgcttaattaccatctacactcaatcatcactatcctacaactaacctttctcacaactctctaatcccatatcacattccctatattttaacgaacaatccaacacttccttaatt

SEQ ID NO: 62542 - DNA, 473 bp, Zea mays
  Clone ID: MRT4577_157039C.1
cctccacgcgttctttttctcttgttgcctttttgttgttttatattaaggcttatgcttgtttgctgccttttatagggatcatttccgaggcaacagaacactgtattgctaaggcgttgcgttctattcgtggccagacgccttccaaaggattgacccttttttttgaaccgcgaaccggaagtctactggtttgcgccacatacggaaaatgccccctggggcacccgggctgagacaggatggggctcctggggaaacccgacccatacacaacccggggggcccatcatcgggtaggcattgtccggacactgcctaaccattgatgaccccccccccttgtggacgcctccggtttcaacaggatacctatacattctgctcctgtgtgccccccgccacatccccgatgctgggagcaaacccgttttcttcaggtgtacttttccaagagttctttcaaaccc

SEQ ID NO: 62543 - DNA, 430 bp, Zea mays
  unsure (1)..(430): unsure at all n locations
  Clone ID: MRT4577_15703C.1
atacaaattactgtcgagcaaacaacccagagcgtttagagagacagaagccagggagaaggagcggaagagccgccgcggtggaagccaggacacgggaaagctttggacgctaccaattcagcgaataacctacgggggtgcgtggaattgagcaaaccctccgccgccgaaccaccatccgctgtgagcagtgcacgctagcgtccgattcctgggctcggctcaccgccaccggcatcaagcgccggcatcgctagggtttcacgcccccatccccccagggcgccgtcgatcccggtcggccatctcccggtgcgcacgtggtaactgatcgttaaattcatcgatcgatcggtgccatgganggacgcagctccaagcaggcaggcgtgggcgttgtggccgacctccacgaacacctccttgt

SEQ ID NO: 62544 - DNA, 354 bp, Zea mays
  unsure (1)..(354): unsure at all n locations
  Clone ID: MRT4577_157040C.1
gacacaccttctgacagcattcagaacgctgcctgcttatgctcagtatgatcaaccactaccatttagccaactttttggcgtaagctccatgctacacctcnttgactatcacactctacaatcagctgccgatctaccagcacgctgcgcctaacgctggaaccctattacaactgcaacaagcgactgtacattcataccaactagcttcagacaacacccgacagcattactaccaacaacccatcattgccggcgccctattttagatagcttatacaacatagatcaataaaaaaggtttttgtctgacgttcgcggcttcccagacataagaaagtacctgcggtt

SEQ ID NO: 62545 - DNA, 299 bp, Zea mays
  Clone ID: MRT4577_157041C.1
cggtgacagcggtagggccatctccctcttgggtgaaaaagatggtgcccttgacaccggaagtgtttacaccaccaatggatgcatgtcaactggaccacactacaatcctgctagcaaggagcatggggcaccataagatgagaaccgacatgctggagatcttggaaacgtgacagctggagcagatggtgttgctaatatcaatgtcactgacagtcagatcccactgactgggccaaactcaatcattggcagagctgttagacgttacgctgatcctgatgatattggaaagg

SEQ ID NO: 62546 - DNA, 482 bp, Zea mays
  unsure (1)..(482): unsure at all n locations
  Clone ID: MRT4577_157042C.1
agacatgataactgagaacacctgtcgtgtctggtattcttgtatcacaaaggatattccttccagggttttcgatgtaaagcagaaaaaaacacacaccatacaaagacatacactcatacagtcttcaagtgcgaaacaatttacaagagcatgatccaaaactaaatttacaccattaacattttacaaagacacagaaactctctttttttttcagaacaatcactcttatgtttgtgcatgtgcctttctagacaaaagtgtggacaactgggttaagaacgacttctttttcctcgatttcttgtccgaaacaaactgatccatactgccagttgacctgtgcacctttggatctctgagttcgtttccttccagataagagcccttctgctggacaaacatctgggtggagttctgacaggactaactgcatgctgtgcagcctcatgggcttttcgacgctgcacatgtcnagc

SEQ ID NO: 62547 - DNA, 638 bp, Zea mays
  Clone ID: MRT4577_157043C.1
attgggacctcgagccggccgggaagtctatccccgtaaagagaaatagcatcgcaactaatctgcaaccacatagctccaatccacccatcccctcctcattcactccgtgtggccatggactgcttgttcgccgccgagaccgacggctctttggtcctcagctatatctgtcgccgcactcgcctgttgcctcaagcacgtgtctgtgtcccgactccgaagggcgtcatacgcagcccgggcacgcgtaccgcactcgatccactcgcggatgacgcgctgtcaccattagactcggcctgtcgcgggatacgacgactacttgtccgtgaacacaaagatctccccctgctaccgacgcctcgacgtggctgactacgagtagatcgacgtgttcctctccgaggacatacgagatcacacatcctcaccatgaacatcatataccgtgtacttcccatttgcatgtgcgacagacatgactgccttcgccgacagatatgatgaattctaagaatattaacatagatgtatccgacgcctctattgccagggcgagctccaaactggcatgtgagcacaccgacaggagactcgaaagacttggactgataataaagacgcatgtatttctt

SEQ ID NO: 62548 - DNA, 376 bp, Zea mays
  Clone ID: MRT4577_157044C.1
gtgtgttaatgatgactgggtacatggttgttaatgatgaaaaaaagcaaacggggggacacccgacacattccattccaataggggggaacacgccactctaaagcgcattggtatacatcaatgtttttgaccgggcccccttattacaatgtacacattggggtactgcacgaaggggggagccctgacacccacccttctaaaggtactcctgtccataaacgccttaggcgaccatggccacactgtctttggcccacccatggtggtggttagtacatgccccaccttggcgctagaggaaggtgcacttttatgcccctgttggtcaaaggacggccaggtgaaaaaccggccggaaaaaaaagggaaa

SEQ ID NO: 62549 - DNA, 567 bp, Zea mays
  unsure (1)..(567): unsure at all n locations
  Clone ID: MRT4577_157045C.1
taaactcggngttcaagctaaccaggcgccaacatatactgcgttagaccttaggcgacggccatgtctagcgctagacacactgccgtcttccttctccttcttggcgttgtttatgagctgagcactgttgcactcgccaatttttacattccaaagttcggtggccatggggtggggggacgccgttgccggtttggctttggaggaggtatagggttcggcggaggtgctggaggtggtttcggtggcggtggagggctcggtggtggcaccagccatggtggtgggtttggagcgggtggtggattgggtggaggaggagggtttggaggaggccttggtagtgggttcggtgctggatcaggcatcggtggtggcggtggatcagggggaggccttggaataggacatggaggaggctttggtggtggaggtggaggtggaggcggagggggactcgacggtggccatggtggtggtttcggtagcggaggtggagttggaagtggtgtctacggcagtggtggagggtttggaggcggcggcggaggaagcctcggcagt

SEQ ID NO: 62550 - DNA, 216 bp, Zea mays
  Clone ID: MRT4577_157046C.1
tgtttatgttgccatatagtcaagtcgagacgagaccgtcctacggccgagtgtcgctcgctagctaggggtttcaccaatggaggggcccaccaccttccgtcgaggaccctattgtgcgcgcaacatggacgacgtgaaccttaccttctagaccttcccggcggtcgtggacactagcaggttggaccagattggcatgaaggacgacctact

SEQ ID NO: 62551 - DNA, 1694 bp, Zea mays
  Clone ID: MRT4577_157047C.1
gtgccccctcgcctccaaggctccaacgcatcaatcaatagagcgagcgcgctgtggcatggagcacaaggatgggggcacagcttctgctggtggtctgcccgccggaagcagcttgtgctcgggctcgccgttgctcgacgcgccgatcctccgccgcctctacgccgggcaaatccttgccagatggggcgcgaggatgtgggagttttctgttgcgctgtatatgattcgcatttggcctgactcgcttctctttgcggccatctacggcgtcgtggagacatcctctctcgtggtgctcggtcccgtggtggggacgctcgttggaagggccacataccttcaggttttgggcatctggctgctgtcgcaaagcatatccttgattgtcgctggaacctcggtgaccaccctgctcatgtatgccaacctgagagccacaagcttcccggcattcatggcgctggtcgccgttaccaacgtctccggcgctctagctgccctctcagctctcgccggcaccatactgatcgagagagaatgggtggtggtgatctcgagcgggcatcctccgtcggtgcggacggggatcaactcggtggtccggcggatcgacctgggctgctcgctgctggcccccgtgctgtcggctctcgtcatcagcctcgcgtcgactcaggcctctgcggctgtgctggcgctgtccaccgccgcctcggcggggctgcagtactgcctcttcgtctccgtctacaacggcgtgcccgccctcgccgcgccaagacagcccagagcttcggacgcagagcgcccgccgccagtaccgatgaccgtcgcgccggccgaggccgagccgacgcaggcgttggattggagggcgaggctggcagataagctctccgtcgcgtccggttgggagtcgtgggtggtgtacgcgaggcaggacgtcgcgcttcccggggtggcgctcgcattcctctacttcacagttctcagctttggtacgctgatgaccgcgacacttgactggaaaggcatacctgcatacgtgatcagtttggcgcggggcttcagcgccattgttgggatcggagcgaccctgctgtacccgctcgtgcactcccgggtgtccacgctccggacggggctgtggtccatctggatgcagtggtgctgcctgctgctgtgcgtggcctccgtctgggcggccaccggcgtggcgtccgcgtggatgctcatggccggcgtggcggcctcgcgcctgggcctctggacgttcgacctcgccgtgatgcagctgatgcaggacggcgtgcccgaccacgagcggtgcgtcgtgagcggtgtgcagaatgcgctgcagtccgtgttcgacctgctcacctacgtcgtggccatcgtcatctccgacccaaaggatttcagcaagatgatcgtgctctccttctcccttgttacctgcgccgcagtcatgtacacggtgcacgcctaccgagcacagaaagcagcgtgcacctcttccacctcgacatgacatgatcctggaaaagaagtgcgagactgcaaggtgtacggatgaaaactgagcggcttatgtatgattgattgcctccatggttttatcctagaccactgtatgcgttaattttatctgaacctatgtttggttacttgtacgtggagacacagac

SEQ ID NO: 62552 - DNA, 306 bp, Zea mays
  Clone ID: MRT4577_157048C.1
cctatgttatttttttttatcttatttttttttttggttgttttttttttatataaatggccaagccgataacaggatggaccacaacatcgattaaacattggatttgacattgagttttacacaacaaacccgaaaacacacggaattattcaacaacataaaacatttttaagttttccaaagcattgatgggtccatttaaaacgcggacatccttggtgtaaccacaaagggctttattaaattcgactgaaatttcactttattggggccagactattggtgaacacattgagagggttg

SEQ ID NO: 62553 - DNA, 336 bp, Zea mays
  Clone ID: MRT4577_157049C.1
gggggaagggaccaaaatccacttttattcacaaattggtcggccccgccatgatttttttcctaccaccgaaaaaatccacacttattcaaaaattattcggccctgccagcctaaaaagcccttaaagaaatttttttccaacaaacgcccgattttttccaccaggggtttttcgaactccatttttttcctaaaaaggagggggtacttttggaggagctcccggtcctgttccttgtccccggcccaaactgccaattttaaaccaagggaggttttttccaggttgccctggtacaggcccaaaatggggacaaaacttccttgcgcgtt

SEQ ID NO: 62554 - DNA, 636 bp, Zea mays
  unsure (1)..(636): unsure at all n locations
  Clone ID: MRT4577_15704C.1
taggggccttttttttttttttttttgagaaaacatataaaaaatttttagctttggatcacaacacaggaaagaaagaaaacatataaaactttcagctttggatcacaacacatgcccaagagaatcagcaggacggttccaaccaatttgagttggagccagccacagccagtatccaactgtccaatcggcaaccagatcattattcaaccaatcaatgtactggttgagctatactctgctactactactactgcacatgacacataacattccttcacatgagctgagcgtagctcctttctttatttgccattgatttagtactaaatttgcgagaaatgaaccggaggccaaaacaagcacaccgtccttgttacaaaatttccattccatccaaaagcaaagaggagcaggggagagaaatccccggcccggccggctcgagcaccgcacaccaagggntcgcttcgctcgctcgtccacactacncgtcgaagcccgtccggctccagacggcgtcgcgcacncgcgacatgtcncggcccttgagcgtccggccggcaccctccaccacggacgcccgcgcctgccgccgcgccaggtacacgtgcggcggcacccacccggcgc

SEQ ID NO: 62555 - DNA, 115 bp, Zea mays
  Clone ID: MRT4577_157050C.1
ttgttttctaccttgccatgcacaaattcagactgcttccatctggtgcctgggggatcaacgacaccataacaatggtatgttaggagatccacatcctgactgtgcactatct

SEQ ID NO: 62556 - DNA, 1114 bp, Zea mays
  unsure (1)..(1114): unsure at all n locations
  Clone ID: MRT4577_157051C.1
cttctgcctgcctcggcacccgggcctttgccttgtgaagaaaagtcgccgcgttcctcttggctgatgaaatcctcttctcgtctagatcgtgagtcttgctctgttatttgattgttctaaacgcatggttttgtttttgtgatggtgtgcaggttccgatctgtttcgtttgattgctgagttgacgcatcggctcgaagcgagacaaggctgcatggtttttgtgcctggaggtttctgatcagcgtgtttaaggaaactgggtgccacaatttgttgctagaagtgctcgatccgtcgaattgatatctgccgagctgcgacgttccggggatctggatcttagcgcactggacatttgggaggcgtcggcgggcttctaaagcgtggcgggagacgaaggaggggaaaaggatacatgaaaaagaagtgagatgtgacatcttgaaggcctttgccatgttgggtgcgctcgcatggcaggcatcgtaataaagatgttggttttgtgtgctgggtgggagagcgcacagggaattgttttttcatccctgggttctcctgcccattgtgtccccgtgccctgcttcgtgttgtttggcttctcgtcctacgcttcgtcaccggcgctgcagcaaattgaacggggtttctcgtctcacggcgtgctgcaaattgaacggggctacatcgcaacgcaacacacaaggtacaaaccggatctaaacattttcaatttacagcaaagttagcaagttactgaaatcaccatcaatcgttcaaaacttcgcgcgccacaaacttctacgcctatactacgccatgcatatgcagttcattcacccaacgcttatcccgtaaggctataaagcacatgcgaaaggcgttcattcactctgtaaggcgttcttgttcttcacccaacgcttctcgcacgggggtcttctattgaccattgaagaaaaacatttgactggagatagcatctggaatatatgaatctagtataacgaactaggnctgaaaatctgggcaattccagattcgattcttatgtgagatgataaaaacctcataaattatcctgccgactaaaaaatattcgctagtt

SEQ ID NO: 62557 - DNA, 267 bp, Zea mays
  Clone ID: MRT4577_157052C.1
cccacgcgtccgagtacgcgttggattaaaaaaaacaaaaacataactgcgggaaggaaaacgtaagggaaaatcttgcaacgaagctgaaaggaccagtacagatcacatgattctacactccactaccatctatagcacgctaggggtgatcttctatcaagtccaagttgaactgatcagtattcacaatggctacgattgatcatggtgtaatttgcatgcaatgtatgacctgttggagaacaactgctgatgaggtagaac

SEQ ID NO: 62558 - DNA, 1342 bp, Zea mays
  Clone ID: MRT4577_157053C.1
ggtacccctcgaggccggccgggatacgccaacgggcatcttttgcctaccccggcaccaccccccccccccccccgcctttgccttagtgtagaaaagtcgccgcgttcctattgcctgatgaaatcaatcctcttctcgtctagatctgagcctccgcgtggcttccagatcagatgcttggtccgatcaacgacggtgagtcttgctctgttagttgattgttcgaaatgcatggttttgtttttgtgatgatgtgcaggttccgatcagtttcgtttgattgatgagttgacgcatcggttcgaagcgagacgaggctgcatggtttttgtgcctggaggtttctgatcagcgtgtttaaggaaactggatgctacaatttgttatctgcagaccttcagagctgcgacgttccggcttccgggggatctggatcttggctgactggacaattgcgaggcgttgacgggcttctaaagcgtggatggattgttggatctcctttctgccccgcgactcgatgatatctctttgtattggtaattattggatgaaatttcgataattattagatcggagagatgttggtcgcggcggtccgtgcctaactgaaggcaaggtaaggtccgagacaaaagaggggaaaaggatacatgaaaaagaagtgagatgtgacatcttgaaggcctttgccatgttgggtgcgctcgcatggcaggcatcgtaataaagatgttggttttgtgtgctgggtgggagatcgcacagggaattgtttttttcatccctgggttctcccgcccattgtgtccctgtgccctgcttcgtgttgtttggcttctcgtcctacgcttcatcaccggtgctgctgcaaattgaacggcgtttctcgtctcacggcgtgctgcaaattgaacggggctacatcgcaacgcaacacacaagcgcgccacaaacttctacgcctatactacgccatgcatatgcagttcatccactcaacgcatatcccgtaaggctataaagcacatgcgaaaggcgttcattcactctgtaaggcgttcttcacccaacgcttctcgcacgggggtgttctattggtagtcattatttgttcaggtgaactaggtctgaaaatctgggcaattccagattctcatgtgagatgataaaaatgtcataatcatttgctaagtttaatgacctacgtcagttcttacgtactaaaaaatattcgctagttgagtcgttccggcatattcctgatgtcctacggtgaacttgtatgtcattatcatttcaacgtatctagatgcattatggaagatttttagttttc

SEQ ID NO: 62559 - DNA, 203 bp, Zea mays
  Clone ID: MRT4577_157054C.1
aattcccaggcaggcaggttttcgaggattgcaggaagaccgaataccgatgcgtgctggggctcgttactggaactttacagtaccccaaaatctcatatccttcctgcccgcccgcccgttcccgtctactcgtcgttcttgtcttccgcgctccaccttctttttctcctacttcatcttaatcggatactctcatattc

SEQ ID NO: 62560 - DNA, 630 bp, Zea mays
  Clone ID: MRT4577_157055C.1
tttcgaaacgcatggttttgttttgtgatgatgtgcaggttccgatctgtttagtttgattgatgagttgacgcatcagctcgaagcgagacaaggctgcctgtttttgtgcctggaggtttctgatccgtcgaattgatatctgccgaccttcagagctatgacgttccgggggaatctggatcttgacggactggacaaatgggaggcgtcgacgggcttctaaagcatggttgaacaattgtgagatgtgacatcttgaaggcctttgccatgttgggtgcgctcgcatggcaggcatcataataaagatgttggttttgtgtgctgggtgggagatcgcacggggaattgttttttcatccctgggttcttccgccctttgtgtccccatgccctgcttcgtgttgtttggcttctcgttctacgcttcatcaccggtgctgctgcaaatttgtaacatccggccaatgttagagatcacacatatcagtactagtgagtacgtatttgaatttgtaatggtggtgggccgtactgggccgtagtgggctatacccatgacattagtataagtatgttgtaagacttgaggaaggggtatggaatgaataacagaaaccttcccgg

SEQ ID NO: 62561 - DNA, 750 bp, Zea mays
  Clone ID: MRT4577_157056C.1
tcattcatatgcagttcattcaccctacgtttatcccgtaaggctataaagcacatgcgaaaggcgttcattcactctgtaaggcgttcttcacccaacgcttctcgcacgggggtcttctattgaccattgaagataaacttttgaatatatgaatcagctgtgtattatttgctgtagcttcaaatgcgagacctatggttgcagtcatttttattgtagttagtttaaatgatacatcgtcgtcaccgcatgaagatctactgctgagccatatgaagacctgctgcctcatcatggtgtttgtatatgaagatcaactgccagtgcctacacgctggacggagtatttatatgatgtgaaggtcaactgttcggcatcgtcggtatgaaatggctatggccttcaaagcttccttggtcactggacagggaagaaattttctgctcaagctaaaaattagatacaagcttgttcaacttgcactatagttcatttgagtacttacctgttattgatctctattgagttgaagctaggtttcaaggtatctcctaaggtttcgtataggtgaaaactagtgtttcttttttttttttttttttgcactacaatctgtgacgtttcatgcccttagtttgagctttctccttagtgagtttattcttaatttttcttcttttccaaatcaaaagatgttttgactttccatattttgctatgcatttagttaaatctacactgtagat

SEQ ID NO: 62562 - DNA, 177 bp, Zea mays
  Clone ID: MRT4577_157057C.1
ggggtccaaaccacccttttccccaaaaattatccccttccacttcaaggggccctccaggggggggggggggggggccccccaggggaagggggacaccccggtacccatcgccgctaaacgggggaaccagctatagggagctaggcagggggccccttacattattaccacagg

SEQ ID NO: 62563 - DNA, 307 bp, Zea mays
  Clone ID: MRT4577_157058C.1
cccacgcgtccgcccacgcgtccgttcatgtaaagcatctgagtggaagagaagagaactgcaggttgaaagtggagaatgaaatgctgaaggaggaaaacaataggcttattaggcaggaacagagcaatgctcctgcccctgctccctgtcccagatgcattaatgatgcggtgcacctactgctcgagaaagaagttgaacggctgaaggctgcttaaccagatgctgcaccaagagttgcagctacaaggctcggatggcgaaactcatatctcttcttgactcgctcagagcttatcatggc

SEQ ID NO: 62564 - DNA, 495 bp, Zea mays
  unsure (1)..(495): unsure at all n locations
  Clone ID: MRT4577_157059C.1
ggcttctcgttctacgcttcatcaccggtgctgctgcaaattgaacggattttctcgtctcgcggcgtgctgcaaattgaacggggctacatcgcaacgcaacacacaagtttaaatgatacatcgtcgtcaccgcatgaagatctactgctgagccatatgaagacctgctgcctcatcatggtgtttgtatatgaagatcaactgccagtgtctacacgctggacggagtatttatatgatgtgaaggtcaactgttcggcatcgtcggtatgaaatggctatggccttcaaagcttccttggtcactggacagggaagaaattttctgctcaagctcaaaattagatacaangcgtgttcaacttgcactatagttcatttgagtacttacctgttattgatctttattgagttgaagctaggtttcaagtatctcctaaggtttcgtataggtgaaaactagtgtttctttttttttttttgcactacaat

SEQ ID NO: 62565 - DNA, 532 bp, Zea mays
  unsure (1)..(532): unsure at all n locations
  Clone ID: MRT4577_15705C.1
gcctttggacgtcggacagccatccctccgagcttgtctcgtctattcctcatctcgcggatggcggcgacgtccgatctctgttgctgcccggtctgatgatttcttggacgcacgacgaacgcgagttggaaggaggtctggaggtggacgggctttgggcagcggggagctgggcgccnagcagtgtcgaactcgaaccctaccaaatcacagatattaattttgagagctgtgaagtagaaaactctaatctttggaggagactttctgaatctgcatcaaaagttgagtgtgctatgttacttgcagaaagttaaatggaaacaacacaggaagctgacattgagaagnnnnntgaaatgacagtccacatgaaacttgtgaaaaggagttcaactcatatannnnnnnctagtggcaaaggttttaatgaagagacttgaactctggttttatgttatattgtccatttgtacgtgtgaattgagatgatcttatgtggtgtgatgatagatagattaactttgtt

SEQ ID NO: 62566 - DNA, 432 bp, Zea mays
  Clone ID: MRT4577_157060C.1
cggacatctggggcttactgttcattgctgggtatgacgaccatggcccgcacttgtatcaggttgatccctatagagcatacttatcctgcgaggcgttactctgggaaaaaatgacgctacaatgcacatacgttacttgaaaatagaacacacaagatatagagcttgatgatgccatccacactaggaattacatacgtttccaagacatatctcaggggcaaatatgctcccaacaccattgtaactcagaattataaggagctgatctatgagttcaaaattttaagctacaggagaaatcatggatttgtcaggaagatgtggagtaagctcattgaagatgatactaagacactacaccaatatcattgacacttataaacaggctgactgcaaatagggttggtatgattactccgaaaactg

SEQ ID NO: 62567 - DNA, 2053 bp, Zea mays
  unsure (1)..(2053): unsure at all n locations
  Clone ID: MRT4577_157061C.1
ccccgcgtccgnacaccttttgcctaccccggcaccaccccgcctttgccttggtgttgaaagtcgccgcgttcctcttgcctgatgaaatcaatcctcttctcgtctagatctgagcctccgcgtggcttccagatcagatgcttggtccgatcaacgccggtgagtcttgctctgttagttgattgttcgaaatgcatggttttgttttttgtgatgctgtgcaggttcagatcagtttcatttgattgatgagttgacgcatcggttcgaagcgagacgaggctgcatggtttttgtgcctggaggtttctgatcagcgtgtttaaggaaactggatgctacaatttgttatctgcagaccttcagagctgcgacgttccggggaatctagatcttggcggactggacaattgggaggcgttgacgggcttctaaagcgctgctggattgctggatctcctttctgccccgcgactcgatgatatctctttgtattggtaattattggatgaaatttcgataattattagatcggagagatgttggtcgcggcggtccgtgcctaactgaaggcaaggtaaggtccgagacaaaagaggggaaaaggatacatgaaaaagaagtgagatgtgacatcttgaaggcctttgccatgttgggtgcgctcgcatggcaggcatcgtaataaagatgttggttttgtgtgctgggtgggagatcgcacagggaattgtttttttcatccctgggttctcccgcccattgtgtccctgtgccctgcttcgtgaggtttggcttctcgtcctacgcttcatcaccggtgctgctgcaaattgaacggcgtttctcgtctcacggcgtgctgcaaattgaacggggctacatcgcaacgcaacacacaaggtacaaaccggatctaaacattttcaatttacagcgaagttagcaagttactgaaatcaccatcaatcgttcaaaactcagcgcgccacaaacttctacgcctatactacgccatgcatatgcagttcattcacccaacgcttatcccgtaaggctataaagcacatgcgaaaggcgttcattcactctgtaaggcgttcttgttcttcacccaacgcttctcgcacgggggtcttctattgaccattgaagaaaaacatttgactggagatagcatctggaatatatgaatctagtataacgaactaggtctgaaaatctgggcaattccagattcgattctcatgtgagatgataaaaacgtcataattatcctgcgtactaaaaaatattcgctagttgagtcgttccggcatatacaaaattattagctacagttgttcctgcatgcgtgtaatgtccttcggtgaacttgtctgtcattatcatttaaaaacgtatctagatgcattacggaagatttttagtttcctttgttatatttgagaagttatatattgtatatacagagagatgcagctgtgtattatttgctgtagcttcgattgcgagacgcatggttgcagtcattttattgtagttagtttatatgatacgtcgttgtcaccgcatgaagattaactgctgtgccatatgaagacctcctgcctcatcacggtgtttgtatataagatcaactgcagtgcctacacggtggacggagtatttgtatgatgtgaaggtcactattcagcatcgtcagtatgaaatggctatggccttcaaagctttctttcttggtcaccggacagggaagaaatattctgctcaagctcacaattagatacaagacataactcagataagagcttgttcaacttgcactatagttcatttgagtatttacctattattgatctcttgagttgaagctaggtttcaagtatctcctaaggattcgtatatgtgaaaaccagggattctcttttttttttgcactacaatctgtgacgttttaatatttgatgactagttgttcatgcattgctattgtatttgcatatcncctaggtttaagacatttctaacaaggtgactcaatgatgtc

SEQ ID NO: 62568 - DNA, 2041 bp, Zea mays
  Clone ID: MRT4577_157062C.1
cattgggtacctcgaggccggccgggacccggtctttgccttggtgaagaaagtcgctgcgttcctcttgcctgatgaaatcctcttctcgtctagatctgagcctccgcgtggcttccggatcagatgcttggtccgatcgaacaacggtgagtcttgctctgttacttgattgttcgaaacgcatggttttgttttgtgatgatgtgcaggttccgatctgtttcgtttgattgatgagttgacgacgcatcggctcgaagcgagacgaggctgcatggtttttgtgcctggaggtttctgatccgcgtggttaaggaaactgggtgctacaatttgttgctacaagtgcccgatccgtcgaattgatatctgtcgaccttcagagctgcgacgttacgggggaatctggatcttggcggactggacaattgggaggcgtcgacgggcttctaaagcgtggctggacaattgtgagatgtgacatcttgaaagcctttgccatgtcgggtgcgctcgcatggcaggcatcataataaagatgttggttttgtgtgctgggtgggagatcgcacagggaattgtttttttatccctgggttctcccgccctttgtgtccccgtgccctgcttcgtgttgtttggcttctcgttctacgcttcatcaccggtgctgcttcaaattgaacggatcttctcgtctcgcggcgtgctgcaaattgaacggggctacatcgcaacgcaacacaacacgcaaggtacaaatcggatcggaacataaaaaaaaaaaaaaaaagttggcaagttactgaaatcaccatcaatcgttcaaaacttcgcgcgccacaaacttctacgcctatactacgccatgcatatgcagttcattcacccaacgcttatcccgtaaggctataaagcacatgcgaaagacgttcattcactctgtaaggcgttcttgttcttcacccaacgcttctcgcacgggggtcttctattgaccattgaagaaaaacattgactggagatagcatctggaatatatgaatcgagtataaatgaaattagtcacgtatgttggtattcaatatttgttcagacgaactaggtctgaaaatctgggcaattccagattctcatgtgagatgataaaaacgtcataattatttgctaagtttaatgacctacgtcagtttctgcgtactaaaaactattcgctagttgagtcgttccggcatattcaaaattattagctacagttgttcctgcatgcgtctaatgtccttcggtgaacttgtctgtcattatcatttaaaaacgtatctagatgcattatggaagatttttagtttcctttgttatatttgagaagttatatattgtatataccgagagatgcacctgtgtattatttgttgtagcttcgaatgcgagacgtatggttgcagtcattttattgtagttagtttaactgctgtgccatatgaagattaactgctgtgccatattaactgcatgaagattaactgcatgtgccatatgaagacctcctgcctcatcacggtgtttgtatataagatcaactgcagtgcctacacggtggactgagtatttgtatgatgcgaaggtcactgttcagcatcgtcagtatgaaatggctatggccttcaaagctttctttcttggtcaccggacagggaagaaattttctgctcaagctcacaattagatactagacataactcagataagagcttgttcaacttgcactatagttcatttgagtacttacctattattgatctctcttgagttgaagctaggtttcaagtatctcctaaggtttataggtgaaaaccagggatttttttttttgcactacaatctgtgacgttttaatacttgattactagttgttcatgcattgctattgtattcgcatatcccctaggtttaagagcaaggtttaagagcctttctaacaaggtgactcaatgatgtctcaaatttaaaatactacatttaaagtgttcaggtcgcc

SEQ ID NO: 62569 - DNA, 877 bp, Zea mays
  Clone ID: MRT4577_157063C.1
aggccggccgggccgccggccggggcgggacgctccaaccctagcatcttctgcctgcctcggcacccgggcctttgccttgtgaacaaaagtcgtcgcgttcctcttggctgatgaaatcctcttctcgtctagatctgagcctccgcctgtctttcggatcagatgcttggtccgatcgaacaacggtgagtcttgctctgttatttgattgttctaaacgcatggttttgtttttgtgatgatgtgcaggttccgatctgtttcgtttgattgatgagttgacgcatcggctcgaaacgaggctgcatggtttttgtgcctggaggtttctgattagcgtgtttaaggaaactgggtgccacaatttgttgctagaagtgctcgatccgtcgaattgatatctgccgagctgcgacgttccgggggatctggatcttagcggactggacatttgggaggcgtcgacgggcttctaaagcgtggcgggagacaatggaggggaaaaggatacatgaaaaagaagtgagatgtgacatcttgaaggcctttgccatgttgggtgcgctcgcatggcaggcatcgtaataaagatgttggttttgtgtgctgggtgggagatcgcacagggaattgttttttcatccctgggttctcccgcccattgtgtccctgtgccctgcttcgtgttgtttggcttctcgacctacgcttcatcaccggcgctgcagcaaattgaacggggctacatcgcaacgcaacacacaaggtacaaaccggatctaaacattttcaatttacagcaaagttagcaagttactgaaataaaaaaaaaaaattccccctatcgcgcgccacaacttctacgcctatacta

SEQ ID NO: 62570 - DNA, 1410 bp, Zea mays
  Clone ID: MRT4577_157064C.1
ccggccgggaccccggctttgccttggtgaagaaaagtcgctgcgttcctcttgcctgatgaaatcctcttcccgtctagatctgagcctccgcgtggcttccggatcagatggttggtccgatcgaacaacggtgagtcttgctctgttacttgattgttcgaaacgcatggttttgttttgtgatgatgtgcaggttccgatctgtttcgtttgattgatgagttgacgacgcatcggctcgaagcgagacgaggctgcatggtttttgtgcctggaggtttctgatccgcgtggttaaggaaactgggtgctacaatttgttgctacaagtgcccgatccttcgaattgatatctgccgaccttcagagttgggacgttccgggggatctggatcttggcggactggacaaattgggaggcgtcgacgggcttctaaagcgtggctggacaattgtgagatgtgacatcttgaaggcctttgccatgttgggtgcgctcgcatggcaggcatcataataaagatgttggttttgtgtgctgggtgggagatcgcacggggaattgttttttcatccctgggttctcccgccctttgtgtccccgtgccctgcttcgtgttgtttggcttctcgttctacgcttcatcaccggtgctgctgcaaattgaacggatcttctcgtctcgctgcgtgctgcaaattgaacggggctacatcgcaacgcaacacaacacgcaagcttcaaatgcgagacctatggttgcagtcatttttattgtagttagtttaaatgatacatcgtcgtcaccgcatgaagatctactgctgagccatatgaagacctgctgcctcatcatggtgtttgtatatgaagatcaactgccagtgcctacacgctggacggagtatttatatgatgtgaaggtcaactgttcggcatcgtcgataaacaaatgtttgtggataagtaaaaatgccttttttggtcgtcatggaacgccgccgaaggggacgacggcatggtcgccgccgccgaagccgagcgacgacggcagcggggcgaagcagcgagagatgggaggcgacgacgacggtgctccgtgcccgggcccggtcgtcgggcgggtcctgcaagcgccgaagctgagggagttcacgctcgccgagctgcgggccgccacgcgcgggttcaagccggagatggtgctcagggagggcagctttggccgcccctacaagggctgggtcgacgagcgcacgcggccatggcaccaaggcgagtgttttcctccgccaagcgtcgccgccttcgtattcgctacctttttctcttctaccgtttctaccatccctgtgtttcgttgtgctgtgttctccctcgacactgtctcggcgctgccagtttga

SEQ ID NO: 62571 - DNA, 499 bp, Zea mays
  Clone ID: MRT4577_157065C.1
ggttgagttcatgccggctcctcatgcgtatatcaggaaaggcacgctggggcctcagtgccaaacagtccagctccagcctctttgacagcgtgtcagactcaaccagctcattagccatgccttcctcatcctcctcaagagcgagaccagggctactcttgacgggtgttgcatgacgcagcaggcgtgctgatactttgccagcaatgcaggcacaggaatcttggtatgcccaactacaaagactcgatgactgcatgacatacatggggaactacttataaaaggaaggacacgactctaattgtacatgagacataactacctcacgctaagcttataccttactggatctggtgaaagagaaccactacgatcaatgcctacgattagaaaaaataaaaatacacgattaggcttcggggcttgcgatcggatctaatcggactaactgttgcttgacttgccgagtgtgcacaacttagactttgcatgg

SEQ ID NO: 62572 - DNA, 395 bp, Zea mays
  Clone ID: MRT4577_157066C.1
gggggcttgacaagggagctcaaacagtcacttcttcttccccgtggcagccctgctcccagggactcctccctgcttccttctccctccagttccttcccgtggccgtgtccctctgcgctctccctactcgccggcagaagctcccagccgagcccctctgcagccatgggcgcggctcccctgctccggctcatctgcgcgcgtcgcaccgtcgagttccacgcgtcccgagcttctccaccgggttggctgctcctccctgcgtccatctcccatggcgccttggagtcccagctcgggctccttcctgcagccggtcgtcctcgccgtgaggggggtcttggccacctctcagttctttcccatctgggtcggtctcgggggcacccctg

SEQ ID NO: 62573 - DNA, 322 bp, Zea mays
  Clone ID: MRT4577_157067C.1
tatctttgttaccattgttttttttcttatttagcttaccaccccaaggtttatggggagttaaagacctcttgcgggcgcaaaatattcataccctattccgcgtgggggcaaccgatacttattttaaacgggcaccctactttgttaatctcgcccccattattataacttgaaatgcttattcccccaaaaaagtgggcctgcccctttaataaatctcagtatatgaacaaatattttggggttttttgtgaccaaaaaacctagcccggttactacataatcccttggacaaaaaccctttttcttgcctcactgg

SEQ ID NO: 62574 - DNA, 727 bp, Zea mays
  Clone ID: MRT4577_157068C.1
gcctgccgtaccgggccggaattaattcccgggtcgacgagctcactagtcggcggccgccctttttttttttttttattttaaatagaacatggacggtgggttgaatatgtaaaacataggggctcttaatgaaaatgccacggtgaaggggtacaggataatctgagccgtccgattaaaaacggaccatccagatcatactccgagagctataaagtggtacacgatatcacccgttcgattacagatcagcgctccagatttaaaacgccgggatctaatctcatacgtccaccattcgatcaacggtcaggatgaagtgtgaccaaatgggtatcttgcatctaatcggggtcgtttatcaagcagccaacagccatggccaaaccacccacttcacgacggccagcggcggcggtgccctattagctgcgggcggcaccatgggcggccctcacccccaccatgctctcggttggcaaactccattcctggttctacatgtagaggataccaaggcgaattccatggaagtgttcgtaccctagatgaagtaatggccgaggctcctaggtctagtcgccaatacacccaggcgcgaccaccacgatcacttccgcgggaacgcagtgaggctcctaggtctggtaccgacatggctctcggtgctttcgtttgggctcgctcgagccgaattccgagcttacgtacgcgtgcatgcgac

SEQ ID NO: 62575 - DNA, 673 bp, Zea mays
  Clone ID: MRT4577_157069C.1
agataaattcatctcattccacaaactattcgatagcaattcaagtgttgaagtcccaaactcgacatgccacattaaaatagttcctttcgtgtatgaattttcctcccataagagccattgaaagggaatccttgaactttaacctgtagcacgaacatcccattcctaacgcaattgaaactattgtcgtcatcctccatcaccgcctccacaaaaggtcgcaaaacaccaatgatggttatggttgtcgctgtcctccatcaccacctccacaaaaggttgtggaacaccattgggggctccatcagccttggtgcacaaatggcgcctctcaggcctcttgagatccccaaccactgcctcataagttgcccacatctcctctaacaacatcgtctagctttgtcttattgtcatcgtcaccatcttaagaaacaattagggttcatcgttgaaggtggaaagtaaagaggaaccaggacaatgggaagagagcgacaacaatctcaatctaacggagcgggtagactcaggcatagacgtgtctagctttgccttattgtcatcgccgccatcttaagaaacaattagggttcatcgttgaaggtggaaaggaaagaggaaccaggacaatgggaagagagcgacaacaacctcaatctaatggagc

SEQ ID NO: 62576 - DNA, 860 bp, Zea mays
  unsure (1)..(860): unsure at all n locations
  Clone ID: MRT4577_15706C.1
cggccgggagccaccccgagcccagcttccgcgtggaaagacgccctgcctctggacgtcggacagccatccctccgagctcgtctcgtctatttctcatctcgcggatggcagcggcggccgatctctgttgctgcccgggctgatgatttcttggacgcacgacgaacgcgagttggaaggaggtggacgggctttgggcagcgggggagctgggcgccagcagtgtcgaaccctaccaaatcacagatattaattttgagaactgtgaagcagaaaactctaatctttggaggagactttctgaatccgcatcaaaagttgagtgtgaattgtttgtatacgttccagtgccaggattcaattcaatccatcctctccgatccatgcgatccatgcattccctgtaccctctatatgaaggattgtaagcaagcatgtctgattgtaagctatgttacttgcagaatgttaaatggaaacaacacaggaagctgacatggagaagaaaaatgaaatgacagtccacatgaagctcgtgaaaaggaattcaactcataatttttttctacttgcaaagtttctaatgaagagacttgtactccatttttatgttatattgtctatttgtacgtgtgaatggagatgatcttatgtgatgtgatgatgaatagattagctttgttggatattagatatttaagactttggtggattaattttgttggatattgaaaaaaaaaaaaaaaaaagcggtttagatttttagagatgtttcattatgtttttgaatttctaaataattcctattttcttttattttttctgatcttntttgaaaaaaaaaaaaaaaagcggcc

SEQ ID NO: 62577 - DNA, 594 bp, Zea mays
  Clone ID: MRT4577_157070C.1
cctcgaggcggcgggcgggctcctcatatcatctcttcaaccgacgagctaggagtttcagcaccgcacctctagtcctccacccaccacaacccaatacagtacatgaccaccgctctccgctcttggcggcaatgacaagtcggggcttcggaagcctgtctttaccaaggccgactcagttcaagtacgcgcactaacggggacaccctcaccgtcaaggtcatcagctccaccccctggccgagccgctggcgcacggcagcacccggctgcgcatctgtccagcgcgccgtgcatcgccgcatgtgcctcggtctgagatcacaccggagtaaccgtattcaccgcccgcaactacaattgtgatttgctgaagcccgatgctacgtcgatcttgagctctgccgacatgtacatgttcaatagatgaatgtggattgcaacgaacttgtgggggagaattgaggctacttagccagcctgcttaaccgggtaggattagatcagttgtcccttgtatagcatgaattgattaacgtgcatgaataaacgtcgaatcgtttctgtccacgcctttgttctttttcacgc

SEQ ID NO: 62578 - DNA, 1302 bp, Zea mays
  Clone ID: MRT4577_157071C.1
agggcaagagaagcgtcggggttttggctcctgttcgaaatccgcagctagccggtggacaagagagagagagaaagagagagacggtcagccatggcggcgaaggcaagggtctcgctgacggctgtgctcgccgccgcggcgtgggcgtgcttatctgtcgtggccgcctccgcattcgacgtcccgaccgtggccttcgaggaggggttctcgccgctgttcggcgacggcaacctcgtccgctcctccgacgacaggagcgtccgcctcctgctcgaccgccggtccggttccgggttcatttcttcggactactacctccatggcttcttcagcgcgtccatcaagctgcccaaggactacacagccggcgtcgtcgtcgccttctacctgtctaacggggacgtgtacgagaagacgcacgacgagctggatttcgagttcctgggcagccggtggggcgggcagtggcgtgtgcagaccaacgtctacggcaatggcagcaccagccgcggccgggaggagcgctacctcctccccttcgaccccaccgtcgaggcccacagctactccatcctctgggctcccacccacatcatcttctacgtcgacgacacgcccaatccgggaggtgatccggcacccggacatgggcggcgacttcccggcgaagccgatggcggtgtacgccaccatctgggacgggtccgcgtgggccacggacgggggcaagtacaaggtcaactacaagcacgcgccgttcgcgtccgacttctccgggctggtcatcgtcggctcccgcgccgacgatccggtgctccgggaccaggaggacctcctcgggctcgtgacggccgactactacgccgccgtcatgacgccgcgggagcgcgcggccatgcgcgccttcagggcgcgccggatgacgtacacggtgtgctacgacgccgtgcggtacgcggacgggccgttccccgagtgcgacaactcggacgaggagagggagtccttctcggcctggggcgagtccaagaccgtcgtcgtgaggccccgcgcccgaggccgccgcccgcgcggacgcaaggtcggcgccggcgcccggcgccacgggacgtgctgacgtgtcaagcagatgagatttcgttgacagaaaaaaaaaaaccaagatctgttgcgaaagctatttggccgacccgcatgcaggttgtaaagctaggtgtagggactagtagggattaatgcgttatgattctttgattccttgggtgacagttataaatttcttattattagtgtgct

SEQ ID NO: 62579 - DNA, 160 bp, Zea mays
  Clone ID: MRT4577_157072C.1
agatttgcagatggtcttaaaggcggggacactgtttttggtgtagcggaacgcaacacaaacaactgggatccgtccaaataacacacagaccgaccactaacgttgagtcgccccgagctacaactagagccgagtcttcgacattaaaaccatctgc

SEQ ID NO: 62580 - DNA, 1698 bp, Zea mays
  Clone ID: MRT4577_157073C.1
gaccctcgtgccgggtcgggaaggtccctgaccgcgtataaaccctgccgagatcgttgggccgcccagggcaagagaagcgtcggggttttggctcctgttcaaaatccgcagctcgccgttggacaagtgaggaaaggagagagaaagagaaagagagagagagagacggtcagccatggcggcgaaggcaagggtctcgctgacggctgtgctcgccgccgcggcgtgggcgtgcttatctgtcgtggccgcctccgcattcgacgtcccgaccgtggccttcgaggaggggttctcgccgctgttcggcgacggcaacctcgtccgctcctccgacgacaggagcgtccgcctcctgctcgaccgccggtccggttccgggttcatttcttcggactactacctccatggcttcttcagcgcgtccatcaagctgcccaaggactacacggccggcgtcgtcgtcgccttctacctgtctaacggggacgtgtacgagaagacgcacgacgagctggatttcgagttcctgggaagccggtggggcgggcagtggcgcgtgcagaccaacgtctacggcaatggcagcactagccgcggccgggaggagcgctacctcctccccttcgaccccaccgtcgaggcccacagctactccatcctctgggctcccacccacatcatcttctacgtcgacgacacgccgatccgggaggtgatccggcacccggacatgggcggcgacttcccggcgaagccgatggcggtgtacgccaccatctgggacggctccgcgtgggccacggacgggggcaagtacaaggtcaactacaagtacgcgccgttcgcgtccgacttctcggagctggccgtcgtcggctcccgcgccgacccggtgctccgcgtcccgcgccgggacggcgccgcccaccaggacctcctcgcgctcatgacggccgactacgccgtcgtgacgccgcggaagcgcgcggccatgcgcgcgttcagggcgcggcagatgacgtacacggtgtgctacgacgccgtgcggtacgcggacgggccgttccccgagtgcgacaactcggacgaggagagggagtccttctcggcctggggcgagtccaagaccgtcgtcatgaggccacgcgcccggggccgccgccggggacgcaaggccggcaggggacgggctggcgtgtcaagcagctgacatccttcaaaataatataaatgccagggtctgtcgcgaaagctattggcacaatggttagggatgatggtcgattgtgttacaatattttgtgaccaatccaaggggctcgacgaacacatccccaagggacacaccccttgggaatgacccctgtcatatgtatataaacctgtcttccctgcaataaacacgagagttactgtcattctctctctcaatctcgttaccactgagttacaacacgttatcagcacgagactcgcgagatcagagaagaaaataaaggaggtgcggtttttcggtgtccagatacttgcaagacaactaaggactggttgctagttgctacacagcggcatcaggaattgatgcacatcgccgataagactcacattttctttcaccatttgcagtggagtaaattggaaaaggtaacgcaatttgggattaacgcttactgatattattcaatcccatcg

SEQ ID NO: 62581 - DNA, 366 bp, Zea mays
  Clone ID: MRT4577_157074C.1
cgacacttagttctaggcacagagagagagcgggatagatagatttagcctgcaagataaagacatggatcacctttgatgtgtttataatcagaacctgagcctccctgccattctttggtacactttctcaattgggctgtcacctgcgagccagcatgaaagtctcaactacattttttgacgacacactcccctccagaccacattggcgacagtccttgcctgctacattactcttttatacttcaaattcacaatgcaaccaccttatgactttgattaattaaatacctgcacgctcctgatatcacagtcccaaatggaacaaccaatgtcacgactgtacaccttgaatgtgttaat

SEQ ID NO: 62582 - DNA, 424 bp, Zea mays
  Clone ID: MRT4577_157075C.1
ggggaacaagaaccaccggagccctaaaaacaaaaatttacctggttcaagtgcctaccggctcacaagtcttaggaaaaccggccaaggggcccaatttagggggggggggaggacccatggtcccaccacaagctaaggggttaacattggccaatttatttccaggaaaaacaattccaccatttggttggtcacattggcccccaaagccaaaaaaccccttattcccttccaggcggaaaatggtttacccccaaaaaggggctatttaaaccttaacaaaccccaatttcgaaaagttgaggggggcccttttggaggcaataaaaaaaagctttttattcccaacaaattttttgacaaagaggggggaaaacaagggcccttaacaagggtttttcacttgggaacctaaaaaggc

SEQ ID NO: 62583 - DNA, 350 bp, Zea mays
  Clone ID: MRT4577_157076C.1
aaaaaacgggaaaggtaactttttatttcgggggggccccatacctcatccaaaaaactttattattgaattacaactaaaaagcaatctaaaagagggcccccccaatggggggttgttgggaggaggctgctggatttgccaaaacaagggggacaaagggcaacaattgttgtaattgaaaaagggttgcggggttacccccaaaccggtggaaaaaaggcaacaactggtgctgggtcaaaaaggaagcacggcttgctgcacctacctggcaaaaagggattaggatttgctggtggaaaaaaacagcggggttcaaggcggccaattggttaaaaggaaaaagt

SEQ ID NO: 62584 - DNA, 158 bp, Zea mays
  Clone ID: MRT4577_157077C.1
tcaagcaagcaagcagcgagttcatacttactacgcagccaggcagccatggggccgagcgcgatgatggcctggtctgcgaccgccttcgctcccatacagtgtctcacgttcaccgtcagcctctccgtagccaggcgctcctccataagcctatg

SEQ ID NO: 62585 - DNA, 1143 bp, Zea mays
  Clone ID: MRT4577_157078C.1
gccggctgatttgggaaagaaagcaaaagaaacgaaactagagggtagaacacgacggtgtccggctccgtagaaaaggaggagaggaggggaggaggcgggggcagcaagaatggcgtgctccaccggtctctgcttcttggcgtcgattcctcctctctcagcctcttgttcttctggctcctcctgcttcctcatgatcaagcgtgtgtcctctgctccgtccttgtccagatggacgatccaatacaagcaattgggacatacaatatatcggagaagccacgttctggcctttgctagtgcagatgcaccacaaggcaaaagaagctcaggtgagaatgttgtgatggttgatccactggaagctaagcgcctagctgctaaacaaatgcaagaaattagggccaaagaaaagctgaagaggcgccgtcaagcagaagcgatcaacggggcattggcagtgataggactcacggctggattgctagtggaggctcagacaggaaaggacatcttagggcagctagctggatatctgacggctatttctagtttatttgggcaataacactggaccatggttggagatttatttttcacgttccacggccaggagaggtcttatctgaatcttatttgatggatccacccaatttttttgggagctgatcccagatggatgtgcaatagcgcacccagacttgtatgttgatcaagcacgatagcatgggctgaacattagtatttctatgtagcacatcaatttctgacgatagcgcctgctaaagagcagttctattcatactcaaatgtgaaatgttgaagtcttcgagaaatcttttccttcttctgcccaaaccattaagctgatggcacattggcacctgcagaaaaaaaaaaaaaaaaaaggcccctaaggcatttcaagtaggccatctattttttagggttggtaggattatgacatataataatgtttattgaacataactttatgtgcttttgaatttttttagaagtttaagttcaatttcttaggcctatatcccaaccaggataccgttattccttagtactctttactttatgcattatactaacccaggtcctggagaaagttattcaactttctttagtgcc

SEQ ID NO: 62586 - DNA, 1617 bp, Zea mays
  Clone ID: MRT4577_157079C.1
atggcggcgaggctcgcggcggcggtgctgctctgcgcctgcgcggtggggccggcgacggcgctgggggtgaactggggcacgcaggcgacgcacccgctgccgcccaaggccgtggtgcaggtgctccgggacaacggcatcaagaaggtgaagctgttcgatgccgaccccgccgccatgcgcgcgctcgccggcaccggcatcgaggtcatggtcgccatccccaacgccatgctcgcgggcctggccgccgacgccggccaggccaggaactgggtcaagcacaacgtcaggcgctacgacttcgacggcggcgtcaccatcaagtacgtggccgtcggcaacgagccgttcctggagtcgtacaacgggtccttcatcaacgtcacgctcccggcgctgaagaacgtccagaacgctctgaacgacgccgggatcggcgaccggatcaaggcgaccgtgccgctgaacgccgacgtgtacaactcccctcggagcaacccggttccgtcggcggggcggttccgcgccgacatcgcggggctgatggcggacatggtgaggttcctggctcggaacggcgcgcccttcaccgtgaacatctacccgttcctgagcctgtacctgaacgagcacttcccgctggactacgccttcttcgacggcggcgcggcgccagtggacgaccacggcgtgctgtacaccaacgtgttcgacgccaacttcgacacgctggtggcggcgctgggggccgtggggcacggcgacatgccggtggtcgtgggcgaggtggggtggcccacggacggcgacaggcacgccaaggcgtcctacgcgcagcgcttctacgcgggcctgctgcggcggctggcggcgaacaccggcacgccggcgaggccgggccagcgcccggcggaggtgtacctgttcgggctcgtcgacgaggacgccaagagcgtcgcgccgggcaacttcgagcgccactggggcgtgctgcggtacgacggccagcccaagttcgccatggacctcacggggcagggccgggacacgacgctggtgccggcgcgcggcgtggcgtacctgtccaggacgtggtgcgcgctgaaccccagagccaaggacctcggcaggctcggcgccaacgtcgactacgcctgcacgttcgccgactgcacgccgctggggtacggctccacgtgcggcggcatggacgtcgccggcaacgcgtcgtacgcgttcaacgcgtactaccaggcgcagaaccagaaggacgaggcctgcgacttccagggccttgcgctgcccaccgagaccgacccctccaccgccacctgcaacttcaccatacagatccagacgggggcggcggccatggcgtcgctcggccggagcgctggcgccgccgcgctggtgctggcgtcggcgtcgctgcagctcctggcgctgttgtggtagcaggcagcagctggttttgtgtggatgtgcgtgctggcatgaagatcaacgtcgtgtacggttgcgttgattgattctgtgcatttttttatcattcaaaacacgttttttttaaatataatttggaccggagtagatgcttgtttacttcctact

SEQ ID NO: 62587 - DNA, 241 bp, Zea mays
  unsure (1)..(241): unsure at all n locations
  Clone ID: MRT4577_15707C.1
ggaaggagacatggtgggaganaagggttgcgcagtgcgaaatcggacaatggcttttggaaaccctaagggggtgaaaaaattgttatatagtgagaagagggagaggaagaaaggaaggtggggagggtacgatacgaagaagacgtagatgacgtggatggagaagggaccgtgtgataatgggggcagcgaaaagaccaaaaactcccaccgcaccaaacagggatgaacgcaacac

SEQ ID NO: 62588 - DNA, 753 bp, Zea mays
  Clone ID: MRT4577_157080C.1
tcaaaacaaaaagggggaaagaaagcaaaagttatccaactagagggtagaacacgacggtgtgccggcgtccgtagaaaaggaggagaggaggccagggaggcgcgggcagcaagaatggcgtgctccaccggtctctgcttcttggcgtcgattcctcctctctcagcctcttgttcttctggctcctcctgcttcctcatgatcaagcgtgtgtcctctgctccgtccttgtccagatggacgatccaatacaagcaattgggacatacaatatatcggagaagccacgttctggcctttgctagtgcagatgcaccacaaggcaaaagaagctcagaggcgccgtcaagccgaagcgatcaacggggcattggcagtgataggactcacggctggattgctagtggaggctcagacaggaaagggcatcttagggcagctagctggatatctgacggccatttctagtttatttgggcaataacactggaccatggttggagatttatttttcacgttccacggccaggagaggtcttatctgaatcttatttgatggatccacccaatttttttgggagctgatcccagatggatgtgcaatagcgtacccagacttgtatgttgatcaagcacgatagcatgggctgaacattagtatttctatgtagcacatcaatttctgacgatagcgcctgctaaagagcagttctattcatactcaaatgtgaaatgttgaagtcttcgagt

SEQ ID NO: 62589 - DNA, 280 bp, Zea mays
  Clone ID: MRT4577_157081C.1
tgcttctggttgcagaagatgaagagcaaagctaataactttttgcacttcaacaactcacgagatgcacaaagcatcttgacatgacaacatgaaattcaggcagttggtcctggcagcctccaaacatccacaataattcacataaacaagttctgcatatgtacaatgtacttatgcatgaaaatcaaaagagcacatggtgagaactgcaatgttactgtgacaacatcatggatatagagaaactaactcattctggatatcactgttagacaga

SEQ ID NO: 62590 - DNA, 1685 bp, Zea mays
  unsure (1)..(1685): unsure at all n locations
  Clone ID: MRT4577_157082C.1
tgggaccctcgaggccggccgggaagatgtcctgctccccaatctctgcttctcggtgtcgattcctcctcttccagcctcttcttcttcttntgtctcctcccccttcctcacgatggagcgtgtgtcctatgtnccgtccttntccaggnggacaatccgatacaagnaattgggggctgnatatcaaagaagccacgttctgggctttgctagtgcagatgcatcncngggtaaaagaagctcnggtgagaatggtgtgatggttgatccnctggaagctaagcgtctagctggtaancaaatgcaagaaattagggccaaagnaaaggttgaagagggggacccacccagaaggtctcaatgggtcaggcaccacaaggcaaaagaagctcaggtgagaatgttgtgatggttgatccactggaagctaagcgcctagctgctaaacaaatgcaagaaattagggccaaagaaaagctgaaggtgcattgttgctgtattggagtgtttcattccttagactaaatcaaataatcaatcatatatactaatagatggaaccttggtaataaggaaaagtggaaaacttataccttttgtttgggccaattgttggtgctgaatcgttgtttcagaaaactggaaacagaactaggcttttccctgttcatgctgtcctgcaatatgagaacaagaaacaccattgtagtatttgtttggtcgtaatttttgtgttccggagctgaatcagaacggttcctaggtgtcaaatgcaccctaaattaaaaaaaaaaatctacctgtggggaaattgtagctcataaaagagatgctgaaattcatttagtgaaacatatatgtttattttattatttcgctaatatatggtctccactttctgttaacaaatagtcatttaatcatccattaattggtgtctgtttgtcctcctggagaacatcatctgctgcactcccctctgaatcccaatatcagtctatattctatattgatgcttcattgtgttttcttactcttcaaattggatccgaatcactgtgatctgttgtgtagaggcgccgtcaagccgaagcgatcaacggggcattggcagtgataggactgacggctggattgctagtggaggctcagacaggaaagggcatcttagggcaggtacataaaccaaatgtagtagaaattcagtttttaatatatacaaacttttaccataaccaataaacatagcttggaaatgttaaaatggacagcagtaatgtctgatgttacacaattgtttacttagaaaccagaatgttaattacagttttgcgctactaatatgtgatggcgtgctcatccatttctgcagctagctggatatctgacggccatttctagtttatttgggcaataacactggaccatggttggagatttatttttcacgttccacggccaggagaggtcttatctgaatcttatttgatggatccacccaatttttttgggagctgatcccagatggatgtgcaatagcgtacccagacttgtatgttgatcaagcacgatagcatgggctgaacattagtatttctatgtagcacatcaatttctgacgatagcgcctgctaaagagcagttctattcatactcaaatgtgaaatgttgaagtcttcgag

SEQ ID NO: 62591 - DNA, 107 bp, Zea mays
  Clone ID: MRT4577_157083C.1
gtggacaatcttggcatcttctccatattgtgctcatcaacatcgtaccatctgcatgcggttttgtcctacgtaattgatatcacagcccattggatggacttgtt

SEQ ID NO: 62592 - DNA, 130 bp, Zea mays
  Clone ID: MRT4577_157084C.1
gtgcctccgggcaaatctaatgcaggcaaagcagaggaggattggcctggggctgaggctgggaccggccgcaccggcgctcgcgacttctggctggtgtttttgatcggccggaccagacatgaacaga

SEQ ID NO: 62593 - DNA, 140 bp, Zea mays
  Clone ID: MRT4577_157085C.1
gatcattgatctgttcttccaggacaggtacttgaatgcgattcagacaaatgcacaccagttggtgttagcggacaacaaaaggagaaggaatatgcttgcgtgagttgattaaggtcattcaggagtgagcaccatag

SEQ ID NO: 62594 - DNA, 649 bp, Zea mays
  Clone ID: MRT4577_157086C.1
tcgcgactaatgagctgtagtttagtggtgagaattccatgttgtggccgtggagacctgggctcgaatcccagcagccacacttttaaaaaaaaaaaaaaaaaaaaaaaaaaaaaaaaaaaaaaaaaaaaaaaaaaaaaaaaaaaaaaaaaaaaaaaaaaaaaaaaaaaaaaaaaaaaaaaaagcggccaaccatctaccagggactcagggagggagagcagcacacacgcagctagctaggagcagcagcagcggggggggcgatgggggcctccatgatctcctcgtcagctcgggggggggggcctcagggcctgccgcccctcggccgccgggcctcctccttcgccggggtcgggtccaagaaaaagatcaagaccgacaagccctacgggaatgtggggggggcctgaaccgtcaacgtcgaacgccaacggtaaaaaagggcaagggcaagggggggtaccagttcgtcgacaagaacggcgcgaacgtcgacggatacagcccaatctacaacgaggatgacgggtctcccaccggggacgtctacgtcgggggaaccacggggcttctgatctgggccgccaccctcgctgggatcctcggcgggggggacctcctcgtctaaaaaccagggccctct

SEQ ID NO: 62595 - DNA, 693 bp, Zea mays
  Clone ID: MRT4577_157087C.1
agcttcttgatctacacgaaggcatggcgacggagatccagggctactacgatgacggcaccgccgtggtgtcgttcgacgtgcacaacatcgacaccacgctgacgaacttgggcagcgtggtggagtggtggctgggtgagacctatcgcctccaccaccgcggccacatcgccggcctcgacgtggagtggcgccccgctcgcgtgccgggccccgtccccgtcgccgtgctgcagatctgcgtcgaccaccgctgcctcgtattccagatcctccaagccgactacatccccgacgccctgtccaggttcctcgccgaccgccggttcaccttcgtgggggtcgggatcagcggcgacgtcgcaaagctgcgggccgggtacaggctgggggtggcgagcgccgtggacctgcgcgttctcgctgccgacacgctggaggtgcccgagctgctccgcgcggggcttcagacgctggtgtgggaggtgatgggcgtgcagatggtgaagccgcaccacgtgcgcgtcagcgcctgggacacgcccacgctgtcggaagaccagctcaagtacgcctgcgccgacgctttcgcctcgttcgaggtcggccggaggctctacgaaggcgactactagggtctagggttacggtatgctgtctggtttagcaatgcctgcgtgtcaggccggc

SEQ ID NO: 62596 - DNA, 202 bp, Zea mays
  unsure (1)..(202): unsure at all n locations
  Clone ID: MRT4577_157088C.1
catggggatcgacgacgcggacgccggcttggacgaggtgacggagccgcgcggcggggcggagtcctacaactgcccgctcttagcctaacggcatgctcggcgncgatgtgacagcagaggccgacaaagtatacgtccttgccgtagaaggggcagtggccgttctgcgccccgcagcgcgggacagtcttgatgaaaa

SEQ ID NO: 62597 - DNA, 357 bp, Zea mays
  Clone ID: MRT4577_157089C.1
gatcagcagaacggacatgcgcatagaggaccgtatgacagaacagcatgaacatggacatcgttgtgcaaccgtgactggctctgccaattgccaacggctctggaatgcacatccgatgccattgggcagcactaaacgattggtacagcactggatcaagcctcacgacgatgacaggctgctagcgtgtgcaaccctactgctagaacctcgtggcagccttaccgcatcacgctggccagatgccaatgatgatgccagggatgacagaacagatgacagtgacacccattccgaatacaatgccatcaataatagaggaggatgatagacgagcaataacgatagctagaa

SEQ ID NO: 62598 - DNA, 313 bp, Zea mays
  Clone ID: MRT4577_15708C.1
cagacacacaacatgctatgcgcaatggcttattattaacctcaacggctccgctgagaagggggtggctcgccctgcgcgccttgctcttgaagggagcgcatcgctatgcagtatacttattagcagcatcagcttgacttcgattctacatgccatctatagaataattcgcttccaccacgttattgaactgggtataaacatccaggcaagcatgcctactagatccaactattgctggcagcgagtgtcaaacaacaaccaactgaccgattgcaccaaccatggttggtacatttatacctaccaa

SEQ ID NO: 62599 - DNA, 2107 bp, Zea mays
  Clone ID: MRT4577_157090C.1
attgggtacctcgaggccggccggggaagaagctgccggcctgccgctgcctgctcgcagttgccagcccccgccgccgcggaggacggaaggaagcgaatcaaccgcgactgtctccgacgggaataaagcaggcgaggccagccggtcgcggaacccccaattctcagctgcggccggcgatcgagtcggttccgtcccgcgccgatgcggatcccgcggcggaagggcggggccgggccgctcgctgtcggggtgcccagcaggcgggcgcaggtcgccgcggtcttcgcgctcgccgcactgctgggggtctccgtgctctacgacaacgcccacatcgccgcctcgctgcggaggcacggcggcccgaggacgtacgccaagctctcctccttcgaaggcgccaccgctgtccccagcatcgccaaggaagaggcggcggcggcggtggcgcgggcaacggagtcggtgccggtgcacggcgcggatcgggccgactcgcccccgcacgagcggcaggaggagatcgaggagcgcgcatcgaagcctggagcgacggccgggagctccctgcaggacgcgccgctaatcgaggaggtggtgcaaggaggaagcggaggccacgacggcgacggcgacggcgacggcggcgcgcaggcgcaggagcagcccccggccccggggacctgcgacctgtacaagggccgctgggtgtacgacgagtcccgcgcgccgctgtacaaggagtccgactgcagcttcctcacggagcaggtcacctgtatgcgcaacggccgacgcgacgacgactatcagaagtggcgctggcagcccgacggctgcgatctccccagatttgaagctaagttgcttctggagaagctaaggaacaaaaggctgatgtttgtgggggattccctgaataggaaccagtgggagtccatggtgtgcctggtccagtcagaggctccatgggacaaaaagtcccttgtcaagaatggttctcttaatgtgttccatcttcaggagtacaatgcaacggttgagttctattggtctcctttcctagtggagtcgaactcagatgacccagacattcatagcatcagtgaccgcatgatcaagccgacatcgatcgctaagcatgcggcgaactgggaaggggtggactacctgatcttcaacacttacatctggtggatgaacacgccacagatgaaaactctgcacggtggatctttttcgaggaaacatgtcaagtatgacgaaatcgaacgtgtggaggcgtaccggaaggtcctcaagacatggtctagatgggtagaggcgcacgtagatcccaagagaacaacggtcttattcatgagcgtgtcaccagtacatatgcagagcgaaggttggggcagccccaacgccgtaaaatgcttctccgagacacagccggcgatcagctacaataagaaactggaggtgggcacggactgggacctcttcgcgaccgcccagcgcgtgacgaggtcgatgaagaaggtacccgtgcacttcgtcaacataactgcgctgtcggagatccgcaaggacgcgcacacctccgtgcacacgctgcggcaggggaagctcctgacgccggagcagaaggcgaacccgaggaagttcgcggactgcatccactggtgcctccccggtgtgccggacacgtggaacgagtttgtttatggccatatcgtgtcgagcaccccgccgccgcagcagcagcagcagcagaagataaccgaggatgaacctcacagatgacggctagaaaatacttcacatggtagcgcaattttagtgagagaagaagatttgtgatcgaggccataagttattttttttgtctgttctaggtttagaagcctatgctatgctgctggttcacctaagcatttgttggaaggtaacaccaagcagccgtgaacagccacggtcacctgaggagccttctcgcagtgtctggatgtggttgtttgagcctctgaggggaaatgccctgcgcgcttctgtgctaaaaaaaaaaaaaaaaaaggcccctagcacataattttaccagaatccgattgtttct

SEQ ID NO: 62600 - DNA, 282 bp, Zea mays
  Clone ID: MRT4577_157091C.1
ttttttttttttttttttttttttttttttttttgggtgggtgcaagaattatttatcacatttttattttcaagaattatgtataacaggccaccttaaacaaccactgagggggagggaaaaacaaatcaccaccccgggtcaactcatttgggccctacaaaaccaggtttttagatccgggaatacaaaccaaaagttttaaaaatgccactcgcataacctcttttacagatggccccccaccgtaaaggaccaaatacaaaacaacttttgccccg

SEQ ID NO: 62601 - DNA, 1434 bp, Zea mays
  Clone ID: MRT4577_157092C.1
gccgctgcctgcctcctgctagcagttgcagcccccgccgccgcggaggcggaggaggtgaaatcaaccgcggttgtccccggtgggcgcaagcgaggccagcaggtcgcggaagtcccaattcccagctgcggccctccagtcggttccgtgccgtgccgtcgccgatgcggatcccgcggcggaagggcgtggccgggccgctcgctgtcggggtgcccagcaggcgggcacaggtggccgcggtcttcgcgctcgccacgctgctgggggtctccgtgctctacgacgccgcccacatcgccgcctcgctgcggaggcacggcggcccggtccggtacgccaagctctcctcctccgacggcgccgcctccgtctccggcgtcgcgagggaggaggtggcgaccgtagagacgctcgcgccgccggcgcgggcgccggtggacggcgcggatcgggccgacccgcctccgcacgagcggcagcaggaggccgaggcgggcgcggcgaagcccggtgcctccctgcagcaggacgcgccgctgaccgaggaggtggtggaagggggaagcgggggccacggcggcggcggctcgcaggagcaggagcaggatcaggcccaggggacctgcgacctgtacaagggccgctgggtgtacgacgagtcccgcgcgcctctgtacaaggagtccgagtgcagcttcctcacggagcaggtcacctgcacgcgcaacggccgccgcgacgacgactaccagaagtggcgctggcagcccgacggctgcgacctccccagatttgaggctaagttgcttctggagaagctaaggaacaaaaggctgatgtttgtgggtgattctctgaatcggaaccagtgggagtccatggtgtgcctggtccagtcagaggcaccatgggacaaaaaatctctcgtcaagaatggttctcttaatgtcttccatcttcaggagtacaatgcaacagttgagttctactgggctccgttcctagtggagtcaaactcagacgacccagacattcacagcatcagcgaccgcatgatcaagccgacatcgatcgcgaagcatgcggcaaactgggaaggcgtggactacctgatcttcaacacttacatttggtggatgaacacaccgcagatgaaaaccgcacggtggatctttctcaaggaaacacgtaaagtacgatgaaatagagcgtgtggaggcataccggaaggtcctcaagacgtggtccagatgggtagaggcgcacattgatcccaagagaagcacggtcctattcatgagcgtgtcaccggtacatatgcagagtgaaggctggggcagccccaacgccgtaaaatgcttctccgagacgcagccggcgatcaactacacgaagaaactggaggtgggcacggactgggacctcttc

SEQ ID NO: 62602 - DNA, 1555 bp, Zea mays
  Clone ID: MRT4577_157093C.1
ggcacggcggcccgacggcgtacgccaagctctcctcctccgacggcgccgcctccgtctccggcgtcgcgagggaggaggtggcggccgtagagacgctcgcgccgccggcgagggcagtggggtctgacggcgcggatcggaccgacccgcccccgcacgagcagcaggaggaggccgaggagggcgcggcgaagcccggtgcctccctgcagcaggacgcgccgctgtacaaggagtccgagtgcagcttcctcacggagcaggtcacctgcacgcgcaacggccgccgcgacgacgactaccagaagtggcgctggcagcccgacggctgcgacctccccagatttgaggctaagttgcttctggagaagctaaggaacaaaaggctgatgtttgtgggtgattctctgaatcggaaccagtgggagtccatggtgtgcctggtccagtcagaggcaccatgggacaaaaaatctctcgtcaagaatggttctcttaatgtcttccatcttcaggagtacaatgcaacagttgagttctactgggctccgttcctagtggagtcaaactcagacgacccagacattcacagcatcagcgaccgcatgatcaagccgacatcgatcgcgaagcatgcggcaaactgggaaggcgtggactacctgatcttcaacacttacatttggtggatgaacacaccgcagatgaaaaccgtgcacggtggatctttctcaaggaaacacgtaaagtacgatgaaatagagcgtgtggaggcataccggaaggtcctcaagacgtggtccagatgggtagaggcgcacattgatcccaagagaagcacggtcctattcatgagcgtgtcaccggtacatatgcagagtgaaggctggggcagccccaacgccgtaaaatgcttctccgagacgcagccggcgatcaactacacgaagaaactggaggtgggcacggactgggacctcttcgcggccgcccagcgcgtgacgaggtcgatggagaaggtgccggtgcgcttcgtcgacgtgaccgcgctgtcggagatccgcaaggacgcgcacacctccgtgcacacgctgcggcaggggaagctcctgacgcccgagcagaaggcgaacccgaggaagttcgcggattgcatccactggtgcctccccggcgtgccggacacgtggaaccagttcgtttatggtcacatcgtgtcgagcccgccgccgccgcaggatcaacctcacagataacaacagctagaaatacttctcgtgcatcagtgtgtttgtggtcgacgccataagttatttctttttcccctaatagtaggtttagaagcctatgctgctggactggttcacctgagcatctgttggaaggtcagatcgcactagtgtagccaaaaaaagcagcagtaaatgtggttgtttgagcctgagggaaaatgcgcgcttctgtgcctcgtgtttctacctggcacgtgtacataattttttaccagaatcattcgtgaaattgtttctattcgtgtcgaaatatttctctt

SEQ ID NO: 62603 - DNA, 979 bp, Zea mays
  unsure (1)..(979): unsure at all n locations
  Clone ID: MRT4577_157094C.1
acaaatgctttttgtgatcaaaatcttgactgaaactttctggcattttagagaaatactgctacacgaatggaaacaatcggattctggtaaaattatgtgcacgtggttgccaggtagaaacacgagaagcacagaagcgcgcagggcatttcccctcagaggctcaaacaaccacatccagacactgcgagaaggctcctcaggtgaccgtggctgttcacggctgcttggtgttaccttccaacaaatgcttaggtgaaccagcagcatggcataggcttctaaacctagaagagacaaaaaaaaataatttatggcctcgatcacaaatcttcttctctcactataaaattgcgctaccatgtgaagtattttctagccgtcatctgtgaggttcatcctcggttatcttctgctgctgctgcggcggcggggtgctcgacacaatatggccataaacaaactcgttccacgtgtccggcacaccggggaggcaccagtggatgcagtccgcgaacttcctcgggttcgccttctgctccggcgtcaggagcttcccctgccgcagcgtgtgcacggaggtgtgcgcgtccttgcggatctccgacagcgcagttatgttgacgaagtgcacgggtaccttcttcatcgacctcgtcacgcgctgggcggtcgcgaagaggtcccagtccgtgcccacctccagtttcttattgtagctgatcgccggctgtgtctcggagaagcattttacggcgttggggctgccccaaccttcgctcctggagtagatcaaagccagacagtgaatgtgccgccggtggtcagacactcagacccagcatcgccggagcattaaatttgtgcaacaacagaacagcaatgctgnggggaaattctgcatccaaggtacggatacttactgcatatgtactggtgacacgctcatgaataagaccgttgntctcttgggatt

SEQ ID NO: 62604 - DNA, 2049 bp, Zea mays
  Clone ID: MRT4577_157095C.1
tgaattcggcacgaggggagaataaacaagttatatatgcatgtccattccaaagatggcagcacggaatattatgatgttggtattgccatttcttgtctcctgtgcagccttctgtcatgcttgttctttatatttatttgctatgaggactcctattaggacggtatcttaagggtatgatgtagtttaacccttctgattatatatgtgaccgtatcttcatagctttctaactttgaggatacaatatgttaaatttgacactgtcaatataagttcagacttaggtgtattacactgggggaggtgtgtgggtgtatttttgcttgtgattcatcaaaatatgttccttcttaaagcacaaacattgtacccttctagaatagctttaggcttgttgtcatatttgtaatgtatatgtatgctaccttcgttaaaggttaaaataaagttttaaccttattttggaagggagtatcacgaaaagccatagaaatttggatttagtaactatttcggcaggtgcaaagggtcccaggcaaccatggcatgatttacattgcaggattgatggccctgctgcctatgatgtcttgacaaattttgagcaaaggtggcgaaaggcaacaaaatggcgtgaccggtttagtcattggctttaggagcgtatctcatggattttaagcccttcacccaatgttccaaataatcatcctagtttgtgggtttcaaaagaagaggatcatgaaaattggcacgttcaggtattcccacgcgttcgctctggttccctaaaaggatttcctagtgattgcaaagcagcttcaaagctgaatcttgtgtgccgaaagaacctggtaattgataagagcatccacactgcatatgtccgagcaatcagatctgcacaacatttcatttatattgagaaccagtactttcttggttcttcatatgcttggccatcctatgtgaattcaggtgctgataatctggtaccaatagaattggccctcaaaattgcaagtaagattaaagcgggagaacgctttgcagtgtatgtagtgataccaatgtggccggaaggagtccctactgcagcatctgtgcaagaaatccttttctttcaggcccagacaatggagatgatgtataaaataattgcagatgagctcaaggcaacggacaataaggatatgcaccctgaagattacttgaacttcttttgtcttggaaatcgggaagaaccaccatctaatggtagtccagaatcagagaaatctacagataaaagtgcagcggccttagcttcgaaatatcgacggttcatgatctatgttcacgcaaaagggatgattgtggatgatgaatatgtcattctgggttcagcaaacatcaaccagagatccctggctggttctagagatactgagatcgcaatgggtgcataccagcctcattatgcatggtctacaaagaatggacatcctcacggccaggtatatgggtacagaacgtctctgtgggcagagcaccttggaacggttgatgatcgcttcaaggatccttcgagtttggagtgtgtaaggtttgtgaatcaaatagctgtagagaactggcaaaggtttacagcagaagaaatgagtacgttacaagggcacctcctcaagtacccagttaaggtggaggctgatggtaagatcagcccactgtcagaccaggagtgctttcctgatgttgggggcaagattctgggagctccaacttcacttcctgattcactgactatgtagtgttattacataaaaaaacttctttcagagttgaactttgtaattgtctaaaattggcgggtttatcgcagaacttgtactatatctgtaatcatcgatagttggcgcagggaaagttcaagatgttagtggtgttttttgagttatgctcctgtaagttttcccagcgtttgtaaatgaaccatatgataggatcctagacaatgcttccatttccattatgattatacaacagttttcaacatttttgctc

SEQ ID NO: 62605 - DNA, 445 bp, Zea mays
  Clone ID: MRT4577_157096C.1
gcgaaaaaaacagaaaaaaacaaaaattaaaaattaaaaaaaaaaaaaaaaagggcgtggtctcgggatctagaaccgagcctcaagcgggcaggccacccagcactcaggctagatagctcatcacagccacagcagctagaccctagtagctcactcgcgctcgtgccatgatgaatacccgagcctgtggcagcggcagtggcggcaggaacgaccagaccatgatgggcttctccgagcatccgaagccggcggcgtcggggcaggcgcagccgtccccgccgtcgtcgccgagcgagcgtccgccagcaggccgcgggcgccggcgcgcgcaggagcccgggcggttcctcggcgtgcggcgccggccgtggggccggtacgcggcggagatacgcgaccccacgaccaaggagcggcattggctgggcacgttcgacac

SEQ ID NO: 62606 - DNA, 642 bp, Zea mays
  Clone ID: MRT4577_157097C.1
gttttccgtgccgccaccctgacccttaaccctcgattccgtctagccgtactcgcgcagcctcagcctccatttctcctccgacgtcggtgcgtgtacttcaaccatggcgctatccaggggcacctcgtcagccaccctccgcactcgcaagttcatgaccaaccgcctgctgtcccgcaaactatttgcgcttgaggctatccaccccggccgcgccaacggctccaatgcgtagttgaaagacagacttgccaagatgtacgaggcgaaagaccccaacaccatcttcgtcttcaagttccgcacccacttcgcgggaggccagaccactgtgttcagcctcatctacgataacctctagactgacaagaacatcgagcccttataccgcctcatcaagaatgatcttgctactatcgctgataactccctccagcatgtgatggaccggcataacaggaacatgaacatccgtgatgtcaacaagaccaagggtgatgacgccaacaacaagtaaacagccatttatatatctgtattactgccctgaactctgggccgaacgtctagctgcaatgtcataattatggtcgtaggtaggtgttggtccgcactcagcagcaagcggagctttgtaat

SEQ ID NO: 62607 - DNA, 242 bp, Zea mays
  unsure (1)..(242): unsure at all n locations
  Clone ID: MRT4577_157098C.1
ttggagggttnagtttttaaaaggtgtntgnttnatgntaagnaaatntttattttgntantgnttgatgggganattttagaatttaganaagttattttgtagtgtgatatgagggaggtaattgttgtagggtgatatgaggnaagnaanataggatggttnnagtggaatattatntttttattntgtgttnnnaaaattgaaattttagaatatttggtttagggtgnnnnatttat

SEQ ID NO: 62608 - DNA, 484 bp, Zea mays
  Clone ID: MRT4577_157099C.1
ctttctttttacttctttgtctgtttgaccctttaggaggccttttttctttttcttaatgttcttattttgaccttggacaaaaacaaacagtctgccaccaggctaaggcattccccaggtgcatatgaaaccttactcctttgaggttccgcaccataaatgctctcctcaaacgctggggaagttgattgcaaagcacgggctgacacaatcttcaaaccatgtataatgctctgttttggcgtgacaagccatgcctaatactgctcttatacctgggttaagcattttgtgctaggacctgactttaacaaggaatattcccaagattctttaggaataaacacatggtgagcatcctacaacgggcccgtttgataaaacaactggggattgtctagatctgggggcaaaaggctggtgggtatcatggtcttgctgaggaccttaagcgcgggggcgacggcctccttgggggtaa

SEQ ID NO: 62609 - DNA, 1803 bp, Zea mays
  Clone ID: MRT4577_15709C.1
ttggggtcctcgaggccggccgggtcgttccgttcccagcggttcccaccgcgcatcaatcaaaccctaaaccctgctctcgcgccgccgcccgcccgcccgcccgctatgtcgctgccacacccggtgccccgagagacggtggccagcgccgtcgcctccctcacgatgtggatgaagaagcgcacagcgcagacgcgcccaaacctcctcgccgacgagcgcgacgacctcgtcgtcctccagctctcgctccgccgtatccccgcctcgtccagcgccaggccgcgcctcctcccgctcccgcatcccgtcatcggacacgacggcgcctccgtctgcgtaatctcggacgaccgccccaagtcgcggtccccttccgcctccgatctcctccacgcgtcgaagtcgctccaccgcctcccagtctctgacgtcatcccgctctccacgctccgcacggactaccgcccctacgagtcgcggcgccgcctcgcagcctcccacgacctcttcatcgccgaccgcgccattctcccccttctgccgcgcgtcctcgggaaggcgttctacgccaccaagaaggctccgattggagtcgatttcagccgcgtcggatggccggagcaggtccgcaaggtccttggctctgcttttctgtacctgcggtcggggacctgctcggggatcaaggtgggtaggctggacatggaggaagaggtgatcgtggacaatgtgatggccgcggtggaggaggctgtcgagaaggtgccaaagaagtgggccaacgttagggcactgcatctgaaggctgtggattcagttgccctaccaatttaccaggttgtaccagagttgggtatgaaaatcgaggtgcctgaaattattggatctggggaggttattgatgccgctgaagcggagacttgtgggaagaagattgacaagaagggggatgctggtgcccgtggaagagaggtatttgccaatgtgagtgccaagaggaagaggaataagaaggggcaggttgaggatgatgttgcgatgcaggaagaagtccaggtggagatagagaaaaagaagaggaaaagcattgtgatttctgctaatgacagccagatggctggcaagaagggtgaaaagaagggcaaacgtggtttggaaaataaggtgaacgaagccagtttggacaacaagaaggttaagatggggaagactgagcagaggaagaagaagagcatgaacggtgatggtgaagtcggtactgaggaaatgcagggagataagaagatcaaggtggagaaatcagatgtcaagatcaagaagttgaggaccaggataagagtataaggttgcagttgatatcactgttggaggtgcctcttaaaatattcagttctgcgtatttgtaggctggatatccaaatcatcgatgaattgagttagtcaattgttatcagctggaagaactatatcatctgttaaagttccaagattttccatcaatcagatatacctcaaaacttggtcccttaggtttcttctgaatttgtttcttcaggttttgcgagcttggtagctcaaacctattggttatagaagtatggcagaattgtttcttgctaaagctatgtacttcgctcgactcacaacgattgtgtgttgatcttctaagaatatgcttatgttaaaaaaaaaaaaaaaagcggccattgttgtcttggcttctcggaagtatccctcacgatgtacctccccttaataatgatggttctatccagcattttaggctgcattatttgc

SEQ ID NO: 62610 - DNA, 558 bp, Zea mays
  Clone ID: MRT4577_1570C.1
cccactccaaaccagacatgcaaggcaatcccgcgatggctcatcgcgtggttcttctcctctttctcgtgttgtctgtcgcggttgccgccgccgttgacgccgacgacccgctgatccaccaggtggttcccggtggagatgacaacgatctggacctgaacgcggagttccacttgctgagcttcttgctgaggttcgggcagtgctacaaggacgcctacaagcacgcctaccagctgtcctgcctcatggccaacctgaaccgcgcgctccggcaccagctgctggacccgttggtggaccacggcgtcactaacttcttcgatctcacgccggaacagatccggcggacctacctccggctctacatgtgcctgcgcgctctcctgagagaactcgtggagtaagtgcacgaggcgcccgacctggccaccgatgttctcaccgacgatttccactgcgaggaccactgcgccgaccaccgcgtcaagaaccacggttagagcgagtcgtgctgctcgttcagctcgtctgtagcgctgtatggagcgctct

SEQ ID NO: 62611 - DNA, 558 bp, Zea mays
  Clone ID: MRT4577_157100C.1
tatgaggaaagcggccacgcccgcagagcaccggatcctgaatagcgggcgccatccacgcgttcgatcatcataaaaagaggaacccagtagcatcaatagagcaacactggcgaccaagatattttccctacttatgctccttagctctttctgcatgaggagctaacgcgacaatattccctcaatgctcacaagcgattatggcttaccttcttcccccataccttccatcaatgatagctccagaatatgaaaacccagctcttgaaccctatatgctacaacaagcaatcgcagccagcaacatacctttatcacccttgtttcaacaatcgtcacccctatctaaggtgcagccattgatacaaaccatcacggcacattaactgcagaaactagtgctacctgtaatcaaccaagtacgatctcgcaaacatatctaccctactctcagacacagcaatttctaaccttcaaccaactgtctacataaaaccgtgcttgcttatctgcagcaacaactattaccattcagccagctaactactggctact

SEQ ID NO: 62612 - DNA, 171 bp, Zea mays
  Clone ID: MRT4577_157101C.1
tttggggcggcgggccttttttttttttttttctagctctcctaaagagaagggaagctaccaccgggaactttactgtaaccacgcatctatctagcttgctttaacgcggcaaaatactaaaccgacggcacgaaaccagtcaaacatccatgatttgtttgcctaagg

SEQ ID NO: 62613 - DNA, 300 bp, Zea mays
  Clone ID: MRT4577_157102C.1
ggccgccaccgcgctggaggtgagttccattcactgttcggacggtactagcggacccgagctctgtaccaagctacgtgtaatttggccatagctgctttactgggtgaaattgctatccgctaacatttccgctctacatacctcccgtaggcataatgtgtagagccagtggctcctaaggagcgcgctcatttacattatgtgcgatgcgctacactgtgcgtatttccaaagagagatacctggcatgccaacagcattaatgaagaagttctatgcgctggtgatgaggccatt

SEQ ID NO: 62614 - DNA, 1070 bp, Zea mays
  Clone ID: MRT4577_157103C.1
cgcgtacgtaatgctcggaattcggctcgagatttaccagtgatgatgagagagatggaatggtcggggtaccaggggtctcaggaaatattttccaggagatagatgggaggcagttcgacagcccaatactggggagtagaaagcagaaaggtggatttggcaaaggcaaaggaaaagctaactttgcaactgaaagagagaggagggagcagtttaatgtgaagtatggggctttaaggtcactgttcccaaaccctactaagaatgacagggcctctatagttggagatgccattgaatacatcaatgagcttaatagaacagtgaaagaactgaagatcctacttgaaaagaagaggaacagcgctgacaggaggaagatactgaagttggatgaggaggcagctgatgatggggaaagttcttcaatgcagccagtgagtgatgatcaaaacaatcagatgaatgggactataaggagctcctgggttcaaaggaggtccaaggagtgtgacgttgatgtccgcatagtcgatgatgaaataaatatcaaattcacagagaagaagagagccaactctttgctttgtgctgcaaaggttctagaggagtttcatcttgagctcatccatgttgttgggggaatcattggagatcaccatatattcatgttcaatacaaagatacctaagggctcttctgtgtacgcatgcgcggtggccaagaagctcctcgaagctgtggagataaagaagcaggcttataatatcttcaactagacataccaatcataatgtttatccagacaacttagcatgctggtctgctctttagcatctaataaggtgcttgcttatcacttatcagagactgaccacattgataagacttctttgatgaatgctgcaaactttcttgatagcttcttcatgctgaacttcttgtcttcttttttgtacactttaacagtcatgttggaatatgtggtgcttctgatttgctggcattgccactctttgctgaataacgtaaaaaaaaaaaagaagggcggccgacgagaaaacagc

SEQ ID NO: 62615 - DNA, 423 bp, Zea mays
  unsure (1)..(423): unsure at all n locations
  Clone ID: MRT4577_157104C.1
tggccttggacctttgggctgatttatgtgcttgtttatgtgcttgtttatgtgcctgaccccccctagggagtaaaggcatactagatgtagagttcaatagcaaaaaagactaaccagcgccggatacacgcgctacacgttccgagtaagagcataacgtcgcccccgcgttgcaagcaccgcactccccttagaatccgaacgtctcccgccgagaacgaagtaatccgacccctctcaccccctcacccttccccctttacaaccttaaacacatcaggtaataccacggcccctacacccttcgcctatcagcagccctccgaccacctctccaacggtccgttctacaatcngacagaatccgaacatcgtcaaggttcctcccggacgcctagcatcaaggaatcacaacctcag

SEQ ID NO: 62616 - DNA, 154 bp, Zea mays
  Clone ID: MRT4577_157105C.1
ctgggaatttacacgtttcctgtacatttgacccgacccttccccccccctccccccaaaccgcaaatctttgccacaatggagaacgaacgcggagaactcgtagacctctacatcccacgcaagtgcgacgccaccaaccgtatcatccgcc

SEQ ID NO: 62617 - DNA, 147 bp, Zea mays
  Clone ID: MRT4577_157106C.1
atggacacgcggcagtactcacaggatagcctgaacacaatgctgactaggatacacaaggcttagagctgcttgtagagaccaccacacccaagtttcatgccatgcatgaactcgtgaggatcaaacacgataacagcccatttg

SEQ ID NO: 62618 - DNA, 560 bp, Zea mays
  Clone ID: MRT4577_157107C.1
aattcggcacgagggacgggtttcggaagcagtggggtcgaacgcaccgcgcgcgcccgacgatggctcttgcgttcggcgaagctcttcaggcgtctcttcagctacaaggagatgctgatttttatggtcggtctcgacgccgccggtgaaaccaccatcctctacaagctcaagcggggcgagatcgtcacaaccattcccaccatcggttttaatggtgaaactgctgagtacaagaacattagcttcctgcctgggatgtagggggtcaggacaagatcagacctctatggaggcattacttgcataacacacagggtcttatctttggtgtggatagcaatgaccgtgaccgttttgctgaagccagagatgacctgctcaggatgctgaacgaggtaaagcattttactacgaccattttattatgctgctgctttctatcaataagattttgtgtggcaaggttttgaattttgcatctttggtgtcatgtcacgtggcacagtgcataatcggataagctgattgaatgtcattcttgagcaactttgaaa

SEQ ID NO: 62619 - DNA, 956 bp, Zea mays
  Clone ID: MRT4577_157108C.1
cggaacctagccgattaatcccagcaacagccgccctatcctcctcgtcagccgtcaccgccgccccacagcctcgcctctaccatcgcccccgccggtgctagctgcatccggccaggaggtcagtgcccggcactagccgcatctagcctggtgattagtgctccacctcgctccagcctccagcccacgcctataggggcccctgcctagcagccagccactgtcggctaggtggtcaatgcccccgcccgccgcccatgccacgccgccagccggccagctggctagccggcccgccactgctccactgtgctccagtagatgctcgattgtttgccggcgatggtgcagaccaacctctccatcgacaagattaatgccatgcttaaggcattcgaccatacgagagggttcatgtagcatgattaccaccttggctagaggcacaacatgctcattatgtggaggttgtcttaggtcactggaatcaaaatgggaaacctcctatgcagaatgttttgtaatatgtttttcataaggcataggaaaaattagcataggcaaagaaatgggtcaaacctcatgttgagactgctaagatgaaatggattcctgttaaggagaaattggttctcctcaagaaaatgtagaacataatgtacaaaaggtatcaacaaggtgttaatgaattcaacctcatattgagattgctaagatgaaatggatttccgttaaggagaaattggttgtcctcaaggaaaatgcagaaccttatgtacaaattggtcgtcttcaaaatgttggtcatgtagctgcaagcctacaacaaagagaatcaacaatggtggtgatgctacacatgtagaagtagcaatgttggtcttgtaaatccaagatttggttgttgatgaatgatatctatgataatatattgctaagtatatgtgatgatc

SEQ ID NO: 62620 - DNA, 334 bp, Zea mays
  unsure (1)..(334): unsure at all n locations
  Clone ID: MRT4577_157109C.1
gttaaccatgaagtttatgtatcttgcattcctacttctatatgaaatatatnaacaattcttgcttggaggagcagatgcttcccccagacaagtgattgacacagaaggcaagaaagttcgagctggcgtagattactatatccgaccggtcctaacaaccccatgtgatgggcgtgggtcgtgtgtggttggaagtgctatgttctcatagcaaggtcatccaaccacacttgccctcttagtgttgcggtggtggagtgtatccgtggcctagcagtcacattcaaactagttaaccctaaaacagggtcattagggttctactgacttg

SEQ ID NO: 62621 - DNA, 374 bp, Zea mays
  Clone ID: MRT4577_15710C.1
ttgtttggttttaattgaaatacattgttgatatcattttgagaattacaagataggcacggagcgtccgaaaaagttcaaaggaaagctaaaagaaaacatgcgccaagaaaacatgggtgcctaaacgaaccttttgggaaaatagaccaaaactttgggaaaaaggtaatttacagaaaaaacataaatgcaatgaagaggaaatgggcggcccgaaccagggacccccaacaaaccaggattgatccaggggccgggccttccaacaggaaaaaaaccgggggtgcacaacttgggggaattcaggttagggttcagccaggcgaggaaccgaaacccgcggggcccgtcaaaaaggctcctaaagggag

SEQ ID NO: 62622 - DNA, 372 bp, Zea mays
  Clone ID: MRT4577_157110C.1
accgagagagccgccaaaccgtgggaaaaagatatggggaaacaggggggccccccgaaaaatccggaaccggcaacggaaggcccccaacgtttccaattagggagcgaaataaaaggaatgggggaaaaaaaaaaaaaccgctcaccagggggaaaaaagggtcggccaaaaagttcaaaaaaaaaaaaaacccgagggaaaaagaggaaagccgggggggcccaaaggggggggcaccccaaaaaaatgggggggggaaaaaaggccggttcaaaaagggaaaaacctgggggaccagcttaaaaaaaaaaacgcccacccgcccgaaaaggggaaaatcccattggggccccggggagggtttttttt

SEQ ID NO: 62623 - DNA, 487 bp, Zea mays
  Clone ID: MRT4577_157111C.1
cggacgcgtgggtgcagccacgcgcgccggcgaccaaacaaagccagctaggcaccggcaagggagcggacggagcaagcgcgcggccgatcgatcgagcttcagcttgagctccagcaagatggtgaacttcatcgaggcgcagaagccgctgctgtcacggttgatgaagatggccgggctccgccccattgagatggagctggagccgggcacgaccatgcacgtgtgggcgcccaagcaccacgtgggcaagaagggcaccaccatcagcccgctcgagcctaccgccgccaagaagaagaagaagaataggaagagccccgagtcgaggcccaacgtggtgctcatccacggcttcgccgccgagggcaacgtgacgtggcagttcaacttcggcgtgctggtgtcgcgctacaacctgtacatcccggacctgatgttcttcggcaagtcgtcgacgtcgagcgcggaccggtccccggac

SEQ ID NO: 62624 - DNA, 342 bp, Zea mays
  Clone ID: MRT4577_157112C.1
agcctacgaaaacacaaaccagctcccaaaacaaaagaccataccaaccaaatatggaggccaaaatttaaaaacctaaccaagcctctcttagtcccacaaccaaaaattaatcaaaaattaaagcatagccccaggggggagggggacacaaatcatcccccttgtttttgggaaaagctaaaaaatatcgctggcgattagacaagccaaaatttttacaaatgttatggagcccgaataacaaccaaaaaaaaaaccaccccgggtgtaacaaaaaacagcgcaaccaaaaggtcccttttgaaagcctttaaaaaaacaaaaaaggtgcaaaaacaa

SEQ ID NO: 62625 - DNA, 833 bp, Zea mays
  unsure (1)..(833): unsure at all n locations
  Clone ID: MRT4577_157114C.1
ctcgaggccggccggaaaaaaaggtgtaggccgagtcctctgtcctcctcagtcctcaccaaaccaccacgagagcgcttcgccgcttcctcctgctcgtcctcctcggccctcgccgttgccgtccatcccaatcaatcaatggcgccgcctccgccaccggctccgcgctcatcaccgagaccaaccaggaggacgccgtcaccgcgcagctcaagaacggtgttaggggcctgatgctcgacacgtacgacttcgacaacgatgtctggttgtgccactcgttccaaggaaaatgctacaacttcactgccttccaacctgccatcaatgtgttcaaagagatccagacattcctcgacgcgaacccgtcgcaagtggtcacgatcttcctagaagactacaccgcggtagggtccttgccgagagtgttcaacgcctccggcctcacgaagtactggttcccggtggcaaagatgccgaagagcggcggcgactggcctctgctcaaggacatgatcagccagaaccagcgcctgctagtcttcacctcaaagagagccaaggaggcgagcgaggggatcgcgtatgagtggaactacgtcgtggagaaccaatacggagatgagggcatggtagcaggcaaatgcncccaccgcgcagagtctccggncatggattccaaggccagtcgcttgtcctgatgaacttcttcacgactaacccgagncagaccggtgcctgcggggaacaattcggcgcactcgacagcatgctgaagacgtgccatgacgctttcagcaaccggtggcgaactacatcgctggtgattt

SEQ ID NO: 62626 - DNA, 1657 bp, Zea mays
  Clone ID: MRT4577_157115C.1
tcgaggccggccgggctcagtcctcaccaaacaccacgagagcgcttcgccgcttcctcctgctcgtcctcctcggccctcgccgttgccgtccatcccaatcaatcaatggcgcctgcccgtctcctgccacggctgccgctcttctgggccgccctgctcttgttgccgtttgcgcacccggcagcggcggcgcaggtgggcgacgcgtgctcctcctcctccggcggcggctgcggctccggcctgcactgcagcccctgcggcgccggcgggggcagcatctgcacgcgcgccagccccgtggacccggccacccacggcacgggcctccccttcaacaactactcgtggctcaccacccacaactcctacgccctcgccggcgccgcctccgccaccggctccgcgctcatcaccgagaccaaccaggaggacgccgtcaccgcgcagctcaagaacggtgttaggggcctgatgctcgacacgtacgacttcgacaacgatgtctggttgtgccactcgttccaaggaaaatgctacaacttcactgccttccaacctgccatcaatgtgttcaaagagatccagacattcctcgacgcgaacccgtcgcaagtggtcacgatcttcctagaagactacaccgcggtagggtccttgccgagagtgttcaacgcctccggcctcacgaagtactggttcccggtggcaaagatgccgaagagcggcggcgactggcctctgctcaaggacatgatcagccagaaccagcgcctgctagtcttcacctcaaagagagccaaggaggcgagcgaggggatcgcgtatgagtggaactacgtcgtggagaaccaatacggagatgagggcatggtagcaggcaaatgccccaaccgcgcagagtctccggccatggattccaaaggccagtcgcttgtcctgatgaacttcttcacgactaacccgagccagaccggtgcctgcgggaacaattcggcgccactcgacagcatgctgaagacgtgccatgacgcttcaggcaaccggtggccgaactacatcgctgttgatttttacatgagaagtgacggtggaggagctcccttggctacggacattgcgaacggtcatatggtgtgcggatgcgacaacatcgcgtattgcaaggcgaattcgacattcgggacctgcgtgatacccccaccgccgccgccgtcaccgcccaaggcatccacccccggcagcagaggctcaacagcaggcggcgatgctagcgctggaacgatggccctgtcctcgcaatggagcttcttgctgggactggcttctctgcttcttttgtcgcgctcgtgagagccgagcggcattggtgactggttttgctgctcttgctacatgctctgcgagctgataggagcatcgtcccatgagatgagctgaggctgagctgaactgagctgtatatttgggtttactgcgcaacgtagttagttggatacgggaatcagttaaattcatcattcatttttattgattggcgtcgttatcgtgaatgttctaataagttccttaaaaaaatgtctcatggccctactgtcagtgacgtagccatgtgaaccgggagagagaaattacagcgtgtttatcttgttcg

SEQ ID NO: 62627 - DNA, 291 bp, Zea mays
  Clone ID: MRT4577_157116C.1
caacaaacaacataaactgtataaactacttttaacaatagaaccccatcgacaaccaaggtgtttttcttacttatgctccttgctctttctatatgtgttagctaacacctacaatcatacataaatgctcataagcttctataccttccctttttaccacataaccttccatcaattatagcttcattatgttaaaacccacatcttcaccatttatgcttcaacaatcaatctgagcaagcaacataactttatacccctttgtcatgtaacaactcccagtcatat

SEQ ID NO: 62628 - DNA, 599 bp, Zea mays
  Clone ID: MRT4577_157117C.1
agttccgtcccttattggttcttgcgaggaggggggcggagaaacggaagcaggaggcagagaggagatcgagccagagggcggcgagcaagggcgcgatggcgtccaagaggatacagaaggagcttaaggatctgcagaaggacccccctacctcatgcagcgcaggtcctgtgggtgaagatatgctccattggcaggcaacaataatgggcccatctgacagcccatattctggtggagttttcctagttactatccacttccctcctgattatcctttcaaaccaccaaaggtggcattccgcaccaaggtgttccatccaaacatcaacagcaacgggagcatttgtctggacatcctcaaggaccaatggagccccgctctgaccatttccaaggtgctgctgtccatctgctccctgctgtgtgacccgaaccctgatgaccctctggtccctgagatcgcccacatgtacaagacggaccggcacaagtacgagagcaccgccaggacctggacgcaaaggtatgccatgtaatgcaagacggcggatgggtcgtcggagtcagtcttgtttgtaacattctcgatcagt

SEQ ID NO: 62629 - DNA, 290 bp, Zea mays
  Clone ID: MRT4577_157118C.1
gagtcgtattaaacagacaaaggtgacagcatgttgaggctcagagaagtgaagcaagtggctacgcaaatgatagcataggtagcgagggcaataatgatgttgtcgatcaatcatcaacagccgtcatggattcgaactcatccaatcacaggcatgtgctacgatctgatgtgaaaaacagcggcgtattttcacactctagagcctggaagccgaaaaccaattcccatcctcaggacatctcagacggcaagattgctgttgacgggcatgtggattcccatggt

SEQ ID NO: 62630 - DNA, 313 bp, Zea mays
  Clone ID: MRT4577_157119C.1
ataagtgattgggagatagaatcgatagtgcttgaagaacaaactcccatgttaaacgtgatcaataagaacacatccgatgaaaaagaattcagggaaatttctagggatgaagccaggtggaccgtacacaacccatgggcatgggagcacccactgctaaaccattgcacaatcgatagcgccaggtgaaacaaacaaaacacgcttcatgcaacagaaaacgaacttatctatctatggaaacaggacaatcatgaatgtaaaaagctagatggagtgatgcgaataccaggctcttcaacaagctgat

SEQ ID NO: 62631 - DNA, 129 bp, Zea mays
  Clone ID: MRT4577_15711C.1
ttaaaacatcaaatccacaacggagtgccgttaactcctaacagccaattccaaagcctgacaaatccaatccaaatgatccaacatacctaaatcctcatactcatgatactgctctctcaatcattc

SEQ ID NO: 62632 - DNA, 558 bp, Zea mays
  Clone ID: MRT4577_157120C.1
caggccccaacaaccccacataatcgtagaatctcttggccagggcagggggggggccaaaggcctgggggtccttcacccctgaggcgtatggccaaccattaccaccaggatcttatggtcaacctattacacttgtcgaactgtcgggcagggctcctcacatgaatcgaatcctggcggtaacagactgactgaagtggaatcctacttatggacaaagaatacggagacagggggcaggaccagattcaggtggatataactggcaaaaaggttctgaccagaatactaccccacatgctggacagtgaaacacgagcatggaaagcatcattaacttgacgtgctgcactgaaaacaaaaatggtcactggagatttataaatctgcatagggtaaaacaaacaactgggatgcattactcaaaacgttctggcatatagactctaaactcatgaacatgcgttaataccaaacctactgaagcatatgcattcaaatatttgggaccaaatgttggatcataaagacgaactaccctatgtctatcgtata

SEQ ID NO: 62633 - DNA, 216 bp, Zea mays
  Clone ID: MRT4577_157121C.1
aggccaacaaatgaagcaaatggggatggggggggcatgttctcaaacacaaaaaaaggaaatgggtgccacccacagtacaagctttggggggggcatgttctcaaacccaaaaaaaggaaatgggtgccagccccaaaacaagctattatgggtttcctctctctttccaacctttttgcccgtcttgattagctgccccgttggaaggggttt

SEQ ID NO: 62634 - DNA, 516 bp, Zea mays
  Clone ID: MRT4577_157122C.1
tttttttttttttttttttttttttttttctttttttttttttttttttttttttgggaacaacaacaacggaacatttttttcaaacttggcgtacaaacaaaaatccaaagtatttttcctgcacaacgtttcatttcacacacaaaaaaaagaccaacattttgacgactttgacgggacaactccagtcacccgacagctaggctttttacttgcgaacgccccactttgccatgcttcctctattatgggctcacatgcagcctgtaccttttggcacgtccatgtgcagggcagctaaaaacacacgatgaaaagctttttcatgagctccacggagggcagtcttttttttccgacgtcaaccgggaaagcttgtccgcacctcaatctccggctgagcaccataagctcctccagcgtcgtggccgcgctcctcggagggctccatggattggcctcgtcattggccacctcccagctcttttttgaaggggcccggggaaactggaa

SEQ ID NO: 62635 - DNA, 2005 bp, Zea mays
  Clone ID: MRT4577_157124C.1
atgggtaagggcgggcaggacgaaggcaaccgccggcgggacggatccgccgcctcggggccggaccgccccgcgccggtcttcccggcgtgggcgcgcaccccgagcgagtgcctcgcggagctgggcgtctcggcggaccgcggcctcagctccgaggaggcggcggcgcggctgcagcgacacgggcccaacgagctcgagcggcacgcgccgccgtcggtctggaagctcgtcctcgagcagtttaacgacacgctcgtgcgcatcctgctcctggcggccgtcgtctccttcgtgctcgcgctctacgacggcgcagagggcggcgaggtggggctcaccgccttcgtcgagccgctcgtcatcttccttatcctcatcgtcaacgccgtcgtcggcgtctggcaggagagcaacgccgagaaggcgctcgaggctctcaaggagattcagtcggagcacgcaaccgtcaggcgtgatgggcgctggtcgcatggcctccccgcgcgcgacctcgtccccggggacatcgttgagctccgggtcggggacaaggttcccgcggacatgcgcgtgctccagctcatcagctccaccctccgcgtcgagcaggggtctctcaccggcgagaccgcctctgttaacaagaccagccacaagatcgagctggaggacactgacatccagggaaaggagtgcatggtttttgccggtaccactgttgtcaacggcagtgctgtctgtgttgtgacgggcactggcatggctaccgaaattggcaagatccatgcgcagatccaggaggcatctcaggaggaggacgacacgccactgaagaagaagctcaatgagtttggtgaggcgctaactgccataatcggggtgatctgtgccttggtctggctcatcaacttgaagtatttcctttcctgggagtatgtggacgggtggcctacgaatttcaagttctcatttgagaagtgcacgtattactttgagattgcggtggcactggccgttgcagcaattccagagggtttgcctgctgtgatcaccacgtgcttggcactcggtacaaggaagatggcacagaagaatgcccttgtgaggaagctgccgagtgtggagacattgggttgtacaactgtgatttgctctgataagaccggaactttgaccacgaaccagatgtcagcagtgaagcttgtagcaattgggaggtggcctgatacacttaggagctttaaggttgatggaaccacttatgatccgactgatgggaagatacacgattggccaagcttgagcatggatgaaaatctccagatgatcggaaagatagctgcggtttgcaatgatgcaagcattgcccactctgagcatcagtacgttgctactgggatgcccacagaagctgctctgaaggttttggttgagaaaatggggcttcctggtggttatactccatctcttgattcatctgatttgctaaggtgttgtcagtggtggaataatgctgccaagagagtagcaactctggaatttgatcgcaccagaaagtcaatgggagttattgtgaaagcaaactctgggaagaacttgctgcttgttaagggagcagtagaaaatctgctagagagatgtacccacattcagttgctcgatggatctgttgtgctattggatgatggtgccaaggcgctcatattatctacactccgtgacatgtctgccagtgctttgcgctgcttgggttttgcttacaaggatgaattgtcagaatttgcaacatatgatggtgaagaacatgcagctcacaagtatctgcttgatccttcatattactcatccatagagagtaatatgatcttttgtggttttgttggtctaagggatcctccacgagaagaagtccacaaagcaattgaagattgcagagctgctgggatacgtgttatggtgataacaggagataacaaggaaacagcagaggccatttgtc

SEQ ID NO: 62636 - DNA, 1634 bp, Zea mays
  Clone ID: MRT4577_157126C.1
cgagcccaggacttggagttgctactcggaagtcctcaacctctaggctagaggccctttcgcaatttacctttatataagttgaagaaacagggtgtgctgtgttgctgttgtttgatagttactaattctgtatggtgacctgcaaagagctgaaagatgactagtaatatcaatgcccagctatgcaggccgcagagagcttaaatgcaagcttaacttataactgctggtgtcatcttttgagttttagcaagggaaaactcatgcactaactttggatttacttgagctagggataataacactattggatcctgagttcagactgagagacagttttgtccttgaaattgttttttggagataacctagtgatgccactgagtaggatgaatgatcaatatgtagtttcatgaagagaggctgctctgagatgtcttgcagtatgcagaaacacattttgtgtgcttattaatgtacttgagggccattatttgttacttatgtgttataataattattggagtaggacttcatgagggaaattgatgatggtattagatctagtagaactgttgattgccaattgtgcacagaagtaatgctatatgcaatgacaccaatgagtttggttactgggagccagtatatgtgggaatcagcacctggtggtgcccatttgaaaaaacaagttgaaggggattatttttcttttgcgtggcaacgatgatagatctgaaagcagaaataatttcttgaaaaacagtagccatagaattaagtacaagaatgctctattcaaattctgagttgaaggctgttgaatttttctccccagttgctggagcaaactcaaggatctagcacatttaagtttaactatctagtcaagtattcaacataaagatacttcagaatcacagtaagctgacaaatacatcttgtttcggaactgtaaggctgcaccattagtccatatcaatgtgatcatcattagtgcatgatttccattttttggtcttttattcatatgtttttagtaatgttattatcaaagcagtcgttgatccttaccttttgtatcctccctaacatgatagcgttgctgttttgatgctgttacttggttttcatgctaacatggcttcaatactatcgttgtttttgagcactttgagaattgtagccaccagcatgcctctccaaagacgtgcatggagattcaaaccggtatcttgcttgctgtcaaaagcaaccagatttgtgaactcgtcatgtgtgaattgtgatgttgtattgctctctagtttaccaatttgagcttgtaaagaacactgtagggatgaaaggaaccaaatgtacaaaaacagagtatgctgacgtttgtcacgcgcgtctgaatctgttccccgtttgagcttgtaaagcacactgcaggcgtggaagtgcttatatggaatatcatatggagacgttagtcacgtgcatatgaatatggtagttttagggccggtttgatttcccgtctaaggagccacaacttatctaataccctgcttgaatttggagcatggaattggtaattggaataaacttttctgaattctgctaaaaaaaaaaaaaaagcggcc

SEQ ID NO: 62637 - DNA, 343 bp, Zea mays
  Clone ID: MRT4577_157127C.1
aaaaaattaaaaaagaaaattaaaataaaaaaaaaaaaaaagagataaaaaataaaatggaaagaaaaatgaaaaaaataaaagaaaaaaaaaaataggtggaggctcttgatgatgatgttaatgatttgataatgtatctctcgaaagtcttagctgatatccctgatcttcaatgcatcggcttcggtcattcaacgtgcttgatgtgaataccttaaggctgcacttgattaacatgtagaaactctccttatatgtattgtcttgacataatcagatgtcggtgttcagcctagacattcaatcatattggtcatggcaaagatttatgggcacatcg

SEQ ID NO: 62638 - DNA, 340 bp, Zea mays
  unsure (1)..(340): unsure at all n locations
  Clone ID: MRT4577_157128C.1
gcacagaagaaacgaagaggcccacaaagncgccgaaccaaaaggccacaaggagggcnacgaaccgaggggacaaaagaaaaaaggacagacaccacagcaccccaccccaacaagccgaacacggggcgaaacccaaccagcaccaccggcaagaggaacaggccaccaaaggccagcagaggagngcagcaaaacccaccaaccaggagcccccgacccagaaccaacgcaccaaggagaacgggccgcgccagaccgcagccggaaacaacanaagcccaccgagcaanagagagccggaaacaaccagaaaagcccacagaaaggaagcagcaga

SEQ ID NO: 62639 - DNA, 1383 bp, Zea mays
  Clone ID: MRT4577_157129C.1
cattgggtacctcgaggccggccgggcccttttcccctcctccctcgctaaggttcctgtgcagcagccctgttgcatgccatcttcctagcttagctagcaagaatctcttgccctccttgcttcctgatcctgcgcccttggatcaccttccatgtgttcttggccttgttctctcgtgcatctgaccatcagttcttaagaatatatttccattggaagcaaattttagggtttcctgggagagactctgccaacctttttttttgccctggtgcatctgcatcaacttgttcgtttctctctcgtaaaaaaaaagctcactgtcgtaaacgttttcgccaattgatccatgatagactaacgtcgtgtagatgtcacaaatcctctccgaggtgagtcaccgctgcagatttatgatcaactcgacgctccggcgaggcacccatcttgttctctctttctccgttgtgttcctctattggttctatgtgttctcagtaagatcctaaccaccaatacaacatactagtatcatatccttggaaattataagcctctacatacaacaacttaattagtcagaggaaagctttcaagtctagatataaccccaagtatcttttgaggatgaccctgtccggtggggcctcgtctgggtctagtcatgggacccgtagcttggggtcagagggtgacatggtgcaccggatggagctcatgcgcaagagaaggatggagtcaaaccgggagtccgcgaagcgatcgaggcagcggaagcagcaacatctcgacgacctcaactcgcaggtggacaagttgaggacgacgaaacagcaactcatgtagcactgaacatgaccagcatgcattacgcgcaacaagcagctcagaactcggtgctgcgcacccagatgatggagctgcagagcaggctctgcgcactgcgtgagatcatatgccatatgtacgcaacaacaacgaatgtccatccagcaactgtcatgggcggtgctgctacctaccatacttttggcgaaactgcgtggaactctggcagctgcagcatgcaaatggtcgaccacttgttgcaccagtgcttctaggctctagctacgtacgaggaggtagaggccaagacaaacaaaggcatgcatatatatgtattccatgttttctatgtcacaactcacaagtagtgtgtacgtcatttgatttaatgtataaaagggtttgtgcaattaattgggcacatgcatgtgggttaaagccaacattattgttgttgcctctaatttgctcatgcgtgaaaaaacacatggcaactggcaacttgtgttttgttcacaactattgctaactgcaatattaatgatgatgatc

SEQ ID NO: 62640 - DNA, 438 bp, Zea mays
  Clone ID: MRT4577_15712C.1
ggctgaacaagtgggggggtcgaagcaactcgcactggaggccacacatacctaatatagagtcccacagtccagtttatatatagatcgatactgcatgctgctcctggcaatacagggggtttattttatttcttccctggcttcatcactcgggcagcgcgcgggacgtacgtgtaccttcgggaggcttattaacttgggcggcggaacttaactgatcttgttgcaaccgggggacatgctgatggggaaacccacggaaaccccccacttgcccgggatgggggccaccgggcccattttgaccctcttgaccctgttggcgaagctcttgaggcaacggcaccccccctgggggtccccgctggtcccccccccgcttttgaggcttttgacccccctgcaacaccacccggggagcgcgctggccctccc

SEQ ID NO: 62641 - DNA, 1757 bp, Zea mays
  Clone ID: MRT4577_157130C.1
atctcttcctcctctctcatctaagccggtggccagggggcataacccagccgacggggtacggcggcgtgggggtataacccggccggcgaccacggaccgcgactacgatcttcatagtcgaggccctgctaccttgggccccgaggtccttgacatttcaatgtggagaaaaggatataccgtgcctttattttgaataatattgggtacctcgaggcgtaaactcggcgtagacggagactgcagacgcccggaccacaggaacatccaagtaccgaacactaccggccacacgctcgagaataggcggcggtgcaggtcctcctccatctctgtcgtgggttcaacttcactgtgaatacgctgacgctacgagaagtcatcacggaaggggtctcgaagcaaggtgcaaagactcacctgccgtctccgatgggcttcgccggccgggtatccatcctgctcttcttcctggtcgctggcactgtagcaaacgaccagatcttcaccacttcaggtttgccatttgggcgaagttcgcgtgagccaaggtaccgcgtcgagttccatcctgttgattcgccattccatccagagaatggtcaggaatcggtaccaatggctagtcatgaggggaagcgttataagtgctttctaccagttgaagaaactaaaaccatgaagtcaatgctcccacaaaatgcaactaatattataatagaaagtgaaaggagaattaagccaaaggagccagatgagttacttgaggttctcaaggatcagtgtttctacaggcacgaaggttggtggtcgtatgaattctgttattatgggaaaatcagacaggtccatgtagaggacggtaaggttatccaagaatttgttctaggcgaattcgatgacgacgcgactgctgcataccatgaaaatagcacctctgagttagctgacgatgaccatcacgtgaaagatatatctaagaggtatcatgttcacttgtatacaaatgggactgtatgcgatctcacagatattccccgggagacagaggttagatttgtctgctcggagcctactgtgctgattagttcagtcaaggagatctcttcctgcagatatgttgtaacgattcaaagtcccatgctttgcaaaaacccgttattccaggaagaaaaacgaaccctctccatccactgcaatgagttgcctgctagagcggaatccagcgcggaggatgactcgcttccaaaagaagctcagatttccatcatccccgatcaggatgagctacatgatttcccagcctatgctacttgatttgcctccaataattatgtttgatgtagaaaaaaacaccattttggaggcgcaggggcaactgagcaacactatgtattaactatctcgtagatactacagcagaggctccttgtaaagcaggttgagacgatcattctgcagttcttattatataggatgattacgaaggtaacatgtttgggacagtaacatttgcttgaaatgtatatagtctacaacaagaataatgccagcattcttgaaatgtatcgcctaggagaatgctagcacttacgggtgtgacgaacgatctgctgtcggttgagatgaaaaggcgttcgccttctattaaggatgtaaatggtacaaaaggatgtaaatggtacagatattatctgttcgtatttaaatttaatccggtttgagattgacgcggatattatctgttcgcattt

SEQ ID NO: 62642 - DNA, 1106 bp, Zea mays
  Clone ID: MRT4577_157131C.1
tctcggtaacggccgggccaccaatacaacatactagtatcatatccttggaaattataagcctctacatacaacaacttaattagtcagaggaaagctttcaagtctagatataaccccaagtatcttttgaggatgaccctgtccggtggggcctcgtctgggtctagtcatgggacccgtagcttggggtcagagggtgacatggtgcaccggatggagctcatgcgcaagagaaggatggagtcaaaccgggagtccgcgaagcgatcgaggcagcggaagcagcaacatctcgacgacctcaactcgcaggtgaatttgacacaaagcaaaagtcagatgaaaaaaacgagacttgtgcttcaggatatgctgaagcaagcaaactccgataatgcgcggtgccccttaatttctcagggtccaccacccaataaaattgattcaaaataggccattccaacctaagcaaagaacgatgcacgacgtgccaccgtcgaaatctttctcaaaaaaagggaaaaaagggaaaaaaaattccacaccaattcattggctgtctcggcaaaatcaacacggtcatatatatatcaatcattttttttcttcttcttctacccgacgtcgcgtttatatcggaataattgaatcgtcttctgtataaaataaaacaaaacaaaacaaacaggtggacaagttgaggacgacgaaacagcaactcatggtagcactgaacatgaccagccagaactacgcggcagcagcagctcagaactcggtgctgcgcacccagatgatggagctgcagagcaggctctgcgcactgcgtgagatcatatgccatatgtacgcaacaacaacgaatgtccatccagcaactgtcatgggcggtgctgctacctaccatacttttggcgaaactgcgtggaactctggcagctgcagcatgcaaatggtcgaccacttgttgcaccagtgcttctaggctctagctacgtacaaggaggtagaggccaagacaaacaaaggcatgcatatatatgtattccatgttttgtaagtagtgtgtacgtcatttgatttaatgtataaaagggtttgtg

SEQ ID NO: 62643 - DNA, 739 bp, Zea mays
  Clone ID: MRT4577_157132C.1
ggtacctcgaggccggccgggccgggagtagaaggcgaatcaaccaagcaaactctgctgtcctgaactcgtgctttctttggcctgtccggattctggtctagttgatgacgcgctacaggttacgacgcatacgcattatagttatcatgagtgcagatcaagcaagcagcctgatacagcgatacagctcagttttccttttctgctctctgcttcaaggacacggctttggtcggtcgagcgtgaataataaatctcagtgcgtttggtgacacagaaaatggcgaggtaatgcatatgcggtggcaacagctgctcgtgttggaggcactctgtcgttctcccaagctgaaaattggtttgtaaggtctttatggacagttcacatgaagttcagagatgtattgtcatgtttgggaaaaattggcgagagattgtatcaaaccaagggatcctactttcagcggcgagcatccaaaagctagagaagatcgtttctggcctcatttcaaagatgctattggtagatggattttccacagctgaacaaatggatcctgatttccacttctgtctactcgtagatggattttccaccgtgcaatactgctgagatatcatacacgaccaaacggtttaaattattaaccatatgtataattcttgcttagaattcgcaaattcggatatgtccgattttctttgaaaaaaaaaaaaaaaaaaggcccctagggcc

SEQ ID NO: 62644 - DNA, 488 bp, Zea mays
  Clone ID: MRT4577_157133C.1
gaaaggaagagtaatgggtggaaaaggacctaagagtgaagggttacaataacatttttgcaattggtgacatcaccgatattcctgaaatcaaacaagggtacctcgcccagaagcacgcgctgctggtagcgaagaacctgaagctactgatcaaggggtcacctccgagcaagctcgccacctacagcacgggcttcccgctggcgatcgtctctctgggaaggaaggaagggctggcacagctaccctacctgacgctcaccgggtgcataccggggatgctcaaatccaaggacctgttcgtcggcaagacgaggaagcagatgggcctgaatgcttgagccgatcttcaggcaaacaaataaacctatggctgcctgcacatatgtgttgtattgtcatgtgttctctgtgcgagtaattgttggtgatgtgctgtgaatggtgatgaacatttcaacattagtgtaaatgtacatgtacgg

SEQ ID NO: 62645 - DNA, 828 bp, Zea mays
  Clone ID: MRT4577_157134C.1
atctcttcctcctctctcatctaagccggtggccagggggcataacccagccgacggggtacggcggcgtgggggtataacccggccggcgaccacggaccgcgactacgatcttcatagtcgaggccctgctaccttgggccccgaggtccttgacatttcaatgtggagaaaaggatataccgtgcctttattttgaataatagttatccaagaatttgttctaggcgaattcgatgacgacgcgactgctgcataccatgaaaatatcacttctgagttagttgacgatgaccatcatgtgaaagatatatctcagaggtatcatgttcacttgtatacaaatgggactgtatgcgatctcacagatattccgcgggagacagaggttagatttgtctgctcggagcctactgtactgattagttcagtcaaggagatctcttcctgcagatatgttgtaacgattcaaagtcccatgctttgcaaaaacccgttattccaggaagaaaaacgaaccctctccatccactgcaatgagttgcctgctagagcggaatccagcgcggaggatgactcgcttccaaaagaagctcagatttccatcatccccgatcaggatgagctacatgatttcccagcctatgctacttgatttgcctccaataattatgtttgatgtagaaaaaaacaccattttggaggcgcaggggcaactgagcaacactatgtattaactatctcgtagatactacagcagaggctccttgtaaagcaggttgagacgatcattctgcagttcttattatataggatgattacgaaggt

SEQ ID NO: 62646 - DNA, 1309 bp, Zea mays
  Clone ID: MRT4577_157135C.1
gtacacactccggctctccgggctccgatggacttcgccggccgggtatccttcctgctcttcttcctggtcgctggcactgtagcaaacgaccagatcttcaccacttcaggtttccttttgttaacactgatatgcgctggaagcgagcttaactgggtgttgatcgccaggtttgccatttgggcgaagttcgcgtgagccaaggtaccgcgtcgagttccatcctgttgattcgccattccatccagataatggtcaggaatcggtaccaatggctagtcatgaggggaagcgttataagtgctttctaccagttgaagaaactaaaaccatgaagtcaatgctcccacaaaatgcgactaatattataatagaaagtgaaaggcgaattaagccaaaggagccggatgagttacttgaggttctcaaggatcagtgttgctacaggcacgaaggttggtggtcgtatgaattctgttattatgggaaaatcagacaggtccatgtagaggacggtaaggttatccaagaatttgttctaggcgaattcgatgatgacgcgactgctgcataccatgaaaatagcacctctgagttaactgacgatgaccatcacgtgaaagatatatctaagaggtatcatgttcacttgtatacaaatgggactgtatgtgatctcacagatattccccgggagacagaggttagatttgtctgctcggagcctactgtgctgattagttcagtcaaggagatctcttcctgcaaatatgttgtaacaattcaaagcccgatgctttgcaaaaacccgttgttccagcaagaaaaacgaacccttcccatccattgcaatgaattacctgctaaagcagaatccggtgctgaggatggtttgcttccaaaagaagcgcagatttccatcatccccgatcaggatgagctgcatggttttccagcttatgctacttgatataatgatatgccttcaatatttatttctggtgtagaaaaagcacagttttggaggcccagtggcaactgagcaacgcgatgtattactctctccgttcttttttatttgccgtggtttagtttaaaaattacgacaaatattggagaacggacccatagatcctacagcagcggctccttgtaaagcaggttgagacgatcattctgcagtgctaattatttaggaggattacgaaggtagaaagtttctcagtattagtaaatgtaacaagtttgagacagtaacatttgcttgaaatgtctagtctataacaaggacaatactgcattcttg

SEQ ID NO: 62647 - DNA, 689 bp, Zea mays
  Clone ID: MRT4577_157136C.1
agggccccaaagagaggttccatcaccacccccaaaaccatttcaaaggttagcaatcccaccacaaactccggcgagaatccccagcccttgagcaagtcccccaggtaaaggcggtaagttatccacatcaaagttactgagccctgaaccaaggcaatgccccaaacccgccgccacagaaccgcagaatactgacccatgggtaattccaaatcctattcaagggggatttaagttgctgttgttaacgttgaaaactatttaccaatgcttgccactgttggagccgagcctatcgcatttactccaccaaatcaattgactattgacagaatcttgaacaatgcctgggccaggaaccgttgcaaccagttacattaagaaatgtaaagaaaatttccccactgtccttttcccatggtccctagcaatgctgaatctcaatccgtagttgtaattggtgctggcattggtggtctgacaacggcggccctgttagcccaacagggttatcgagtcaaagtttatgaacaggcggccatagtggggggttgtgcatccacctttcggcgacggggttttattttcgatgtgggggccacccaggtggcgggcctagagccagggggaattcaccaccgcattttccgccagttgcaagtggatttgccggaagcatccctgtg

SEQ ID NO: 62648 - DNA, 1326 bp, Zea mays
  Clone ID: MRT4577_157137C.1
gaaggcgtaaactcggcgtagacggagactgcagacgcccggaccacaggaacaccgaagtaccgaacactaccggccacaccctcgagaataggcggcggtgcaggtcctcctccatctctgtcgtgactattctagtttctgcgcatgccctcacggatctttagactccagggttcaacttcactgtgaatacgctgacgctacgagaagtcatcacggaaggggtctcgaagcaaggtgcaaagactcacctgccgtctctgatgggctttgctggctgggtatccatgctgctcttcctcctggtcgccggtgctgtagcaaatgaccagatcttcaccacttcaggtgtgccatttgggcggagttcgcgtgagccaagttaccgcgtcgaattccatcctgttgattcaccattccatccagagaatggtcaagaatcggtaccaatggctagtcatgatgggaaacgttataaatgctttctaccagttgaagaaactaaaaccatgaagtcaatgcttccgcaaaatgcaactaatgttataatagaaagtgaaaggagaattaagccaaaggagccagatgagttacttgaggttctcaaggaccagtgcttctacaggcatgaaggtttgtgggtcgtatgaattctgttatcatgggaaaatcaggcaggtccatgtagacgacgataaggttatccaagaatttgttctaggcgaattcgatgacgacgcgactgctgcataccatgaaaatatcacttctgagttagttgacgatgaccatcatgtgaaagatatatctcagaggtatcatgttcacttgtatacaaatgggactgtatgcgatctcacagatattccgcgggagacagaggttagatttgtctgctcggagcctactgtactgattagttcagtcaaggagatctcttcctgcagatatgttgtaacgattcaaagtcccatgctttgcaaaaacccgttattccaggaagaaaaacgaaccctctccatccactgcaatgagttgcctgctagagcggaatccagcgcggaggatgactcgcttccaaaagaagctcagatttccatcatccccgatcaggatgagctacatgatttcccagcctatgctacttgatttgcctccaataattatgtttgatgtagaaaaaaacaccattttggaggcgcaggggcaactgagcaacactatgtattaactatctcgtagatactacagcagaggctccttgtaaagcaggttgagacgatcattctgcagttcttattatataggatgattacgaaggta

SEQ ID NO: 62649 - DNA, 233 bp, Zea mays
  Clone ID: MRT4577_157138C.1
ggggacgctacgcagagcgggacatcgttcagttcgtcccattccgagactatgttgaccggtcggggcaccaggtgttcagcatggcccgactggccaaggatgtgctggccgagatcccggagcagctgctgtcctactatgcgcaccagagacatccagcctcggcccccaccccctgccaaccccagcccgatcccagctccagagcagccctgagggattccacatat

SEQ ID NO: 62650 - DNA, 265 bp, Zea mays
  unsure (1)..(265): unsure at all n locations
  Clone ID: MRT4577_157139C.1
tttcctaattttttcttaacggaacaanactaacccctttggggggcttttgtaaattcaggggcttgtttacactgacactgccacccatggtgatgcgtgacacaatagtactcaataagctgcagttatatgtctcaactagcatgctaggcagaggcttgtctacaatacatagtttcttgagagggggacaccgtcggcagaagcgtaggggcatggagtctgctgatgcaggacgcacatcgtcgtcagtatgctgcgc

SEQ ID NO: 62651 - DNA, 610 bp, Zea mays
  Clone ID: MRT4577_15713C.1
cccacgcggccgactagcacaccaaccgccgtagcagcggcggtcgcgcggtggtagacattttcaacgaagattacatggacttcgacgtggagtctgaagatgatcctcctgaagctggggccgaggaagaggtcgataacgacctagataaccacgaagatgccctagatggtgtggtatgtggtgagggagatgataaggcacagcaaaagaccaaacctgcgcgcatatcaacaaaatatgtgactacgcatgtacttgccccaataccctggacactaaccatgaatgctaccatgaatgctgaacttatgggagaacttgacggtgaaactaatcctattaagattgctataacggaccttataccgttcacgataccattgaacatcacacagtaccatacctgaagacagttatgaagactagctaattgacgagctcacttggaaacactactgaaaacgccactgtggttgctactctacatgctaatctactgatgatgaaatacatgtgtacttacacgtcttatgtatctttaacagggtgctgaccagtacatgaccctgcactactcgatgctatcctagcagttacctttacc

SEQ ID NO: 62652 - DNA, 286 bp, Zea mays
  unsure (1)..(286): unsure at all n locations
  Clone ID: MRT4577_157140C.1
ctcgggaaattactggactccatcatgctttatttgctgtctgataatcatgtgcttcattaggcatatgaagcatgttcgcataaaatggaactgactatctttgcggcagtaaactgaccgcgcnnaaaaaaaaatgaaaaaagcaaataaaaaagaactagataaaaaagggcggcgttaaggatccagctactcgctgctgcactctacttttatggcacctaatcaattatgccgcgttacaactctgctgggaacctgcgaccaactaatgctgagacat

SEQ ID NO: 62653 - DNA, 869 bp, Zea mays
  unsure (1)..(869): unsure at all n locations
  Clone ID: MRT4577_157141C.1
agtgggtccctgcccgctgccgtgcttctccccattttccgcagtttcttccgccgctccnnnnnnccggccgggtctccttcctcccaagcaaccgcttctcgccgggcgccggcggcagctgccacgtgccgccaccgtctcatcgcctcgccgtactagccccgcggcttcgtcgtccgatgagccgctgccctgtttcctctcatacaatataatggtgtcaaagcctgtagtgcttgtcttcctgttggtggtactcataatcacgtcccagtttgaatggaagcaacagcttgtaaacgagttggaatctacggctcgcaaccagaaacatgtttcaagtagagaagagcttgtcaaggatcagataatcttcactcaagaaaagatgattcaaagattgaataattttgtccagaatcttcagcaacagttggtgcagtgtcgtggcaacaacaggacagttaatcgttctggaacttctttgacatcttatattagtgagatccagatgccgcagatgatggatgactgacaatgtcgcgcggcatgaactatacggataaaaagataggatattcacagagtcatgtggacagcgaagttctcccagtaaaagcagtcataatgtagtattagcctggacagaacaatattcgatcagttccagagagaaaggaacgctgatcctttgaaaacccgtgtaattttatttcccttttcctctttttcccccctaagagaactgaaaattctttgttttatgataggcatctatatatacttattatcctctacagatattgtgatatgaagggtgttttagaagtgtaaacgtaaaaaaaaaaagcgtgttttagaagtgt

SEQ ID NO: 62654 - DNA, 2831 bp, Zea mays
  unsure (1)..(2831): unsure at all n locations
  Clone ID: MRT4577_157142C.1
aaccgcttctagccgggcgccggcggcagctaccacgtgccgccaccgtctcatcgcctcgccgtattagccccgcggcttcgtcgtccgatgagccgctgccctgtgagctatcctctcctggtcggcctaatccccctcctctcttctcgtctttttcagcttgtaaacgagttggtatctacgtccctccgtgaggaacatgtgtccatgtgcgatgatcttgtcaaggatcagattatcttcactcaagaaaagagggttcacatattgaataattttgtttggatgctttatctacagttcggtccagtgtctgtgactagaacaggccagctagtctttctggaacttctttgacatcttatattagtgagatccagatgccgcagatgatggatgactgacaatgtcgcgcggcatgaactatacggataaaaagaggtaattgctataacagttattgtcatgagtctcatgactcatggaccatacacttccacttcagtagttcagttgcctgtgatggggaaatctcaagtactgattggaatagcatcagaaggggctaatcttgttcttgtatgtagcgcattgaaacaagtactaaaggaaaggtcgtgatttggtttgcgtaccttttattcacttctctatattatttttaaaagcacttcgtgattttcagatgaatagaaatgtctgcatattagtgcgttcattgatgaatttgtttctaggtttcctctcatacaatataatggtgtcaaagcctgtagtgcttgtcttcctgttggtggtactcataatcacatcccagtttgaatggaagcaacagcttgtaaacgagttggaatctacggctcgcaaccagaaacatgtttcaagtagagaagagcttgtcaaggatcaggtgaggcgactcactttgtgtatctgaatgctttaagcgatttttttttagttttagatagtggcaaaatttgagatgaaaaggagcttgaatagcagggctctaataacatgcaaattattgcttccaagaccttattttcatggtaagtgtaagcgttgagatgtgttcagtaacctcatattagatatagtcttatgttgttgtcccagcacattgcaatttggttagaaagaaaattattgtgtcgtactagaggactggaagagatctttttttggcagcagtattcaaatttggctataaccttatacttgtttcagataatcttcactcaagaaaagatgattcaaagattgaataattttgtccgaaatcttcagcaacagttggtgcagtgtcgtggcaacaacaggacagttaatcgttctggaacttctttgacatcttatattagtgagatccagatgccgcagatgatggatgactgacaatgtcgcgcggcatgaactatacggataaaaagataggatattcacagagtcatgtggacagcgaagttctcccagtaaaagcagtcataatgtagtattagcctggacagaacaatattcgatcagttccagagagaaaggaacgctgatcctttgaaaacccgtgtaattttatttcccttttcctcttttcccccctaagagaactgaaaattctttgttttatgataggcatctatatatacttattatcctccaaaaaaaaaaaaaaaaaagcggccgcttttttttttttttttttcagaacaaaattactcttcttttatagtataagaacagttccgtgcaacaaaacaaacaccaaaaccaatatgacatatgatgtttattatgacactcttattgttcaaatggacaacaatatgaatatgccgacaatgtacaaatgaaccttaatttaggggtggctactttcacaaacgatagggcaagctgtgcacatatacgacgggccggatgtatccggaaacaataggagaagccgagcaccggaggaaggtgaccatgtgacttccactgcacaggggtggctgtctcaagcatggagagctagctttttcactatggaggccatgtacttgccctggtgctctgcaagggcgagttcagtctcactgggttgtctgctgccatcgccagcaaatacccccgcgccataggggctgcctcctctgataccatccatgtcgaacatgcctgaaccaaaggtgtagccaattgggacgaaaagcattccatggtgagctagctgggtgatggccgtccaagccgtggtctcctgccccccgccctgcgttccggtgctgacgaagaacccggcgggcttcccagcgagcttctgcgcctcccagagcgagccggtggagtcgaagaaggccttcatttgcgcagccatggcgccgtacctcgtcgggaagccaaacaacactccgtcagcctcctgcagctccgcggccgacgcgatcacggggaccgcggggtccttgaccggcgcctgcatcttctccagcacctccggcgggagcgtctcggggacccgccgcagcacggcctccaggccgtccactgcgccggcgccagccgctgcgcgccgtgccagggactccacgtgcccgtacatcgagtagaacacgatgtagagccgcagctttcgcccgaccgctactcgacatagaacaataaataaagcatggtcactgatcaggaatagcttaggcatggtgaaaacagatacttcaattcagctacagagattatatcgagaaaaattacaagttgcaaacaagtagggagaataaaaccaaggcatcaggattccaatgcttttagaatttagattattncatgatcactattcccagcca

SEQ ID NO: 62655 - DNA, 278 bp, Zea mays
  Clone ID: MRT4577_157143C.1
gttacgacgggtgcgatcctaatctggaaagaaaggtatgcccttgtttgatggctgtgccgcattattagttacaagagaaaccttgctgtgatttgagcgaaacgtatggactatatttctgcggaggtgagcatgatggcgcatgtccagcatgtatggacagtggagctggtccctattgatactggtgagttctatggggagcttgatttaattcgtcacctgagcttgggctcggagatggacgttcctggttatttgcttggcctgcgcta

SEQ ID NO: 62656 - DNA, 370 bp, Zea mays
  Clone ID: MRT4577_157144C.1
gctggagaacggtattctgccttgacggggttctttgttccttattcacatgtttcacttgtgatctattaggtgaggaaggaactaggaattgaggagaatgctaaggtgctcgtttttaattttgggggtcaggtgggtcacttgtcatataggtggtttggtaagcttatggaatatgtttctattttctcatgtggtaatgttatgtggctacttgtcaaaatgaactcaatacagacaatacacaaaagttgcttttcgccagcttcccagataaactgcttttccaacaggcaacagctaccaaatagggcctatcgtttcttctgaaccgatatctgctgattctgattctttcagtaatcac

SEQ ID NO: 62657 - DNA, 316 bp, Zea mays
  Clone ID: MRT4577_157145C.1
cccacgcgtgcgcccatgcttacgtatatataatgtttcccatcatcagtataagcgattcagagtgtatcagctgatcgttaatccctattttaatcctttgcacacccaaccattctaccgcttacgagccatatgaaagcattgtgctctgtgttcattgcaaagcgcgtgcatatcctaagaggattttctttcttgctgaactataggcaccatcgtatctggaactttgaagctttctaaatctttgtacaataaagatacttgaatacagaatacatacatagcgctctttgttttacaaaagtatcat

SEQ ID NO: 62658 - DNA, 390 bp, Zea mays
  Clone ID: MRT4577_157146C.1
gcgactttcacagtgctacccgccgacctcaggttcggggcaccaaggctggtcttcgaaagcatagctgaagcagaaactactaggctagaggatattcatgtgctggaggaacaacgattgaacacagtaattcagtcagacagataccagcagaccatgaggcgctatcatgataaagccatacgacatcgatccattgcagtgcgagacttggtcctccgccgaattctaacgggggaagggcggcacaagttgtcaccactatgggaagggccattcattgtatcagcggtcactcggccaggatcataccggcttactcaaatggatggcatggaagcggggaactcatggaacatagagcaccttagaaagttttacccttag

SEQ ID NO: 62659 - DNA, 364 bp, Zea mays
  Clone ID: MRT4577_157147C.1
tttattaaaactcctaggctgctgctcctgctccggcgtgccggcatcatgcgcggaaacgtacacgtgctatgttgctatcactggcctacaaggacagagggtacgcattcttgactgatacagaaggttgaagcacacgggccccgactggacggacctataccatcacgaggacaacttcctggcacattagaggctcgccgatggatcaccgctatacgtcgaccagccggtgttcaacaaggactcgacagatgtggtggtagccaatggcgagatctagaaccacaggaacggcctgaggcagcttacaggtccacacataattaaaactggcagccactgcgaagtcatcataccc

SEQ ID NO: 62660 - DNA, 255 bp, Zea mays
  Clone ID: MRT4577_157148C.1
ttcacgcgtccgctgagatgcacacagacgcttctgcgatgtgcgggcactgcacacaatcatgggtagcgtcgtcacgaaaggcttattaccactagttggtctactgctcgttggatttaacgtcatgggcccgtgcagcgttctgccgccaatgaagcagcctccagtactgcttgaacaaccacatcttttaggacgtttactcgatgtaactcacctggcgcaagcaccttcacgcactaccatggtcac

SEQ ID NO: 62661 - DNA, 430 bp, Zea mays
  Clone ID: MRT4577_157149C.1
gggtcgacacacgcctctaaagtgagtctgatcaggctccagcgcgccaccggacttgatgtcgtcacctagtcttgatgcttggggacctggattccgggatgccgtcggcgcttcggtacgcacgcaacctctcatcgcttctcgccaccaaccgtcaccgatgcgtgctcacgtccgtgtacgacgtagctatcattagagtcgcgcagttcgcaatcaaggccgctgtcctaaagtactgacgactgtggatggtagtcaacatggacgagtagtaaagtttagcacaagagctgtgacagacttgacgaccacagtttcagtctagtacaatgctacagagttaccgtctgtaccaaacaggatcattatgccatgggccagtatgacgactactggataagtccgagctggtctcgaatccaat

SEQ ID NO: 62662 - DNA, 261 bp, Zea mays
  Clone ID: MRT4577_15714C.1
gtctccatttactgacgtggatggatctaaatgttcacgacaaataatgcgaggcacatgagtttctatcctgggggtggacacatcagcaccctctagagagatgcacacagaactactatggaccaggttcaaactcatgggacgtacaataggacaccctacacatatctggagacagatcccaccacaggtgatgtgctgatctccaatggatggactgagggctagactcctgctgatagaataggatctgcactt

SEQ ID NO: 62663 - DNA, 112 bp, Zea mays
  Clone ID: MRT4577_157150C.1
cgactgcttaaggcccattcgcccttatgaggtttacaattcatggccgcgtttcaacgtaaaatggaaaactgcttcccaattaaacctgaaacatacctttctcagtgct

SEQ ID NO: 62664 - DNA, 146 bp, Zea mays
  Clone ID: MRT4577_157151C.1
gaaacaccaagcgcaggtcgataggttactttgaccggggcgattactgaaccatctcggggacgactggaacactaactacgcccacatcctaagtgccctgcgaacgacatcggcctcttccctggcgacgaacacccaccagc

SEQ ID NO: 62665 - DNA, 269 bp, Zea mays
  Clone ID: MRT4577_157152C.1
ggctctgacacagtgactgctcagcactgttacccactgatcttcacccgatccctcactgtgacatctgctcacagatcgctcccctcacctgaacctagtgcgagcacagtctccctcccatctgctttctatgggtcccttagtgacttcccagaggaagacagaagctgctccttcatcaagccctctcctcagttttctgtatgtacttacgtagcaaatctcaatactatgcgctctctcccttgtaaggtaaaagaaagggt

SEQ ID NO: 62666 - DNA, 450 bp, Zea mays
  Clone ID: MRT4577_157153C.1
aacctttgggctgatttatgtgcttgaccgagcgacgggtcttttaaacccgcttgcctcgccggcgcctccgggtctcataagggagaccggcttctctcggggctgctagaccttccacattacgacgaagcccgtccttcccgagattactgccgagtccactcataagtacgtcgcgttcgccttgaagctcgagcgtagtaagatcatttagccgggcaccagtcccgtcggcggccatgccgttggcgctcctcgcgtcaccgacctctatttggtcgataattccgcgctcccttcgaataacgttaagggagtcatagcgggagacgtcgccaagaagtccggctctcggggctctcctatcagaggatccttctcctgcactgctacgaccggcatttccatcggcgtctagcggggaacccatgacgtacctaaagcgac

SEQ ID NO: 62667 - DNA, 398 bp, Zea mays
  unsure (1)..(398): unsure at all n locations
  Clone ID: MRT4577_157154C.1
agccactgcaactgcgatccgcctctttcacgctcttcaccgtcgcatcactgcagcaacacaccgncggtntcagccgacaggatctggtcagggagacctgcttcggcaagatctatgcagcagatcgtccaacgggaagcaagctttcggtactgaagctcgacggcgacgcggcgaggacgccggtgccagagttcctggaggccgtccgcggcgtcgcggggctccggcaccctaacgtggagcagctcgtgggctgctgcgtggagcacggccagaggctgctcgtctaccgccagtgcagcgaccgcgctctggacggcgagctgcgtctagagcacggggcgtcgacgtctggagctgatgagaatgagacgcttcgctgtgccgcgcgg

SEQ ID NO: 62668 - DNA, 1076 bp, Zea mays
  Clone ID: MRT4577_157155C.1
acaaaaaataaaaaaaaaaagtcgcacaaatcctacaaaccaaacagcaagagcggaagaagaaacgaaaaaggttcactggaatcgaccaagaaatccgccttgccatctccgtttcgtatatgccctgagaatttccaaacgaaatttccgagcttttccctcgccgcgcgaccttcgatctcgcttgaaagagatggcccagatcacgggaccggtgtgaggactgagacgccgacctccgacctcaccgaggcattcgattcgtcgcaatcctcgccctcactcgcgtgttcagttcttggtagcttccttgcggctctgaacaaatttattgctgatcgttattcttggaatcactcagtatcagaatatcatgtatacgagttctttaagatatggaactgttctcgagaaagagctaattttcttgtccacgagttcttcacaacccattacttccaagatggcattcatcctattccgggggctcgagatgctctccaaactctttcttctttctgtagcttgtctgtagtaacatctcggcaggatgtaattaagaatcacacattggaatggattgagaagtattatccaggcttatttgagcagatccatttcgggaatcatttcgctttggccggccaatcaaggaatcttgcaggtctttcggcgctcaggttctaattgatgacaaccccagatatgctctagagtgtgctaatgatggcatgagggtccttctgttcgattacgaaagctcgtatccttggtgcaaaactggagccgatgaactgcatccgctggtgacaaaggttcacaactgggaagaagtcgaggagaaacttctctcttgggtagtacctgatagctgacactcttctgtcttgtgagaagcactgcttgagaccagcaaatgattccttttgcctggtttctaaaggaacctgatagggtgaaagactgcaatgttcctagagcttgattttcaatacagatgtcgatagcctctccaaaaaaaaaaaaaaaaaaaaaaaaaaaaaaagaaaaaaaaaaaaaaaaaaggaccctaa

SEQ ID NO: 62669 - DNA, 2143 bp, Zea mays
  Clone ID: MRT4577_157156C.1
cgggtgacactatagaaggccggccggggaagcgagcccaccaccacggtcactgacgttcacaaaaaaaatcgcacacaaaattcctagaccacgttttttttagtcgcacaaatcctacaaaccaaacagcaagagcggaagaaaaaacgaaaaaggttcactggaatcgaccaagaaatccgccttgccatctccgtttcgtatatgccctgagaatttccaaacgaaatttccgagcttttccctcgccgcgcgaccttcgatctcgcttgaaagagatggcccagatcacgggaccggtgtgaggactgagacgccgacctccgacctcaccgaggcattcgattcgtcgcaatcctcgccctcactcgcgtgttcaggtttgtcgggctgccccgggataggaatgcttctgtcgacatgctaagccgcggagccgtgcggttgctgctgtatcgtctccggcctccgcctctgcgtttgagttggaatccgagcggtgctatgcctccgccaccgccatccgccgccgccaaccgctcctgcctctgcaggttcgcctactcgaccgcgcgcgtcgagaggggcaggaccctgccgggcaaggcggtatttcttgatctgggagccgggaggaggttcacgccgagcggcgcgcttagcttgaggggttgcttgggttggcgggatggtggcggcgacggcgagttcaggaggagggtggacggggaggcggcggggatgaaggcgcaggtgctcaccacgcagcggcagctgatgcgcgatccggaggtgctgccgctcgaggaggccgccacaggcaagagcatgaaacgtgaatgggtgcctgtcggcgagggaagccgctagggtttccggagcaggcagcggctaagatggtggttgctgttgatgtagatgaagttcttggtagcttccttgcggctctgaacaaatttattgctgatcgttattcttggaatcactcagtatcagaataccatgtatacgagttctttaagatatggaactgttctcgagaaagagctaattttcttgtccacgagttcttcacaacccattacttccaagatggcattcatcctattccgggggctcgagatgctctccaaactctttcttctttctgtagcttgtctgtagtaacatctcggcaggatgtaattaagaatcacacattggaatggattgagaagtattatccaggcttatttgagcagatccatttcgggaatcatttcgctttggaaggtcaatcaaggccaaaatcagagatttgcaggtctttcggcgctcaggttctaattgatgacaaccccagatatgctctagagtgtgctaatgatggcatgagggtccttctgttcgattacgaaagctcgtatccttggtgcaaaactggagccgatgaactgcatccgctggtgacaaaggttcacaactgggaagaagtcgaggagaaacttctctcttgggtagtacctgatagctgacactcttctgtcttgtgagaagcactgcttgagaccagcaaatgattccttttgcctggtttctaaaggaacctgatagggtgaaagactgcaatgttcctagagcttgattttcaatacagatgtcgatagcctctccaagagtcattctaaaacccactctaaatcatcatccgaagagtcatttgcataaatttgactccaactccaacagtttttctatatcctgggatatttttcattaaactctctattcacaataattagttaggatatggagagtcttggggatgttgtcaacgtaagctaggatattcagcttcattaccgcagcctggttgaggcatattcgactgtacttggtcagtctgagctgtaggcgcttctgctctcacacatcagaatcttgttttatccttttgccgcagccgggtgtactatgtatatatcgacgctgccatatggctaagatggtatttgaattgttctaatacagaaaactcgtgtgtgtgtgggtccttggaccaactgatttggagcactttcattattgaggttaagcacactcgcgatgagagttcagtctttataaaaaaaaaaaaaaaaaactcgagggggggcccggt

SEQ ID NO: 62670 - DNA, 403 bp, Zea mays
  Clone ID: MRT4577_157157C.1
agattataatgacattatcaagcacccgatggaccttgggaccatcaagaagaagctagattctggttcctacgcaagtccatctgattttgcagctgatgtcaggctgacttttaacaatgcgataacttataatcctcgagggcatgtagtgcatgatctggccattcaactgaataaaatgtttgagtccagatggagaacagttgagaagaagttagctactgccgccactaagccacatgttgaggttgataaggccgactcaaagaggagaaagacccctcccgtggaacgcagtaacttgtcaatagaccgtgtcaggccaactgagattgtgaagccaaagatgacaaaagaggagagagaaaccttgggagactgcttaacttctttggccgag

SEQ ID NO: 62671 - DNA, 383 bp, Zea mays
  Clone ID: MRT4577_157158C.1
aggcagaaatgatatattggacgaaccaaacttgaaaacatcgaaaagataacagtgaaggtgaagattccgagctttaaacaatgtgtcaacggggtaatgtacttgatcacattgccgtttgcagattcagttcttaacatctaaaaccagctagggagaccgcgaactttcaggatgacaccaagttcagagagagctgaggttcaaaattatttcacttgacctcaagtattgatacggagacttgactgtgctaggactaggggggatcggcattatcatcagggcttgaggaccagtgatagcccaaacttgggggtgtgcaagaaatcaaacctgttgacgtcgatctcggtggatagggtgcagaatgacttggg

SEQ ID NO: 62672 - DNA, 545 bp, Zea mays
  unsure (1)..(545): unsure at all n locations
  Clone ID: MRT4577_157159C.1
gtaccctcgnggtccggccggggcaagcatgtcgagagggcctcgaacgatctcaagtccgtgatcacgacgtacgaggggaagcacaaccacgaggttccagctgccaggaacagcggcaacgggcatccgagctctggctccacaccagcaccaccacaggggagcggcggccttcaccggaggctggagccgccacaggtcagcatccctcggttgagcgctgctgctgccgccgccgccgccgccgctgcctacggctcgctctcgcttcgtttcccaccacagctcagcgcagctcccgggggtttctccttcggaatgctccgtcccactggcatggcaccgtctctgggcggcttcttgccagcgcagatgccaggccgtgggttgccgatgcagggctgcgcgggcctggtgctgccgagaggcgaggcgaaggtggtgagcccagagcagcagtccggattgccggggggaacgggaatgccgcggcaacctaccagcagcaagagcagcagcttatggccaggtgggctcagggt

SEQ ID NO: 62673 - DNA, 637 bp, Zea mays
  Clone ID: MRT4577_15715C.1
cctcgaggccggccgggataccacctttcaccttcagcaccttctgcttgctctggggagaactacagatagacactagagaatctattagataggctatctacagtgcaccttccaatcgaacagtgtatggcgcatattcagtcggacattatggcgagaggtagcccgacggaggctggagaacgaagtcccatcctcgacagacgatcacccaagacgatggacttctagctggtgcggtcgtacatggacgcctcccagccgtacgagtccagggagttcaccaaacgcggacacatgatgtacacctaacaatacagagcactctatgctgcaatattggtggcacctaccaggatttcttcaaatcatatgttcgaagtcgacgctgcaatacctggaggagcgtaggcacgatgacacctgccaaatctgcgactaagacacaagggttccatcctcatccaagttctacaatctaggtacgatacgcatcactgatgtagtgctctggataaccccaaaccatgcgaatcttttgtcttcaaaatcttgccaccagatgagctatgctagcgtccattcgaaagctatgttctctcctcactcgaggatatacagagtacgatatata

SEQ ID NO: 62674 - DNA, 246 bp, Zea mays
  Clone ID: MRT4577_157160C.1
ggccatgaacacaagttatgttttgttgggtgcgcagtagtggacattgtggaacagggcgaaaaccaccattcgctttacgtgcaagtgcgcacggtaaggtttgctacggaaggataaaggattgttgcggagtattttggacaaaaaagccggggcgatggtgttgccgggcccataaagttggggaatcaggagaggatacaggtggttgctccggggcgaaaccctggtaaaggaaccaaa

SEQ ID NO: 62675 - DNA, 206 bp, Zea mays
  Clone ID: MRT4577_157161C.1
acgccgctcgctagtgtcatcagcggaattctcttgcactagatgcttgtaatggcgcacaacgaattcatgtaccttctgagcgttaggatatgagggtggacagtggggtaggtcctgcaatgcggatctctgttggatgttggtttctgcgtaggtggagtaaagctggcgattatggttctgggggtaggaatggtaactct

SEQ ID NO: 62676 - DNA, 311 bp, Zea mays
  Clone ID: MRT4577_157162C.1
aaccaaccaaaccaaagggggaggagaagataattgttgttgtgtgggggcaaggcgatacagcaccaggaccacttgccttttttttctttacttcccccacccaatctccattctactattatattttcaattaatgcacatctttacacataccacaataaaaatgacaaacattatgacattacattacatgattgagagcgaccagaaaacgtgggccacagcttcattaatccctaccttgtttaatttaccaaataaggaggaccctgcgattcctaatttaaaaaccgaagggacggtcggcg

SEQ ID NO: 62677 - DNA, 278 bp, Zea mays
  Clone ID: MRT4577_157163C.1
cggcccgttgactgactctgctgtgctccgtgctcagctgtgttcggttcggagttcggacaatctcctggaaattctgatcgaacctcctgcttggagcttccagcaacacgtcctcaccggtgaaaagcacccactactattgcgctgtcttgtagatcaatcagtatttccttcgtcaatccgatccgtgatcgttaccgcgtccgaacgattcatcctacttcgtggtctcactatcggtcctcacttggaccttaaggtctcagtaagctatg

SEQ ID NO: 62678 - DNA, 163 bp, Zea mays
  Clone ID: MRT4577_157164C.1
agaaagaggtaatttgccattatcatgcccttacatagtgcagggtagggaaccgtgcaatttctaatcccatgtgcacaaattatctgctgctataatagcttggtactgggttaagtcaacattagtatgtcagctgactgtctgacacccaaaacgagtc

SEQ ID NO: 62679 - DNA, 420 bp, Zea mays
  Clone ID: MRT4577_157165C.1
gtaaaagcaaaccctgtaaaaatttcgcacccctaaaaaggggccaaacacgacgggggacaaagtggcccccaaccccccggcaaaaggttaaaggcaagctctgcaacccgggttaaggagcggcccccttaacatttccggggggaatcgaaaaaccacaggggccacctgttgtaagaaagggaacccccttgaacatggcaattccattctcggcgggacaaaaaaccgggatccaaaaaccacgcggggagcgccctagggggaaactctcccccatttagcaataagccacctccttcaacaaaaaaaaacaaacaggggggtgaaattcaggaccccaaaatggggctggttatgttaaccaaaaactttccatgacaagggtgttccctcatatcaaacgggccccgggag

SEQ ID NO: 62680 - DNA, 1712 bp, Zea mays
  Clone ID: MRT4577_157166C.1
gaccaattcggcacgaggcaccatcgaccacccacacccgcacgcctccacccccacccccacccgatcccgatctcaccgtctccaccccgaccccctcccaccagtctcccgcagaccaacagcatctaatcaatcaagacagccccgtgctagctcacccgccggggctcgccacgatgagaggcctcctcgcgtgcgccaccctcgcccgccgcgccgccgcctcctccgcgcccgcgcgcgtccgccacctggcgggcgccgcggaggcggcggaggccgagctcaagaggacggcgctctacgacttccacgtcgcccacggcggcaagatggtgccgttcgccggctggagcatgcccatccagtacagggactccatcatggactccaccgtcaactgccgcgccaacggcagcctcttcgacgtcgcccacatgtgcggcctcagcctcaagggccgcggggccatccccttcctcgagtccctcgtcgtcgccgacgtcgccgcgctcagggacggcaccggcaccctcaccgtcttcaccaacgagcagggcggcgccatcgacgactccgtcatcgccaaggtcaccgaccaccacatctacctcgtcgtcaacgccggatgcagggacaaggacctcgcccacatcgaggcgcacatggaggccttcaacaagaagggcggggacgtcaagtggcacatccacgacgaccgatcgctgctcgcattgcagggtcctcttgctgcacctactctgcagttgctgacgaaagaagatttgagcaaaatgtacttcagtgacttcaagatgattgacatcaatggatatgcatgctttctgacgagaactggctacaccggcgaagatggttttgagatctctgttccgtcagagaatgcagtggatcttgcagaggccatcctagagagatcggaaggcaaggtgcggctgaccggcttgggcgcccgtgacagtctccgactggaggcaggcctgtgcctgtacggcaacgacatggagcagcacatcacgccggtggaagccggcctctcatgggcgatcggcaagaggaggagggcagagggcggtttcctgggcgcagacgtgatcctgaagcagctccaggaagggccaaagatcaggcgcgtgggcatggtcacgcaggggccgcccgcgcggagccacagcgagctggtgagcggctcgggggagaggatcggcgaggtgaccagcggagggttcagcccgtgcctgaagaagaacatcgctatgggctacgtgaagtcgggaatgcacaaggctgggacggagttgaaggtggtcgttcgcgggaagtcctacgacgccgtggtcaccaagatgccgttcgtgcccaccaagtactacaagccctcgtagattatattcttgtacagagggacgccttgcgtttctcttttgtcgttgcggcttgttcttggcagattggttaagcattgcaactgtaacttctgtgagattgtcttacggttcacatttcatgtatgcctgcctaataagccttcttttcccaaatacaaagcatgcatgtgcctatgtgaagaatcgaatcttgctggttggacaattcatttttgtgctcgtatagtgaggagaggacatgtatagatccaaaaaaaaaaaaaggcggccgccggataatagagcgtggcgaaaagaatt

SEQ ID NO: 62681 - DNA, 916 bp, Zea mays
  Clone ID: MRT4577_157167C.1
gccggaggggcgccccggcgccggcgccccgtcccccctccccgtccccccgccgccccccccccccgcctcccctccgccccccaccccctccgcccctccggccgggacaagaacctgctgattcctcgtcgccagcttctctttcccccaccacaaccccccgccggcgcggctcccggtgtcccttccccctctccttcccttcggcgccaagtccatccgcccctccgaatctccgattgccgccgtccaggtttggcaggtgccggccgacagttgagaatgggactgaggcgtctgatgagatgctgctgctgcattgcaaagcacgcggacgacggcgacaagatcgatttcggaggtggcaatgttcatgttgtcacaagcaaagaggactgggaccaaagaattgcggaggcaaacaaggatgggaaaaccgtggttgcaaacttcagcgcttcctggtgtgggccgtgccgtgtcatcgcacctgtctacgccgaaatgtcgcagacgtaccctcagctcatgttcctgacgatcgatgttgatgacttgatggagttcagctcgtcgtgggacatccgcgcgaccccgacgttcttcttcctcaagaacgagcagcaggtggacaagctggtcggcgccaacaagcctgagctggagaagaaagtggccgccgtcgccgacgcggccggcagcaagacagtgtagtgtagtgtagtttaggcaaagacccgcgtccttgttgacctggctctgtacatcgttatatcctgttgctgtgcgtttctttcttggcaccgtgcgcatgcgtcgatctgtcggcggttatgtcttccgccatgtgctgattgtaagagttgcccggtaatggtaatggtaatggtaatggtgtcttacggtttcttat

SEQ ID NO: 62682 - DNA, 1926 bp, Zea mays
  Clone ID: MRT4577_157168C.1
gtcgcccacatgtgcggcctcagcctcaagggccgcggggccatccccttcctcgagtccctcgtcgtcgccgacgtcgccgcgctcagggacggcaccggcaccctcaccgtcttcaccaacgagcagggcggcgccatcgacgactccgtcatcgccaaggtcaccgaccaccacatctacctcgtcgtcaacgccggatgcagggacaaggacctcgcccacatcgaggcgcacatggaggccttcaacaagaagggcggggacgtcaagtggcacatccacgacgaccgatcgctgctcgcattgcaggttgatgaatcataagagacttaagagagacttcaatgctgtttagttgtatcactagttgatttaggtatcaaacattggtgcttgcttgatagtagctaaatcaaatcttgattacttcagagtgccttctttgcttcacttgattggtttatcttaggtaacagttgagcaggtctgactgtccttttcttggtcggtggaagtaaagcttcctccatggtcttgcttttgtggttaagaaatgcctggtgttcactgtaaaaacattcaattccaatgtcctgtgaaattgttaatgcaacacatggaactgggttcctggtgaactttttttttaaaaaaaaatttaaacctgattcatggttcacaaatcgtagtttcttcatggggtaggtagctagttgttgacactgctaatcatgggtggactcaatctgcatgatccgtatatgtttttttaccttcaaatctatactctccctaagcatatcatgtaacagaagcatccaactttcactttaatggcaagttgaaagttcatttctagagtcctgatgtgtaccaggttccaagttcataaaagggcagcattataacttgtttattgatgcaaatgtaagcagggtcctcttgctgcacctactctgcagttgctgacgaaagaagatttgagcaaaatgtacttcagtgacttcaagatgattgacatcaatggatatgcatgctttctgacgagaactgggtatcacttcgattctttatcgccattatttgagcagtattgtaaggattgtcttatttcttatttcagctacaccggcgaagatggttttgagatctctgttccgtcagagaatgcagtggatcttgcagaggccatcctagagagatcggaaggcaaggtgcggctgaccggcttgggcgcccgtgacagtctccgactggaggcaggcctgtgcctgtacggcaacgacatggagcagcacatcacgccggtggaagccggcctctcatgggcgatcggcaagaggaggagggcagagggcggtttcctgggcgcagacgtgatcctgaagcagctccaggaagggccaaagatcaggcgcgtgggcatggtcacgcaggggccgcccgcgcggagccacagcgagctggtgagcggctcgggggagaggatcggcgaggtgaccagcggagggttcagcccgtgcctgaagaagaacatcgctatgggctacgtgaagtcgggaatgcacaaggctgggacggagttgaaggtggtcgttcgcgggaagtcctacgacgccgtggtcaccaagatgccgttcgtgcccaccaagtactacaagccctcgtagattatattcttgtacagagggacgccttgcgtttctcttttgtcgttgcggcttgttcttggcagattggttaagcattgcaactgtaacttctgtgagattgtcttacggttcacatttcatgtatgcctgcctaataagccttcttttcccaaatacaaagcatgcatgtgcctatgtgaaaaaaaaaaaaaaaaaaaaaaaaaaaaaaaaaaaaaaaaaaaaaaaaaaatcgaggggggccgggtacccc

SEQ ID NO: 62683 - DNA, 418 bp, Zea mays
  Clone ID: MRT4577_157169C.1
ggggaaaaaagggcccgcccgaatttgggttaaaaaggccattaaaaaaagaatcccccctgtgggtttcaaaagtttcccaggggaaaaaaacaccctccaaaaaaccaagacggggggcgggcacctagaaattaaaccccccaataactcgggggggggggaccaaacccccgggattttgaaaaactggggggccttggccccaagggggggggcgaacgggtaccccctttcaaaaacccccaaaacccggcggggctccgggggggttttggggacccaaaacctaatgttccccgggggggagggggggtatttgaaggtctcctttgggagctccttattggaacctttgcccccgggggggaaaaggaaaagcctttttaaaaccgggggaaccaccgccccccttggg

SEQ ID NO: 62684 - DNA, 1142 bp, Zea mays
  Clone ID: MRT4577_15716C.1
gaacaaatgaataaagacgatttatattcatgaatcgatatcgcactagacaggattctgatgatatccatcacatgaaacacaacatgccatcacaagtcagataacacctggactctgagaacagcctaccaaacaaacggctgtctctcaagcattcaaactctcttgactacccccacaagcaaacataaaacctagcgaatgtcaggctcgccttccattacattatactaacaaacactagcacgaagttatcttcgtggacttccccctcgaggccggccgggataaaaccggcccacccatcgctagggttcgccccaccaaagcctccgcccccttcttccctgacaccctcgccgccgcgcacgcacgcacgcagggaaccagcgaagagagatgggcgtctacaccttcgtgtgccgcagcgccggcggcggcgagtggaccgccaagcagcactccggcgagatcgaggcgtccgccgccaccccctacgagctgcagcgccgcctcgtcgcctccgcctccgcggccgactccgcgtccggcgtccagtcgtccttctccatggtcacccccagctccgccgtcttccaggtgatcgtcggtggtggcgcgatgatggttagtggcggcggcggcggcggcgcgtccgccgccgcgtcgggtggtgctgcggccgaagctcccaaggaggagaagaaggaagaggagaaggaagagagcgacgacgacatgggattctccctgttcgactagagacagagttaagctgcgtgtgcatggttgctgttcggtcgtgtcgcgcgaaacgtgaagagctcaagcggcctttttgttccagtcccacatgtgagagctttgatacgttgtctggaatgaaaaaatttccccttgacaccttgtctgcaccgagggaggagtaggcgtgggggaaaaactgtagaacctgtgggatgcaaaatctatctagtctagttttgggatcggttacgaatttgtcttcaacaaatagtttggatgagacgagtggaaaacatgggtggtgttgatttcaaaaacgaatggcgatataaaatgtgttgtggtatccaaaaaaaaaaaaaaaaaaaaaaaaaaaaaaaagggccggacgc

SEQ ID NO: 62685 - DNA, 868 bp, Zea mays
  Clone ID: MRT4577_157170C.1
ccggccgggatccatggaatggaacggaacggaacggaacctttgcctgtctgtactgtactgtactggctggctggcactggcaccatccatccgtccaccgttactgttctatagcactagaacctgctgattcctcgtcgccagcttctctttcccccaccacaaccccccgccggcgcggctcccggtgtcccttccactctccaccctctccttcccttcggcgccaagtccatccgcccctccgaatctccgattgccgccgtccagttttggcaggtgccggccgacagttgagaatgggactgaggcgcctgatgagatgctgctgctgcattgcaaagcacgcggacgacggcgacaagatcgatttcggaggtggcaatgttcatgttgtcacaagcaaagaggactgggaccaaagaattgccgaggcaaacaaggatgggaaaaccgtggttgcaaacttcagcgcttcctggtgtgggccgtgccgtgtcatcgcacctgtctacgccgaaatgtcgcagacgtaccctcagctcatgttcctgacgatcgatgttgatgacttgatggagttcagctcgtcgtgggacatccgcgcgaccccgaccttcttcttcctcaagaacgagcagcaggtggacaagctggtcggcgccaacaagcctgagctggagaagaaagtggccgccgtcgccgacgcggccggcagcaagacagtgtagtgtaggcaaagacccgcctagcttgttgacctggccctgtacatcgttatatcctattgttgctgtgtgttccgaaaaaaaaaaaaaaaacatgcgtccatctgtcggcggtaatgtcttccgccatgtgctga

SEQ ID NO: 62686 - DNA, 303 bp, Zea mays
  unsure (1)..(303): unsure at all n locations
  Clone ID: MRT4577_157171C.1
agcagtggaacaactcgantacgcggggtcacttgtgttgaactcggcaacgatgactcacgatgggtattgtgtgtgtggggttgttgttgtctggtttgtttgtcctgtataggttttgggctcggtttcccttaaaactgggtcaattcctttcttcttaattgagagggggagcttctgccattacgttcaaaaaaaaaaaaaaaaaaaaaaaaaacaaaaaaaagccacacccacgcaacgcgccacccccgcaacaaaaaaaaaaaaaaaaaagtcctctccgttgttaccactgct

SEQ ID NO: 62687 - DNA, 377 bp, Zea mays
  unsure (1)..(377): unsure at all n locations
  Clone ID: MRT4577_157172C.1
ctcgcggagaggtaccgggacggtgtcgtgaagaggtttttcacttctgaaccgtgaattcttgatttcggctacgccatctgatttccccattctacacccgaactcacaaagaaactgtcgagtttgcatttggaatgggacagggtaagtggagaaccatgccaaatttctcatgtttgatttggtcgatgctgtggtagatatatttcggatggcagttctaagctgcaacttcgtttggagaagcatgaatctccagtgaacggtgtggaagatgagaatgcagattctttgatcccacaggctattttggactttgtgcttncagctgggtttccagggtctggttcagcggactacctggactacatgct

SEQ ID NO: 62688 - DNA, 333 bp, Zea mays
  unsure (1)..(333): unsure at all n locations
  Clone ID: MRT4577_157173C.1
cctcgaggcggcggggcagtgtctgatatactctctttgctttattgttgcggaatttatcgtaatatgttattttaaaaaaaaaaaaaaaaaaaaaaaaaagcgaaccactgaaaagaccccacgaacttttactctagccctcccggctcccagggtctctcttcggcggcggcgatgtctctccccccggacccggcgggcggcggcgccggcaccggcaccggcgacgactggttcctcgactgcggcatcctcgacgacctccccggccggcgggnncctgggggggggggggggccccccctttttttttttccccccccccccccc

SEQ ID NO: 62689 - DNA, 260 bp, Zea mays
  Clone ID: MRT4577_157174C.1
attattagtttaaagtaccgaatccttggggggcgacatatggcaaaaaaacatgaaaaacccgaccctagctactagtattaactacactaaaatatggggggggggggcagccccaaaaagggtattaacctcaaatcgccacaataaaggagaactcgcaggaacataacattgcaaaaaggacgggggaaagggccgacgaccaaaactaaaactaccgggcggggggggggaccccaggaacccggaacgatgcc

SEQ ID NO: 62690 - DNA, 724 bp, Zea mays
  Clone ID: MRT4577_157175C.1
cggaactaatgaaatagattagaccttactcttataaataggtgctaacctaaattggtgccctatatcaacttgaccttatgcaactaccttaaccattcgatggttgcataacccatctcttatttatagatctaccctaacctcttacccggatggagacgcaaaagctcaagaaggaagagatcaatctcattaaagaagaataggaatcaagctagacccctaaaggaagcaagattttgccctagcacactcatttcaagtcaacattcattctatgcgacctacccactaaccatctgtccttacctacaagtcgtcataactataggtccccaacttgggtgacgattccaaaaccgaagatcgaagaagatcgaattaaggaaggataggattcaagccagatcttcaggggaatcaatccacaaatcttgggtggagtcttttcctaccctactcgttctaacccaaatctatctatgctttaaagacaccttttatcctacatattagttggcttgatacccatgctttcctaatcacccgctaagttgtgtcagacttatattttttttaaaaaaaacttttggtattaaaaccaattagaaactggcatatagactgcaaataattctttctgcctctttttcttacaaatctcgaggacgagatttttgttaagggggtaggatttgtaacacccaaaatcttatttttg

SEQ ID NO: 62691 - DNA, 503 bp, Zea mays
  Clone ID: MRT4577_157176C.1
tgcacgcctcgtaagctcggaattcggctcgaggcgggggctacatagcaagctccttctctgctaaccgagcgagagcagctgtagcctacactctacagctagcgcaactaacgaccatccacctgaaagaggaagtgcagtgcaggtccaggcagctagcagtgaccgagagtgagggacagggcaatggcgtcctcactgctccactgccccgacaagctcccgttcttggacgtggaggccatcctccacatgaaagaggggctcggcgagaccagctacgcgcagaactcctcgcttcagaagcgaggcatggacacgctgaggagcctcatcaccagcaccgcgacggacgtgtacgtctcgcagatgccggagcggttcacggtggccgacctcggctgctcctcggggcccaacgcgctgtgcctggcggaggacatcgtggggagcatcggcagggcgtgcggccggtcgtcgcggccgccgacagaaagctc

SEQ ID NO: 62692 - DNA, 260 bp, Zea mays
  Clone ID: MRT4577_157177C.1
cctgctccatctccagcgctcctccagctcgcccatggtggtgtacgctactcccctgcaatcttcagccttcccagaacgatccggtcgaagagcccgaggaacccgcaggagaaggccctgagcagcagtcggttggtggaggttgtccgcgttgcaaccactgctcaggagaagatgaagccgtggaaggagacttcctggagttccaagactacgatgaattctaggcgtgggttagcggcaacccccagtcggct

SEQ ID NO: 62693 - DNA, 561 bp, Zea mays
  Clone ID: MRT4577_157178C.1
gacgaccggccgcacgccctgccgatgctccccacgatgtcctccgccaggcacagcgcgttgggccccgaggagcagccgaggtcggccaccgtgaaccgctccggcatctgcgagacgtacacgtccgtcgcggtgctggtgatgaggctcctcagcgtgtccatgcctcgcttctgcaacaggaacgtacgtacacacggtggtcgcgcttgctcaggcttcggagctgttgattaattaatctgatggcaaaagccaaaggggcgccggctacaaaacggcggcgatccgctcacctgaagcgaggagttctgcgcgtagctggtctcgccgagcccctctttcatgtggaggatggcctccacgtccaagaacgggagcttgtcggggcagtggagcagtgaggacgccattgccctgtccctcactctcggtcactgctagctgcctggacctgcactgcacttcaagaacccccaatgccttctccctgtgccaatgtaatgcagtacatatatcaggaactcatgcttctgcacatcactgggcacaagatta

SEQ ID NO: 62694 - DNA, 364 bp, Zea mays
  Clone ID: MRT4577_157179C.1
cgggcattttacgacccctcctatctgtcgatttttggtgtagcggccctcccctcctatggccgtcgacgccggcgccgcgtgttccgtcgtctcctctcaccgatggtttttgctaaggtcggtgctgccacgcaattggtgaacagaggcgcgctgccacaaaaggttacccaacgacgcgtctgttagggagggggactggaattgtcctcagtgtggggatgggaactttagtgatagaaatgcttgccactgtggagcctgtggtggaccccgttcatcaccgactccaaatccatagaatgctgccagcttctcctgctactggatatagaccgactccctctgctttactgacgag

SEQ ID NO: 62695 - DNA, 143 bp, Zea mays
  Clone ID: MRT4577_15717C.1
agccggaccgcccctgactcctttttatgcgcgccggctgctcatccctggcatgctgcgtccatggccgagcggctccaatggcgagctcgccgggatgcccttgttcaagcttcatccttgatcggcaagacaatcggctt

SEQ ID NO: 62696 - DNA, 1358 bp, Zea mays
  Clone ID: MRT4577_157180C.1
ccggccgggacaggaacaatcgagtcctaaccctaaagcttcctgctctagccactcgcaaacaagaacgcagccgccgaggctcccctcgcaagaatgcatccgccagctctgtcgcagcgttgctccgtccacctccggcctctcccgactcatcagcgtcggaccatcgagctcctccccgctcaggacctctgacaccgagctccgcatattctactcggcgctgcccagcattgccaggtcttctccagcgccatgttccaacgtctgcctaggcgtcgtgcggccggtgccgccgtgccgaggtgcgcccccgctccctgcccgagcctagtactctcctctgcctagctcctgttcggcggtgttccgcccgtcccgctagccgcctagagcaaccagcaagaagcaactaaaagctctacggcctccaaagattattagtattattagttcatccgataggttattagttcattctagaacacccaacccgattgattctcagaatattttgcttgggggaccatgttggtggccttgcttgcctgattttttgatcgttgtaagcgcaaaactggaaccagatgaattttatgatgaaattctaccactaatttatcatatttagggcggccagatcgtacgctatcggcctgcctttacaggcaccctgaaaactgaaacatccatccgggagcacctagctattttcgcacgctaagaactgaaatgcgatgcgcaaccgaacaatgtgttcaactcgttcttccacatcagctactcacaaaccgtgtaaatgcaagtgtagatatgtacaacaaccttttaccggttaggattagactcaactgaagatatatcttttcacttatttcacagtttttatttcaatttatcattattagtccattttctcttttccagattttatcgctatataacatttggatgtaaatatattatgatcgctatgactcttgttcatcacttattttgtagttatgaattgctttagactgtgttacgaatttttttcattattaatttagcaataccttaattttggttcgtcctccaccactatttgctggcatgcctctctcatctcgtcctatctgcaaccttcggtcgtatcgactggagggccatccgatccgcggctccagatcggagtatcgggccaatgaacgaacgagctacaagttcggtacccgggcggggccagaggtggttgtctttccccgatctcatcgtgtctccagggcggaggccatgcgatcggaattgaattccgtggcagggaggagggggggggttgggggtttttccccccccaccagttaaacaacgtg

SEQ ID NO: 62697 - DNA, 132 bp, Zea mays
  Clone ID: MRT4577_157181C.1
acgtaaaaacactttaaaataccaagggaatttctccattttggttgacggtaattagtgggggatgcatataactcggaagtaatatggataataacactgtaaaataccatgtgaataggtgtgagacat

SEQ ID NO: 62698 - DNA, 245 bp, Zea mays
  unsure (1)..(245): unsure at all n locations
  Clone ID: MRT4577_157182C.1
cggggcggggccaggcatgcgggcacaacggaaaccgagagcagagnatccaacaaacaccagccacaaacaggaaaaccccccggcatccaccccctcccgagctgcgcctgcaacctcacgaccgcggcccgcagcgggccttcattcttgctgaggggggggctcaccaattttttttnttttncggggncgaggnagaacacgcngggcggaagagggcagacgccgaccccccccaacaa

SEQ ID NO: 62699 - DNA, 683 bp, Zea mays
  Clone ID: MRT4577_157183C.1
tcctcttatttcttatcagacgatcccttcttagctaactaaatccctagtcgccccgcatcggtggcgcacgacgccgagaagaaacccgcggcgaagaagccggcggaggaggaccccgccgccgaggaggcccccggcgagaagaagccggaggaggagaagcggctccctgctgggtagtctgctgccgagggaggcgggtagggcacgaggggcaagaaggacggcaagaacagcgtggcctcctacaacatcttcttcttggaggtgctgaaggaggtgcaccccgtcattgtcttctcctccgaggtgatgttcatgatgaacttctttattgacgatttctttgagaagcttgctgatgacgccgacctgctcggctgttataacaagaatactatcatctcctcccgggagatccagtccttcgggcgcctccttcttgccggggaggtcgagcagcacgccttctacgagggcaccgagggcgtcaccaagatctcctcctactatgctgggccgccgcttgttggaggattttctgctgtgatcacgtttgttgctgttagtaggtgctgctggctgctggcttttatggatgtctactatccggctggaacagctgtgttatctgataggaccgtgatggtgattattccaccccgttttttttttttttt

SEQ ID NO: 62700 - DNA, 168 bp, Zea mays
  Clone ID: MRT4577_157184C.1
cattcctctctttatcagtctctgtgcttagtttagtttagtagttcgtagagtaggcggccggcacatatggcagcgcagtccatgctcatgtcgaccagcgtcaacggcggccgcgcgctgccgtctcttcaggacgaccggccgcctccatacccgcggataccg

SEQ ID NO: 62701 - DNA, 183 bp, Zea mays
  Clone ID: MRT4577_157185C.1
atgaccaacgaggtcttccggatcacctggctcagcggcgaggccgagggcaacggcccacgcaaggtgctcgtgcgcatctacagccggggcgtcgaggtcttcttcgaccgtgccaacgaggtccgcaccttcgagtgcatgtcgcgccaacggccgcgtcgaggagtgaaagggaaatag

SEQ ID NO: 62702 - DNA, 232 bp, Zea mays
  Clone ID: MRT4577_157186C.1
tcgtttcgagtacgccggcaactttcccattcaggagtttctgcaggcgcagagcattgtggcgcccaacggctacattctggggggtggttttggcgaccaggcaagccttttggggggctggaagcttgccggcaggatgtttcttaaagctggcttggaccaaggatgctgagacattaaggttgctgagcttattaccaaaaacgacaggccggttggcaaggagctt

SEQ ID NO: 62703 - DNA, 359 bp, Zea mays
  Clone ID: MRT4577_157187C.1
acctaactagtatgatttatggccaaacaccaacggaaaagaagaattttatgtaacatagcccatgcaaaatataagcccaaagttatatatttacaagggaggacatatgtcacgtgtaatagggaattttaaatggcgctttggggggcagacatttaaccgaggttttaaacccggagctaattttataaaaaacgcttccactttgacgtcaatgctcaaagaaactggatgggtgtcgagtttttagtttgcttccgctccatgtgcttgtcactgccccaggcttattttggacgtggtgactgccacaggagtttaagacctttcacttgccctgattgaaagtccccccc

SEQ ID NO: 62704 - DNA, 169 bp, Zea mays
  Clone ID: MRT4577_157188C.1
gtcctatcacatccctcgctcaaaaataggggggtcttactactatttatagcgggtctcacactatcacaaacaaatatctcatcccctacatactcaaatacaacaacctatctttgtcttatgctataactattatttatgacactaataatcactatttaccaaa

SEQ ID NO: 62705 - DNA, 643 bp, Zea mays
  Clone ID: MRT4577_157189C.1
ggccgcttttttttttttttttttctttttttttttttttttttttttttttttttttttttttttttttttttttttttttttttttttttttttttttaccccaaaaaaaaccaaggggaaaagaacgggggaaaaaacaaaccagggggggggggaaatttggtttaataattaaaaccggggggggggggggggacaaaattaggggggggggtaaggcaaccctttaaaatggccgggggaattaggcagggggataggggctcctgggactaaggggatttttttttttttttggggcgaaattaaaaattactggggaaaaaggattaagtttggaccctctcgggggcccgggtttttaaaaaaccctccgccttttttttaaaggactcggttaaagggggtatccaacggggggcacgggcattttgggaaaattgggggggcccgggagggttctccttggggggaaaaaagggggcctttttttttttttaatttttttaagccccccaaaaggggggggccagtttttttggcaattttttgggggatttcttttggccaccaaaaaaaacccccccggtccaaagttaaaaacaaatcttcctaggctgtagagggggggaaaaggggg

SEQ ID NO: 62706 - DNA, 669 bp, Zea mays
  Clone ID: MRT4577_15718C.1
aaaagaattcttccttccttattttttatccacgagacgatttctattatcctttcacccgacgtgctgacaggagggcgggcacgccggcacctaggactgagggcatccatgggactgagggcatccctatccatcaaatcaggccctattgtccgccaagcgctcagttcggtccccatcgatcaccggcagcccaccccaatcttctcgggcgcctgccatggtagacggcgaaccaccccgatcttttccggcgactgccatgtgccatggtcgacgacgaactgccccgatcttttctggtgcctgtcgacccgccccgatcttctttcaaggggagcgacggtcaattgcttgtctagcaaacgacggtcagctgcagggggagagcgacgctcagcagggaaagtggttctgttgcttgtctaaaaaacgattgcctttgcttgtctagaaaacgatcaaggcaagtacaatttttctctgaagtatagatgattatcagttgcttgtatagatgagtttttcagttctgttgcaaggaaatcggttttttgtctgcctcaacttcttttcctttttttcataccttttttgcccagacaattgtcttttgcttgtctattttctaattaaataaaggcgtctattgaatatagtttgtat

SEQ ID NO: 62707 - DNA, 135 bp, Zea mays
  Clone ID: MRT4577_157190C.1
gaacctgttgcagggcgccttattttgatacgttttgatgaaccgtctttgtttgttgttgccctgaatcttagtggtatcgcaagcgtcatgcccaatttcttttgcataagaataaagaggtgcccataaaaa

SEQ ID NO: 62708 - DNA, 304 bp, Zea mays
  Clone ID: MRT4577_157191C.1
agaagggatcaacacacaaccatgtgtcggaattattccccgaattcaatagctgattcaattaacaggttttaaagttctgaacagacacaattacaaatagcaacgaaggctaacaaacttcactaaccaaaaaagcattttttgggattacaacgctcaaacccccatgtagcggcttatttatagcatataaccagcccttgtttgcaaccatcttaaaaagtttactggtacttagggcaacctatgttttaacctttggtgccttatcacataaaaccctcctaattcggaaataact

SEQ ID NO: 62709 - DNA, 386 bp, Zea mays
  Clone ID: MRT4577_157192C.1
atatagatagatggataacactggggaccagccacataaacaggttcatggttcacagatccccaatggatccaatgtatatacttataatgaggcaaaggcccaaagctcatctgacaaatagctgaaagggaacactattaggagactgtgaagaggcggcaaactacttctggagctgcttcaccttcgcgatcttaccattcatgggctcatccttacatttgccttaaacagccttccaagcttcccacttggcccatgaactcatggtaaaatatgcccttactatcggggttcacatctgcaaccgtggacttgcttgtagagcccgacactaggatcagacttgagtctcattgtctcatgctgatcaggcaaggtgt

SEQ ID NO: 62710 - DNA, 209 bp, Zea mays
  Clone ID: MRT4577_157193C.1
ctactgaggtttcgcggtgcacaagagagttgggagtgatgtggtataggatcaggaggagatccacttgaagccgattgatggaacttgttggacactagtctatagtattactagaatctagagcacataatacatgttgaaacaatggatgtgtttagtgaaatgaataatattttagaaacatgaagggttcatgcattttatgt

SEQ ID NO: 62711 - DNA, 593 bp, Zea mays
  Clone ID: MRT4577_157194C.1
atttgaagatagattctgatacttccgatccatccactgcagctcgcctgcgatctacccgacataacgattcgaaggctctctgaccgcactccatgtgcgcatcttatgagacgaccctcaccagctccagaccttctcctctcgaagcacatccagcggctgccctcgatcatagctgaggatcctcttccggacaaggacgcaatccctccacatcacagagctctggtcttcgctgccatggatgtcgaccacgaacgtgcccgtgatgactagaatgctgtaaggaaaccacgctccaactggtgttgaggctctcagccggcatgcagaccattgcagaagaccctcagaaggaacaccagcaaccttaaggccaaatgctcggatgctatcctccacttaccagctaagtatccagaaccgggaggccctccctaccggaacaactacctctcatctgcgctggaaaggatgtcgaggatgatcacattctcgctgagtacagcgttcgaaatgagaggcagacctgcacactggggctcaagatcctttctgccaagtgaaaattcgatgacacccgatgcttg

SEQ ID NO: 62712 - DNA, 431 bp, Zea mays
  Clone ID: MRT4577_157195C.1
ccccgcgtccgctgcatccccgtcttcttccacccgggctcagcgtacaggcagtacacggcccacctccccaaggacccaaatagctactctgtgctcatcatgcacaccgatgtcaccggccggaacgtcagcatcgaggacacgctgagcaacatctcgccggcggcggtgaaagccatgcgcgaggaggtcatccggctcatcccgaggttggtttacgctgacccgagatcgaggcgtgtcgatttcactgatgcgttcgatttggcgacggaggcggtcatcaaccgcgtggccaagcggcggcgtggtcggtagacaggactagtaacgccgccacgatgcgatcttgtgaccaacacagcccgtgagttttagtttgttgctgattgcaatttcacatagctatggcaaaattcattgatttc

SEQ ID NO: 62713 - DNA, 2000 bp, Zea mays
  Clone ID: MRT4577_157196C.1
gccaccgccaccatcaccgctaccgctacggcttcccacctcaaaaccctaaccctaaaccccctccgcgcgggagccctcgcccatggagaaccccaggccccaggccccagcactcacccctcccatggccccgctccccgtccccatccacccgccaatcgccccaatccccgtccctccgccccgcgtgcccgcccccgccccagccgccgccgcttccatggcctccacacccactccctccactggggacggaggcgaggccgagtacgaagtctccgacgaccaccgcgccgcgcgtgagcgccacgagcgcgcggtgcaggagctcctccagcggcgccgcgcctacgccatggccgtacccaccaacgactccgctgtgcgggcccgcctccgccgcctcggcgagcccatcacgctattcggcgagcgcgagatggagcgccgcgaccgcctccgagccctcatggtccggctcgaggccgatggccaggtcgaccgtctcctccgcgcgcaggaggacgaccaggccgcgcgcatcggcgaggaggaggaggaggagcagatcgagtaccccttcttcaccgagggctcgcaggagcttctcaaggcgcgccttgacattgcacggtactcgctgccccgtgccaaggccaggatcgagagggccaagcgacgccacgaggaccctgatgaggatccagaggcggaggccgaactcgtcgtcaagcaggccggggagtttgtgctcgagtgcagtgagattggagatgatcgcccgctcactggctgttccttctctcgtgatgcatcgatgctcgccacaagttcctggagtggaatagtcaaagtatggagcatgccacaaataactaaggttgcaaccttgaaaggtcacacagaacgtgcaactgatgttgtcttctctcctgctgatgactgcttagcaacagcttcagctgatagaactgcaaaattatggaaaccagatgggtcacttttgatgtcttttgatggccaccttgatcgtcttgctcgccttgcttttcatccatctggaaagtaccttggtacagctagctttgacaagacttggagattgtgggacatcaatactggcaaggaactgctactccaagaggggcacagcagaagtgtatatggagttagctttcaccctgatggttctttggcagcatcttgtggtcttgatgcatatgctcgagtatgggatctgagatctggaagattgttctttacactcaagggccatgtgaaacctgtcctaggagtcagcttctctcctaatggttatctggttgcaactggaagtgaagacaatttctgtcggatatgggatttgaggaaaaggcaaatgttgtattctattccagctcataagagtattatttcacatgtgaaatttgaaccccaagaagggtattatttagcgacttcttcctatgacaccaaagcagccctgtggtcagctcgtgattacaaaccaatcaaaagtttggtgggccatgagtcgaaggttactagtttggatattagtggagatggacagaagattgtgactgtgtcgcttgatcgtacgataaaaatttggtcatgcagaagtagcacacaagataatgagatggaactggattgagacaattgggttcattgttgccagccccgcttctctattcatcagctagaagtagatattctccctttttgctgatcagacattccaatcagtcattggtgctattgcacggaactatttcatagcatgtataaacccttggcttgagaaatatgttctgcacttactttgctgataaaaaaaatcaaaaaatagggctagtttggctaccccattttttaagggattttcatttttctaacgacccgtttggatcattagaatttaacaatagtaattttggcatatattaattaagctaattcagttttatacaaaatatattatatattatttt

SEQ ID NO: 62714 - DNA, 2936 bp, Zea mays
  Clone ID: MRT4577_157197C.1
gtcaatcgtcctccttcgggcttcggcacagcaagcaccacccccttcgccaccgccaccatcaccgctaccgctacggcttcccacctcaaaaccctaaccctaaaccccctccgcgcgggagccctcgcccatggagaaccccaggccccaggccccagcactcacccctcccatggccccgctccccgtccccatccacccgccaatcgccccaatccccgtccctccgccccgcgtgcccgcccccgccccagccgccgccgcttccatggcctccacacccactccctccactggggacggaggcgaggccgagtacgaagtctccgacgaccaccgcgccgcgcgggagcgccacgagcgcgcggtgcaggagctcctccagcggcgccgcgcctacgccatggccgtacccaccaacgactccgctgtgcgggcccgcctccgccgcctcggcgagcccatcacgctattcggcgagcgcgagatggagcgccgcgaccgcctccgagccctcatggtccggctcgaggccgatggccaggtcgaccgtctcctccgcgcgcaggaggacgaccaggccgcgcgcatcggcgaggaggaggaggaggagcagatcgagtaccccttcttcaccgagggctcgcaggagcttctcaaggcgcgccttgacattgcacggtactcgctgccccgtgccaaggccaggatcgagagggccaagcgacgccacgaggaccctgatgaggatccagaggcggaggccgaactcgtcgtcaagcaggccggggagtttgtgctcgagtgcagtgagattggagatgatcgcccgctcactggctgttccttctctcgtgatgattcgctgctcgccacaagtgttttttttttgttgttgaagggaagatctggtgcagcggcgagagctatctcattgagtcatcaagtcgtgggtgccaagcagtttctctgcatttgtgggggaaggaggattgtcacggtttatccctttcccagaccccactcatgtgggagcctccaacattgggtttgcccttgctgtaatttttttgttggaagtccatatcagtggcgagagctatctcattgagtcagcaagtcgtgggtccgaagcagtttctctgcatttgcggggaaatgattgcctcggtttatccttttcccagaccccactcatgtgggagcctccaacattgggtttgcccttgctgcaatttttttgttggaagtccatgtttagtcaatttatttatgatggatttatgcactgtgcagtcctgcttgagcttaattgagattagtttctcaccgcaagagaactgcaactagtaagttcatatatgacattcaaaaaattcagcatctgtccatctgatcacttgggaactaactaagtcagctgtagtttcgatttttagtatctgaagtcactgggctgctaggaagccaggatcaggtattcaggtttgcttttcttctagtggatagagaatgaccaacatattatcaatccaaaattcccgtttggaacttgtatccctacccaatgcacataattctccctttttaacaaaccttggtagaacataaagctgaagttagacatctgtactgtcccccgtggtattgagtattatcaaaataacagcaataagaccatgttcagcgatatttaccttgagccgttaattgaaatcagttagcagttcgtatgcacagaaataagattgttaactgaagttaaacaacttatctatgttaccagtgtcatgtgcaactagttgcttattaaatgttatgatgtctatcatatatttacatttgttttgagctttaacatggtagattatgttctcgtactcttgcttccttttcaggaaataaccatttgcttatccacattgtgtagttcctggagtggaatagtcaaagtatggagcatgccacaaataactaaggttgcaaccttgaaaggtcacacagaacgtgcaactgatgttgtcttctctcctgctgatgactgcttagcaacagcttcagctgatagaactgcaaaattatggaaaccagatgggtcacttttgatgtcttttgatggccaccttgatcgtcttgctcgccttgcttttcatccatctggaaagtaccttggtacagctagctttgacaagacttggagattgtgggacatcaatactggcaaggaactgctactccaagaggggcacagcagaagtgtatatggagttagctttcaccctgatggttctttggcagcatcttgtggtcttgatgcatatgctcgagtatgggatctgagatctggaagattgttctttacactcaagggccatgtgaaacctgtcctaggagtcagcttctctcctaatggttatctggttgcaactggaagtgaagacaatttctgtcggatatgggatttgaggaaaaggcaaatgttgtattctattccagctcataagagtattatttcatatgtgaaatttgaaccccaagaagggtattatttagcgacttcttcctatgacaccaaagcagccctgtggtcagctcgtgattacaaaccaatcaaaagtttggtgggccatgagtcgaaggttactagtttggatattagtggagatggacagaagattgtgactgtgtcgcttgatcgtacgataaaaatttggtcatgcagaagtagcacacaagataatgagatggaactggattgagacaattgggttcattgttgccagccccgcttctctattcatcagctagaagtagatattctccctttttgctgatcagacattccaatcagtcattggtgctattgcacggaactatttcatagcatgtataaacccttggcttgagaaatatgttctgcacttactttgctg

SEQ ID NO: 62715 - DNA, 894 bp, Zea mays
  Clone ID: MRT4577_157198C.1
cctcgaggccggccggatcgatattcaatcgctcctcgcccgcacccaggcgttcatctctccccgcccctctcgtttctttttcggtcctcgcttatctgcccgtcatgtctggccaacagtgtctccgccgcctaccagctgccatgcgctctgtgcgagctttgcgcgcaagcccccgatgcactcctactgcccgctcctactcggctctcaccaaagccaactcatccggtcttctgggccaggcctcaaggcgcccagctcagctctcctcacagcgcctatgcgctctcgagcagataagaacctatgccgacaccatcgtcaaggtgcccgaaatggccgagtccatcaccgagggaactctcaagcaatggtcaaaacaggttggcgactttgttgagcaagacgaagaaatcgcaaccattgagactgacaagattgatgttgctgtaaatgcgcccgaggccggtatcatcaaggagttcctggtcaatgaggaggacaccgtcactgttggacaggagattgtgaagcttgagcctggcgcggcgccagaaggtggaaagaaggaagccagccaagaacccaaggaacccgcttctcaggaccaggagacttcatcgcaacctgaaggccagcaggagcagtctcagcctgaggcgccaaaggaggaatccaagccagcgcctcctaagcaacaagagcagcccaagcaggaatcgaagcctgagcccaagaaggactccaagccaaaggaggagcccaaacccgcaacccccggcagccgtgaggagcgtcgcgtcaagatgaaccgcatgcgtctccgaattgccgagcgtctcagcagtcgcaaaacacggcgcttctctgaccaccttcacgaagtcg

SEQ ID NO: 62716 - DNA, 1931 bp, Zea mays
  Clone ID: MRT4577_157199C.1
gaaatttattccggacatgtaatgccgcatcagtgatgcactgcccactcaaacatcagggaaaggctcaaagcacagttacagactttcagttgccgtttttgcaaaaggcatcaacgccatgccatggaagacagtaaaaaaaaataataaatagtttgaaccacgattacatatataataatctcagaacaaacaactatcgaaagggcatgaaccgacgacaggtagagttcatccccaggagataattggtatctatctatggctaaaacgaacaacaatatcaggcgcgtgcatccagctaatttctcccgaaccggacatgggtgttgctggcggcagccgcggcgaatcttgatgacgagaacccatgcttcctggcgctgggtgaataattccagttcggtgacatggtaccatggctgtgccctcgtgaagactcgggagtgaagtagtcacagccagacaagaattggtgattcggtgaagacatggtaccatggtagttgtgccttcgtgaaggctggggagtgaggtagtcgcaaccagacaagaactggtggtttgcgtaagacttcttgggagtagatggagagccccacccattggatttgtacttcttcaatggtagatcatctccaccagtccagccacccctcgatttgggtttatgacgaggtgtgcccactctttcctcgagatgggggcttttccttttgcttgtttttcgggcgtcataaggagctgatctagcactactggaagcctttttccatttctccttcctctgaatatgcgacgatgacttgcctttcgaccgatcggacttagcgttctttgtgcagccacgtgcaaagtgaccttcctcgccacatttgaagcataaggttggagttgtgacagcactggtttccctgcgtttggcacatcccagaccagaatgaccagattgggcacaattataacagctaatttgtttcggacaatcgtcagagaagtcggaacaacatagatggcccttctggttacacacgtagcatcttattttctcgatatcatctggtgggtaatcattggtacatccaaacatatcatgacctatttctccacattttaaacataatgtggattgatgatcattcctcctgtgcttatcagggcagtcctttgccatatggcctccttttttacagataaaacagtcttgaccctgcgtgcactgctttgcattgtgcccaaacaacccacaaacaaagcaaggcttctttcgcttttccaatggacagtttgcagctacatgcccttcctcgctacaattaaaacaagtctccaacagtgtttccccaggatcaaagtatctcggtatgcgaaggagcttccgcagaaccatattatcagatgcaggggcatcagccccattttcagttaacaccgattctgctgtcccaatgggctcctcctgggtgctacaaaccgccttctcttcctcgtccacggcggcccccgccgcagcggtcgcctccttccgttgccttttcctttgcttccagtgctgcctcttcttctgtttcctccggggctcatccgcctcagcgagctccaccacggcgtcctcatcgtcgccggaggacactgagagcaggttggcgaagccggtgactccaccgcaggacgcccaacgccgcttccgctgcgcgcgcgcgatgatctccaggctgaggtcctcgttccccacctcgtcgtcctcctcgtcgctcccgcccctgcgcggcttccgaaaaggcggggaaccatcttcgtccaggtctgagtcccaccgcgccctggagcgccagcgctgggccatcagcgttctgcggcggcgggtgagggacagagaaaaccaaataacgcgctcgatctcgaggcggcgcaagaaagtcccggcc

SEQ ID NO: 62717 - DNA, 274 bp, Zea mays
  Clone ID: MRT4577_15719C.1
caataagagcattttttgttagtccaactccaaaatccaagaaatttttgtttaaaagaaagggaaactctaagaacacatcccctggatttgacatttgaacatttatatattttgggaggggggcaggacacaacccggggcactttgggccgaggggggaaatacacccttttgggctgaggagggcatacccctcacttaaaatatggtaattactcctgaaagagggctcaattacatttcaatggcaatgttagagcaatgtgagcca

SEQ ID NO: 62718 - DNA, 604 bp, Zea mays
  unsure (1)..(604): unsure at all n locations
  Clone ID: MRT4577_1571C.1
cgccccgcgnccgcccacgcggccggccgccgccgggcnancggccgccgcagcagcagccgcagccagggcaanaccccacncaaccaccgcagcnaagcccgggccagcagnnncggaccggcggcgncggcagcgncggcagcccgnnccggggccagngcgncgagggccggaggcaccagngcagcccggcggcgacgcccnacggcncgccacagngccaggcgcngcagcagcagggcngccaccagaacaggcaggnggagccgcngcaccggnaccaggcgacanacggngnggnccngcagnccnnccggcagcagcagccgcagggcgagcncgcggcgcnganggcggcccaggnagcgcagcagcggacggcgaagngcggncggcagcngcagcagccaggncccggcccnggcaacgcagcngccggcgggggcnacnacngaggaaacangnacngnagnaanaagggaagggagccgcngacnagcnaccnanagggcnanagcnagnncacncgnnnagcggcgangagnaacggaggggcacccancaccangggnggcagngngagcacagaccnngaagaacc

SEQ ID NO: 62719 - DNA, 194 bp, Zea mays
  Clone ID: MRT4577_157200C.1
gcacgaagctccccggcatcaccggggcgacatacgcatacggagcgatctactgtacctctccctatattatccaaactccagctcatctaattaaacatgggggaccttacaaagaagtggggggattcatacgctgactaacacctttgtacctagaacgatggccaccaccacattgctgaattcattgt

SEQ ID NO: 62720 - DNA, 2003 bp, Zea mays
  Clone ID: MRT4577_157201C.1
tccttcccttctctcctttttttttttttctttgttcacagtagaaataatcagtttcaaccgcgcttacatatgtaaatatgtaatctcagacaagacacctatctaagggcatgaaccagcagctagagttcaaccccaggagataactgttatcaatggctaaacaagcaacaaaaacagacacgtgcatccggctagcttcttttgaaccggacatgggtgttgctggcggcgaatattgacgacgagaacctgtgtttcctagcaccgggtgacgcggtaccatggttgtgccttcgtgaggactggggagtgaagtagtcaccaccaccagacaagtactggtgattcgtgtaagacctcttgggagtagctggtgaaccccatccattgggtttgtacttcttcgatggtagatcgtcatcaccagtccaaccacccctccatttcgatttatgattagatgcgcccattctttcctcgaaagaggggctattgcttttgcttgttgtacaggcatcatgaggagctgatctagcactggaatctttcttccatttttccttcctccggatgtgtgatggtgacttgccatcgtttttccatcttcccttcctctgactgtgtggtgacgaccagccttttggcccatcggacttggcattcttcgtgcagccgcgtgcgaagtgaccttcctcgccacatttgaagcataaggttggggttgtgacagcactagcttccctgcgttgcttagcacatcccagaccagaatggccagattgggcacagttataacagctaacttgttccagagaattgtcaaagaagtcggaacaacatagatggcccttctggttacacacgtagcatcttattttctcgatatcatctggtgggtaatcattggcacatccaaacatatcatgacctgtttctccacatcttatacataatgtggattgatgatcattcctcttgtgcttatcagggcaatccttcgccatatgccctccttttttgcagatgaaacagtcttgaccctgcgtgcactgctttgcattgtgcccaaacaacccacaaacaaagcaaggcttctttcgcttttccattggacagtttgcagctacatgtccttcctcgctacaattaaagcaagtctccaacaatgtttccccaggatcaaagtatcttggtatgcgctggtcacaagtagaagtaacacaatgtcaagtgttcaagtataagtgaactgcccacctctcccgatcaacttaagcttttggccgaactggtcagtgcatgcaatcaaagctagaggtctcaagctcgaatcaaggagcttccgcagaaacatactgtgagatgtaggggcatcagccccatcttcagttagcaccgattctgctgtcccaatttgctcctcctgggtggtaccaacctccttctcttcctcgtccacggcagccgcagccgcagcagcagcggtcgcctccttccgttgccttttcctttgcttccagtgctgcctcttcttctgtttcctccggggctcatccgcctcagcgagctccaccacggcgtcctcgtcgtcgccggaggacaccgagagcaggttggcgaacccggtgactccaccgcaggacgcccaacgccgcttccgctgcgcgcgcgcgatgatctccaggctgaggtcctcgttccccacctcgtcgtcctcctcgtcgctcccgcccctgcgcggctgccgaaaaggcggggaaccatcttcgtccaggtctgagtcccaccgcgccctggagcgccagcgctgggccatcagcgttctgcggcggcgggtgagggacagagaaaacctaataacgcgctcgatctggaggcggcgcggagaagtgggatggtggcagcgccgcagcggcaatttttcggcagcggctcgggaaaatcaatttgcctgcggctgtccagaaaacgaccagccggccagcctcgggggtacc

SEQ ID NO: 62721 - DNA, 237 bp, Zea mays
  Clone ID: MRT4577_157202C.1
gtggcctggccggtctgcctcgtccgcttctctctcacccttccttcccctcctctcctgtggatgctccctccctctccggctctccgcctctcccccgccccccaagcccaaatcaccgcgcctcgccccacagcaccgggtgcgggggaggagggaggtaggaaaatggagaaggaagcgaaaactgctgactcggaggaggtcactgcggaggagcgcaacctcctgactgtt

SEQ ID NO: 62722 - DNA, 638 bp, Zea mays
  unsure (1)..(638): unsure at all n locations
  Clone ID: MRT4577_157203C.1
naggtacttagttcactattccatcactgccaagtttatggtatataggctcctctgtcatatgtgggtctaggctaggaagtttccntgtttgaaaatctaacctactggggagatgtccaacaatcccaagaaaccccacattctatgaaacgctatgtttacttgttgatataggcttcaaaagctagcttctccttgaactcgatcattacttggttgatgttttgcattggtaaacactaaacacttgaggtggggtcaccggatcatgtatgttctggcatatcatcatttattatttagtctcgttttgcatttcattagtcagtggatgcttcaggagtacggtgtataattaaaccatcatttttaaataatttatggtttggtgcatgtgagtattaccattgttgttaaggtgttcttaaagcgtcgcttaggcgataaggcgtgcagcagcggcaaggcgtcgctctcgccttagaacagagactaaggcatccgccttgaccagtacagcgtcgtcatggcgccttgaagcttgctaaggcgtcactttggagacgccttgaaggtctgcagcgttgctgacttgcccgttagtctcctggcggatctgcaccggcagtggtgtt

SEQ ID NO: 62723 - DNA, 1427 bp, Zea mays
  Clone ID: MRT4577_157204C.1
aatcatccccgtctctctcttgaaaaaaaaatctcccggaaccaatcacaatcacaaacgcaggcgcagggaggcgagtgtgggcatggccaggaggggagcggcggcgaagggcacctggaggccgaggaggaaaccctcgcgcgcgcaagcggatgtcgacggcgacggcgacgcggtacaccgcggcgccgaaggcgggcgccctccgccaaagggacacacaaatgccaccggcagcggcgggtttttctgctgctacctgctccggtccctctgcccgcgcagcaagggccgcacctatatcggcttcacggtgaacccgcgccgccggatccggcaacacaacggcgagatcgtcagcggcgcgtggcggacccggcgcggccggccctgggagatggtgctctgcatctacggcttcccctccaacgtcgccgccctccagttcgagtgggcgtggcagcacccgacggagtccctcgccgtgcgcaaggccgccgccgagttcaagtcgctcggcggcatcggcaacaaggtcaagcttgcgtacaccatgctcaacctcccctcatgggaaagtctgaacctgacggtgaacttcttctcctcgaagaacaccaagttcaccaccggctgcccgtcgctgccgagccagatgaaggctgtcgtgtgcgctatggaggatctgcagtgccagcccgacggcccgtcatccgaggaggatgacaatgacatccgcgacgagtcccaagataatggggaagaaccgcctgactcgcctatccgagatggattttcatattctgactactgtttccagcaaccgtcctctgatcaagcgcagccgatggacgagcaaaccataagtgcaggttctggtgtcgaggatgactttgttgacgagttcgcttcttcgatggaaaggagcgaaatccttggcacaagaagaggactgaacggaccaagaacatcgcctctatgttccttgggcgcgtgcagcaacgatgacggattggaagaagaggcaggactgatgtctccattattgatgcccaatgctagctcagatgctggtgacggccgccatagcatcaacggaaaccacgtggtggacttggttaccccgactccactaggccggctccggagaagagactgcatttccagcatctgtccaaagatcattgatctgacgtcctcgcctattgtcattcagttgtagcgtcttgtattcgtgacacttttcagtgtcataccatgtataagttaaagagtacaagacagataaacacaggaacatggacattcttgtgctacaagcttgcaaatagtatttctattaagcaaggcattaggcatatgaatgggtgtggcactgcaattgctagttctcctttttttaacgaagcattgctgttttcttg

SEQ ID NO: 62724 - DNA, 552 bp, Zea mays
  Clone ID: MRT4577_157205C.1
tggctagcgggtctgtcattgtcggcgccgccgtcagcagcccggcggcggtgggcgataccgcgctcgccgaaggcttccggctgggccacggcggcgtgtgaggtagaggcgctagcggctggccttcttccacgcggttgcagcaggctctgtggcgttctgctgctggttcacggacttgacctgaccggcggccagcccgatcgaggcgttccatcggcactgcagtgtcgcgacacggcgagcgcatcgcgcacagaagcagggcaggggatgcagcaccaatctgggagaaatcaattagaccctgttttttttatgcgcatagtagatttcattcgaatgccattatggaaattgcaagtactaccacttctttagatggacgctgtagcgaatccaccaagattctcgtttaatttcaggcctgcctgtagattaattgtcctctatcatgctaacatctcatcagatcttatctaagaccgcgtcctattagcatggtagcgtcctaattatttttacactaaatatgtgctatggttagat

SEQ ID NO: 62725 - DNA, 557 bp, Zea mays
  Clone ID: MRT4577_157206C.1
ggttttttttttttttttttttttttttttttttttttttttttttttttttttttttttttttttttttttgaaaatcgaaacaaaccgggctctcccggggcccttttataaaaatcccaatttctgaaatcccttacccatgggggggggggcaaaccccaaaggctcggcccccccgtcttaacaaacctcaaaacatcaaaccggttcttgggcccctttggggctcaaaaaaaaaagggggcccccctttttttttttttttttttttttttttccccccaaagccctttttcctttaccatgagcggggggcccccccccaaagggccccaaattattggagcctccctttttgggatggccccccctttaaggggggaggccctttttcctccaaacaggtttggcccggtcccccccctttcctccttttcccctttttttttgggagttatggaacctgggaaaaactgccggggttgaagccccctttctttggatccccgtgcccttaaaaacaatttggttgaaagctttccctttaacccccc

SEQ ID NO: 62726 - DNA, 218 bp, Zea mays
  Clone ID: MRT4577_157207C.1
gtgatcgatcaggactataataaacctgacatatatatacatacatatgtgaaggggtctttatatcaacccattgatttttgagagtttaatgtgtagtcttggctctccactgtatttaccagacaaatacatatacattgccgtttctgagtttagatcctacaatatttttcaacgtgtacccacgtgtgcagagtctgcaggtgatgtatccg

SEQ ID NO: 62727 - DNA, 439 bp, Zea mays
  Clone ID: MRT4577_157208C.1
acgtgtttcttactggtcctcggcgtgcccgccctgcgtgccgcggtgtcccgtgcagggcgggacgagacgacaactgactagcaaagcataagccaactgagcacgagcgagacgaccagaccgcgattgctagctagctagttcgggcagctagtggtgtgagaccgctatagcttgcttatccttcattttgcaccattttaatgtacttattacttaaactcattatttatctttctttaaaccaatacactcattcaatattatattcttttttactttattttcatatattgggggggggggggggatatttaaaaattcttttctaatataaatcttatttctattacttataaattttatctttattatattatctataatcctaactattttactaattttttaataatttaaatatttatttattttt

SEQ ID NO: 62728 - DNA, 379 bp, Zea mays
  Clone ID: MRT4577_157209C.1
gccactcgttcgcccacacgtacggcagaatcaaagctctttgtgtgtactcccttactgcggatgcatgcatacatccatctataagactaacttccaactgcgatccctgtgtagccctgctgcgctaaccgagactcagaagaagctcgatctctcggttggtgatgcgattacaacaccatgtacggcgggggaaccggcattgtcttacgcgcgaggggcagagcatggacatgctgattgtacgcactgctcgtgatgcgtacgaactcctgcacgaccctcatactgcaccattaccggaggctcacgatcaagtggcacgcggacccgtgggacaaggaccccgattcggacgaacaggccaaacaaaaga

SEQ ID NO: 62729 - DNA, 790 bp, Zea mays
  Clone ID: MRT4577_15720C.1
acgctacgggcttaaattagctctagttgatgagcttggcgagaggccggagttggagttgcgtccacaggactgcacggctgtcatgaaggtctgcataaggctccgacggtacgcagccgtggagagccttttcagctggttcaggggggccattgggagccccaccgtggtgatgtacacgacggtgatccacagccggtgccgtgacgggaggcaccgagaggcactgtccctggtgtgggaaatggagcaggcaggctgcctgcttgatctgccggcctaccgagttatcgtcaagctatgcgtggcattgcacgatccggggagggctctccgctatctgtcaaggatgaaggaggctggttttattccaactggcgacatgtacgacagtctgatcgagggctatttggcagatgggaggctggccaagtgccgacagctgatcagagatgccgagtcagccggtgtgaagctggataggaggctgctttcgcggttgtctgaaactggaggcagacatccttagttgactctggtgagtgttgttgacatgtgttatgcacgggtagaatccggacaggacaggaacaccacagaggaaaattatctctagcatttattgtagagtaatacaaagagtaatcttggcagaagattagtacgttgttgcccagtttccctttgtatttgtcagtaatccatgatttcatgacaacgatgaattgctggctgaaaaaaaaaaaaaaaaaagcggcaaatcctgaaactgctaacgcatgcttgc

SEQ ID NO: 62730 - DNA, 772 bp, Zea mays
  Clone ID: MRT4577_157210C.1
ggcgattgggaattccggccggccgggtccattcacatacatatccatccatccctaaaaatcaaggttacacaccaacttactttctaggtctcaaattaaatggcctcctcgtcctcctccttgctgctcgtgttggtggcggtggcggcactctttgtccttggctcgtgtggcggcgcgctcaccttcacgatcggcaaggactccagctccaccaaactatccctcgtcactaacgtcgccatctccgaggtgtcggtcaaggagaagggcgccctggactggtcggatgatctcaaggagtcgccagccaaaaccttcaccctcgatagcaaggagccgattaagggccccatctccgtccgcttcgctgtgaaaggtggtggctaccgcgtcgttgatgacgtcatccctgccgacttcaagcccaactctgtttaccagacaggcgaacaaatctgagtaatggattctgctacgtgcagattatatcgatctctaaaataaatgtttgacagagactaattaagcacacaaacaaagcaaggcactaattcatttcctatgtttactttgtggtaggcaacctgcaaaacaatgtattgtatgcatgttctcctctcacatatgttgttagtgtgctgtatatataattaatttctttactttttttctaggcacacatgtatgttgaaatcaatacactagtagaaaaaggctcaaaacccgttgtgcgataaaatttcaaaaaagggaaagccaagcggcc

SEQ ID NO: 62731 - DNA, 305 bp, Zea mays
  Clone ID: MRT4577_157211C.1
gtgctcaatattactgtcaacccctagtgctgttaccaaagagaatagggcggtcggcgtcctggacaaccacaacgagggcgagagggacgctatgcacggcctcaagaagctcgaccgaagaaaaaaaccagaaaacaaggccaccatcaacaacaacaaggccaagccaccaaaggaccaaaagggaagaaaacggccggatggatggaaggatggatacccgaaacccgatcgtgcatagcatggtgtaccattcaataactgccggcggcacgccttgaaacggagccgaaaacggaaca

SEQ ID NO: 62732 - DNA, 210 bp, Zea mays
  unsure (1)..(210): unsure at all n locations
  Clone ID: MRT4577_157212C.1
tttttcatttttttttccccttttacatctccancaaccnaacaacagggggtgccaggatattataactcagggcacaactttcgcattttgcaagcgcaacaaatgccttcataatttacacaaagctcactagctccaacatccatcattacacataatcctttcaccaattacttcaatgtgcgaagtacacccaatttgagcaaa

SEQ ID NO: 62733 - DNA, 483 bp, Zea mays
  unsure (1)..(483): unsure at all n locations
  Clone ID: MRT4577_157213C.1
aaaagctgccccgggaggagaggcatacaggcagagggaaaaatctaaaggaaataactaaagcancacggctttttacacgacgaagagagaagaggcgggaatcaatacgaacaagcgggggcgccacccccaccccccgagtcacaagaccgaggggcaaggggaccgaccccgagaaagagcccgacggacaacccgacgcgacaaagagccgcaacaagattgggaacaccaacagagcccctgccttaagaagaaaggcaaagcgcgcacaggccacacgaaaacgtgactcaaacgagaaaaaatagtctggcccacggagtgaggtgaagccaagacacgcccacgaagcaaaggatccctgcgaaagaccccaacgacgagccccccgaggagccaaacacacgcacggggcacaggagggacagaccggacgccgtatacagccaaccccgccccaaccaaccccgaaaaacc

SEQ ID NO: 62734 - DNA, 251 bp, Zea mays
  Clone ID: MRT4577_157214C.1
ctcttccgcggtcttctcgcgctttcactcccaacgagatccatcacccccgacctgtgtaagcttcccttgacgtcgtcgtcgtcatccatggagagcaaggacggtacccacgatcccgccacgacggccgcgccaccggcctgcgcgccgtagcccgtgatgccttccgcggagacggcgcgtgtggggcacgcggcagatgggcccgccggcggcccccggtgcgctctccggagaaccaatatgct

SEQ ID NO: 62735 - DNA, 305 bp, Zea mays
  unsure (1)..(305): unsure at all n locations
  Clone ID: MRT4577_157215C.1
atacaaagcggtaggattattaggacggtttatactactttaattagaacttaaaaatcgccactgtggcttatggggacggtgaacagaccaaacaggcagcggttttgcggggcggtttcatcttatttagatgtaacaaaatctccaaggtggggggcaagggcggggggatactaccctacacgtgagggacgagcgcggtgtcgacctctctcattccggatagccccaggttggcgaggacgccggcnaaggccagctttaacttccccaccaggggggcaccagcgagctttgagctg

SEQ ID NO: 62736 - DNA, 814 bp, Zea mays
  unsure (1)..(814): unsure at all n locations
  Clone ID: MRT4577_157216C.1
ctcgaggccggccgggagttgtatcccagtagtagaatagttgtgccagagctccagcaataatggccgacaaggccgtgaaggtgtttctgatgtgggcgagtaccatgctgatcgaggatgaagtggactctgaggatgaagggtgtcgagtacgagtacgtctcacgaggacctcgccaacaagagcgtctacctgctccgccacaacccggtgaccaagaaggtgcccgtgctcgtccacgacggcaagccggtcgcggagtccaccatcatcgtggagtacatcgacgaggtctggaagggcggctaccccatcatgccgggcgacccctacgagcgtgcccaggcgaggttctgggccaggttcgcggaagacaagtgcaacgctgctctgtacccgatcttcaccgcgaccggcgaggcgcagctacctcgacatcgtcgtcgggtggttcgcgcactggctccccgtcatcgaggaggtgaccggcgccagcgtcgtcaccgacgaggagctgccgctgatgaaggcctggttcggtcggttcctcgccgttgacgtggtgaaggcggccctgcccgacagggacaggctcctcgccgccaacaaggcccgccgtgagcagctcctctccgcgtagatatggctagtaattctggagcagctagtttcaccgccgacgctcatatattgctgaataaggactggttgcacacttgcacttagcacgttgtgcagtgcagtcgagggttggatgactcctgcccctctgntccattcagaaatcaggtttgcatgacctcctgcctg

SEQ ID NO: 62737 - DNA, 458 bp, Zea mays
  Clone ID: MRT4577_157217C.1
tcttttgagttgaggatctgttcactggactcgcgcgccggatgcatgcagccgcagtatataggcccatctaagaggaccgcattgacagcacgcgcttgaatgacatgagagagggcactaggactgatctcaggaagacaaagcatatcaacggcaaatagggaataaatacactaagactatgtgaatcgaacctatgcattaatgggacgcccatgtgacggtcactcagaaccaattataatgcatcaactgaaatcgtagacattggtgactgggctgtaaaagtagcgaaccaacatacatacatactgctgtatggctgataggcagctaaccaaagaaggatatagtgaccacaagaagagctaggacaggtcgagctatctaaagaggacatgatgaagaggggagtcacaaaccggtggagaaacctcatgaagaggcacatcatg

SEQ ID NO: 62738 - DNA, 1339 bp, Zea mays
  Clone ID: MRT4577_157218C.1
cttcacgatctgtgactgtgatctatactataaggtgaacaagatctctttgtctaccctcgaggccggccgggtgtagttgcagcaccagcagcagaagagcagcgccagagctccagcaataatggccgagaagggcgtgaaggtgttggggatgtgggcgagccctatggtgatcagggtggagtgggcgctgcggctgaagggcgtcgagtacgagtacgtcgacgaggacctcgccaacaagagcgccgacctgctccgccacaacccggtgaccaagaaggtgcccgtgctcgtccacgacggcaagccggtcgcggagtccaccatcatcgtggagtacatcgacgaggtctggaagggcggctaccccatcatgccgggcgacccctacgagcgcgcccaggcgaggttctgggccaggttcgcggaagacaagtgcaacgctgctctgtacccgatcttcaccgcgaccggcgaggcgcagcgcaaggcggtgcacgaggcccagcagtgcctcaagaccctggagacggccttggaggggaagaagttcttcggcggcgacgccgtgggctacctcgacatcgtcgtcgggtggttcgcgcactggctccccgtcatcgaggaggtgaccggcgccagcgtcgtcacccacgaggagctgccgctgatgaaggcctggttcggtcggttcctcgcccttgacgtggtgaaggcggccctgcccgacagggacaggctcctcgccgccaacaaggcccgccgtgagcagctcctctccgcgtagattggctagtaattctggagcagctagtttcaccgccgacgctcatatattgctgaataaggactggttgcacttttgcacgttgtgcagtgcagccgaggtttggatgacctctgcccctctgttccatttcagaatggtagtcccataataatgcatatacatcatgcataaaaaaaaaaaaaaaaaaaaaaaagctgattttcttcaggcgtgcaaggtagcaaaaaaaaataacacatagaaacagacatttcttcttttttttatattcgttcagattagatcagtcctgtactgggatcggcccacaaagtgcgccggtccagacttactgtccgaaccgaacgtggtactgccaaggtacatctacacaccatgcagcacagtattggccaacgtccaccgccgaacagaagagcacccacaccagaagcgacagctgcaggtgacgacgattcaggacgctatccacgtagcacacagcagcgatcacaatcacaacatatactgatatacacacaacggggaagatcgaagaggcca

SEQ ID NO: 62739 - DNA, 169 bp, Zea mays
  unsure (1)..(169): unsure at all n locations
  Clone ID: MRT4577_157219C.1
atttgcctaatcttgccaacgccggctctcccctgccacgactccctgcccaatnntaanccgagtctttccctacgttagctgacttcttctcgccccacctagagccatggtggaaaccaagggagagggctcgaccatcagcatcgagctcggcaccacctactcg

SEQ ID NO: 62740 - DNA, 134 bp, Zea mays
  Clone ID: MRT4577_15721C.1
ggtttgcatatcctcggctaggcatcatatatagaattttaaacggacacggcccaacaagcccaacagcataaacacaaaactggaccatatgtgtgggattaaccaaccgggaaatcactcctacaacaacc

SEQ ID NO: 62741 - DNA, 1170 bp, Zea mays
  Clone ID: MRT4577_157220C.1
accttggcagtaccacgttcggttcggacagtaagtctggaccggcgcactttgtgggccgatcccagtacaggactgatctaatctgaacgaatataaaaaaaagaagaggccgctttttttttttttttctttcttttttttttttgcacgcctgaagaaaatcagctactgggattgggcaacaggccaacagtttgacgcaccgtgcggtgccacgaaggttatgcatgatgtatatgcattattatgggactaccattctgaaatggaacagaggggcagaggtcatccaaacctcggctgcactgcacaacgtgcaaaagtgcaaccagtccttattcagcaatatatgagcgtcggcggtgaaactagctgctccagaattactagccatatctacgcggagaggagctgctcacggcgggccttgttggcggcgaggagcctgtccctgtcgggcagggccgccttcaccacgtcaagggcgaggaaccgaccgaaccaggccttcatcagcggcagctcctcgtgggtgacgacgctggcgccggtcacctcctcgatgacggggagccagtgcgcgaaccacccgacgacgatgtcgaggtagcccacggcgtcgccgccgaagaacttcttcccctccaaggccgtctccagggtcttgaggcactgctgggcctcgtgcaccgccttgcgctgcgcctcgccggtcgcggtgaagatcgggtacagagcagcgttgcacttgtcttccgcgaacctggcccagaacctcgcctgggcgcgctcgtaggggtcgcccggcatgatggggtagccgcccttccagacctcgtcgatgtactccacgatgatggtggactccgcgaccggcttgccgtcgtggacgagcacgggcaccttcttggtcaccgggttgtggcggagcaggtcggcgctcttgttggcgaggtcctcgtcgacgtactcgtactcgacgcccttcagccgcagcgcccactccaccctgatcaccatggggctcgcccacatccccaacaccttcacgcccttctcggccattattgctggagctcaggcgctgctcttctgctgctgctgctggtgctgcaactacagtagacaaagagatcttgttcaccttatagtatagatcacagtcac

SEQ ID NO: 62742 - DNA, 300 bp, Zea mays
  Clone ID: MRT4577_157221C.1
cgggagtgactgaagcactcggtaaagccttaaaaacacccggtaaagtttttgtcgagtgtcgcactcggcaaagaggacacacaatgcatcgacaaagcctactttgccgagtactttttcacgggcactcggcaaaatggtttgccgagtgcagagacactcgcaaagaaagcagccgtacggtgccgggtgccacagacactcgcaagaaagcagccgttagatttcatacatagtgtgtcacagctttctcgaactttctcaaattttatcacagactcttatatgatatcatga

SEQ ID NO: 62743 - DNA, 163 bp, Zea mays
  Clone ID: MRT4577_157222C.1
ctcgacaatcgatttccgctcttctactcctcgcgccgccgcaggaacccgacgacaggtaatggcttccgcgcggtgctccggaagccgaatctcgccgcctcttctctaccccaactccgtgctgctgcatctcggaccgacgtgctaccgatgcgcccgt

SEQ ID NO: 62744 - DNA, 427 bp, Zea mays
  Clone ID: MRT4577_157223C.1
aaaaaccccaaggtaaaaaaaaaggaaacccccaaaaaaaaaacctaaaaaaaggggcttacaaaaggggggggccaaaaaagggggaaaaaaaaccgcccaaagggtccaccaaaggaaactaacaaaggggcccaattaagggggcccacctttgccttaaaccggggagtggtttggaggaaaaccctccttattttttcccccaataaaaacgccccctaaaaaccataaaatttttacaaaaaatttggggcccccgggtggggaaacccgataaaaaaacccggttcggacccggtaaaccacccattaaggggggccccccccagggggcccccccaaggggccggggcccccccccctgggcgaccaacggaaacgtttttaaacaagggggaccccgggcaagccctaaaaaccggcc

SEQ ID NO: 62745 - DNA, 292 bp, Zea mays
  Clone ID: MRT4577_157224C.1
tcgcgctagcccatctcgtttttcatccgccttcgccttcaaccgcgggcgctccacgcctgctccaggaaagcgagagcttctgaatagcaacaacagatcacaagctcgatcagatcggtgcctacaaaacctcagcaaccaagtttcatgtgtgatgtcgacgtacagcttccatctgccttagatccgcacgctgaggcaaatgctgaagactctggagctggtcctggaacgaaggattatgtgcatgtgcgcatccatcaacgcaacgggagaaagagtctgacta

SEQ ID NO: 62746 - DNA, 320 bp, Zea mays
  Clone ID: MRT4577_157225C.1
ctcgagccgattatgataaggatgatatggtacaagggactggactactgggaactgagagacaagaatctgaatcacaacccccactggtgaataatgattggcatgccgatatgcacagagctcatcctctggggtctgtgcctccatgtactacattcacgagtgatctggctgaaaaaccatctgtcagtgcagaaactaacggtgaagatgtaatgatatttacaacaaaaattcctggaacagctttaggcgattgtgataaaacttccaacctaaacattatgaattctgatcaatcaaaatgcagcaaagat

SEQ ID NO: 62747 - DNA, 297 bp, Zea mays
  Clone ID: MRT4577_157226C.1
ggcccgccccggggggtttttttaatcctgcctgaacggttgtcctttgggtttgcctggggcccttgggggggccaaaaaaaaagattattatcatgaatcgccccgggggggggccggcccatcacggggtaaaatcgggggcccaaggaacggaagggaaaagaaagaataacccgggccaattaaattaaaagggggggaaatccgcaaggggccccttttccggttgttcggggggggccgggcgcttccgatcttgaacctgtcccaccccgccccggtcccgtggggtcc

SEQ ID NO: 62748 - DNA, 426 bp, Zea mays
  unsure (1)..(426): unsure at all n locations
  Clone ID: MRT4577_157227C.1
ggagaagagacatgtaccaaaatttcatgggccacgatcgacggggatgtcatcaacaccagtgggttgtcatcgatgaggatagtcggtcgctgtttgctaatggcggagaaggatgaggaaatctggtggtgacggaccggattcagcgggaggtcgttgtcacatccccccttagtgtctcttgagcgtcagcgtangcaacgtggatgagccacaatctgcgggggtggtggcctagaggatggcggcgacttggagaagggtggcagtgctgggtggaggaacataggatatgaggaaggagatctcgagaatggatagaaacggttggatatagtaaataaaaacaaaataggaaaatattaaaaaaaaatagaaagtggggtataaaagaaggtataaaaattataaagtggggtatat

SEQ ID NO: 62749 - DNA, 309 bp, Zea mays
  Clone ID: MRT4577_157228C.1
attatttttttttttttttaagttccaggggggttttttttttgacactgtgaattacagcttccaagcgacacaatacaggtgcattgagcacgacacgctgcactgttctgcaaacccaatttggtatattattatacaggacggatagaacgaatacgtggagggacgtccaggttcctgcagaatcggccccaaaggctaggtagtgaaaatactagatggcttacttatgggtttaggccctcgtggtgaactcgtgcttgggccgcaccgtattgcgcatgtgagctattttggggaccaaag

SEQ ID NO: 62750 - DNA, 437 bp, Zea mays
  Clone ID: MRT4577_157229C.1
gggggggttgtgggtttttttttttttttttttttttttttttttttttttttttttttttttttttttttttttttttttttttttttttttttttttttttttttttaaacggaaagcttttttttaaaaaggagggctccttttgtgtgggaggggggacacccttttaagagaaggtttttaaattttaaaaaacccccccaaccggttttaaatggcagggagggagccaaaaaaattgggtcccttttaacccccctgtttaatttaatttttccggaaaaaacatccctactgggagttccccccccaactttataatccccatccccctaaagctccaactgccccttttaaaggccaaaaaccccccccgggctccttttttggttttcccccaccccccctttttcccccacccttcccggaaccct

SEQ ID NO: 62751 - DNA, 578 bp, Zea mays
  Clone ID: MRT4577_15722C.1
aaaccaaatcgcttacgcgcccccggagcgtatgggctcgcataccagtactggtcttgcagcacgccaaacaacccagtggctggtagcccagacaggggataggattgagagaggcgcgcatatggcgacgccggcgcccacattttgctccagcttccactccctgcggaccgactccattgaacacccccgtggcataaactactacacgcccagaataggcatttcatgtgagggcatcagctcgggatgacaagttctcaaatagtgacatcatcgagtaccctaaaatcctgtctgcaaactttgcaaagcttggtagatcaggactaaactgcggatgtggcatgatgccactggcttcactagaagatgtgatggttgggcgcttattgtccaacattacaataggaccctcgtatgtagatgctctgcatgcacagactgatcttgcgtgggatgtacatactatgatggaggaacctgagacaccgagtgccttgatgtatcaacgcacctgctgatattgtgagtgctcactgagaacagacatggaccatccattagcaccgaac

SEQ ID NO: 62752 - DNA, 272 bp, Zea mays
  Clone ID: MRT4577_157230C.1
ggggcaacccaaacttttattggatggggttggaaaactcaaacaaggcggggtttgtaaaaaggttccggctgacttcccttgggatacaacttttgttccccgacgtttaaaacaaaattgaaacaggtccatttcaggtttatatacaggttggtcaaaaacagaggacaaacaagggttgtttaaagggcgttttatttttttcgcccaaacccttgggagaaaaaagggagcctcaaggcttttcgggctggtaaacgggttggtgg

SEQ ID NO: 62753 - DNA, 234 bp, Zea mays
  Clone ID: MRT4577_157231C.1
atatgaagaatacaccttctatcaatatcttctttagacagcgtaaccttcttcttgggggggcgtcaatggccaactgggcagaaagaccaattgactacaccttctactctcatgattgcagccctcatgccgcataagccactgaggaccactaggacatctctaggataatctgcgactgcattggcgactacttcttcaactacaacatgttcatagttcagactgttc

SEQ ID NO: 62754 - DNA, 465 bp, Zea mays
  Clone ID: MRT4577_157232C.1
ggggccctaaatttgacttttattaataaaagtcccgtaaatttgtttgaacaagttattgtaaaaaaataaccaaatttttttttttttaaactggccggggttttggttacaatgaagccccttgaacaggaaccaaactgttggttttacccaacttttggcgcagaacacaaaacaaacattttgtccaaacagggtttctttcctaatggggggggcccgacattggttggaaccccccaaaaaagaatcaaatttgatttttttttgtcgaaaaaacctaaatgagctcaccacttagaggatgggtcggggggaaaaattcagtacttttttttaaaaacggggtttgttttgaaaatgctggctccatgttcctcgaagccctcctttggggggcaaaactcaaaaaagtcagggtttagatgcagtttaggtgaccccccgaaccaaaccgggtaa

SEQ ID NO: 62755 - DNA, 693 bp, Zea mays
  Clone ID: MRT4577_157233C.1
cctcgagccggccgggccggcgatccactcctcggcggcacgaggtccttgtcctcctcggcgcgatccatggaaggtccgcgatccactcctcggcgcgatccattcccttctcctcctcggcgcacagagcggcgtgatccaattcctcacctcctcgccgtgatccacgtctgagcccccttccccatcttctaccatccccggtgattccagcatcgccgtcacgcacgatgcccgcatacgcactccacaccccaccctaatccccgcctcggagcccctcgcccctcgtctcgtgctccccatcccccacctcctccgcgcgtcgattccgtggcccctgctcgcgatggctgccgccacagcgccccttcctcggcgacgacaacgcgaactgtcgtcgatgcctgcccccgccctcgcgacgcccactgaggcgcatgcccatgcctgtgatgcccggcgcagcagatggcggccgccgcaaatcccgctacccccagccaccacgaccctgaccttgatgcctggcgcggacgttgtcaccgccgagcaggagtcaggcgccgcaaggtgctaggagttggtcgggccagcccccacggcgctgacggcgttcaccatcttctatggcggaaggtggggctggttttgaggactttgccatgggcgaccgagggcgtgcgcctg

SEQ ID NO: 62756 - DNA, 193 bp, Zea mays
  Clone ID: MRT4577_157234C.1
tcgcccacgcgttcgacaagaccctttttttttccaccgaccaccgccaagaggagagccgacaaccgagcgtgaagggcgggcctccgcacgtggccatgctggccacgccggggatgggccacctgatcccgctggcggatctggccattctcctggcggcgcgtcgcgaggccacgaccacgctcatcac

SEQ ID NO: 62757 - DNA, 409 bp, Zea mays
  Clone ID: MRT4577_157235C.1
cccctccaggaaaaaaggggccatttgacaaattttttcctccccccaaaaaaattccaaacaagggtttaggcccagcccttttttgataccctagcaatagccccccaaggttgaaaacccgggggggcccaaacaaacaagggggcccccttccccacccgggggccacatatgtttatacccctttattccccaacccgaagaaagaaaggttatttaccaaggggtaggatatagcatggttttctcccaaagaaccaggaccgaatcatggtttaaggattaaagttaccgcatattggatcatccggagggactttttaactattgagccactttgtgtgccccacggggaaaaacagaagcccccgccctttttgaaccttgggggttcccaacccaaacc

SEQ ID NO: 62758 - DNA, 1331 bp, Zea mays
  Clone ID: MRT4577_157236C.1
gaaaaaaaaaaaaaaaaaaaaaaaaaaaatctcacctgcattggggatcccgaggctagctggtaccacggcgtcttcctcaagggaccactccggcccggccggggactccggaccctaaaaccctagtcgggcttcatacgccgccaccgcgccgcttcctccctcgccatggccctctttgctgccgcacgccgcgccgcgtcctcctccgtgcccgtcctcctccgtgcctccgcctcctcggggtcccaccgcagcgccgtcctgctccggcccctcgctgccgccgtggcgccgccgaagccccgcgcgatgccgttctcctcggcgcccgcgacgagacccagctccgacgccgagctactcagcgtcatcgactccgagatcaagtacgccgaggactgcgatgaccacgacagggttgaggagattccagaaaatttccctttcaaaatcagcgacgagaaggggacgaatgcagttacccttaaaagaacatatcagggtgagcagattgaggttgtggttcacatgcccagccttgtcactggagatgagcctgatcatgaccgtgatggtgaggatgaggacacggcgggagatgacaatgacgaagatgaaggccagaagcctgaacagtcaagcattcctctcacagtcactatatccaagggtgacggtcctgttcttgaattcacctgcactgcctatcctgacgaggtcatcatcgactccatgtctgtgacacaacaatcaggggatgatgaacgtgacatgattgcatatgagggtcctgatttcaatgaccttgatgagaacctgcagagggaattccacaggtacctggatctgcgtggcatttcacccaggaccacaaatttcttgcacctgtacatgatcaacaaggacagccgtgagtacctgctctggctgagaaagctgaaggatttcttcaagcagtaggtgtgaagacctgaagatcagctttatctctcttttgttcctgctagggccttctcggttattccaattccatgtggattgaagtgtattaaaataaattttgacttgttatggatttaaattaacttaataccacccaatccacatggattattggtgaaacaaacaagccctagtcgagattcttgttaagttggtagtttgtcagacccgaaatagagttttttgggtttcgaatggaaacactagacaaaataaaggatttagtattttttctataaatttccaagatttatttaactgatgacaatttagggtgagaaagtgtggctatataaaacctttcatgaagttaatttgcccac

SEQ ID NO: 62759 - DNA, 378 bp, Zea mays
  Clone ID: MRT4577_157237C.1
ggggggtgtttttttttttttttttttttcttttttttaaaaaaaaaaaacagctcccttattatggtaattcatctccatgggaccccataacaattaagccctttacacacaggggtcgttcccgattagttattccaaggaaaaaaaaacgggattttatgtccttcccaggtctgcaacaacggtagcccttggaactagaggattttagggtccaacattcacccgctttgtgtttctggtgtttgtttcttagttcctaatatcttttgatggggttctcgcgttcgtgtggggggttttattaattctcggcgatggggggggtgaaattcttgtcctttgtccccaattgtttgaggggggggggggggt

SEQ ID NO: 62760 - DNA, 239 bp, Zea mays
  Clone ID: MRT4577_157238C.1
aacattaacctctaacggcgcctttttttttttttttttatttttttgggccggggcatgctgctgggggggtggttctcatgttgataaggggtcaccttgctcgcctttggcggcgcctaagcgtccagcgggggttcaatggcttacctcgccttaccggtttaagaaccatgtatgaaaccaagttaaaggaaggggactgagtataaccttcttttctggtgctagagattcct

SEQ ID NO: 62761 - DNA, 1159 bp, Zea mays
  Clone ID: MRT4577_157239C.1
tttgaatgtgccttggcgtccaatccaagagagaaagccaggtgctgcggcctcgagctgccgggagattgactgccaattcggaggtcaaaccagagcagcaggcagcagcatcgctgcctataaacagtatcgaccccccggccggcgggggggaccagcaccgaggcaggagcggcgatccattccacacaaccaccactgctcttgccccagcccgccgcaggagttgccagatctgctccggtcacaggagctccgactccgagccctctccaatggcggttaaggtctacgtcgtgtactattccatgtatggacatgttggcaaactagctgaagagatccagaaaggtgcctcgtctgttgaaggtgttgaagctaaaacatggcaggtccctgaaaccctccctgaggaagtgcttggaaagatgggcgcaccccctaagcctgacgtgccagtcatcacgccgcaagaactcgcagaggccgacggaatcctcttcgggttcccaacgaggttcggaatgatggcagcgcagatgaaggcgttcttcgatgccactggtgggctctggagggagcagagccttgccggcaagcctgccggcgtcttcttctgcactggatcccagggtggtggccaggagacgacagcgttgacagcgatcacccagttgacgcaccacggcatggtgttcgtgcctgtgggctacaccttcggcgccaagctgttcggcatggaccaggttcagggcggcagcccctacggcgccggcacgttcgccgccgacggctcgaggtggccgagcgaggtggagctggagcacgccttccaccaggggaagtacttcgcaggcatcgccaagaagctcaagggttcagcctgatctacacatatacccttgtcggatatcataaaaaacacttattacagattcgtcttacccatcaatagatcggtctgttctctcgtggtgtctggatgttgtgtggctcagtggaactttcatgctacggtgactttgttgtaatctggagttggaatatcgttgtttcgcataaatttcgatgatttgctcaagtaaaaaaaaaaaaaaaaaaaaaaaaaaaaaaaaaaaaaaaaaaaaaaaaagtactctgcgttgttaccactgct

SEQ ID NO: 62762 - DNA, 410 bp, Zea mays
  Clone ID: MRT4577_15723C.1
gggtgggggttttttttttttttttttttttgtgttttttttttttttttttttttttttttttttttttttttccaccacctggggggattggcaatcactggggagccaaaaatggggggggttttatacacaaaccaacaaacgggggggggggggggaacaatcgttatgggaaggttataactacgccatgaacaagccccgggcggagaatccatcaaagaaacctatatttccttggaaatttggacgcacgctaaaacatttccgggtttctaaagggctttttttgggccgaaggcctttaatccacgaaaggcttaaacaattttccatttaatctagtgggaaaaaggggaaataagggggcaaaaacacttttggatggggggaacctttaaaaatcc

SEQ ID NO: 62763 - DNA, 531 bp, Zea mays
  Clone ID: MRT4577_157240C.1
gaacagaccgatctattgatgggtaagacgaatctgtaataagtgttttttatgatatccgacaagggtatatgtgtagatcaggctgaacccttgagcttcttggcgatgcctgcgaagtacttcccctggtggaaggcgtgctccagctccacctcgctcggccacctcgagccgtcggcggcgaacgtgccggcgccgtaggggctgccgccctgaacctggtccatgccgaacagcttggcgccgaaggtgtagcccacaggcacgaacaccatgccgtggtgcgtcaactgggtgatcgctgtcaacctggatgaaaagagtagcaagcgagatgttggtcccatgatctttggacaccaggtctaggcagcgctcggatcatgtaaccatgcgtggaatgtaatggcacatacgctgtcgtctcctggccaccaccctgggatccagtgcagaagaagacgccggcaggcttgccagcaaggctctgctccctccagagcccaccagtggcatcgaagaacgcct

SEQ ID NO: 62764 - DNA, 348 bp, Zea mays
  unsure (1)..(348): unsure at all n locations
  Clone ID: MRT4577_157241C.1
tttttttttttttttttttttttttttttttttttttttttttttttttttgcggcatcaacatcgtgcatctccttctcctccctccaaatgataaggttcaatggacttctcgcgacgtcgggggcggcgaaccgcccccgtacgccgcgatccgaacacttcaccggaccattcaatcggtaggcccggcgccccctcccttcgaagcgcgggggcgctctcagcccgtcctgctgactcgngctactaggcattcctcgttgaagaccaacaattgcaatgatctatccccatcacgatgaaatttcccaagattacccgggcctgtcggccaaggctantata

SEQ ID NO: 62765 - DNA, 578 bp, Zea mays
  Clone ID: MRT4577_157242C.1
ctggtctggtcttcccttcattctcaagctcgaggtatagatcgcgtcgtgcggtgtcttgccgatcgatcggatgacaaagcacagggaagccatccaagtggtggcagatcgtgtcccaagagacgtcctggagcagatttacaaaatctccttgccgaagccaaagccatatgaatcacaatctcggccaccgactgcagctgagctgttgcggtcatactgcgcgtctcggggccatgtcagccatggtgggcagcctgacgagaccagggctgctaggcagatactcaaggactacatcgacggcaaaatcccgcactatgagctccctcctggtgttgtcacagacgatgaagtagcaacaacagaacctactgcaccagcagcagaaggcccgactgcttcagcagctgacgaatctggcagggacgactctgatgaacaggatgatgcaacaggaggtccagacatgaggcagctcttgagtgagctcgagtcttttgacttggccgccatcgaaggatctgatgccactggaaagaagcagcagcaccaggcatcacagacgcagcaca

SEQ ID NO: 62766 - DNA, 443 bp, Zea mays
  Clone ID: MRT4577_157243C.1
ctcgaggccggccgggatgaaatgtccctgttttttgttgtgtactgtaatcatctgagttggttttgtgaaattttcgtagaaagaatgaatgtgagatacagaaaatgtaatgccgtggtatatgcgtatggaacgatgtagtatcttttatggttccaaaaaaaaaaaaaaaaaaaaaaaaaaaaaaaaaaaaaaaaaaaaaaaaaaaaaaaaaaaaaaaaagaaaaaaaccggcaccgaggcaggagcggcgatccattccacacaactaccactgctcttgccccagcccgccgaaggagttgccaaatctgctccggtcacaggagctccgactccaagccctctccaatggcggttaaggtctacgtcgtgtactattccatgtatggacatgttggcaaactagctgaagagatccagaaaggtgcctcgtctgt

SEQ ID NO: 62767 - DNA, 708 bp, Zea mays
  Clone ID: MRT4577_157244C.1
ccctcctcgagttttttttttttttttttttttttttttttttttttttttttttttttttttttttttttttttttggcccccgttaatttggaaaaaatttttaaaaaaaaaaaaaaaaccaagggttttttcacccaaaaaaccaggaacccccggccagtttggcggccgtggctttggggcacaaaaaaccccgggggataaaaaacccaaccggttccaaaaggctggttttttaaacgggaagggggggtttttaaggctaacccccccccaggtcccccgggaccccaaaggggggttggcctcccttaaaaaatttccaaggggcaaaaaaagctatttttttttttttgggcccccatggcccccaaaactttttgttaagctaaagggccttgggggccccaaatgccccccagggataaaaacccatagcgttgtaaagggccccccggccccccccagaaaaatcaaagggcctgggccataacccaaatgggaccttttgggggccggccccaaaacccatgggggtttggccatggccaaaaaaatcgggatttgggggtttttaaacatcacccggaacatggaaaatatcccccctttcccaaaatcttttaaaaaaaagcttcccccggttaaaacccgggggtttaaaaaaaccctgcccccggttaaggccgggtttttgtggggggg

SEQ ID NO: 62768 - DNA, 376 bp, Zea mays
  Clone ID: MRT4577_157245C.1
atatttattttttttttttattttttttttttgtttggttaatttatcttacgggtggttctttaatttttttttaccgcgaaaactgaaaacaaactcagtttcccttttaaaaaccctcataaaaaaaattacccgcgggaaccaaccaactccccgatgatcccaaagaaccccaaactacgaacccccacacattttaacattttcagaaggggccccaaacaaaaaaaaaccaatcctaaagccctttcccaacgaattcgggggcaacccctgatgcccaaaaccatgggggggaccccatcgcaggggacaaccgaaacctgtaggattggtacaaaaaacccaacagggacattaaaaaatttttatt

SEQ ID NO: 62769 - DNA, 456 bp, Zea mays
  Clone ID: MRT4577_157246C.1
ggcgctcgaggccggccgggtcgagacagcgtctggggcgcggggcagtgtacacgtcgccgcccccgcaggcgagcctctcccgcgctgacaccagcagcagcagagcatcatcatcgacatcatttagtatagtactactacatctcctctatctgtccgctatccgatctgccacgaccgcgctaatcaatcaagcacgctcggctcgccgccatcgtatcatagcggcgacgccaacctcatctccatttaacaaccccccctgtttcctcataggagagggcggggcgcgcgcgcgagcgagttcgttcccgtggagaagaagcgatcgagcggaccatcggacggacggcagccgggacgcggtgccgtgtgatcgtatggccctcccacccatcgatcgaggatacgaggatgctgatcctggagctgagcatctgatcgctacccttg

SEQ ID NO: 62770 - DNA, 177 bp, Zea mays
  unsure (1)..(177): unsure at all n locations
  Clone ID: MRT4577_157247C.1
cgcggcgcctactgctcgccgccggtgttcgacaatggcatgacgagcctgctgtaagttcgcgtacatacgtgctgatactagcagctagcttgcgtgctaataatgtgcgctgtcgccgtcgntgcgtcgcgtcacacgtaacgtacgtcgtggcagcggctatactcaatgctc

SEQ ID NO: 62771 - DNA, 793 bp, Zea mays
  Clone ID: MRT4577_157248C.1
ggccgcttttttttttttttttttcgcaggaagaagacttcgcgctttatatgacaacaaaaaatcatcccctcaaggatgtaccccatgtcccattttttgtttttgcgtgctatgcttccgacgatcatatcactcactatttccaatttacaacagtgctaaatttgtggctcccccagttgaacccatggcgatataagtttaaagataaactaggtcaatttttttttttttttttttttttttttttttttttttttttttttttttttttttttttttttgttttttttgatcgaatctcaggagtgaacattctgatttcggtgtagtagtggataaggtgatcaatcactcaagaaaaaaaaaacaagaaatgcatccacgggataatcaaaccaatcgtaatcaagaaaagaaaagacaccaacaggaaagaagaaaaagcaaagccattcaattattcatgatccaagcgtggcaacaaaccatgatggcccctccggcaccggcaccggcaccggcagcctggtcatcatcaggtcacccgtcctactccgtgtccatgtggtccacgacgaaccggcgcacgatgcggacgagctcgtcggcgcgctccgaccaggggtccaccacgaagaagccgtggtcggcgccggcgacctccacgtactccacctccttgccccactcctccttcatccgccgcgcgtactgcgcgttccggtccctcagcacgtcgcgcccgccggccaccaccagcacgggggccatctccacggcctccagc

SEQ ID NO: 62772 - DNA, 137 bp, Zea mays
  Clone ID: MRT4577_157249C.1
caacaaacttatttatcgccttgcatcggccgacggccctacatgcatcgtaccagctagcaacgacgagacgctagcaagatggggtagacgatcattattcgtgcgcgcacgttctgatttcactatggagcgcc

SEQ ID NO: 62773 - DNA, 282 bp, Zea mays
  Clone ID: MRT4577_15724C.1
ccccgcgtccgccccgcgtcgccagcgtcgggagcgtgggcggagcgtgggggatgcgtgtaggtagctttttagagctggttatatggtactggtacttggtgtcgttcttgatttgtttttagtgtggttttttctggtttgattgatttactgtttatggtgatgttgtgttactgctgatgtttgttgttgatggtggtgaaatgtttgtggttggtatttgagatgtgattatgtagttgtatgttgagcttgttgatgctttgtgtgttatgtttt

SEQ ID NO: 62774 - DNA, 473 bp, Zea mays
  Clone ID: MRT4577_157250C.1
tgcactcgacacagataactaggacagcggctctacgtggatctctatgaacactgaaacctataggctgcgagtcatacattgcctgcattcagtcatcacactgtaggtatatgagggcgagagatttgatatgacccacacgactgcggatgactgatatgataagcctcacgaatattacgggaatattaggatgacggataccaaggcatacgatactatacctacgataggagacctgcgatcactttgaacgagcgacggcttctccagataggtcaaaaaacacacaacgcatatccattattgctggaggccataggccacaaacttaatgcgaaaggacaggtctagccagcagagcccaagaaaagacaggccgctacatcagtgctttatcccaaccttgtacagccaactgcggtctacaagtttgggtaaatgcaatcatcgagccgactttctgttct

SEQ ID NO: 62775 - DNA, 410 bp, Zea mays
  Clone ID: MRT4577_157251C.1
ggccgggacccggggtccccgactccgcagtccgcaggaccggtcactcggcacgcaggctagcagcacagcagcagccagagccatcccctctcctcgctttcgcttcgcttcctcggcgccgattcctcctcctcctcctccaccctcgtccgtccccttccggcgcgcgagctcgcccgagatggcgaacgccagatcgggtgtcgctgtgaacgatgagcgcacgctgacacccggcgagctgcagttgaagaggctgcaccgcttcataactttcatgatggaccacacgtccacggccaccgccgtggaccaggcccgggatcgcgctcccagctacgatgactccgcccatagcgtgcctgagaacgactgccgatccgtgacctatgacctcgacattgcta

SEQ ID NO: 62776 - DNA, 529 bp, Zea mays
  Clone ID: MRT4577_157252C.1
cggctccccgaggatagcatagcagcagcactcacaatagcaaaaaccaccatccgtcgtcgccaaccgtagcaagaacatcaccaccgcccaacggcaagaaagaccccgcctgcaccaagatgtgcaaccaggcgtgcggctccacggatcagggcgccggtgccgccggcgccgcgccggcttgatcgcccagcgcattcatcgcttcagctcgatataatcgctgctccgtcagcaacccacatatgattcgatcaattttcctcctctaatttctcgaccccgtcgaattttttttcctttctattcttctactatactactactatctgtttgtcgcgttgatttcttctcatacatcgatcgaggatcgactcatcgttttgtaattcctgcaatttgtaagtgtaatgacctctatgattcagtcttccttttaaactgcaaaaaaaaaaaaaaaaaaaaaaaaaaaaaaaaggttagatacattgactttctattcaaaaaaaaaaaaaaaaaagcggcc

SEQ ID NO: 62777 - DNA, 295 bp, Zea mays
  Clone ID: MRT4577_157253C.1
atggacattaagttgatggcatctaggaagtacggtgtcaccattcagcccatagtgctgggagaactaaaacccttgtgggtaggcaaaaacgtgctgattgtcacaacagctatgtctgtgaatggttacatgaattatctggtgtacaaatgaggagagcatagagctgatgcttggtggactggaagatattactgattgaatatactatataccttgatgaatgatattgacatgttggtgtcttaagaagcagagttcaatgcagcttgcctgcccaatggaacaaact

SEQ ID NO: 62778 - DNA, 404 bp, Zea mays
  Clone ID: MRT4577_157254C.1
ccaaaaaaaggggttgttggggaccgccaaaagggaaaaagttttacccaaaaatcgccccaacattggaacgcattttttgtttggggcaagtgaaatccaatgtttaacaaaccaactgaactttttttgattttccattttaaaagtattgggggccaaaaagggactagcctttttttgggcagaaacatttgttagctttggaatcgaatctttttggtcatgggaaacacaaatgccaatttttgcaaacaagatcaagggtttgggattaactgtaactggttaagtttttaccaagtcttttcttgcccctataatcaactaaattctttaaaacttgggttaccgttctttgaccctttttgggaaaacaaaatttgtttaagcggggcaacttg

SEQ ID NO: 62779 - DNA, 645 bp, Zea mays
  Clone ID: MRT4577_157255C.1
ccggccgggagaaaaaagaagacattgccaaggctccccaaagatagcatagcagcagcactcacaatagcaaaaaccaccatccgtcgtcgccaaccgtagcaagaacatcaccaccgcccagcaataatggcgcagagcatgaggattgtggcgctggccctggtggccctgctggtggtggcggcggcggcgcccgtggccaccgcgtacggctgctacgacgactgctacgagcgctgcgccaacggcaagaaagaccccgcctgcaccaagatgtgcaaccaggcgtgcggctccacggatcagggcgccggtgccgccggcgccgcgccggcttgatcgcccagcgcattcatcgcttcagctcgatataatcgctgctccgtcagcaacccacatatgattcgatcaattttcctcctctaatttctcgaccccgtcgaatttttttcctttctattcttctactatactactactatctgtttgtcgcgttgatttcttctcatacatcgatcgaggatcgactcatcgttttgtaattcctgcaatttgtaagtgtaatgacctatatgatttagtcttcctttcaaaaaaaaaaaaaaaaaatttgcggcctatgaaaaaaaaaaatttgcggcc

SEQ ID NO: 62780 - DNA, 282 bp, Zea mays
  Clone ID: MRT4577_157256C.1
aaaaaaccaattttaattaacattttttttttcaaaaaaaaatttgaattttttacaaaattaaaataacaattctttacattgtcccctaaataaaccaccaagccaaattttttttattccacttcatttaaatttttttttaaccataccccaatttttaagaaacttttaaaatctcacccccgaaaaatgatttcctgtatttcctctggaaacattataattttgacatccccttctttttttataaagctcctttcgtactttaggccattaaaa

SEQ ID NO: 62781 - DNA, 853 bp, Zea mays
  Clone ID: MRT4577_157257C.1
ccctactacactcctaagggcgattgggtcccctcgaggccggccgggacgacattgccaaggctccccaaagatagcatagcagcagcactcacaatagcaaaaaccaccatccgtcgtcgccaaccgtagcaaggagccaaggacatcaccaccgcccagcaataatggcgcagagcatgaggattgtggcgctggccttggtggccctgctggtggtggcggcggcggcgcccgtggccaccgcgtacggctgctacgacgactgctacgagcgctgcgccaacggcaagaaagaccccgcctgcaccaagatgtgcaaccaggcgtgcggctccacggaccagggcgccggtgccgccggcgccgcgccggcttgatcgcccagcgcattcatcgcttcagctcgatataatcgctgctccgtcagcaacccacatatgattcgatcaatcttcctcctctaatttctcgaccccgtcgaatttttttcctttctattcttctactatactactattatctgtttgtcgcgttgatgtcatctcatacatcgatcgaggatcgactcatcgttttgtaattcctgcaatttgtaagtgtaatgacctctacctatatgattcagtcttccttttcaaaaaaaaaaaactgctgtgtcgaccttgtttcatttacaagtgtaatgatgatgccgcacctccaatcccccacccgtatctggggatcacaaggacgcctgtttgcggcggggggaacggcacctccacgagcccttcgagcattaggatgacgctcctcatgtcgggcctcgcctggggctccgcctgcgcgcaccacactgccaccttaa

SEQ ID NO: 62782 - DNA, 310 bp, Zea mays
  Clone ID: MRT4577_157258C.1
cctctcgctagacgtcttcccactatcccaagtctctgtcggccggcacgccgtaggcgagatggaactcgacctggcttccgcgccagccgcccgcagtggcctccgcacgacagaacgcctcggcaggcgaggctaccgactcctgctcccatccgacggctacgccgccgctcggcaactgtccgacccaccgccatatgcgtggctccatccagggatgtccgttcgaagctcttggtgtctgcgcgacgattgcacctcgctgaccgctgcacagcagaggccgcgcgtcagccacggctgtacg

SEQ ID NO: 62783 - DNA, 260 bp, Zea mays
  Clone ID: MRT4577_157259C.1
agcgattagcgagtagctcgcatcgctcgataacgatgcgctcgcaagagtgctctacgcgcgagactgagctacgatctccgcgggagatgcgtacagcgcacggcatactggacgatctcgcgagagcacctatctgtgagtgtgagagtctcagtgcgtcataaccactagtggaagagtaacgagaacgcagatcgatcaggtcgcagtgtcctcaatagtcactacaggttcagcgtatctagcgatctgtgatc

SEQ ID NO: 62784 - DNA, 270 bp, Zea mays
  unsure (1)..(270): unsure at all n locations
  Clone ID: MRT4577_15725C.1
gcacccgctgtccctttcggctctcctcctaccgccttcgccgtggcttgacacccgagccctgctctgcccctgggttcgcctccatcctccgtcccccaccgccgcgcctttcctatntctgacgcagaacaaaacacctcggcttatctgttttgtgttgccttccggctacattcctccttctctccctctcatcttccctccgtatctccacaanttataccacatactggcgcaaccccctccgggagcccctacccctcgttc

SEQ ID NO: 62785 - DNA, 217 bp, Zea mays
  Clone ID: MRT4577_157260C.1
tcgcgatctagaactagtcaaaaaaaaaaaaaaaaaaaaaaaaaaaaaaaaaaaaaaaaaaaaaaaaaaaacggacgcgtggaacggacgcataggacggacagggtgggaacgacccggtgaattccgcgaccgcgtgccggcgggccgtaccatcctttcctttgagtggggtcgtgttgccagctctgtcgtttgcatgggcgttagttgcctg

SEQ ID NO: 62786 - DNA, 141 bp, Zea mays
  Clone ID: MRT4577_157261C.1
ttcttgggctcgaggtgacgacaaggtcgggggctgatcctggcagagccacccaggatgtgggacggagggtgactaatgcgtgccctcctcctgggccggataagaaagctcccgatgccgcaccctaaccttgccaac

SEQ ID NO: 62787 - DNA, 274 bp, Zea mays
  Clone ID: MRT4577_157262C.1
ccaacaaccaaacaacaaggcgtaccattatattatccctccgtcctactaaaagcgctcatagagagcgcaacaaatgctttcattattccacaatgctcacttgctccaagttctattattacacagtccctcccaccacttactccaaaggctttttaacacccatctcgtcaagcctatcttctacaacatgcaattgctgccagcgtctcacatcaaccaattacccaatttcaacatcaaatacttggctcatttaacaatttcaaat

SEQ ID NO: 62788 - DNA, 144 bp, Zea mays
  Clone ID: MRT4577_157263C.1
acctagtgctgcgccagctagagatcagaggactgtgtgtgcttaccatctatctctgaacgcagatcatagacatgtatataggtctctctcctaaggctgaaaaggtccgaaatgttcgactgattatggatcgaaattcac

SEQ ID NO: 62789 - DNA, 174 bp, Zea mays
  Clone ID: MRT4577_157264C.1
agatgaaacgatgcagatgtcccactcggtttttacgatacaagtacacgggcttcttccttagtaaccaatttacagggctgtgcccgccgttctgttgttcttcgcctgtgggtagggtattagatttcttgatcttgtctccacgcggttcctgtttttcgtacttttttg

SEQ ID NO: 62790 - DNA, 668 bp, Zea mays
  Clone ID: MRT4577_157265C.1
gcaccctcccactcccctcccctcccctcccctcccctactctctcggaagcggcggcgccggggccgcagcggcgaggagccagccatggcggcgcacgcgacgctccccttctcctgctcctccacgctgcagaccctgacccgcaccctctcctcgcgcggggcccaccagctccgcgggggcttcctccgcctaccctccctcgcggggctcccgaggctggcccacccctgccgccgccacatctcggcggccgctgcggcggcgcccactggaggctgggcaagggctggttcagaccacaaccttgacgcacacggaggcctatcaagcacataagagggaggtgaagctgaatcttggggttggtgcctataggacagagaagctgctagcctacctactcaaggtggactagaaggccgacatgctgatgatgcagaaaggggaaaacacagaggatcttcccatggcaggtttagccgagtttaataaagcaacaggagagctattgcttggacctgataaccctgatattaatcaaggactgggttgctacacttcagaatctctccggcactggatcactgcgtatcgctgcagcattcatacaaagaaactaacctggagctaaagaggtgatatggtcggctacctggggtaac

SEQ ID NO: 62791 - DNA, 306 bp, Zea mays
  Clone ID: MRT4577_157266C.1
ggggggaacatgatatttattacatttatacctttgccttggaaaagaacgataattccagtgtgatgcgtcgatgattacaggattgcgtgaacagtaaaggagtattgttcatttatttataggcatagggcgtagcctatgagaaattacaatcatgccccttacaaaagattacaattatgactcagacccttatggactaagaagtcatttcatctttaagttggttcgaacctttcttttcagatacgttacattaccaaagctttatgagcgggagcttcgattctacatttaaacggg

SEQ ID NO: 62792 - DNA, 382 bp, Zea mays
  Clone ID: MRT4577_157267C.1
gcgctgatcggactgggattgaccgtcgtttatagatcaacacacctttcacggacccacgcgagccttgatgcctgtgatgccatgaatcggctggctgatcatgtccaggatatggagctacttagcccattctaacttgacactgatatagcgacgcgttatgactatgcgactggattcataacgaccagagtagagcttgataaattgcctgttcaatcattgcatgtggtaacgtatcagtgtataatgcatctcatactgcgacaaaacctcagctgacttgaagcaagatgtagaagaacttaggccgggcgatctatataccctagcttaggctccgaacgttcgacggcatagcaatcctatagtgtcacct

SEQ ID NO: 62793 - DNA, 419 bp, Zea mays
  Clone ID: MRT4577_157268C.1
atgctaacgaacgtctaaagtactctggataaatcaaagaccgcatatttctccatgggagaatggcttctcatacggggttggctagcacctcctgctatagaaaagaacctataacaaatccctggacagtctcctttcagacgcatttattcattctccagaggacagctgctgacctgcaattgactgcagcagcgctatgagcttacccttgccgccagtgtaaaagtgcagaagacccatgcgcaggaagcgctcgccatagtgaacatatctgcatgttagcatccatgatacactggcgctctttaactcattgctggatgcgcgcgcctggcactccttactaaatgcactcagggcgcttgtatcgcggtgaagatggacaccgactacatagagtacgaccctcttgg

SEQ ID NO: 62794 - DNA, 289 bp, Zea mays
  Clone ID: MRT4577_157269C.1
ggaagaaaaagggggttttggatattaacaagggggcagcaagaaacaaaggccaccaccattgtacaaacagggttcatataagcgtactacgccaaataattaggttaacttggctatgcaatgcaacgtgaaacaaaagacacgcatggctttggcagcatgaattaaatcacctacggtcatcccttctcgtttcgaaagacaaggaagttgcctagcaaagcccctgtggttaatggacggggacaaagtaggcggcgtatgcccatgccatggtgaagattgg

SEQ ID NO: 62795 - DNA, 105 bp, Zea mays
  Clone ID: MRT4577_15726C.1
gacaacatccaacgcagcagtcatattttcaacaacgtcgcagcatgcgaggggctttgctcctagtgccacctgcaagcactgcaacagccaccattttacagc

SEQ ID NO: 62796 - DNA, 281 bp, Zea mays
  Clone ID: MRT4577_157270C.1
tttttctttttttttttattctttttcggggggaacaaaaggcattaatctcggtagggtttgtttgaagccgtggacaccaaaatttcacggcgtatttttaatgggattgcctcaccccaagaaaatccatctgttaccccaaaggacgcttaagatgacacaccaccggcgcggccctcagttcactgatggatagggggaactggcacttgctgaactaactgccatacatcgttgagacaatgtttggaaagccgttaaaatggagtgctgtaagc

SEQ ID NO: 62797 - DNA, 371 bp, Zea mays
  Clone ID: MRT4577_157271C.1
tatggggcggccttggtttttttttttttttttccgggttaccccgtaaccaatgcctttccaaatgggaccgtcgttccatatataagcggtgccaggctattttccgaccttaaccaaactttaatatccttttttaccacctacgtttaaagaacattttcaaacctggttaaggtattataccaaacaaacggttaatttaaacaggtttggaccactaaaaaaaggcaaccagttgactggggggccctttcctggtccccaaaaatactttggcgaaatcaagggaccttgcggggaaggccctaacgagggggaaccttgggctcccacccaaggagctttttcgcccggttgatgtaaggctt

SEQ ID NO: 62798 - DNA, 584 bp, Zea mays
  Clone ID: MRT4577_157272C.1
atctcatctgttccttcccctccacgatctcaccaatgccagcgacctctcacagtcgccggaatgagatgaccttgatcctgatgctcctcgaatcggtacagatctcttctcatacgcagagatcgtcattgcgtactctcattatttatttctacctcaagctgttcaatctcgcgatggtgctgagctttgttgttgtaaaacactacttagatctcacctcgacgctattcttcgaacacctcaggcactacctcctctctgcccttgagatgagactcgctttggagggctcgagcatgagtcacaactgttcccaagatctttatggtctgcatgcccctgtcttctgaggccggaaccatacatgtggatgttgttggacacattgttaggagtgccattcatgaaactgacatacattgagagaggtaataatgagattgtcctgtgcgtgcccgagcaccctgttgatcggcacaccaatgagcacctctgcatctacgataagatgacctgccttcttatccatccgaccttgatagtcagagtgagcctgtcaccatttgagatttagcaat

SEQ ID NO: 62799 - DNA, 567 bp, Zea mays
  Clone ID: MRT4577_157273C.1
tgggacctcgagccggccgggagactaccagacctagctacgattctctcctcccagtgatctagtccttactccataacatgacctatatcactagatagtactctcgggcgaatcgccggactcttatgaaagcggcgtcgatcctcctcggcaagcgcggctctgctcgcgtgctagatgctgcctggactttccatcctgtcggccagctccttcgcctccgccaagtggccacacacatttcgacattgatgagctccagcacgacgactcactccgcttgcaccaccaggcaggctgcatgacgcatgagctcgagcgcaagggccagctaacgcgcggcagcagcagctggagtgcccgcgctgccacaccaacatgaccaagttctggtactacaacaactacagcacggcgcagccgcgccacttctgccgcgcgtgccgccgctactggacgcacgggggcacgctgcgcgacgtccccgtcggcggcgcctcgcaccgcgccgccactggcagggtaggcaagcggcgcaggaagctccgccgagacctcataccc

SEQ ID NO: 62800 - DNA, 1434 bp, Zea mays
  Clone ID: MRT4577_157274C.1
ttttttttttttttttttgcgggcgtgagaaggggaaacatttcctgaagcaatgcgtatgcgtgcacaaagatttggagctcgggatcaacaatggaaacgcgtgtcagtacttaggcaagaaaaaatgatcctcgtccagtacagtgtgccatgaatcaaaattcagcgttacaagatgtgtatacatgcatgcatgcatgcttgatcgatccagcagtcgatcgtcggatcagtagtagtacgccggcagccagtccttgccgttgatgaagtcgatggtgaggtacttggccgcgtcgtcgggagagaacctccgcgaccatggcacgcggttcgtcacgtcagcgcccggcccagtgcagttgaactccgcgagcgtcaccttgtcggtgctgccgctgtagcctatggttgtccagccggccgggtggatggtcttggagaggtaggtgtctgcgaagatgacgcgcgagtcgggcgcggtgacgcggcccaggtacacctccccgacgccgtacaccttgcccttgaggaagacgaagccgctgctgtcctcctcctgccgcacctgcgcggtgatggagccgcggatctccgtccgccggtcaggcctcacgaagatctcggggcactggaagatggactggccgctgccgaagatgaagtcgatgttgccctggatgtagcagctctcgtagtagtggcggccggcgctgtcgaacagcccgtggtgggggctgtagaacgcgcagtggtagaaggccaccttgtcgccggccaccatcgccgccacggaacggatctccgggtcgttcaccaggccgacgcgggcgctgttcctgaagctgacgccgaagacgatgacgttgtccgagttcacggtgaacgcggcggactcggcgttgtcggaagaggcggactcgtgggagatggaggtccggcctttgccgttgcccctcacgaagatgaagggcttgttctccggtatcacaactttgcccctgtgcaggccagagcggaggtggacgatgacccactcggcgttgccggcgggcaccgcgtcgatggcggactgcacggtcttgaactcctcgtccggccccacgatcagcgtcttcttcgcctggatcttctcggtcaggaggggcccgttcacgacgtcgtcgctcttcttggcgagcttcgacttggcgagcgcgacgccgggcaccgtggtcagcacggccgccgcggcgaacaggaaggtgaggaggaggcgcggccgggccatcgtcgtcctggtcctggcttctcgatcgcgcgtacgtgcgattctgcgacgacagcttagatggtctcgaggagacaaattaagcagcggatgcaccggaactcttaacgcagcgctctatttctggccgctcccggccggcctcgaggaacccaatcgcc

SEQ ID NO: 62801 - DNA, 842 bp, Zea mays
  unsure (1)..(842): unsure at all n locations
  Clone ID: MRT4577_157275C.1
ccggccgggacctccttccccgccccggtttctacctcctcacgacgcgaggaaccgatcaggccactgccggacccgccggagatccgctcagcccgcgctattccgatccgaaacacctcgtcggatctccagggatctgacggaggaccagcgcgtcggctgctgacccggcggggcacgcgcgcacgccagccatggcgcgtggtggcggaggcgggtgctgcccgccgatggatctgatgcggtcggaggcgatgcagctggtgcaggtcatcatacccgctgagtctgcgcacctcacagtctcctatctcggcgacctcggcctcctccagttcaaagaccttaatgcagagaagagcccgtttcaacgtacatatgctgcccagatcaaaaggtgtagtgaaatggctcgtaaattgaggttttttaaggagcagatgtcaaaagctgacataggtcctacacaattaaatgaaactcatctggattttgatgacttggagataaagcttggagaactggaagctgagctaactgaagtcaatgcaaacaatgaaaagttactgaggacctacaatgagctattagagtaccatactgttctccaaaaggctggtgattttttctattcagctcaaagaactgctgcatcacaacaaagggaattggaggcaaatctatctggtcaaacttcactggagagccctctgttggaacaggagatgtcaactgatccatcaaaacaagtgaagcttggttcattgagtggncttgttccaaaggaaaaggcaatggctttcgaacggatcttattccgtgncacaaggggtaacatt

SEQ ID NO: 62802 - DNA, 271 bp, Zea mays
  Clone ID: MRT4577_157276C.1
aggtcaatcatcgggtggttccaaaaaaacaatgagaagggctttgggggtccaaagctcctgatgtgaaaggaaaagggggggctgccgttctgtactatcctgggtttgaaccggaattttgttgggttgggctcgcgcttgtgacttgcgcagtacaacaaaggggaaactggaacaggggaaaaaacgttccaaattggggcaaatttggggcaacgcaaccaaacgtgggttttgggggcacattgggattgggggatcaacaccg

SEQ ID NO: 62803 - DNA, 479 bp, Zea mays
  Clone ID: MRT4577_157277C.1
cacgcctgcatgagccgggccgcatacagggtcgacccagcgttcgggagagcccaggctggtggaatgctgagcacaaggctcaaccatgtactgtgacgcggcaacatatgccaatcagagcttgcgtgatacagattaactgttcgctcttgggggggtgatcaaaagcatggtcaaaaaaggcgctaaacaaaacacccgagctgtgctcccaacatcattgcttggaattacaccataaaactgatgagtacctaccgactggtcatgttattgcattgaacggaataggccagaaccagcataacactcttcaacatgcctaaggcgggcacacatcgtaagcaaaaacaatatcctatgtgcacaatcgcacggaagggagcctactgagtatgctatcatatgcacatgtccccaagcacaaacacgatggaagccctgacacacggcatggatggccctctgcagttgtc

SEQ ID NO: 62804 - DNA, 334 bp, Zea mays
  unsure (1)..(334): unsure at all n locations
  Clone ID: MRT4577_157278C.1
ataatattgtttttttttgagaaatttaaagaaaaaaaaaaaaaaaagaataagggggaaaagaaggaaatgaaacatgngaaggaacttaggggctctaaactctgaccctggggaggggaaaaaaaataaagttcctagtatttagaaaaagcaaaaaaagaaactaccgggccatttgagagaaaaaggaattggtataaaaaaattacaaaaaaactaaaatccgtaggccaataaaaaaagaaagtagcgccaccagaaaaaaaaaaaaaaactgaattgaaggctttcattaaaaaaaaatgagcacataccttaatttttacatttg

SEQ ID NO: 62805 - DNA, 402 bp, Zea mays
  Clone ID: MRT4577_157279C.1
gatgttaatcttccaccagtttctttgacgacgaaaggcccttctcttaccaattttggggggatgttaaccaaccccttttttgaaaaaaaaaagaccctttctagggggacgggcttacgataagtactctgaaaaccgtttttttttaaaaaaaagccaaactggttttttgcaaaacaaacacacgccgagggaatacttaaagggggaaaaaataaacttggccgacgaaagaaacacttaacagtttgagcggcagcaaacctcgtggaaacaactatgactcaaaaggttgtggaaaaatcaggtgtttttgatttggaaataccgccaaacctgcggaaaaattactgggcggggaccccccccgatttttggggctgagcacgcattggaatg

SEQ ID NO: 62806 - DNA, 327 bp, Zea mays
  unsure (1)..(327): unsure at all n locations
  Clone ID: MRT4577_15727C.1
ccggccgggctagtctcgagcacagacaggccgccggtcccttctctccactcccactactcgcgctcgccgctggatcctccacccgccgcggcgccaggccggagatccagcagctgggaccacggaggtcggccggttgctccgttcccgctggtggttgctcttcggccgctggagatcggcagacggaagcagttgacgccacagggcttcgtgctgccgaattccccagatattctgggggggttcaanccgaacccccattgcccgacaaacactggggcttgaaaattgggccttaaaagggcttccaaggggagcccc

SEQ ID NO: 62807 - DNA, 539 bp, Zea mays
  Clone ID: MRT4577_157280C.1
gggaaaccccgggggtttttttccctgggttaaaaaaaaaatgggaggcaatacaggaccaaccaataccgggctttttcccggggggtattcccaccttttaaaaacaaacaaaagggggcctaagggcccccaaaaacccccaaagcaaaggccccctgggccaaaaaattcataagggcgttgcccccggcccgggaagcccaggcaaccccccaaggctttcgggggatcccccaaagcttttgggcctttcccggaacgggggcccccgggaaaagggggttttcaaaccaccccgggcccttgttccacctccagaccccccccgattgggggggggggggggcgttaacccccgggcccagcctttggggggaccccccccccgacaaaaaaccctgggggacaaacttttggaccggggggaaaaccaccccaaacagggggagggcccccgggaacacccccgggggggggagcccccccgggaagagccacccaaacgggatccccctccccttggggcacccccgggg

SEQ ID NO: 62808 - DNA, 348 bp, Zea mays
  Clone ID: MRT4577_157281C.1
gtgacctcctctctcaagaaggcacatacggagtgctcagtgggcgaggactgcttcaggtccaatatttggtagggatgtccgacacataaacttgcaatttcatatttctgcgaggacacgatgatccagctgccattctttctgtcgggaaggaacgtcctgatagagtcccactctgccatggtgggcaggtcttccaagacaacaaggtacctgttcttgtcaactagctgaacgaactcgctgaggagatccccctgggtggcaggcgcattcatgctaagtaggacatcaacaccgatgatcccttcttggctttcttggcaactggttgcataaaagtga

SEQ ID NO: 62809 - DNA, 509 bp, Zea mays
  Clone ID: MRT4577_157282C.1
gtccggaattcccgggtcgacccacgcgtccgaaaacggagaaagagaaaaagcactcattcttttactggttttgatttgtatcagttaagatctaatcatctaaaatctcgatgtgcatgtttattaagtatacaaagttttcaaaagagcaagcaaaagaatcagcaacctgtgagttatgtgaaagtcacttaaacactggcagtagttacttttctagactgtagcacacgtcatggaaagctaaagtgtcttggaagatttctgatgttttggaacttctctgctgggcctctaaccaagacagacttccttgcacaatttaacaacaattttacttccgatggggaatgttttaatagcacaccaaggatgttatgggcaacgactgccaggtgatctgtgagtgtctggtgtgttgtgagcaccttccagtgatttcttttacttttacctattttattaatgaaagcgctttctggtttacattatgggattggtacagg

SEQ ID NO: 62810 - DNA, 313 bp, Zea mays
  unsure (1)..(313): unsure at all n locations
  Clone ID: MRT4577_157283C.1
gactgaaaagtgttatgttaatgttatttgggacggaccaatttttcttntcgattaaaaaaaggatcgggaacccatgtttctactggcttatacaatgccactctacccaaggtggtctcatggcacacaaaaacaaaaaacaaggcagttgttttccatccagacttatgatactggggcagcgtgacacctcccgttgttgggaggcccaccataggttcgcatgcgtttataaccccccactgaaccccagttatgggaccaactatgacgatgctgaacggattccctcttgtgaagagaccccacc

SEQ ID NO: 62811 - DNA, 228 bp, Zea mays
  Clone ID: MRT4577_157284C.1
cgtggtcactaaatcatgaaatccgctcggctaattcatccaacgtcggagcgcgcggtttacgacgctcttggattcctcctcatccatgtttattgcttcgggtcggagggtaccatagctaaaccccacgctaacacatgtaaacagctctcatttctagacgagtactagacggtccgactaaagcatattccactcatgggttctgctgccagggccatcgga

SEQ ID NO: 62812 - DNA, 629 bp, Zea mays
  Clone ID: MRT4577_157285C.1
gcgacaaaataggtggtatactgcatgcccacgtagaccgggcaaacgaacggcactgcatgctacacttttttttacttttctagatatgtttttacctatatatgaacgtataataaaaactgtgtatttaaaaggccaaaacaatccataatttagggagagagcatggacattacatggcataaaaaaatcaacaattagtctatgcacgatctcctccccagtaccaagatagacggacgaataataaaatcgcatgcttccattagggttcaggtaaccttggaatcaaatacacacttcagatagccgtcggatgctgcttccttactgtttgcaatactcaagtcacagcgccatctcaattgccaacatggactaacacaaacatgatccgtggggaaaccatcttaacttgtatgtaacagtccaaatcccccagcacaccaaataatcatatcaatgtaacaggccaaatcccccagcacaccaaataagcatatcaacgtcatattacagcccaaacaacacgagactcccacaggatgtgtgatgctcatgaccttagccttttaagggccctttcaatacgatcatagtttcggtgctcatgcacattctttctt

SEQ ID NO: 62813 - DNA, 161 bp, Zea mays
  Clone ID: MRT4577_157286C.1
tccaagtacctttactgaacaagattttgattacagaataatcaaacaacatcaagagcagcattatcagaagcttcagggcaaatataaaaacaaagagaatacaacagaacactcaactcaacattaacctgatcactcatatcctaacatccctacca

SEQ ID NO: 62814 - DNA, 248 bp, Zea mays
  Clone ID: MRT4577_157287C.1
ctttcccgcgtcctccctcgccttcgccttcgccggccggagatttccaccaccaccgtcgaaccgccccgaccctgctcgcctctcgcgctatggccctgactgtcgtgctcaaggttgtgcatgtcctgtgatgggctgtgttggagctgtctagcgggtcctcggcaagatggaaggcgtcgagtcctacgacgtagacatcatggaacagaaggtcaccgtgaagggcaatgtgacacctgacg

SEQ ID NO: 62815 - DNA, 1155 bp, Zea mays
  Clone ID: MRT4577_157288C.1
cctgccgggagacggacacaacacgaagcccaagtagaaacagactgcacccctttttccaaacgcccctgaacaagacaaggcccagaaaaaattcagcaaacaagcaaaggtacggccaccaccaccggccaggaagcaagctcaaaccctaaccgccggcgacgccagcacgatggcccgctacgaccgcgcgatcaccgtcttctcccccgacggccacctcttccaggtcgagtacgccctggaggccgtccgcaagggcaacgccgccgtcggcgtccgcggcacggacaccgtcgtcctcggtgtggagaagaagtcaacccccaagctccaggactccaggtccgtgcgcaagatcgcgtgcctggacacccacatcgctctggcatgcgcggggctgaaggcggacgcacgcgtgctcatcaaccgcgcgcgggtcgagtgccagagccaccgactcaccgtcgaggaccccgtcaccgtcgagtacatcacccgctacatcgctgggctgcagcagaagtatacacagagtggtggagtccgccctttcggcctctccacactcattgtcggcttcgacccctacaccgacaagccagcgctgtaccagaccgatccttctggtaccttctctgcttggaaggcgaacgccacgggaaggaactccaactctatgcgtgagtttctggagaagaactacaaggagacctccggcaaggagaccatcaagcttgctattcgtgcacttctagaggttgttgaaagtggtgggaagaacatcgaggttgcagtgatgacaaagaaggatggtctccgggaacttgaggaggctgagattgatgaatatgttgctgagatagaggcagagaaggctgcagctgaggctgcaaagaagggtggtcctagggacacctagtccctgtattgtggtattcctccctttgtgtgtcttgtttttatgttccatagcaccatcttaattgttttagaagaaggatgcttatatggctgtggctgccttgtgacttgtgtgggtctgtgggctgcggggtggttctaaagctctgcagccccgagtgtttatttattaattattgttgaggttgagagaagagggatgacaaaaaaaaaaaaaaaaaagcggcc

SEQ ID NO: 62816 - DNA, 409 bp, Zea mays
  unsure (1)..(409): unsure at all n locations
  Clone ID: MRT4577_157289C.1
acgcgacaancnnngcccgtcaatggctcacnnaagctgcctatagcttgccctgtctnntcccccataccccttccatncaatgtagtggggtggggtggtnngtgaagaacccagctcgttcaaccattatagggcttcaacaaggcaagtcgcgagcaaggcannacatacgctttatgcgcgcctttggttggtgttcaacccaatcgncccagcccgtatcgtttgggtggcagtngcattgggtaccaanaaccatcaggggcnaccaacagctggcanngcaactcgtggctgacctgtgggatcaaccaagttagcctctgggcaannacctttcgtccctaccctctcagcaaccaacaattttctttccatgtcaacccaactggtctacactggaacc

SEQ ID NO: 62817 - DNA, 327 bp, Zea mays
  unsure (1)..(327): unsure at all n locations
  Clone ID: MRT4577_15728C.1
actgtaatacgaccaaacctggacagtacattcaatgttggagcannnttggggacgaattaaccccgtgttgcctattgtataatctacctcaaaaaaattcttacaactgcactcacaattgcaccaacataaattggcctggcaaattcacgttcacacatattgttcactacccatgtcttcttcaaacagtttgtcagtgtcaatacattattctaatacggcctctaatatccccatgactatatattcgtctatatttcccatacacaggagtccaatataatggcctttaatccacttcacgacacattcacaacattt

SEQ ID NO: 62818 - DNA, 1709 bp, Zea mays
  Clone ID: MRT4577_157290C.1
cattgggtacctcgaggccggccgggacaagagcctttcgctgcatcaacacctgccgactgctgcaggcaagtaaaggtggatttgatggaacagcttgcaaggcatttcataaggccccttactaaggatcaaatggaggcaattatggagttggcaattcagggaaaggagaaggaagggaccaagaagaagggcagaaaggtggcacctctcaaggctcctttcatagaggctgctgagaggatctgagtgatgtttttagatcttgtgtgggtcggtctagtgcagaatgttatctcgcatgtgtaatagtctgtgggtcacccaactacttttgatgactgctttgggtagcaggttgtgggattgtcagcagtgttttttcttttggcttgctctgtcggtgtttctatctgtcattatttcaggcgtgggatgcttgcttttcccaactagcaatgtgctgttgtcgctggttgtctggtcaggtcctgtcttgtgtggctctacttgggcatgtaggggaactacttttgattaatgaatgccaactgttgtattttgtcaaaaaaaaaaaaaaaaaaaaaagcaaacaagcaaaaggcacgaccaccaccgccggccgggaagcaagctcaaaccctaatcgccgtccgccggcgacgccagcacgatggcccgctacgaccgcgccatcaccgttttctcccccgacggccacctcttccaggtggagtacgctctcgaggccgtccgcaagggcaacgccgccgtgggcgtccgcggcacggacaccgtcgtcctcggcgtcgagaagaagtccacacccaagctccaggactccagtttccgtctccctaggtccgtgcgcaagatcgcgtgcctagacactcacatagctctggcgtgcgcggggctgaaggcggacgcgcgcgtgctcatcaaccgcgcgcgggtcgagtgccagagccaccgactcaccgtcgaggaccccgtcaccgtcgagtacatcacccgctacatcgctgggctgcagcagaagtatacgcagagtggtggagtccgccccttcggcctttccaccctcattgtcggcttcgacccctacaccgacaagccagcgctgtaccagaccgatccatccggtaccttctctgcttggaaggccaatgccacgggaaggaactccaactctatgcgtgagttcctggagaagaactacaaggagacctccggcaaggagaccatcaaacttgctatccgtgcacttctagaggttgttgaaagtggtgggaagaacatcgaggttgcagtgatgacaaagaaggacggtctccgggaactcgaggagtctgagattgatgagtacgttgccgagatcgaggcagagaaggctgcagctgaggctgcaaagaagggtgcctcgaagaacgcctaatttcccgtcttgtgctatggctcccttcaacactgtgtgtgtcccgtttttatgttccatagcaccatcttaactgttctagaaggatgctagatctttaggtgaaactacgcttatatgcctgtgggttaaatgatgtacaatgtgctcgtctacatgccttcttcggaggttttcaatttcgtgtattctgtcatctggacagcgacagttcaaatattcattttacctgattccttgccaaaaaaaaaaaaaaaaaaggccccta

SEQ ID NO: 62819 - DNA, 628 bp, Zea mays
  Clone ID: MRT4577_157291C.1
gggtacctcgaggccggccgggcttttccttcccttcggcgtctctacacggcaacggcgacatcgtagaacccaagcgttcttccctgcagtcagcgagttgagggagaagacgaccatcgtggcacaactgctgtatgagcggctccccatatctacaagcaaatcgctgccctccgcccctcctccgacgctcgcctcgccgtgggacctccgctggcgagccccccaccgccgagggacgtccgctggtgagtcgaccaggtccatcgtcttcctctgctcttctccttcaccatgggttaggcaagcttcctacagtcgctgtggcggcacatcgacaatgggaggctggaccaggaccccagctacgagaccaacctgctgatcgtctcccacgacctcacattggattgaatcttatgccatgtgtgggaagagcatcatagtgatggtgtattgaatcatcactggtttgtttcttcctcaacagtctgtagcatgttcacaatagctactagctagaactagaaatgattcgaaagcaaattcagaaaatgctaaagaaacatatactactatatgtatcttaaggatttagctcgaaaaaaaaaaaaaaaaagcggcc

SEQ ID NO: 62820 - DNA, 322 bp, Zea mays
  Clone ID: MRT4577_157292C.1
caccggactagccatcgactaccagggggggggtcctgaaatggataaggcgggggcaaagaagctcaacgctagtgactatcgtggaattaatgatgtgaggaccacaatcaagaactaagctgatgatgctggagggtctgctcggaaagctggatattcctgaccaccttacaagattataatcctagtcgaaacaccatatacgacagaagatgcccaaaaaggcttgaggcgtaccacggagacctaccccaaagtgaccagaatctttctataagagcaactataccagcaggataatagaaccacttgcattaag

SEQ ID NO: 62821 - DNA, 187 bp, Zea mays
  Clone ID: MRT4577_157293C.1
cggaacttccaggcttgcctgcacaactcttggattgagcaggcagcaacttgcctgggagattaagctggaagaagacatgtataagggaggaaaagctgaccagcaagaagaacgtcggagacaaaagcagatgaaggttctgaagaaggagctgcgccacctgctgtcccagccactgtttacg

SEQ ID NO: 62822 - DNA, 390 bp, Zea mays
  unsure (1)..(390): unsure at all n locations
  Clone ID: MRT4577_157294C.1
tacccaacataacaaaccgactaaaaaaagcaagagaatacacatataaaacagaaaaaaacctaaaaaaaaagaaatagctcaacaatggctctggattatgcctggaaaattttattgcttggagctctttctcagtctatttgttggttttctcctgtgcgctccaggtcttgttactcccttgcaccgccgtggcttgggaggacccctggccgttgcttgcgggtgtggtgcccttgttgtcgccgctggcgtggtcctggttgctgcctccgctcctgtgtttgtccgggttgccacccagttgggtngtcgtcctttttaccgtggcgctgcttgggtgtccctctttggnagctgtgtggcttgcccgctttgccttttttt

SEQ ID NO: 62823 - DNA, 517 bp, Zea mays
  Clone ID: MRT4577_157296C.1
ggaaggagagaagcaaggagagcgtgccgagtcgcaaggattggcgggccacaggaagatagttggatgttgaggaccgtgaaggctgagctcacagatccccgtcgggcgatgggcacgctacattgaagaagggcacggtacgcgcagggtggcgggaccggtgcccccgtttacctcgccgatgtcctggaatacgtcttcgctgaggttctggagctcgtcggtaatgctgtcagggacaacatgaagactcgcattattccgagccacgtgcttctgacgatccggaacgacgaggagatcggtaagctgctgtgcggcgtgaccatagctcacggaggggtgctcaccaatatcaaccctgatatgctgcccaagaagactgagagagaggcgtacagtgtcagatagcaaggaggcaaagtcaaccaagaaggccgccaagtcccctaagaaggcatagactgactgtccggagtgatctgatgcttaacatgaccttgctaccagtatg

SEQ ID NO: 62824 - DNA, 726 bp, Zea mays
  Clone ID: MRT4577_157297C.1
ccatcgcgtacatccaggagctggaggaccggctccgcggcggcggcggcggcggcggcggctgctcggcggcgcgcccggacagcccggacgtggaggtgaaggcaatgcaggacgaggtggtgctgcgcgtgaccacgcccctgtacgcgcaccccgtctccagggtgttccacgccatcagggacgccgagctgatcgtggcggcgtcggacgtggcggtggcggacgaagccgtcacgcacacgctcgtgctgcggtcgcccggccccgagcagctcaccgcggagacggtactcgccgccatgtcacgggggatgaccagcgccaccccctccccgtgactctgtagcggtagctgtaagtcgtaaaccgtactcgccctcgtgcgtgccggccacgtagtaaagccacagaaattgcaatggccaaggcggcccaacattaaatttactggtgctcgtttcctagttttttgcatttggattttaattagatgagatgtgtacacgcaaggcggcaaggcacagtttgttgctcctagctatagcttctttagtttgttgctttcccaacctactagtatttttttcttcttctgaatacccaacctactacttctagtggctaactgtactagtagtagttctgttgttttcagtttccacagtccacttattagcttgtcgtgactcgatttcgagatcaaatctattccattcgatt

SEQ ID NO: 62825 - DNA, 357 bp, Zea mays
  Clone ID: MRT4577_157298C.1
cttgatttggcacgcgaagaattctggcaaggggcagagctaccttgggctagaaatccgccaaaaggttttattggttttaggttgcagcttgtttggtttctggattggatgattttttcctttttgtaatgtataaatgcccggatctctgcctttcagtttaagagagaaaagaaagatcacaacagttttagaaacaaagaactgggaagctcaagcagcacccccccccaaaaaaaaggcataccgcaccctcataacacggaacaaagaaaatgaactgcagaatcgcatgccatcattttgctttcaaagacatttgctttggctgttggaacaattctcgaagatgat

SEQ ID NO: 62826 - DNA, 391 bp, Zea mays
  Clone ID: MRT4577_157299C.1
gggggccaaacccttttttaggggggaccaattaaccaccagtcccccggggggggggggacgtttccggtgcgacagactgacatgcatggggcctgggctcacatggggattagttacaagcaggcgcggccaaagtaaaaaaaagtttttttatcaccatcaaagggggggggggcagaccacccaggcgaacaaaaacatgggggaggagggggggttccccttctctttaaagacaatgcccttgaacctgcaccccttggcctttttgattggaaaaagccgacacaaaaccaactcctggttgtgctgatgaagatgatgggaacaaacccccccccgccccccgctggtgtttcccgcccggggcggttggtcccccaccccg

SEQ ID NO: 62827 - DNA, 282 bp, Zea mays
  Clone ID: MRT4577_15729C.1
catgcatgactggggcgcgctgatgtttttttttttaaaaaaaaaaaaagggggcggagatagagatcaagcttacgacgcgcgatgcgacttatttctttttatagcgaatataaataaattccctggccgtttttacacagggtggagagagaaaaacccgtggcgacacaaattttaatcgcctcgcaccacatccctttttccccatgtggaataatagagaagaggcccgccccgatctcttttcacaagatttgcacattgtgaatggcgaggggc

SEQ ID NO: 62828 - DNA, 1354 bp, Zea mays
  Clone ID: MRT4577_1572C.1
gcattgggtacctcggggccggccgggacgggtcaccagtcaccacatccctccctcactgccatttgtttggttgttcctctcgctcgccagtcgccaccaggcagcaggcatcccaatctcgcgagagccagtagcggcggcggcgcttccggcttcccttcccattggcctccgggatggcgctccgcctccacgacgtcgcgctctgcctctccccgccgctcgccgcccgccgccgcagcggcggcagtttcgtcgccgtcgcctccatgacgtccgccgccgtctccaccagggtggagaacaagaagccatttgctcctccgagggaggtacatgtccaggttacacattcaatgccatctcacaagattgaaattttcaagtcacttgatgattgggctagagataatatcttgacacatctcaagccagtcgagaagtgttggcagccacaggatttcctccctgacccagcatctgaaggatttcatgatgaagttaaggagctcagagaacgtgccaaggagatccctgatgattattttgtttgtttggttggagacatgattactgaggaagctctaccaacataccagactatgcttaacaccctcgacggtgtcagagatgagacaggtgcaagccccactgcttgggctgtttggacgagggcatggactgctgaggagaacaggcatggtgatcttctcaacaagtacatgtacctcactgggagggtggatatgaggcaaattgagaagacaattcagtatcttattggctctggaatggatcctaggactgaaacagggactaatccgacatccatctgttcctcgtcgacaggtcgaaggtggcgaactcgactggtctgtctggtgaagggaacaaggcacaggactacctttgcacccttgcttcaaggatcaggaagctggacgagagggcccagagcagagccaagaaagcaggcacgctgcctttcagctgggtatatggtagggaagtccaactgtgaaatcggaaacccattgcgactgttgagttgcagcggaagtctatcatgcatcctgagacgcatcacgaagacaagacctggtgtgtcgcgttacatagttgttcaggttttgaccaaatggtctgggagcattctgtttgcctgtgtcgtctcatagagtgataggagaatgttcggctgttttttttctgctttgttgtacaacctgtggccgcatgaactgggcgtgaacatgctgtacgttgtctgtggcgttgtgtttcgctatggttatccagttcttcagatctgttaaaaaatttgtgagctatgaagttcagttctgttgct

SEQ ID NO: 62829 - DNA, 451 bp, Zea mays
  unsure (1)..(451): unsure at all n locations
  Clone ID: MRT4577_157300C.1
gactctcttttttttttttgctttctgtgatcaacctaagagctctggctaacctttctccctactgtaaggtcgccatttcttcctttgaaacttctgtttacactgtaacctgctgaatttttgaagatggcaccatccgccgtgtgggcctggtgcgctactgggggtctggtttcgtcaaagcgagttggccctttggccgcnttggcgtgctgtgccccgaggcgtctttggtgggcccattccgtgggtcgtttggccggctttgtgggtgttgccgtgcgggctttttgtctccgcaccctgtgggggctttgtccccgcttgttgtggttggccgccggcccctctgttcgctccccttttggacggcctgggtgcaactggtgctgccttttgaaggcggctgggccccccccccgttggttggtggggcggtgctgttggg

SEQ ID NO: 62830 - DNA, 128 bp, Zea mays
  Clone ID: MRT4577_157301C.1
aattaggggagcgggagaaatattttcacttctcaactttattcaattgatgcatcagtactggactaatgagttattttaacattttggacaatgtaccaaaataatgttctcatggggataagcat

SEQ ID NO: 62831 - DNA, 430 bp, Zea mays
  Clone ID: MRT4577_157302C.1
tcttaatcccctgtgatccctgattaccaaatcaactctgagtgtgctcggatgtggcttgtccggtttcagaccgttgtttgttctctctaaactctttccccttaattgatggatagagatcttgccattttcgttcaaaaaaatatatatatcagcccccataaaccagggacatgtgccggtgcctgaacttgcttatgttacttatgcccagtgtcaatgtaaccgttggagagaaagaagaccgcatgacgatcacagggatgtattccgtttctgatattttttgtgttggctgcggagagattgttggatggaaatacgtaagatttataatgatgatttggcaatatatatataacatgctctagttttgtctatcgcctggacttctaagttgtatatatgatgcatggtgtctctactc

SEQ ID NO: 62832 - DNA, 295 bp, Zea mays
  Clone ID: MRT4577_157303C.1
tggcttggaacctttgggccgattgatgtgcctgcagacgttgttggtacagtaaacgttgtagtaagccagatgagtacacgacgtagttcaactatcgtcgctcgaaaaggcaagacactgcaacgacgaccgaagcgacgtcacctccgatgcagaggacgtttcaaccgacgtcgataggacggagactgagaacatcacggataccgcgtgacaagagacgaatgtctccggtagatgctgactaactagctagggcgagagatactcatgcgatatactcgaatcccac

SEQ ID NO: 62833 - DNA, 550 bp, Zea mays
  Clone ID: MRT4577_157304C.1
tttcaagtcatgcaaagggttcgcccaacggaccaaggccaacgctcccagcgccgcaattaactgcaaacgtaacgttttattattgagtggtctctcgaagcatccgtagcgcccacagaaaatgcattatccccctagccctaggttagtagtagcacagcggagtgtgcgtggcactgcagctggtcgctcgtagtcgtagatctgaaacgagtcaaccgtggcgactgtctctgtctggaatgctggctcggtagccgtgcttgcttgcacagatgcacgtgaaagaccggccagcatcgcattattgataccataccatggcctctggctgaactgagctgacgtggcgttggggttccttcctcatcggctcatcctcttgcagcggcgcacacggtggtggttcgcgcactgcagcacgttcgcggaccggatccagccgcagtcggtggacccgacgatgaacgcgacgtacgcggaggacctgcaggcggtgtgccccgcggggtggaccccacatcgcgctgcagctggacccgtgacg

SEQ ID NO: 62834 - DNA, 357 bp, Zea mays
  Clone ID: MRT4577_157305C.1
ttttaacacaaacaggctgggaataacttatatgatgctgcgtacataaatacacaagaatagtccactaaccaccatgtttcactattaaaacacttttaaaggccctccacaaatttttattttcctatcttgaaccaaccacaacttaaattatttcaagttccaaattttttgtcaacatatttcacaattaattcaccttctaagttcaataaatgtcattaatttcctgataaaaccaaaaggcttccttcccctgcccttttttcatctcttgcaaacaaaatgcaaacatcaaaaaaaaagccacaattaccttaaaaaaaactaataattataaacttttatttaaat

SEQ ID NO: 62835 - DNA, 247 bp, Zea mays
  Clone ID: MRT4577_157306C.1
tttcatatcacaaatgcaccagcaacataatgggagggaacacaacgaccgaagctttgtttgggtttcttttcatgagcatccatggttgctaacggttcagtgcgaccccgtatgactggcatggacgaggctctatgacaatttcttgtgctgccaacttacaacggctactataggcgaaaacagtgggcgaaagcagctgacggcgcagaagaggatagagattatggaggtgggcgtcctt

SEQ ID NO: 62836 - DNA, 486 bp, Zea mays
  Clone ID: MRT4577_157307C.1
gcgcccaagactgtcggaggaacatggcatgggcacaacagatgatgtgccagcttcactacttgcgagctacctgatcagagcccagcacgggcctataggacctccacccaaaggtgtacatacatagcgaccctaccacaccaaaccacaacccattcagaaattcttgcaataaagcaccgtactgaccatagcgaacgaggcgcacaatacctgtatttacagaccgaacgaatatacataccctgtgcacacagcatgaggctaatatgccttcacacgttctgacaaaacgcacccccaactgctatggccaactgacccaaacccattattgtataccggggcatacaccatatatccttatggaggggtaggagaacaccctccccttccaactagaaggtaataccgcacatttgcttctccattgaaggaaaggccctgaatgccccttatggattactcgaacactttgatgct

SEQ ID NO: 62837 - DNA, 790 bp, Zea mays
  unsure (1)..(790): unsure at all n locations
  Clone ID: MRT4577_157308C.1
ccctactctttactcgctcactcccccgcgccactgatctctccttccgggaccctaattccgcaggaggccgcgccgggggagtgacgccgatgcagcgccgggtgggcatggcggacggcgaggctaggtgtcggacgctcggcgccgtcatcaaggagaaggatgaggagttcgcgctcttcctcgagatgcgccgacgcgagaaggagcgcggcgctgcggccgccgcggcggaccagcttctgctctccggggacgtcgcggcggagaacgggatgctgctcctcgacccgccgccacccgctgagcccaaaccggcggcgtacaaggtggctggcggcggatttaggagggcgcctgggggagtggacgacttcctcaatgcagacgccagcgacaagaacgattacgactggcttctgacaccaccaggaactccattattctcatctctaaaagttgagccaaaaaggtccctggtgagtcaagctggaacgccaaaggctcgtccaactgccttgaaatcaaggggagaaggtgatgatggtgacatcgagtctgtggaatttccaaagtgtgtggtggcaagtaattaggcacatggtcacatactcacattgaggagatggaggagagggagagataggacccgggagaggagcatgagaggccatggtcattatattttgttggctgaacttagctgtnnnaaattgttgtggccaacttgaaagttgcactgttgctaactggaacatattttgtggctccctggcactttgtctga

SEQ ID NO: 62838 - DNA, 313 bp, Zea mays
  Clone ID: MRT4577_157309C.1
ccgactcccagccaatgcaatcacaagcagggtggcacgcaacacacatgtggagtgacaaaaaaaaagggaggggggggggacataacagcatttttacacccaaatgtggatgaagaaatcgacaccctttaaaagggcacctggaaaaaaaagaatctttcaaacagaataccgtaatggcagcttcttgcactgggaccaaccctacttgattgggctaatcagggtttgggggagctagatcgtagcctttttgggcaacagggaaccctggtcaaagggtcggggaacgctggggggcatgtgggcc

SEQ ID NO: 62839 - DNA, 455 bp, Zea mays
  Clone ID: MRT4577_15730C.1
ccttaagattaacttaaaataaagcctggcgggggtatcaggatccatcgatccgcataccatgctgtttgatgcatggttctgcttgaaaccgagtgatgaccacatacttaacaactgatacaaagcgaccttgcaatcataaactcagatgggcagcatcaatcacgacacaaacgaagataaaccctctggactagggtaaacatatcggtccttatacaggataacttggccgcgcgggccccaccgctcaatttctccagttcccgtcggagttaccgaagccgccgacacggatgccaccggcgaaaccgtctatctttcaatttaatccgcgccggcatgctagtagccgaccaggctgacgtcttgccattgtcaatgatgccattgtctgccgaagcggccgctccacatttaccttcggactccaatgcgtcgagtactttgac

SEQ ID NO: 62840 - DNA, 1396 bp, Zea mays
  Clone ID: MRT4577_157310C.1
caaaccgcaccacaaaacaaatcggccaaagcgagccaagtgattcaaacagacgagccccgagagaagaggagataaagcagagcgccatggcaacagcggtcagcggcaggcggacgcgcgtccgcacgctgggccgcggcgcgtcgggcgcggtggtgtcgctcgccgccgacgccgcctctggcgcgctcttcgcggtgaagtccgcccccgcgtgggccgcggagcagctgcggcgcgaggggagcatcctgtcgtccctccggtccccgcacgtggtcccctgcctcggccaccgccccgcggccgacggcgggtggcagctgctcctcgagttcgcgcccggcggctcgctcgcggacgtggcggcgaggagcggcggcgggcgcatcggcgacgagcgcgccgtcgcggcgtacgcagcggacgtggcgcggggcctggcgtacctccacgggcggtcggtcgtgcacggcgacgctcaaggcgcggaacgtcgtggtgggcgccgacggccgcgccaagctcgcggacttcgggtgcgccaggtccgtgggctccgggcgccccgtcggcggcacgccggcgttcatggcgcccgaggtggcgcgcggggaggagcagggccccgccgccgacgtctgggcgctgggctgcaccgtcgtcgagatggccacgggccgcgcgccgtggagcgacgtggacagcctccccgcggcagtgcaccggatcgggtacaccgatgccgtgccggacgcgcccgggtggatgtccgccgaggccaaggacttcctggcccggtgcttcgccaggaacccgcgcgaccggtggacggcggcgcagctcctggagcacccgttcctggcgtcagccggccgcggcgtcaaggcggaggaggatgcggcggcgtctcccacgagcacgctggacgccgcggtctgggagcccgactccgatgacgagggcgatgcgtcagagagccccgcccagagaatcaaggcactggcctgcccctgctcggtcctgccggactgggattccgacgagggcgactggattgaagtgctcgacgagcaatgtgaagccaccaacttggtgccggtaccaaccaaaaaggcggccggcgatgacgagtgccagctcccgagtgtggcgttggaaacaggggtcgacttcatcgacgccgatgcggagggcgaagatcccgggtgttgtgtagctgtaggatatgatcccgggtgttgtgtagccgtaggattaactactgctttgtcagttgggctgttggaagagcagtgtatgggtgattacagtaacccaactgtatttctcgcttacagtattgaaatatcaaagacctctttactgcgaaaaaaaaaaaaaaaaagtacct

SEQ ID NO: 62841 - DNA, 809 bp, Zea mays
  Clone ID: MRT4577_157311C.1
attgggtacctcgaggccggccgggtctctcccccactctcgaataccttcgacctcgttctccccttcacctcctttttacagtaaacctcgcccaacatgcctgtcgacacccacatcaagcgcgctcacccgatcctgttcggcctcctcatcctcttcacgctcgtcggatgggcaatgtgcgctgctgtcaccaaccactacaacggtggtgtctggccctcgcactcgatccgtgaccgagttcgcttcctcttgttcgccaacttgtggacgttcgtcttctcgatcatctacctcgtcgggttcctcaaggcgaccggcagcttcctcttctcgatcgcgtcgcatgccgtcatcatcttcctctcgtgggtcttcatgatgtcgggagtcgccgctttgacccaaagtctcggaggtggattgaactgcaacactttccgatacgcctactgcggtgtcctcaacggtatcgagggtatctcatggctcaactggatcatcctcaccatcctcctcatcatgatccttgtccaaggatcccgagctggacgatctggaaacggtttcggtggacccgtcgttgaggtctaaacgaaaatacctttttcctgccgcaatcactcatcgccaacttcccgacgatggtcccatccctcctctctcctcgcccgacgctgtatcatagtcaaatctctctactccatccccttttcctctctatcatacattcgtgcacttcgttttctttttttttcgttttcgttttttcgtctacggctctacttaattttccctttcgt

SEQ ID NO: 62842 - DNA, 367 bp, Zea mays
  Clone ID: MRT4577_157313C.1
ccgaggggcccctttttttccggaaacagggggcccggctttttccgggcccttgggggggggggcacatgggttcacaggtcaaacttggcttaaaaacaggcgcccaaaacatacagccctttgttttaacccgggacacaaaaacctttttttttttttccctttccctttccggtcactggcttaatttaggaaaactggcggggctccgggcccacaaaggcggggttggccggcccaaaaatttccacggggggcctcagctcggcgcagcccttaatggccccatggacagggtcccaaaagaagtttcttataagggcctggttgatcggggcgtccttttccacccccaaaaagggct

SEQ ID NO: 62843 - DNA, 403 bp, Zea mays
  unsure (1)..(403): unsure at all n locations
  Clone ID: MRT4577_157314C.1
aaaaaaaaaacgaggaaacagagagccaacaaaaacaaaacaaaggagaaaagaaagcccagacacgaaaaggcgaggcgaggacacgcncagagggcgaaaaaaaaacgacgggggggcgggccaaaaaggacccaagccaacgaacgcgggcgggcaacaaaaaagccctgattaaggggacccaaacccaaaccacgggccggggggtaaacaagggcgggactggaaaaaccgtggggttccccattttactggcttgcgaacaatccccttttggcaattggggtaaaaagaaaaagggcccgacccgatcgcctttcccaaaattttgtcattttaatgggcaaggggtccgcccctttttccggctctttaacggggggggtggggggggtacccc

SEQ ID NO: 62844 - DNA, 238 bp, Zea mays
  unsure (1)..(238): unsure at all n locations
  Clone ID: MRT4577_157316C.1
ttttataggctcctgcnctggtactcccatcagggggttttttttaccagatcgcggtttttctactacaagtccgacgaggccgtggccgtctaccccgagctgaggccgttctggaacgaggtgcgcacaagaaagacaaggccctagacgcgaacaagatagtcatcaacagcagcatgctcatgtgcaaccgcgcaaacactaaccaccattatttggttaccctcgagcccca

SEQ ID NO: 62845 - DNA, 1680 bp, Zea mays
  Clone ID: MRT4577_157317C.1
cccacgcgtccgcaagcattgaagccgtagccgccgccgccggacgagacaggttgaggcggggcggcaatggccgccggggaccttgaggtgctcaccgcgctcgacaccgcgaagacgcaatggtaccacttcaccgccatcgtggtcgccggcatggggttcttcaccgacgcctacgacctcttctgcatctccctcgtgactaagctcctcggccgcatctactacaccgtggaggggtccgcgacgcccggcaccctcccgccgcacgtgtccgcgtccgtcaacggcgtggccttcgtgggcacgctgtcagggcagctcttcttcggctggctgggcgacaagctcgggcgcaagaaggtctatggcatgacgctcatgctcatggtcctctgctccgtcgcgtcggggctctcgttcggccacaccccggcgtccgtcatggcgacgctgtgcttcttccgcttctggctcgggttcggcatcggcggcgactacccgctgtcggcgaccatcatgtccgagtacgccaacaagaagacgcgcggcgcgttcatcgccgcggtgttcgcgatgcagggcttcggcatcatggccggcggcctcgtggccatcgtcgtgtccgcgtggttcaaggccagtttccccgccccggcctacgccgtcgaccccgccgcgtccacgccgccgcaggccgacttcgtgtggcggatcatcctgatgctgggcgcgatgcccgcggcgctcacctactactggcgcaccaagatgcccgagacggtggagatctcagccggcgccgccgaggagggcgccgcggctgcgactgcgactgcgactgagcctgcgccggcgtcggcgtccgcgtcttttgggctcttctccggggagttcctccgccggcacgggctgcacctcctgggcacgtcctcgacgtggttcctgctggacatcgccttctactcgcagaacttgttccagaaggacatcttcagcgcggtggggtggatccccaaggcggcaacgatgaacgcgctggaggagctgttcagcatcgcgcgggcgcagtccctgatcgcgctgtgcggcacggtgcccggctactggttcacggtggcgctgatcgacgtgttggggcggttcgcgatccaggtgacggggttcctgatgatgacggtgttcatgctggggctggccgtgccgtacgagcactggacgacgccggggcaccacatcggcttcatcgtcatgtacggcctcaccttcttcttcgccaacttcgggcccaacgcgaccacgttcatcgtgcccgcggagatcttcccggccaggctgcggtcgacgtgccacggcatctcggcggcgtcggggaagctgggcgccatcatcggctccttcgggttcctgtacctggcgcagaaccgggacccggccaagacggaccacgggtaccccgcgggcatcggcgtgcgcaactcgctgttcctcctcgccggctgcaacctgctgggcctggcattcacgttcctggtgccggagtccaagggcaagtccctggaggagatgtccggcgagaacgacgaggcggccgctctagaggatccaagcttacgtacgcgtgcatgcgacgtcatagctcttctatagtgtcacctaaattcaattcactgccgt

SEQ ID NO: 62846 - DNA, 1217 bp, Zea mays
  Clone ID: MRT4577_157318C.1
caagcattgaagccgtagccgccgccgccggacgagactggttgaggcggggcggcaatggccgccggggaccttgaggtgctcaccgcgctcgacaccgcgaagacgcaatggtaccacttcaccgccatcgtggtcgccggcatgggattcttcaccgacgcctacgacctcttctgcatctccctcgtggccatcgtcgtgtccgcgtcgttcaaggccaggttcccagccccggcctacgccgtcgaccccgccgggtccacgccgccgcaggccgacttcgtgtggcggatcatcctgatgctgggcgcgatgcccgcggcgctcacctactactggcgcaccaagatgcccgagacggcgcggtacacggcgctggttgccaagaacgccaagcaggccgcggctgacatgtccaaggtgctgcaggtggagatctcagccggcgccgccgaggaggacgccgcggctgcgactgcgactgagcctgcgccggcgtcctttgggctcttctccggggagttcctccgccggcacgggctgcacctcctgggcacgtcctcgacgtggttcctgctggacatcgccttctactcgcagaacctgttccagaaggacatcttcagcgcggtggggtggatccccaaggcggcgacgatgaacgcgctggaggagctgttcagcatcgcgcgggcgcagtccttgatcgcgctgtgcggcacggtgcccgggtactggttcacggtggcgctgatcgacgtgttggggcggttcgcgatccaggtgacggggttcctgatgatgacggtgttcatgctgggtctggccgtgccgtacgagcactggacgacgccggggcaccacatcggcttcatcgtcatgtacggcctcaccttcttcttcgccaacttcgggcccaacgcgaccacgttcatcgtgcccgcggagatcttcccggccaggctgcggtcgacgtgccacggcatctcggcggcgtcggggaagctgggcgccatcatcggctccttcgggttcctgtacctggcgcaaaaccgggacccggccaagacggaccacgggtaccccgcgggcatcggcgtgcgcaactcgctgttcctcctcgccggctgcaacctgctgggcctggcattcacgttcctggtgccggagtccaagggcaaatccctggaggagatgtccggcgagaacgacga

SEQ ID NO: 62847 - DNA, 2145 bp, Zea mays
  Clone ID: MRT4577_157319C.1
ttgggaccctcgaggccggccgggaagaccaagatagaccacccaagcattgaagccgtagccgccgccgccggacgagacaggttgaggcggggcggcaatggccgccggggaccttgaggtgctcaccgcgctcgacaccgcgaagacgcaatggtaccacttcaccgccatcgtggtcgccggcatggggttcttcaccgacgcctacgacctcttctgcatctccctcgtgactaagctcctcggccgcatctactacaccgtggaggggtccgcgacgcccggcaccctcccgccgcacgtgtccgcgtccgtcaacggcgtggccttcgtgggcacgctgtcagggcagctcttcttcggctggctgggcgacaagctcgggcgcaagaaggtctatggcatgacgctcatgctcatggtcctctgttccgtcgcgtcggggctctcgttcggccacaccccggcgtccgtcatggcgacgctgtgcttcttccgcttctggctcgggttcggcatcggcggcgactacccgctgtcggcgaccatcatgtccgagtacgccaacaagaagacgcgcggcgcgttcatcgccgcggtgttcgcgatgcagggcttcggcatcatggccggcggcctcgtggccatcgtcgtgtccgcgtcgttcaaggccaggttcccagccccggcctacgccgtcgaccccgccgggtccacgccgccgcaggccgacttcgtgtggcggatcatcctgatgctgggcgcgatgcccgcggcgctcacctactactggcgcaccaagatgcccgagacggcgcggtacacggcgctggttgccaagaacgccaagcaggccgcggctgacatgtccaaggtgctgcaggtggagatctcagccggcgccgccgaggaggacgccgcggctgcggctgcgactgcgactgcgcctgcgccggcgtcggcgtcggcgtcctttgggctcttctccggggagttcctccgccggcacgggctgcacctcctgggcacgtcctcgacgtggttcctgctggacatcgccttctactcgcagaacctgttccagaaggacatcttcagcgcggtggggtggatcccccaaggcggcgacgatgaacgcgctggaggagctgttcagcatcgcgcgggcgcagtccctgatcgcgctgtgcggcacggtgcccggctactggttcacggtggcgctgatcgacgtgttggggcggttcgcgatccaggtgacggggttcctgatgatgacggtgttcatgctggggctggccgtgccgtacgagcactggacgacgccggggcaccacatcggcttcatcgtcatgtacggcctcaccttcttcttcgccaacttcgggcccaacgcgaccacgttcatcgtgcccgcggagatcttcccggccaggctgcggtcgacgtgccacggcatctcggcggcgtcggggaagctgggcgccatcatcggctccttcgggttcctgtacctggcgcaaaaccgggacccggccaagacggaccacgggtaccccgcgggcatcggcgtgcgcaactcgctgttcctcctcgccggctgcaacctgctgggcctggcattcacgttcctggtgccggagtccaagggcaaatccctggaggagatgtccggcgagaacgacgaggcggccgccgccgccgccacgccgaactacaacaaccgcacagtgcccgtgtaagtagccgtagtagatgcatctgcatgcatgcatgcaaatgttatataaggaacaagtacgtacgtaacgtaacgtaacgtgtcgtgtgtgtggctgttgcacggtagggtacacgcactgttctccttcgatctggtcgaggttgtttgtcgaggcacagccgtcgccttccgttacgtcattgttaatgtttccgttctgtctggtgcttgtgtgcatgttcagttgaacttgcgcgatcgatctgatgggatcagagacgtgctcctaaataaccggaggtcaccgtcggatatagacgtgctctcctggatgttgtaccaagcgcgtcatgctgctttattagatcaatcaagtactgttgttttcgttcaaaaaaaaaaaaaaaaaatttgcggcc

SEQ ID NO: 62848 - DNA, 919 bp, Zea mays
  Clone ID: MRT4577_15731C.1
attgggacctcgagccggcggaccgaatcccgcccacggccgtttcccgcaccccctatccgggaaggaagaaagccagaactcacccctgcttcgtctggcggcgccgtttcccgcacgcgatgccgtcgacggcggaggatttcccggcgataaggaagctggggaagctcttccggcttaccgaagtgtacctctgggacgattcgtatggcgctggacctcacgatggacagaagaacgggcgctcggcggaggctgctctcgtggactctcatacagataaaacatgcaatgaagcatccaatagcactgacaaaggccatttctttgttgaagatttggaattggtcaatctcatgggttctttggggcttcctgtttcattcagcacaagtaaagtgaacaagaacacatgcaacaagggaaagaaaaaaggaagacaagcaccgctcaaagcagcaaacactcaaatcaatgatgctgtgaggatatgtatcaatactgaagatagagaaaattctgttgaatcattggatgctatggagcaaacgcactcatgcaatttatttgtgacaccactgggtcaaaatgaaccctcccgtgatgacactgacaagaggcttagggaagacagctcttgtgttgaagaacaagaagagtctggctgtagcaccatctactctgctggcaaagcccctggctgtgatgctaaaaatcatctcactgaacttggggcttttgagctttctgataacttggccaactcagcaaaagaagaatactcaattcaagaaaatcagcttatgaaagtgtgttgctagattctgaagagatgtcaaggaatgactgtgttgatgatgaatctacacattcctgtgttggcatttatcaggatgaaagagtgtccacaagggga

SEQ ID NO: 62849 - DNA, 187 bp, Zea mays
  Clone ID: MRT4577_157320C.1
tagaactaaacgtctgcacccttatatataaaagcatggttaggcccacagtgagacttcctacagagaatactactaatggcgtcctaggcataaccgggagggcgcaaaatgaaaccctcgttatgctgacgcatgggagccttgcccttaacaaagtctgacattgatttaggaggggcattaa

SEQ ID NO: 62850 - DNA, 478 bp, Zea mays
  Clone ID: MRT4577_157321C.1
ccaacaaaccccataaaaaacctggttttttggttttgggccaacctaaaaaaaaaccctggccaacaacatattaaaacggagcctggggattaggggccagggacaaaaacagaccggttattatgccaaacccaatctatccaaaaccggccagaaaaggagagacaattttcatctttgtaaataaaactacccaaaccccacctccactatttaacaataaaccaaaccctaatggccactttaaggggtcccaagttgcaaacagctgggaaaaaattactacgggaccctgggaaatggccgtttggagcaaactaatgtcatttttccgccggcataaaacttcctccggtaaaaaagcacatatgcagcaccggacttacataattttggttaaggggggaaaaagggctatcacggaagttatccccctactggcgcccaaaagcttgatatgggcagggaagggccc

SEQ ID NO: 62851 - DNA, 211 bp, Zea mays
  Clone ID: MRT4577_157322C.1
agttcgtgtttctttttgcacactaaaacgacaaggggggtgtgccaatgtattttttcacgtccccaaaccaagaatgatgtaaactgcccaaggctctattgccaaagttataatgtctgcttgcaactcatctgttaaatctgaactgtaccttattgttaacattgttacagtattacacagttcccattccatcttgaaaatatta

SEQ ID NO: 62852 - DNA, 595 bp, Zea mays
  Clone ID: MRT4577_157323C.1
agaataaaaatgtgaatatacaatacagtcatacaaatgtttcccacataaacaacttagtccatcctggaactgttacggtgctgcactcgggaaatggtttcgatttctgccgcaaactgcatctttccctggttagaggaccgagagagctgcttcactgccaccacttttccatcactcaacttacccattcaaatttgggtcacacttgatctcacggctgcaatacttgcatttccctttcttcaagtgtccatcaacacaaatcttgacaaagtgagaccatacttctgatctaggtgcaatctccttccttttcttcgcgttatcttctttcttttcctcagtagtgttgccggcggtcggtgctgattccttggtggcatttaggacttcattagaggactgctccgttggtgttgacataggactgttgtgtgcgaatggcgagcctggtggtgaactggcgagtggctgactgcactggccgaactggcgagtggcgccgtgccgtgcaagcggtgtcgtcgtgccgggcaagcggtgccgggctgctgggcaagcgatgtcgggttgccggcttgtgcctggt

SEQ ID NO: 62853 - DNA, 364 bp, Zea mays
  Clone ID: MRT4577_157324C.1
gccaccgtggccaactaacgatatttttgattgagatcaagtctgagggcttttaaaccaggcacgagattccctacaatgagctccaatgacttataatacgatgcacggagtacattggtttttgacctacaccttgtgaatgagtccactagccccactgatatcccaaaaccacactacccatccaatatgccgactgtacactactacagtgggcatcatgttttgtatacatcatcagcagattgtgcaccgggggggatagatttcagacagatacaggaacattctcatctacgtatacgtgtctgccggaagatacagcatcaccatgctacacgaacattctctatactcactg

SEQ ID NO: 62854 - DNA, 559 bp, Zea mays
  Clone ID: MRT4577_157325C.1
ctcaaagtgtgagacaaataagccgcggcggatatggcctcattctcctacttccccaatgccgtttcccgttcgcatgtctcgccggggcctgcggcggaagcgggagcagagtgcggccgtggggttcgagcgggggcacatcctagtctctatctaagaaacagatacagaaggaactgctgcacctaaagcctgcgatgcttcgagcgctcaaggacgacaacctgtacagtggctcttcataatcatgacgacctccaaggcatcgcgcgtaatgaacagagggcatattacacccttgacatagtgtttccttctgataatcccttcaaaactacatggaaacattcataaataaggatttaccactgcaatatttattccactggtaaaatacattggatacattcttgaaagatggatggagtccaactttcactatttctaacgtgttattggccataaaagacattattagcaatccacatccatactccaaacttatgattagcatttcacgtcattatctgactgatagagttaaacacgatgaaat

SEQ ID NO: 62855 - DNA, 1141 bp, Zea mays
  unsure (1)..(1141): unsure at all n locations
  Clone ID: MRT4577_157326C.1
ttttttttttttttttttatccagattatataatccatggggtaaacaaacagacccttaagttatctatctttaacagattacctatttcactttctattctaaactatacttttataaatagtgttgtctataccgaattttactttataaatagttacaaaatagtgttttgcgcctatttacatggtctggtttgttagttggtcgccccgaccgtgaacgtgaagcagcgaagcgtcccggcaaaggcacccggtggccgcgtccagcgcctaccgtttccgggggggctcctcgccttctcttcccccaattcggcacgaggctggccgctcttccccttcgtcgtcgcactccgctagctcacctcctcgtccccatataaaccatatccctctccgggccccgcgcagccgccggcgacaagcgcgcaggagcagcagttgtcgcgcctcactgatggcgaccgccgtggcgtcgcagccgtgccaccttcccctcagcgccggcggagatcccaggtgcgcggccagcacttcgaatgttcatactctggagaaagtatatggtttcagattcatatgcagaagcatttttgatgtaaagactcacaaattccactcccgcatttcaaagaggaagtgctacttgaggaactcactgtcggagtgtgacaggaccatccacagtggtagatggttggagtttcggagacacaagggagtcttccagaaaactagaaggatggttcacattattccattggcttctgatggtgatggcaaccatatatctgttaatggagctctgcaagttggttctacaagcaacattgatgaaataaagttgaaattgaataaagcattgcagagtgaagatatcagcaatggactcgtccagtcgatacatgatgctgcaagatctattgagttggctctcatagagcacagcaaattgccaaagagctcttggtttccaaagacatggctgggcgttgagaacaatgcttggataaaatcactgtcttaccaggctgctgtagactcattgttgaaagcagttatcgatgtttcatctcgtgggaatgacagagatagagatattaatgtgtttgttcaaaggagtttgtnccgcctgc

SEQ ID NO: 62856 - DNA, 451 bp, Zea mays
  Clone ID: MRT4577_157327C.1
actacagcccaacagccaccttgaaacaaatcagccccatttttcattgaatcccagagttcatacaacgacccatcaggtgaaagtaagatggcgcgtggtaacagggcaggtgagaggagtgttactaaacaaaatgccccccccccccccccccaaatcttctttgcgccaagggacatggagggagactacttatctcctcgccgattaaccccgccctgtgacactcagaggaggcaaggaggttttggctcagtcagacatcctccatttccttccacaacaaagtccgtccctgctatgctgtctccttttcgttgaaagaccacaccaaggactgcacatcaggacttgtggagcaaaataagtctccgctgccgccaacatgtgcgcccgacagcaatgaaaaatggccaccaccttcctgggctccactcaacgacagttc

SEQ ID NO: 62857 - DNA, 329 bp, Zea mays
  Clone ID: MRT4577_157328C.1
aaccaattggatacataaaaaggggggtgtatatttaaactatccggggtatcccccccccaacgataaataaacaacagttatatcacaaaaataaaacaaaatggggaccataaaaatattagcaatggttcacgattacagaacaaacccttttacaattcacacgaccaccaaacgaaccaacaaacaaacaattaaccaatctcaaaccacgtaaataaaaaaaacaattaattaatcgggggaaccaaacacgatgcattccaaccttgcctgcccgcgcggcgcctctcaatggaggtagtacgcgaggaaggaggcaacca

SEQ ID NO: 62858 - DNA, 417 bp, Zea mays
  Clone ID: MRT4577_157329C.1
gaatggaaataaacaggtgcatggaacatttgttaaacaaacttatgctcacgttctctgggaacggaaaaccctgataacggctcctaaaacttattgtcaagaaccccgtgaggccctggatgttcttctgatggggagacccaacagaaactttttgtgggggcatccccagttttaatgccaaaaattgtttcaattaacgggaaaatgccgtttaagctggcaaagaaaaccggggcagccgaaaaccctttggtgtacattgaagattttaagtctttaaaaccaagtttaacctaaatggatttgccctttgaaaatatctttagcagacgcgcctgcggtgcctccctttttttcttttgccaattcttgaaaatgaaaaatgacaacagaaccccggcccccactcct

SEQ ID NO: 62859 - DNA, 362 bp, Zea mays
  Clone ID: MRT4577_15732C.1
caccaacggttgtgcgcactatcaccgacgaaaaaattggtgcacaccatgaattagccctccttgcagctactcgcgctacctgggatcaaccaagtagctctggcaaacctttctccctactctcagcatcaacaatttcttccatgcaacccactggctacactgaaccctgctgcttatttacagcaccaactataaccattcagccaggttgttactgcctactatcaacaacaacaacctctttcattgaaccaatgggccgtactgaaccccggtgtttatttgcagcagcatatactactaccatttaaccagctagctgcagcaaaccgcgcttccttgttgacacagcaaca

SEQ ID NO: 62860 - DNA, 410 bp, Zea mays
  Clone ID: MRT4577_157330C.1
gccggccggtttcggaatcgtcggtggctaacgtacgtacctgtgcacacgatgaacccccagactgcgtcactgtgcagtgcgcgcgccaagcttgcttaatcatagccgccatggcctccctcgccgccgtctccgtgaaggccgtggccatcaagggtctcgccggcagctccatctccggaaggaagctcgccgtcgccaggagcgacggaccgctccatccgcaggccccgcgcatgcggcgtggtggccaagtacgaggccgagatcgactactatgaccacaactatataggatacatcatcgatctgctggacctctatgcctccgctgctcccacgacttactctccactcctaagtattttgaaatatgatgtaacaaaatatgtttaggtttaattttt

SEQ ID NO: 62861 - DNA, 367 bp, Zea mays
  Clone ID: MRT4577_157331C.1
cttggagcgagggaaggagactgtcaagtcttaggtcacagccttgaagaaagaagtggcttactgggtcaaggaggaagagaggctccaggcctgcctgagagtttgatgctgccaaggggaatttcatcgaagtgcaacatcgcctaaaaaggacgaagagggagaatggtcgtctatcaaaggcggtagacgtcgcgcgcacacgatttagggtgccctttccttctaggcatgagcccctgatatctcactttgagcttttcacgggctaagttaacgagctcagggtggaggccttctgcatggggtcaaccaaaccttcatcatcgccatgtcccactatgtgggggaattgacttggaag

SEQ ID NO: 62862 - DNA, 1006 bp, Zea mays
  Clone ID: MRT4577_157332C.1
acaaaattctacttactttgtccaccaatgtaagggaggatgaagctaacttaaaggctcaaactgaaattcaaaagaatgagattgaagaccttcgaagacacactggctggagccaacttaaagtgtgctgtcgctgaagctgatcgagatgtcagtgaatactggaagaattatttagaaaaaacagttgcagagcttcgctcctccaaagaaagatgttttgagaaatctgtggagtgtgtgaagaaaataaagactagctttgctaacgtgggcgcgtattcgagcgaagacaactttatacgaggcgaccccgaaggcgttatcgaatggatcagtaatgaagctgaatcttttgaagaaatcttaagtgatcgtggggatgtttgcgcattttctggcgcaagaggaattgcgaccgtcttggagaaggcggattgtgatcacattaaaaccttggcccaggccgaagctgccttctccgtggacgtcacgaaggacccctcgaccgaagcaagtttaataggcggaaaaattttcactgatatctgggaaaatggcggccgaaaaatggctcatgaaataataaagaaaagagaaaaagatcttcatgacgctcgagaagcagcaaaagaggcagaaagagcagcagcactcgaaaaacgaatagctaaactttctcctccaccagagccactcgacccactggccaacccagaaacaaagaaggaagaagaaattattaacatggccgaagctattatcgacgaagttgttgccaagctactaaacgaagctgctgaaaaagttttgaaggaagtgtagctgctattgtaaaaacatttctaaaatattaatgtaacatttgctgaactaagtttgtaatatttgttgtttataatttttgaatgtaatatgtaaattgtttgtagttcgattctttacgatgcatgaaactttacatacaaaaaaaaaaaaaaaaaaaaaaaaagtcgacgcggcc

SEQ ID NO: 62863 - DNA, 158 bp, Zea mays
  Clone ID: MRT4577_157333C.1
ggaaggatggaggggcgcgtgctgcggcgcagcgtgacgctggcggaccagctcgccgcggttgcgccggcgccggcgccgctgccatcacccggtgccgtcgggtcctgcaacctccgtgacctgctgaagctactagacgaggacgacctgtcgtt

SEQ ID NO: 62864 - DNA, 709 bp, Zea mays
  Clone ID: MRT4577_157334C.1
ggggtaccctccgaggcctgccggggcatcgctcacccagctggctgatcggcgacgcacaaggtgcagcttttcttcatctctgcgctggtgtcattgtcgaagaccccgtgatcatggcaccctcagccaagagcggcaccaatgctgccggcagcagctcggcatccaacaatgcagcctcgatcggcatcggcctctcctcgtcctcatcaggcgctcccggtgttggcattggacttggaccactagccggagcgccagcctcggtctacccgacagacaccgtgcgcgacgtggccgagtcgctcggcatcaatggcatgaaggagagcgttgcggctgcgctcgctgccgacgtcgagtatcgcatccgcgagatcgtgcaggatgcaaccaagtacatgcgacactcgaagcgagaccagctcaagaccgctgatatcgatgcagcgctgcgtgcgcgcaacatcgaacccatctacgggttcctaccatcgtcttcagggcggacgggtggtggcaatccatccggatacactgcaggacccatcttccgccgcgtgcagacatcgtccggtgttccgctccactacattgaggacgaagagatcgactttgacaagatcctcgaagcgggtcccaagaatggcattggacgtggaggggctggggggcgcattggcttggatcgagggtgttcagcccg

SEQ ID NO: 62865 - DNA, 877 bp, Zea mays
  unsure (1)..(877): unsure at all n locations
  Clone ID: MRT4577_157335C.1
cattgggtacctcgaggccggccgggaaaaaaaaatctttcatgggcaagcaggctgatggaaagctatgaaccggagcgaatacccaacaagcctaactaccagaaatatgcagaccggtttgcgaatgaagaagacctcacttcgcgagccgcaatcttgggccaaatagtagctttgactcaggatttgggtctgaaatatgaagagctggtacgcactgtaatggactcggaggaggagaagcgtggcattcccggcaccgaggatgaaccaccagctacggctgcagatattccgctttcaaggactggtgctctacttctcattgcggcacaaaacgttaaacaggaactgtatgctcctgctaagcaagaggaggaagcgtcatcagtagccatcttcccgggacatgcaacgatacttcgcaactttatcgggactctgggacctcaaactgttggcatggagccagaggcacttctcgacacggttcttgccatgggtctcattgcattgcaaagaaacaatgtcggcgagcccaaggacgacgagtcatttgctcagtatctgcaaaccatctcactcatctctgcgaactcaccctccccaagcttacgaggccacgcacattacctcacaacaaccgtcttgcgttcgcacccccacgatcttgtccgtctaaccttcatccgcgacaccctcgagcactgtccctatgagaacctcanagcaagcgccgtatcctggctcanaggcgaaaccctcgaaagcaatacaccccacctccattcttcagaaggcacccacgaatcccgacacacaaacatcttcgccacccccgtcgccctgtccaccgtagccccgtacctctggg

SEQ ID NO: 62866 - DNA, 416 bp, Zea mays
  Clone ID: MRT4577_157336C.1
tcgtcgatttcgcgctgtgttgaatgatcaggatcaggtgataggcctattagtctggctggattgatcccctatatagattttagtgatggtttttgtgtcctgcaggtccatccgttgttttgggcttgcagcagttgaccaattgggaatttttactcatgcaacttgctatgcaattagaaatggcatataaaaaatgtacaaactagaagtggaagatttagtttttttattgattaccttttactggtctaaaggttctaatcataaataaggtatgtttatcaccacttggtcttttgtaagctgcgaaacagactatcaatggatgcttcatagtgtatgttgattatgtgttgaccacatgcaatacatctatgtaattttgagtttcaaacttgaacggttttttt

SEQ ID NO: 62867 - DNA, 267 bp, Zea mays
  Clone ID: MRT4577_157337C.1
gaaaacccggccgaccgcacgcgtccgatatggactctccctcattctgtgtggcgctttaaaggcaaccggacggaacgcctccccagtgcggcctatcaccaagggccacagctccatgcacctcgcccatctcatataccaactacacccatgccaatactcctctgagctcatggccccagccgagctacatcatctcttctgcagcacacgtcttgctccctaacatgtcacgcacccgtactcacagctcaccctgccctc

SEQ ID NO: 62868 - DNA, 491 bp, Zea mays
  unsure (1)..(491): unsure at all n locations
  Clone ID: MRT4577_157338C.1
atatatatatctatatacacattataattattatattttggatttttcnnggaaagctaaaacatntgaaagttgtatatatatatatagaaaaatatcacctccaaccttttaatacagtcaatttaactaaacaaatctgtacatatctttctatacattgcaaagacaactctatttttaaatttcttgactatattgagaatactcgacaatagatttatttctattactaatggatttcatatattttacagtcgtcttaaagaaaatacaaccaatatatttcaacttacaaaattggtctatacttttctatatattcatagtcaactacatttaaaagtgttgactaaatngagatttctcatgatatacttaaatagttaaatttgtcaactaatttagctacaacagatacataatgatctatctgtcatatgatttccaagatttttttgtcctctaaccacctgtaattaaacatacaa

SEQ ID NO: 62869 - DNA, 312 bp, Zea mays
  Clone ID: MRT4577_157339C.1
accacaaatactgtttttgccaaaggggccccaagggaaagggaaccccccccaggggcccccccaaacaattcaaagggttagccatgtagagactttattccatggaaaattttttcagcctattttttaccaaacaaatgggaatcgacgagggcggaaatataaagggtttttacataaagaacatttttgggtttttatgccccggtcgaattcaggcgagttttttttttaactgtttcaacagtttttaccccattggttttccagggctttgcaatgtaatcccaaagggggttttttggattt

SEQ ID NO: 62870 - DNA, 467 bp, Zea mays
  unsure (1)..(467): unsure at all n locations
  Clone ID: MRT4577_15733C.1
agcagtggtaacaacgcagagtacgcgggctaccaccggattgtctggtatgccgcaaagtgcaacaacttttctccaacagctatgggttctagccaacatacatccccatcggtgaaaaatacatatcacctacgctacatatgactggagtattgggatttatttgagaaataatggcgtacacacaccacacattattgtgcactaactactctagtacgtcctagctacggtttgtgtatttatttacacgtaatgaaacacacactactatacagaaggttcaatataggcagttctaaacctatttgtagtgtcgtttttcagtacgatagtgctaagaaccagtgaaaaaaaaaaaaaaaaaaaaaaaaaaaaaaaaaaaaaaaaaaaaaaaaaaaaaaanggggaaaaaaaaaaaaaaaaaaaaaaaaaaaaaagtcctctgcgttgttaccactgct

SEQ ID NO: 62871 - DNA, 227 bp, Zea mays
  Clone ID: MRT4577_157340C.1
ggcacgaaatatgaattttattggatcggttcttgggcatgaatgaccaattacatagggaaaaatcccctccagaacggagcccaattaaaacagaaattgcgaccatttactactgggcacttaaattccaccaaaataaaggagaaatttcagccctttaaatactactggaccactaaattccagcattgaatacgaagcatccccctatgaaaattattaaa

SEQ ID NO: 62872 - DNA, 596 bp, Zea mays
  Clone ID: MRT4577_157341C.1
gcaaaaagttctgaatcgatgggggaccagacatgacagaacaccagagctcgattacatccatatagacaagacaaccaggggaaaacatcgcatactgagcccccctggatggatgcagaccactaacccgtccttgactagctagctccctccaatcattcatatatactactgtatgtattatttacagcgtctcacaattcacaaccagccagtgagatctcagactcagttgctttattctcgctcggaattacaagaacagccacccaccccagacccaggcatgtcgaccgacggtgtggaagaagagctccaagataccggaaatccgctactttacagtcagcactcactcagcaacgtggcaatggcgccgcgcagtcactcactgcctcactggccttcgtccaggagcactcggaggctgtgaagcccctcggccgatatgctcggcgcgaccctgctgcccgtactcctgctcgctcggcccccctgggccctgggaggcgcgtcccggtggaacgcgaccagcaccgccgtcaggttgtccctggcgccccgccgcagcgcctcgtccacgacctccctgc

SEQ ID NO: 62873 - DNA, 348 bp, Zea mays
  Clone ID: MRT4577_157342C.1
attcggctcgaggttcttctacctgggatgcttattcgaccacatggatcatgggccggacccggcctgcctgaatgggttggccgacgactgtctaccgagtgtctcagccatgcagcaaagatccatggtcatcggctctatggagtatctcggcagaaagcactaccctccgttggagatgatggaggacaccttatggaacgcctcacccgtcagggtcctcgatgattgacatgcaggccgtgcacactacccaaggggaggttctatgggcgctcacgcatactgctattgtctgagcacgggcaccagcagcagacccaaggctgctagttaggctaaggc

SEQ ID NO: 62874 - DNA, 142 bp, Zea mays
  Clone ID: MRT4577_157343C.1
tcgcaataccccctcggtagacgcgtttctaatggctgtgttcctctcctggcagggtggcgcgcgcctcaccctcacccaggttccactcctacttctcctatgacctatatcatctgttctggtctgcgcctcgtggccg

SEQ ID NO: 62875 - DNA, 365 bp, Zea mays
  Clone ID: MRT4577_157344C.1
aaaaaccatgcatttttattggttaataaaaattccatttttttttatttgttctgacaggggggggggaccccacgggggggcccccacgggaaaaaacacacgggatggggtaactgggggatggggcttccccaacccgacttttacggggcagattaaagcttaccggtcgggggggggggatttttttgtccaacaacaacaaaggcccaaattaaaaaaaaccccgggggggggccccggcccaaataaaaaacttcttgtttgctggcccctggatgtttttttaggggtccacaaacttttggtgcttgggggcaaataaaaaattcttgggcggggggggggaaacctttgggggg

SEQ ID NO: 62876 - DNA, 342 bp, Zea mays
  unsure (1)..(342): unsure at all n locations
  Clone ID: MRT4577_157345C.1
aaaccaactaaccaggaaataatcccttttaactgatcaccccattaataatcagggaaggttcatatttcctgccctagaggcaaaggtccccaccaataatccatttttttaatacaaccatttttaccaccagggaaacttttttaattcaaatgttatcactaggctcaacctaatccatggatgcccgcctcccattttttttaacnggcggggcccctaactttatttagttaaaccatttgcatgtcactgaagcctttaaaaaatccccactgaaactagcagcgatacaccttggtggtttccaaaggatggacccccatttttaataacctt

SEQ ID NO: 62877 - DNA, 143 bp, Zea mays
  Clone ID: MRT4577_157346C.1
gggagaccacgagcaaaacacacctgcggctgacgaaagatgatcatgtcccgctagctcgtgatgttgggcctggtgaagctaggtccgggagacagagagagagtatgcgaactaagctaggcgctcagggcagggcaggg

SEQ ID NO: 62878 - DNA, 106 bp, Zea mays
  Clone ID: MRT4577_157347C.1
gacttgaccgcctcctggtcggaggcgaactctgtaggcgatgtccatcaactgcctcgccctggtgggggtatcgagacccaactttctcaccaggtcacggcat

SEQ ID NO: 62879 - DNA, 586 bp, Zea mays
  Clone ID: MRT4577_157348C.1
tccccatctttaaatattaatagagctccgcagagatctggggggggggggggggggggggggggggggggggggggggagtccccccctgccgccagctttttccacgccgtcaccgcactagataccctaaaaacttccctaccaccacgcgttcactttctggctcgtgcgtagcacacgaccaccgtacaagactttttatgcctacccgaaccctcgcccctaggagcgttttagaggtcaagacattcttgacagtaaaatacgcgccacgacaaagggcaagcgtcgggggtagagcccaccgagcgataatcccgggagccaaaggcagtaggacttactccctggaaagatttgaccccacacgaccactttctttaccccgactcatttttcggacccccgaacagtagagcgcgaaccttggcagacttagggaaagtggggagaaatccggtaattcaattgtggaaccgtaagggtggcgacgggcagttccaccggaggccgtttgtctaggactttggtccccaaacagattatccttcgggtcagtcgttcttttcccccctgcttgaac

SEQ ID NO: 62880 - DNA, 3364 bp, Zea mays
  Clone ID: MRT4577_157349C.1
gtttccttgcgcggcggttgctgctcgcccgatctgccgccgtcagccggcgcccgatctgctcctatactgtggcgcggaggcgcggagcagcagattgtaaagctaggaatacaaatacaagatgggcgcgtcaagacccccaagcacccctgcatcgaagggtgagcacacaccgatgtcgactcctggtggcagctcaagggccaaggaggagaagatttttgttacggtgagggtgaggccactaagcaagaaggagctggctgcgaaggatgacgtggcatgggaatgcgctgatacccagacaatcttgtacaagggccccgcgcaggaccgagctgcacccatgtcttacacttttgataaagtgtttgggccagcttgccaaacagacgtggtctatgaagagggagctaaggatgttgcaatgtctgcactgacaggcattaatgccaccatttttgcatatgggcaaaccagcagtggtaaaacattcacgatgagaggcgttacagagagtgctgttagtgatatttatagacacatagatagtactcctgagagggaatttgtgataaaaatatctgctatggaaatttacaatgagattgtcaaggatcttctgcggcctgactctgctccccttcggttgttagatgatcctgagaaaggaaccattgtggccacgttgcaagaagaaattgcgaaggatagccaacatctgaggcatctaatcagcatttgtgaagaacaaagacaggttggggagacggcactaaatgacactagttcacgttcccaccaaatcattaggctgacacttgagagcaggctccgtgaagtttcaggatgtgttaaatctttcgttgctaacctgaattttgttgaccttgctggaagtgaacgagctgcacaaacacatgccataggtgcaaggttgaaagagggttgccatataaatcgcagtttattgactttgactactgtcatcagaaagctaagttcggggaaaagaagtggacacattccctaccgggactcaaagctgacacgcattctacagctttctttgggtggaaatgcaagaacagcaatcatctgtaccatgagcccagccctgacacatgtagaacaatctagaaatactctattcttcgcaacctgtgcaaaggaagtcacaaatactgcgaaagttaatatggttatatcagataagcaattggtgaagcaccttcagacagaacttgctagactagaatcagagctgaggacccctgaccgtggctcctcttctgatatcctcataatggaaaaggacaggaagattagacagatggaaattgaaatagaggaactcaggaaacagcgagataatgcacagtcagagctcgaagaactgaggaagaagaaggttgatcaccagccagggtggaatccctttgactcgccacaaaaggcgcgaaagtgccttacattttcaggatcgctagagccaagtaacaaaaataagatgatgatgagctcgattaggcaatcatctactgctccatttatgttaaagcatgaaatccgcaagctggagcagctacaacaacagcttgaggttgaagcaaaccgcgccattgaagtacttcacaaagaagttgaatgccacaagcatggcaaccaggatgctgcggaaaccatcgctaaacttcaggcagaaatcagggagatgcaaactgttaggtctgagaacagagacatggagatgattacagatgaaggaaatggatccgatttgaaagatgagatttctagacttcatatgcaagacaatgatattgccaaacttgaggcgaagctggaaaatgtgcaacggtctattgacagattggtgatgtcacttccaaacgttgccatgccgtgtaatgagactaccccaaagtcaaacagatcaaagaagaagaagaggctgcttcttcctctgggtgtgagcaacaacatcaacagagcaaatcttctcagagcaccctgttctccccattcttctagtaggccttcggaatcagaagttgagaacagggcgccagagggtgacactatgtctgttgagggttcagaaaaggctactcccaccaagagtgaagatggagatatgtcatctcgtgatgaaacgccacgctacaggcgctccagttcagtcaatatgaaaaagatgcagaggatgttccaaaatgctgcggaagaaaacgttaggagcatcagggcttacgtgactgaactgaaggagcgagttgcaaaacttcagtaccagaagcagctgctagtctgccaggtcctggagctggaatctaacgagggcaagccgaatggagaggataattctgggcctctacaggatggtcctgattcatgggacagattattcaaagagcagatgcagtgcatcattcatctgtgggatcagtgtcaagtatcgatcatacacaggacccagttctacctgttattcaggggggacaaggctgatcagatatacatcgaggtcgaagtaagaagactcgtatggttgcagcagcactttgccgaggtcggtgatgcaagccctggtgctgttgaagaccctgcagtttcacttgtctccagtatgaaggcgctgaggaacgagcgagagttcctcgcgagaaggatgggatcaaggctgacggacgaagagcgtgagcggctcttcatcaagtggcaggtgcccctggacgcgaagcagcggaagctgcagctggtgaacaagctgtggacggaccccaacgaccaggtgcacatcgacgagagcgcggggctggtggcccggctggtgggcttctgcgagggcggcaacatcagcaaggagatgttcgagctcaacttcgccgtccccacgagcaggaggccgtggctggtgggctggcaacccatctcgaacatgatcagggagaagacccagcagctctggtgagaactgaacgcatcatggcgcagcgccgtgttgtacagatggaatggaacaagagacagacagtgcatttcggtttcagctctggaaattgctgatcaattaattgtggggggaagcgtctctacttccttcccggttgatcaaggcggacaagcggtcgtcggtctggtatccccttcctgtgtccctaagtgtagatggcgaattcgtggagtccgaagaatctgaatgatctcgcattctttacataatcccttgccaattttatggcaagttttgtttgctccatttgttttatggtatgatgatctggatctgatgagccccttcaaatttttttgccgagcccccctcaaaaaaaaaaaaaaaaaaaaaaaaacccaaaac

SEQ ID NO: 62881 - DNA, 237 bp, Zea mays
  unsure (1)..(237): unsure at all n locations
  Clone ID: MRT4577_15734C.1
gactcgaggccgcncaaaaaaaaaaaagggggggggggggggcaacaaacaccaaagncgagacacaggggcaggaagggcccagaaccaacccgggccgaccgaacgngaaanccagcgacgccancggaaagcncccccaaaagcgaggaggcangacagagcaaagaagccaacccgggggggggggggggagacanaaaacgagaaaaacaaacggagaccgagcagacgaag

SEQ ID NO: 62882 - DNA, 328 bp, Zea mays
  Clone ID: MRT4577_157350C.1
aaaaaaaaaaaaaaaaaaaaaaaaaaaaaaaaaaaaaaaaaaagtatttttctaaacgtccgctccatgcggatctcccccgtgcttcctctcttttcggcttggtcggggcatacgcaaacacaaggcagaagggggggctaggcctaagcacgacctctgtgctagagaactctgagccgtaaagtctccaggctcggtgcaggtagggagcgggtacggctccttcttggtctctcgacagtgacagagcggtcccgaccctgcgcaccgcccggtgccgagctcaagcagagcttaattattcgacgccgctcccacggcgccg

SEQ ID NO: 62883 - DNA, 475 bp, Zea mays
  Clone ID: MRT4577_157351C.1
aaaaaaaaaaaaaaaaaaaaaaaaaaaaaaaaaaaaaaaaaaaaaaaaaaaaaaaaaaaaaaaaaaaaaaataaaaacaaaaaaaaaacaactttttatagggaaaccttaataccattctattggcccgaccgtttatcaacttgcccgacgcgggaaacccttgggggtttcccgtcgtcaatcccctgtgcccaacctccctcctttccccagcttggcctacttcccgtataggcccccgtaccgtccgccctgtcccagcaccgtgcccacctttccttggcaatttggaaccccgccttgtatccggggctttaacccccccctcgttgcgtggattccgcccggcgtgccggttacatttcccgctgccttaccccccgctttttccctttccttccctcctttccttgccccttttgccgtttttcccccgcaagctttaattgcggggctccttttaggtttccgg

SEQ ID NO: 62884 - DNA, 735 bp, Zea mays
  Clone ID: MRT4577_157352C.1
gccctccctcgagttttttttttttttttttttttttttttttttttttttttttttttttttttttttttttttttttttttttttttttttttaaaaagggaaggggcccgggtgtcctaaaaaaacccccccaaaggggtggggggacaaaaactttggggatctcccctaaacatgatctaattaaacggcccaattgttaagggaaaaattgtttaaaaacaggaaacccctctcccccttttggggggactaaagggcctttttgggctccttggcccccttttgggccccctttttggggaggaccccaggggggattttggggaggacccccccgggggcaaggggaaccccccccaaaagtttgccaagctccttttttttggggatgggaaaaacccccgggcccggaaaaaaccccctttttttgttgccccttgccgggttgccgggaaactcaaccccctcggccggggggtcccccaaaacggggggaaggaaaaagggggcccccgtccctaccccctgggggaaccggccttttttgaggcccccccccccccggttgacgggaaactgccccccccccctggaggaccccaaacccgatttttttgtgggccccccggctttggcccccgccgggcctttttttgccttaccggcgggtccgttaaaggacatgggtgttacgggggggcttccaaatggaaaaaaaaaagggccctt

SEQ ID NO: 62885 - DNA, 350 bp, Zea mays
  unsure (1)..(350): unsure at all n locations
  Clone ID: MRT4577_157353C.1
ggcctgctcgagattgtacctgataaggtaacggtgtgacaagatgccaattntgagagggtaacagagtgtgacaatactctataattgtacagttcccttgaatgactcgtggcttagacgtgctctatgttattgtacggttcccttgaataacttgtgacttagaaatttagcttatattaaggttatcttgcattgattcatatactcattattataaggttcccttgaatgagtctgtattattgtaaggtttccttgaatgacttgtggctcagtaatttgccaaagaaatttatgtaacattcatgttatctagcaacgcgatccatagtgtgtattattgt

SEQ ID NO: 62886 - DNA, 742 bp, Zea mays
  Clone ID: MRT4577_157354C.1
aattcggcacgagggccgcaccaggccccgcactgcccatggacgcacgcctcccggggctctcgtgtccctgtccgtctcccgtttgcggcctccacagcaacgcggcgcgcggggtggcggtgctctcgcgatcctcgtgtcgattccagcggcgggggtgccattccctcccctggccgttgcccgcgcctcgcggtcgcgcaccggaaccggagccccgccgcgaatcgagggttgcctccgcctcgccccctcctcccgagactcctagcggcaggaattaggacgagggtaacaggcgacagaggctgcgaaggacgccccttcgtcaaatgcgccggcgaccgatccgtggaggagcagccggagcacgcaggaggttagtctaggcacgtattgtcgcctctcaccccctcttcaccctagacggttcgatccaatgtacttgctaattgctgatcgggttacgcggatgcgtgtaaattgagcggaattccagatgtagtcccattactacggagtagcagacctcataatcatatctccttgtcttccgcgattttctgcacttgatcgtctttagttggtggcgaaatgcttattctgggtttctacctttacctcgagcgcggcggcggggggcatttttatgcggtctcgaggaggaccaaggaggtgccctatagctttccgggaccaaatgtgcgagagtgacacggtgatgggtggcggggagcag

SEQ ID NO: 62887 - DNA, 582 bp, Zea mays
  unsure (1)..(582): unsure at all n locations
  Clone ID: MRT4577_157355C.1
ccccgcgtccggcagaataactttgttttctataaattgggatcaatggtctttggtctaaaaaggtaaatatgcaaagtttccaaaagaactctaatatttttttcaatttgtatggcatatgcctactctgtttactgtcactgcattccctcttcacagttcttcatgacttgcattgcaattttttagaataaatcaggatctattttctgttcattcaaaggatggttacatttaaatgataaatctccaatatcatttgtccttcaaattgaaacttttagtttttttaaatggtattcttttaatctaatttcttttcaaatttttcatcttgctaaggtaaaagtaccttggcatgtacattaggccgggagctccacacaagagggaagcttgcatatgttcttgacggtgataacttaagacatggtctgaacaaggatcttggctttaaagctgaagaccgtgctgaaaatataaggagagttggtgaagtancaaagttattttcagacgcgggccttgtatgtattgcaagtttgatatctccatataggagagaccgtgaatcttgcc

SEQ ID NO: 62888 - DNA, 1113 bp, Zea mays
  Clone ID: MRT4577_157356C.1
caaagatggtgttctttagcaaaattgtgcagaggccttctgcatgttgggctgaacaacggcattcctatgctttcaaagagaccaagctcctagaatgatggccgagataactccttgctggaccagttttgagaggtgttcaatgctctccttcaatcagcaaaagaggattcagcttgacttggctcttgaggcaaagcccaactttgaaagaattttagaccagaattctctagtgaaaacgcaagtggtaataatatgctggacattctcctcctcttggtcacaaacacacattattgagggtgtgggagaccttttttttgctagccggtcagccatccagcacctatttctaattgctagccaggatgattttgcactttgctggagcacaggttttccaaatccgcctccatgcctcaaaggtcacagatccttggaagattttgcacttagcagttcacattttgtttcaactattttgaacaggtgaagtagcaaagttattttcagacgcgggccttgtatgtattgcaagtttgatatctccatataggagagaccgtgaatcttgccgtgcattgttatcggatggtagctttattgaagttttcttgaatatgtccttggaattatgtgaagcaagggacccaaagggcctctataagcttgctcgtgcttgggaaataaagggttttacaggaatagatgacccttatgaagcaccactgaattgtgagattgagatcaaggaaatagatggtgtatgcccttcgccttctgacatggcggggcaagtggttacttaccttgaggagaaaggcttcctgcacgagtaggctgaatcgaagctacattccgggaaggtttcaatcagactagcgcagaataagtcaaaagcgctgccagttaccgtatggttacatagattgatctggatgcctagtatttttctttccgcgcttgctctaccacaagttccattcagatgagccaagatggttcctaatttctttgacctctggaatagattacctgtaatgcaattctgatgacagcttggggcagtatcgatttgtcacgggaaggtacgcctaatgttgagag

SEQ ID NO: 62889 - DNA, 2611 bp, Zea mays
  unsure (1)..(2611): unsure at all n locations
  Clone ID: MRT4577_157357C.1
accgtccttaatttctctctcgggcaggcgggcgctgagactaactaatcagacaataactgtaggacctaattacctaaccaacactgtgaaaactactaactagcccacccctcgaactggactcagttctttaagatgtttggcaccggcaaaacaccaaagatggtgttctttagcaaaattgtgcagaggccttctgcatgttgggctgaacaacggcattcctatgctttcaaagagaccaagctcctagaatgatggccgagataactccttgctggaccagttttgagaggtgttcaatgctctccttcaatcagcaaaagaggattcagcttgacttggctcttgaggcaaagcccaactttgaaagaattttagaccagaattctctagtgaaaacgcaagtggtaataatatgctggacattctcctcctcttggtcacaaacacacattattgagggcgtgggagaccttttttttgctagccggtcagccattcagcacctatttctaattgctagccaggatgattttgcactttgctggagcacaggttttccaaatccgcctccatgcctcanaggtcacagatccttggaagattntgcacttagcangtcacattttgtttcaactattttgaacggtaaatatgcaaagtttacaagaactctaatattcttatcaatcgtatggcatatccctactgattactgacactgcattccctcttcacagaatgacttgcattgcaatagaataaatcaggatctattttctcattcaaaggatggttacatttaaatgataaatgtccaatatcatttgtccttcaaatggaaacttttagttttttaaatggtataatctaatttcttttcaatttcattcatgggctttcacctccaaaactaatattgacacttgcctcaatcaccaccaggaacttgggattcactctctctcccggccagcttgtacccatactacaagcatttaagcgtaactgcagagggtcactgacgtgtgggcattatctaggtttggtccctaatgtcagtgacggagcaggttccaaatatgaagcttcatcagtagtgtatcgtgagaacacgtcggtgccaggctgccagcagcaacgaagccgcaccaggccccgcactgcccatggacgcacgcctcccggggctctcgtgtccctgtccgtctcccgtttgccgcctccaccgcaacgcggcgcgcggggtggcggtgctctcgcgatcctcgtgtcgattccagcggcgggggtgccattccctcccctggccgttgcccgcgcctcgcggtcgcgcaccggaaccggagccccgccgcgaatctagggttgcctccgcctcgccccctcctcccgagactcctagcggcaggaattaggacgagggtaacaggcgacagaggctgcgaaggacgccccctcgtcgaatgcgccggcgaccgatccgtggaggagcagccggagcacgcaggagttgaagggcaagctttgaaaatgtcatccactgtgccgaagtcatcaaatatcttctggcatgattgcctagttggcaagactgatcgccagaagctactcaaccagaaaggctgtgttgtctggatcacaggccttagtggctcaggtaaaagtaccttggcatgtacattaggccgggagctccacacaagagggaagcttgcatatgttcttgacggtgataacttaagacatggtctgaacaaggatcttggctttaaagctgaagaccgtgctgaaaatataaggagagttggtgaagtagcaaagttatttgcagatgcgggccttgtatgtattgcaagtttgatatctccatataggagagaccgtgaatcttgccgtgcattgttgtctgatagtagcttcattgaagttttcttgaacatgtccttggaattatgtgaagcaagagatccaaagggcctctataagcttgctcgtgcaggaaaaataaagggttttacaggaatagatgacccttatgaagcaccactgaattgtgagattgagatcaaagaggtagatggtgtatgccctccgcctgctgagatggcagggcaagttgttacttaccttgaggagaaaggcttcctgcacgagtaggctgaatccaagcaacatctggggaaggtttcagtaagactagcgcagaataagtcaaaagcgctgccagttaccgtatggttacatagattgatctggatgcctagtatttttctttccgcgcttgctctaccacaagttccatgtcagatgagccaagatggttcctaatttctttgacctctggaatagattacctgtaatgcaattctgatgacagcttggggcagtatcgatttgtcacgggaaggtacgcctaatgttgagagttagtctaggcacgtatcgcctctcaccccctcttcaccctagacggttcgatccaatgtacttgctaattgctgatcgggttacgcggatgcgtgtaaattgagcggaattccagatatactcccatttctacgagtagcagaccgaccgtcacgggaaggcccccctaatgttt

SEQ ID NO: 62890 - DNA, 424 bp, Zea mays
  Clone ID: MRT4577_157358C.1
ggccgcgagcggcgtagcggtgctcgtagtcgtaggcgcacatggcgagggcccctctgttgtactcggtgcagctgccgttcggcgaggtggacaggttcctctggctcttgagcccccgtttgaggtctcgcatcagaagcttctgaatcctgtacaagcgatggagctcgtgaacttgctgtctgaaagtctcttcatgcttcagcatggccaccttcagcgtgtctttatcgcagtgcctgaatgctcgctccatgggcattgtgagagtagtgcttctcactctgtcttcttcaatctagtgtaactagtacccgacggaggatgtcagagaagtgactcacaaactgtatccctactgagctctaactactccttggcgcttgccactctcagtttctgatcattgtatcccggccgg

SEQ ID NO: 62891 - DNA, 313 bp, Zea mays
  Clone ID: MRT4577_157359C.1
tttattttttttttgtggtttactcatatttactgtaacagtacaagtggttttcacatttggttgtgcataccaaaaaattgggaagatgtaatgaagccctgtaagcctgtactgtggctgtgttgtcacttaacaaacattcatgcttcagctaaccgtcagccgttcagaattggttactagtgtcgtgaaaactcttgctggatctgatggccgaatgagttggtttcagcaacttgcctgtgctcggacatccgctgctgacactcactacaaccataaggggtggatttgtacggcgacgatgtgc

SEQ ID NO: 62892 - DNA, 318 bp, Zea mays
  Clone ID: MRT4577_15735C.1
tgctctagatccgtccatcctggtggttttgtgatgtctacagcttccatctaattagagagtgctgggcaagctttgggacgacgtgctgaccatacctctccccgagacgggcctctagaagctccggaaggccaccaccgcccgcccgctcgtcatcaacatagacgcggacggcggcatgctactaccgggcgcagtcgacgccgtcgaccccgacgacgccggtgactccgtcgttgttacgacgccggacaaggccggaaacgtgtttcgcatattctttcaaccacagagctacctgggcaccaagggcat

SEQ ID NO: 62893 - DNA, 385 bp, Zea mays
  Clone ID: MRT4577_157360C.1
cctcaccccttcccatcatttaagaggctgtttgttaaagctctaggggtgtgaacacaagtgtgctaactgggagacttgaagaggaaggccattacccaggggtagggtagcagcagtctttgccctcgctacattccaccccagggtacaccggctcgtcctggaggaggaccacgaccagctcatttttttccacaaaggactccacagaaaccccacactcgtcaggctgcccccactggcaccccggcgagacctacaggacagaagacatgccctacatgtttcaagtgcactcaggatgggcattatgcaaaggcttggctagaggggaactttaatgccccatcttagaacaagcaacaaactgctgggaagggat

SEQ ID NO: 62894 - DNA, 555 bp, Zea mays
  Clone ID: MRT4577_157361C.1
ccggccggggagtatccagtttaaagttcagagttcaatctcaaagcaccaaacaaaaaggaagcagatcaagggcagccgagcgagcagagagtatgggggaggtggtcatgcatcaacgtctggggatgtttatagttttggaacagtgttgttggagattttgacgagcagaagcccaatagatccaacgttcaaggatggctagggcatcatcaactttgtggagaataactttccgaatcaagtatttcaagtcattgactctgacctcctagaagaatgcaggaactcaactcaaagaaataatttggtacaagaaaatgagatctaccaatgcttggttgatctactgcaagtcacactttcatttctctgttcattaccatctgaatgatcgaacaaacatgaagaaagtagctagcagaatgcatgcaatcaaaacatcacatattgggtggaagcacatgtaacaagagcaagggtgttccctaaattatacagtaacatacttaggatgggtcatagtcgaaaaaaaaaaaaaaaaaagcggcc

SEQ ID NO: 62895 - DNA, 378 bp, Zea mays
  Clone ID: MRT4577_157362C.1
gaatggatcctaacatatgatgagagcattattgactgctgacaacatcgagcgaagtgcttagagcacatgattacgcttacatgatatgcagacaattgacatggatctgaccgagcagacaagggaacttgagcatactttttcgaggagctgttcaggactacctaccatgaggtccttctgaaaacaggctaggatcccagttgtgcgcttgacgagccagactaactagaggatggtcctgatggttgctctcatagtgcaagaagggccaggcttgataggatcaggatcaaggtaaccctcaggcccacaaaacccagattcatacgtgcgatcactgagaacatgcaaggtacgctatggtaacccaga

SEQ ID NO: 62896 - DNA, 394 bp, Zea mays
  Clone ID: MRT4577_157363C.1
caggcgcccatatatgctatactatactctaggaagcgaggaccccagcggcacggcagtcaagacgctcgtatgcgttcgcgctcttagcgtctgggcgcgcgcgcctcgagcgacccatattgcagacaagttgctatcagtcatgtcattgcgtaccacgaaccatatagcaggcagctctgcattgtgcaaccagagctcgtcagctttatgggcgtcgaacgcgcctgacgctgcaagcaccatacctctatacacccttggatcaacaacgggcaggcgtatctatggtgggtcattagcacgaaccatcagtggacagcagctgcagtgactcgcgctacctgtgagcaaccaaggagctctggcagacctttctccctactcttaa

SEQ ID NO: 62897 - DNA, 230 bp, Zea mays
  Clone ID: MRT4577_157364C.1
gggggtaaattttaagccatttgggctagtttccctatagcaaagaaggccggaaccaaaacatatctcttcgagtccctgaaatcgaaaccccaaacccaggaagggcccgaacgtaacgcatatattaacagaagccgggaacgagccaaacaaaacatatacggcaagacacaaaaggcgtaacaccatcacaatttaccactacatgggtttaaacgtaacccatg

SEQ ID NO: 62898 - DNA, 317 bp, Zea mays
  unsure (1)..(317): unsure at all n locations
  Clone ID: MRT4577_157365C.1
aaancgcggtccctctaggcgcggcgggagttcatgcggcgcggcggcggcggcgggaggggcgacgccagctatcgcaagtcggtggtgggggtgcggaggcgtggtcacggcatcgaggtgttcttgcaggaagcagcatcatcagcccgacgacgccggctgcggcagcagcgacgaccactaccagcacgacgtgatcatgctgaggacaacgaagagcgggcgggcgttcccgccgccgatatccgtgatctgcaagggcgggcgggcgtggctctgcctgctggcgcaccgcgagggtggacgcctcgtgc

SEQ ID NO: 62899 - DNA, 317 bp, Zea mays
  Clone ID: MRT4577_157366C.1
ttacaaattatgcatgccaatagtgctatggatatattcgaaaataaaacggtgatcgtaaatccatcatggtcatgattgattcaacatcataatagatctacctctgccatctaccaagtttttgtcttaaaaagattaatctcacactcctcccatgacttacaccagaacataaactaagcatagtgtctacatcttagtcgattaacgaccctctcaatgtatgctttatcatcaatgaccctttaactgctcacatgccttgtaatcgctaagcctttcctacttcaaactaaagtcggaataaaataaca

SEQ ID NO: 62900 - DNA, 412 bp, Zea mays
  Clone ID: MRT4577_157367C.1
gaaaaggttaaactgaaacaaggactgaagagtgcaatgggcatttctagtgatggaaatgcgtatctgcaggtaaatctcgttgtttttgtttagtttttccctgtaggctatagtgacttttagttatctcttgttatcaaatcaatgtaggagagccagttttggaaactttacaaggaagatcctgcagcatgtgcgatcgtgatgaaaacttcagttggccttgtctacctgcttgcctgtctgctatcacctttcatgccctccttttctgatgaagtatggtcctagatgtcactgtatcttgtatgatttaattggactaatgtttttcacttgaatctcatgatgcgatccttttgcaaaggtattacgtcaattaaatttatctccagaagaaaatttgtca

SEQ ID NO: 62901 - DNA, 280 bp, Zea mays
  Clone ID: MRT4577_157368C.1
gtgttgggggcccaacacttgggtgggtgcattttacgaaaacggcggccctcaaacagggtttgccgggggggataacctatactcttccaaatttcgtgtagcatgcctaggacgccaaacatttttcttttcagcaaggtgtcccttggggcttgacacatcttgggggccttagacacataaacagcacaaaaggattcctagccgggtttttttgtccccctattttgggagcaccattgttcacggtgagccaagtctaatgccattggggggg

SEQ ID NO: 62902 - DNA, 571 bp, Zea mays
  Clone ID: MRT4577_157369C.1
tgaattcggcacgagggtgacgcctatacggcgcccccgtgaggcaacgatcccggcttctgttgtgagctgatgatgcccaaccgcaagaactgttttcactagggctgcagcctgaaagtgagggcggccatgcaggatgcagctgccgatgaggcgccctgctgttcggcatctgtgagagacgtcacaaatacttccatgaacattatcaccggcgtcgtcacacgtttctttgtgaaattgagtctggactgtgccacgtacttgaggaaagcagacctgatgatgtaccactgctacaattagctcaattaggcccttgatgtgatggtgaactccgttatcacctcctacatgctgacaaaattcgccgccttctacgaagatccgaacggagatctcatgctcgtcggatacgatcaggtcgacatgttcgctagcacctatgcgaaggttgagatcatgatgagatctgagagcacacgtgtggtgtcgtacaccgcgaggtatcaatgactatcccatgtgatcgttatgacctccatgcgtggtaacgtagatcaacatg

SEQ ID NO: 62903 - DNA, 560 bp, Zea mays
  Clone ID: MRT4577_15736C.1
tgaatcaggttttttttttattagaatcacagcgggcaacccactgagggacagagttgtaacaacgccacaggagccgcgccactccacaatataccaaccaaaccactcaagggggaaaggatcaaactatattatgtaccaaaccccacacaccgtttttatggtctgatccctctatacaacgccccagaaaattaagctgccgtcctaatcatcttgttgcatgcctttgctgagcatgactgatacatccactagggccaccccttcttttagctccatcacaaatggccccgctccacctacactgtgcattattattaccttaaccccggcatctcttggaggaagagcctcttagcccatcctaagtatctttgcgcattcgacccggaccctattgtgccctaccgacttccacagtaccgctggaggtagtggaacgctttcaaaccattcaccggcgataaaatgcacggacgtgtgagcttgagacctccctcccacatgggcaaggtccagaacgctacacttgactttgccggaaccccttttaa

SEQ ID NO: 62904 - DNA, 179 bp, Zea mays
  Clone ID: MRT4577_157370C.1
ttttattttatctatcttcaaaaatacagaacattctcgttaagttatacatagacaaaccatcctgaacccacatctatttcataattggactctttgatatcattatacaaaataatattctccgaccaatccaatcaaatgatttgaactagaacagctcatgatacatgcatcca

SEQ ID NO: 62905 - DNA, 114 bp, Zea mays
  Clone ID: MRT4577_157371C.1
ctggatggaaagggctttattgttggcaggagggcaggcacatgtgggggggaggatcaatcaagagaaagcatccagttagagaaagaattgattgttcatgggaataaatag

SEQ ID NO: 62906 - DNA, 1812 bp, Zea mays
  Clone ID: MRT4577_157372C.1
ccctcgaggccggccgggaatatcctgaagtggaagtatctcgcgtcgccgcgatcgaacacacacatcaccagctttgggagccgctgagagaaaccggacgcgcggtggtttgctttcgccggaagcgccgtcggattaagaagcataaagggaggaggacagatggcgggggatcggctgagctgggcggggctgctcaaatggagcctctcctacgtcgacggggcgggaccctctcgcgccgtcagagaggaggagcggcggtggctggcggacgcggtggagcagcacatgatgatggacgtggtgagccggatgagggagattgcgctgctcatgagcaccccgcccgccgtcctggaggcgcagggcatcacccacgacgacatcgaagatttgctgagtgagctgcaggtgcatgttgagtctatcgacatggcaaatgatttgcattctgttggtgggttggttccagttatcaagtacctcagaaattctaatgctcgtatccgagcgaaggcagctgatgtggtaacaacagtggttcagaacaatccgaccagccagcagttggtcatggaagctagtgggtttgaacctctcttatccaatttcagatcagatcctgaccttactgctcggataaaagctcttggtgcactatcttctctgattcgaaacaacaaaccaggagtttctgcatttcgtttagccaacggatatagtggactaagagatggtctttttgtgtgagtgtgtgtgtctatcaggaaagcattgagtctgactcactatctgctcagcgaaagccattcagattgttcagtatttgcacagttaggtttcccccaacttatgatgcgtttggcatccagcgatgactccggtgttcgagaggcagcattagggggcttgcttgagcttgcaagggacacgacacttggaaataggaatctactagcagaacatgacaggttacgaaggcttctccgtggacgtatggaaagcataaggacgatgactcctgaagatttggatgctgcacgagaagagcggcagcttgttgactcactttggatcacatgctaccatgaaccctccatgctccgcaatgaagggctccttgttctgcctggggaggaatcctttgagcaacctcctgatgtggctggtagattgttcgagccaatgcgccgagcttctgctaggagggcaccccctgctgagagatcagacccaagggatgaaactgggggaggaatggttttgcttttaggtggtccagcacaagatggtagatcaaactcccccaatcactgatctttctgggcggtgaggccgtgcgttaggaatggagaaatgaagcaaaccgtactgctgccttgtaataattatataagttgcttcgaacaacattatgtaatgtgtaattaggatttagggacctggcatccagtctcaaataagtaaatactacgttgtgtttatgcttgtatagtattagtggctcccaatcatgttatatacttgtacatgtgtttgttcgacgttgagtaaacagtgtgaatgctaaacattacatctattaaatctaagtagcacaacatttctactttcatggtagcatcaaatagaccaacacatgcatttgtaggaaactcttggatgtttgcttctgcaaatctgggcaactatgaaactgtgatcaatcaattctgttcatttgatctcagaccatatattcgtttcgattatgtagactcactctaaccagctgcagccatgcaggttttttatgcgccgtctttt

SEQ ID NO: 62907 - DNA, 383 bp, Zea mays
  Clone ID: MRT4577_157373C.1
cccacgcgtccggctcgttccgtttgttcccgtctccgacaccggactggtcacaacttcgacaccacttcggactccgtcgccaggtccgccgccggcgagagcgccgcagtcgctagctccgtatgcagggttagagtatacagctgcagcggcgggtgctcctgccggtaccgagtgagtgtgagacggcggaagctccacgtccagcggcgtgcccctccgtcttccgtcactccagatccgaggcagttcactgctgggacgcagtcagagctgttcggtggagctgacagaaaatagtccgtacagaattccatatgacagacatgcagaaggtggtcaacttggtgcttcatggtattttagtcgaaaagaaatag

SEQ ID NO: 62908 - DNA, 385 bp, Zea mays
  Clone ID: MRT4577_157374C.1
gaaaaatggaactaacagggcagattgaacgctaagagaaacatggccaggcaccactaatttacaaaacgaggttagctgctaccaacaacccacttacatagtgcaggattttgaaccgtgcaagaggtaagcctaagacgtacacaaataagcatcgattggtcggagatactgggttacatacatcagctaactgtctgccaccagaaagtgttaagacaccccatcgatgaccagatgcaagctagtccaacgaagccacctacataactgagctccaatcaccagatggcaagctactagtttcatcagagctcgctttcaaaggacgaacttgctctagttatgtagaccgtgaactttgctggctcaatcagctgga

SEQ ID NO: 62909 - DNA, 1398 bp, Zea mays
  unsure (1)..(1398): unsure at all n locations
  Clone ID: MRT4577_157375C.1
gatggttcccgtctccgacaccgcactgctcacaacttcgacaccacttccgactccgtcgccaggtccgccgccggcgagagcgccgcagtcgctagctccgtatgcagggttagagtatacagctgcagcggcgggtgctcctgccggtaccgagtgagtgtgagacggcggaagctccacgtccagcggcgtgcccctccgtcttccgtcactccagatccgaggcagttcactgctgggacgcagtcagagctgttcggtggagctgacaggtttttgagaagaggaatataatcatggttatcatgcagagtagtgactcttcacatcatggaattgtagaaaatagtccgtacagaattccatatgacagacatgcagaaggtgatcaacttggtgcttcatggtattttagtagaaaagaaatagaggagaattccgtatcgaggagggacggcattgatctgaagaaagagtcttatcttcgcaagtcatattgcacatttctgcaggatttggggatgaggcttaaagtgcctcaagtgacaattgctactgctatagtgttctgtcatcggttttttcttcgtcaatctcatgcgaaaaatgacagacagacaatagccacagtttgcatgttcttggcgggtaaagttgaagaaacacctagacccctgaaggatgtcgtactcatctcttatgagatcatccacaaaaaggatcctgctgcagtcgcccgaattaagcagaaggaagtgtatgaacaacagaaggaacttcttttgatcggggagcgccttgtgcttgtaacacttggttttgacatgaatgtgcaccacccttacaagcctttggttgaagcaataaaaaaattcaaggttgctcaaaatgcacttgctcaagttgcctggaattttgtcaatgatgggctacgcacttcactttgcctgcaatttaagccccatcatattgctgccggcgcaatcttccttgctgcaaagttcctcaaagtcaagcttccagcagacggggaagaggtctggtggcaagagtttgatgtaactccacgtcagttggaagaggttagcaaccaaatgttggagctctacgagcagaaccgtgttggaccaccaccttcacaagggaatgacaccgaaggcagctctgcaagtgtggttaatcagcgtgctcctgtgaaatctgaggagcctcctgcccatgaaactcatcaagcacctagacagtcgagcgtaccaggccgtcatgggcatgaccaccctcagcctgaaaagcagaactcaaaccagaggatacccaagagtgaagcaagggatggcactaccaacagcaatgaaggcacaaatatgtcctcatcaatgatggatgcngatgaaa

SEQ ID NO: 62910 - DNA, 365 bp, Zea mays
  Clone ID: MRT4577_157376C.1
gggggggaaaaaatcaagaaaatttggggccacgggaaagttctgctaaaaattgcaccgccaaaaccgggggcccatttataagggcccgcagggaaaaaataaggccctaaaaacaaacaaaggaaaagagcccccatttgggccaccccatctccaaacctgaggggggggggggggctccaccaggatttccccggtcatgcctggaacccccgggggcccccccgagggggctgggggccccaaggtggaatcttaagaaaagctttttcttccaaccccttaaaaaaatttatgttcccgacaaaccctgttttccaccccctgggactcgggcatgcacttttttgggggggaaaccc

SEQ ID NO: 62911 - DNA, 507 bp, Zea mays
  unsure (1)..(507): unsure at all n locations
  Clone ID: MRT4577_157377C.1
cccgggttctacccacgcgttttttacagtccaagagagtattctcacgctgagtgcccgattgagcatggtattgtcaggagttgggatgacatggagaaaatctggcatcacactttctacaacgagctccgtgttgccccggaggagcaccctgtgttgctcactgaagctcctctgaacccaaagccacaggggggagaggcccagattatgtttgagactttcaatgttcctgccatgtatgttgcgattcaagcagtgctctccctctatgctagtgggcgtactactggtattgttctcgactctggtgatggtgtgagccacactgtgcccatttacgaaggatatgcccttccccatgccattcttcgtttggatcttgctggccgggacctcacggactccctcatgaaaattctcacgggggaggggttacctccttcacaaccttctgcttgagcggtgaaattgtaatggtgacatcaaggnaggaagccttgc

SEQ ID NO: 62912 - DNA, 525 bp, Zea mays
  Clone ID: MRT4577_157378C.1
caaaggttatccagcaaaatccacgaaagagatctcccctatgacgcgccagaatggacatggagattcaccggcgatggtcggctgccttctcttcggagttctattttcctcccaggtgaatgatgtgcacttttagcttgggattctgaaatatggggacctcttctgtagcgaatttacatcaacaacatcctccaacacacggaatgctgcctccaaggcatgcaacacgcccctcacggctgcagacctcgctgtcgctggatctcttccagcaagttggtctcgcctgacatgcatcgactatgactaacactcggaggctgcacatgattccgacactgatagcttcagttccatagacgcatggccaattgagacgaagcatactaatggtgacccgactgccagcgatgttgtgactaaagatatatatataaagaagcttgatgatgtatccgagacgcaagctatacatgacacctcctgccgagtgagtaatatgcttctgcgtaagattgc

SEQ ID NO: 62913 - DNA, 479 bp, Zea mays
  Clone ID: MRT4577_157379C.1
cctcgaggccggccgggagtcagtactaagagcgcgaggttggcgccggtgtttctgctccacatcccctgagcctgctcacctactctagggggaccactaactactttagcggctcgctcgttctctcccaaacgcgcccattgcgggtagttgagagtagaacgacagagggattccgtttcctactgagccatgaggaaccgcggtgtctggacccgaagcacatgatgcaaactatactgccgtcagacgtgactagactgtcggggacaactgcatcgagatcgcaacgctgacccttccgttgctgccttcgggactttctacagccgagtcggtgctgtcaattttttttccgcggctgcccgcgttgatctactgaccacggtcttggatgaagcggcgccgccagactgaccatcaatctcttccagcagacgccgctgatgctcgtgatgatgcaggcaaatatcgac

SEQ ID NO: 62914 - DNA, 715 bp, Zea mays
  Clone ID: MRT4577_15737C.1
cgccgtgcgtcccaagcgtcttagtttatacgggggactttttatttgtgaaacatctaaaacaggctggtaacctgtattttgtgtggatttcaaacaatccattcatgtatctatagttgtctattgaagtagtttaacccatctgttgtagcgtaatatgtggatttcaggcaatagtagtctcctggctccgtctttgaagaaataaacctgcatgaccacacacttctggcagtagtgcaacacatgccagatctgcagttgccaacttgactcagaggtggcaggcaatcctgctcgaccttgccctaagcacccttgagtagaaggtgggggagcagacatcgaaaaggcatggtgcggggttgcagtgagggttggtgcacgatagagatgggtgtcgcaggcaatagagaagggcaagtagagagggctcagtcaacgcatgaatgcagagtgaataaatgggagtaggtattctgtttcgtgagttcattccaaatatggtgaatcaatacatgggtggagattgagcagccaatttagtgctctttttggttgcttgatgtgcctgtagtttgtgtggatttgaaacaattccttcactgactgttgaactgatgcaaaaatatgagagccctattgctctttgattttgtggatcttccatggtaaataattttgcaaaggttaaactaaatttatagcttgc

SEQ ID NO: 62915 - DNA, 271 bp, Zea mays
  Clone ID: MRT4577_157380C.1
cgtgcccgcagaatataaacacaatggccatgatcaagatcgggatcaaggggtgcgggaggatcctaaggctgggggacatggcggccctgcagattgacgacgtcaagctcgaaagcgggaacgacccctttagataaccggctacacgacctacaggctcaagtgcgacactgtgcacggacagtggaagcaccatgaatgaaaggtgcaagactccaaaagccttctgttacaggagaaggaggttgatgtattaggctgcacgaac

SEQ ID NO: 62916 - DNA, 568 bp, Zea mays
  Clone ID: MRT4577_157381C.1
ccggccggggtcctcacaccatcacttgttctctcctctctctctcgtcgtcgtcgtgtgcctggtcgaccagcgacctggctagctagctctccagctgcgcgcgccatggccaacccaacagatgccaatttagatgaatctgatgtttctctctcgatctctacaaagaggcctcgatcgatgtcctggcatgtggatccaagatctctaaacaaatgaattaagaggcatgatgcgttccctggccggcaacctataataagaggcaatcatggatccggagaccttgccccttgccggaggagaaagcaagcaggagtggtggcgtggtggtgtagctctcagtctcctccgcctctctgcccgttacaagtggctacacttgtgccgcgtagacttttccttgttaagtggcttggttctaaattttagacgctaataaggattatatcggattagaatcatatgctctattttcattcatttttaaattaaaattattttagtgcccaaataaactatgaaggaacatttggacccataaaaaaaaaaaaaaaaagcggcc

SEQ ID NO: 62917 - DNA, 136 bp, Zea mays
  Clone ID: MRT4577_157382C.1
tgtacagcggacgccgcccccttttttttttattaaaattatcacatttgctggcagtgggcaagtactagagtcaaagagaaacattcgtcctctggagcaacaagaatgtacacagaagtttacaactctacat

SEQ ID NO: 62918 - DNA, 106 bp, Zea mays
  Clone ID: MRT4577_157383C.1
aaacaaacactatgaacaaaggcacacgatattcctagtgtatgtttacaggtgaaatcaacatgatagagatggattatcatgttgatttcacttgtggaacaaa

SEQ ID NO: 62919 - DNA, 711 bp, Zea mays
  Clone ID: MRT4577_157384C.1
gtggaaaagcgagcaaatgatggaatacatcaagaaactttgagaatgtatcaaaggggttcttgggacagaagacacaaatatttctgaaatcgagaacgagaagatcagtggtcatcttgaggcgacacacaaacaacattttgagatagatacaaaccttttgaaattattgcatcatatatacttccttctacatttctctggctaaaattttattatttcgtacagtggctgacttgaagaatactattgaagaaacaatagcaatatgtgaggaacttcaaaaacaatgcacatctctaaaaaaggctctaaagatagtggaggccaaaaatggatgctaggaggcatctaagagatgaaatggaggcaaggatgggtgtggaatctttgcggaatggacttttagaagatctgaacatggaaaaatttgaggagaaacgccttagtgacttggtattagctaacgccttttgtgaatctcccctttcataaaaagaagcccctttgaattattattttgtcaacaatgcaaccttttgtgaatctcccctttcataaaaagaagcccctttgaattattattttgtcaacaatgaaatcttccttttctattgtgtactctctgtttgttcaatgttatccttagactaaaatgtagatgtactcttgtatataatacaaggttgcagcgatacaattgcaatc

SEQ ID NO: 62920 - DNA, 282 bp, Zea mays
  Clone ID: MRT4577_157385C.1
agcgaggagggggctggctggagttggtgtggctttaaaaacgatgatgttcgtaatccacaattcagcgtattcatatactactgtgtttataactcagaaaacccatcatcacacggcccactgcggcccaataaacttcggattcggacaccgagcacgcgcgctgcttcccttcacactcgtcacctgctcctccacattcgtgggcgtcctggcctccacattccccctagcttgagttgaagcttgccccaagctgacgccgcaagaaacttgact

SEQ ID NO: 62921 - DNA, 812 bp, Zea mays
  Clone ID: MRT4577_157386C.1
cttctcgatcgcaggccgagactcgcgcaaccttcccatcccatattaaactcgcccccaccccatctagggtttggccctgccaagagacccgcgacccccttaatccttctcccaacccttatctgtatccctctccatggccacggcggcggcggcgaagcggaagccggtgttcgtcaaggtggatcagctcaagcccgtcaccagcggccacacgctcgtcgccaaggtgctcagctccaagaccgtcctccagaaggcccgcgccgctggcggccccggcccagccgccaagcccaccaggatcgccgagtgcctcatcggcgacgagaccggctgcgtcctcttcaccgcccgcaacgaccaggttgatgttttgaagcctggcaacactgtcattatccgcaatgcaaagattgatatgttcaaaggttcaatgaggcttgctgttgacaaatggggccgtgttgaagtaactgaaccagcaagcttcggtgtaaaggaggacaacaatctttcacttgtggagtatgaacttgtcaatgttgaagagtgaaaatcacatcgatcttaatcagaagaagtgctttcccaagcctgttggtcaaatctacttgttgagttgtctagaatgtgaaagatggatcttctgagttcatattggaattgttcactcgaactaccgcaagttccttcttatcaagcatttctatctatgagtgattgttagttgctgcagcagttgtgtttctgagaacaatgtgatgtgctgagcaatatacaatttgatctcctaaatggattatgcg

SEQ ID NO: 62922 - DNA, 1479 bp, Zea mays
  Clone ID: MRT4577_157387C.1
atgccgccaaagaaagcttcagcgccaggggctgccgcactacagccactagacccaaatcaggagaccctttctcttcgagaggcccaaagccaaaagaggaaggccactagcccaacactccaggaggaggagttggaccaagaaatcagaaacatggagataatccatcagcaagtacaaaggaagaaggagaagatggcccgactggctgatcctcaaaggcaaatcgacgaagccactgaaaaggtgcttcatcaagaaggcctattcaatgaggatggatggtatgatgattttaatcatgatacctttacctttgatgatgcttctcccttggcagtagaactgcaggctatcccatggcctccatcatacaagccacctcagctccctatgtatgatgggcattcgggtccgaagcaatttttgatgagttatgaagcaaccatatcttcatatgaaggcaatgcagctgtcatgaccaaatctttcgtcatggcagttcggaatgtggcccaaacatggtattcttctcttcggccagggactattacttcgtggcagaagctcaaggatatgctactgacaagctttcaaggctttcagatgaagccggtcatagctcaagccctgtttcaatgcacgcaagaccatgaggagtatcttcaggcatacgtccgaaggttcttgcatctcagagcacaagcgcctacagtgcccaatgaaattgtcattgaggccatgatcaaggggcttcgtccaggacctactgcccagtattttgccagaaagcctccacagactctggagaagctgcttcaaaagatggatgagtacatcagggctgacaatgacttccgccaaagaagggaggaagcttacaggttctctgagatgaccaggggattcggaggaagaatccactcgaggcatgtcaggtcaattcacaactccactcagaatggcaacagaggaagtcagctgcagaggccgcaatattcttcacaatctttggggcagcaacaaagctcttttcggccgccagctccaagaggcagaggcaccaggggctttggaggaagatatggggagcaacctaggaagatttactatctattttgtgaagacaagggccatactacaagaatgtgccaaatcaccatccaaaagcagaaggagatcgcagaagccgaagcccgacaaagtcaaccgaagcaggtcctacacactgcttcgtgtcactcaccctacataccagaatatgtgggtaatcatcctgtagcttctgttgcttcggctagtcagccacaggcttcttggccacaacttccacctccgccgccactacaacctgcctattcacgaggtcagcagccagaagggagccatcagactcatcagcagcgagatctcagggaggaatccgaagctcgcacagtcaacagtactgtgccagaatcaaaacacatctattga

SEQ ID NO: 62923 - DNA, 1119 bp, Zea mays
  Clone ID: MRT4577_157388C.1
atgccgccgaagaaggcttcagcaccaggaaccgctgcactgcagccgttggaccaaaaccaagaaaccctttctctccaagaagctcggagccagaaaagaaaggccaccagtccaacactccaggaggaggagctggaccaggaaatcagggacatggagatcatccatcagcaaccactgaagaagtatgccatcttgctcaagacgaacaagatcgaaggccccaacacagggagcttcatcaagaaggcttattcaacgaggatagatgcagaactgcaggctatcccatggcctccatcatacaagccacctcaactccccatgtatgatgggcattcagatccgaagcagcttttgatgagttatgaagcaactatatcttcatatggaggcaatgcagttgtcatggccaagtccttcgtcatggcagttcagaatgtggctcaaacatggtattctactcatcggccaaggactattacttcgtggcagaagctcaaggatatgctagtgacaagtttccaaggctttcagacgaagccagtcacagctcaggccctgtttcagtgcacgcaagaccatgaggagtacctccaggcatatgtccgaaggttcttgcgtctgagagcacaagcgcctacagtgcccaatgaaattgtcattgaggccatgatcaaggggcttcatccaggacctactgctcagtatttcgctagaaagcctccacagactctggagaagctgcttcaaaagatggatgagtacatccgggctgacaatgacttccgccaaagaagggaggaagcttacaggttctctgagatgaccaggggcttcggaggaagagtccatccaaggcacatcaggtcaatccataactctactcaaagtgatgacaaaggaagtcagtctcagaggtcacaatatacctcacaatcttcggggcaacaacaaagctccttcaggccaccagctccaaggggcagaggtgtcaggggcttcggaggaaggtttgggaatcagcctagaaagatttactgcttattctgtggtgaggacaagagccatactacaagaatgtgccatgtcaccattcaaaacaaaaggaaatag

SEQ ID NO: 62924 - DNA, 1224 bp, Zea mays
  Clone ID: MRT4577_157389C.1
atggagattatccttcagcaagtacaaaggaagaaggagaagatggcccgactggctgatcttcaaaggcagatcgacgaagccactgaagaagtgcgccatcttgctcaagatgaacaagatcgaaggccccagcacagggagcttcatcaagaaggcttattcaacgaggatggatggtatgatgatttcaatcatgatgcctttacctttgatgatgcttctcccttggcagcagaactgcaggctaccccatggcccccgtcatacaagccacctcagctccccatgtacgatgggcattcagatccgaagcagtttctgatgacctacgaagcaaccatatcttcgtatggaggcaatgctgctgtcatggccaagtccttcgtcatggcagttcggaatgtggcccaaacatggtattcttctcttcggccagggactatcacgtcgtggcagaagctcaaggacatgctggtgaccagtttccaaggctttcagacgaagccggtcacagctcaggccctgtttcaatgcacgcaagaccacgaggagtacctccaggcatatgtccgaaggttcttgcgtctgagagcacaagcgcctacagtgcccaataaaattgtcattgaggccatgatcaaggggcttcatccaggacctactgcccagtatttcgctagaaagcccccacagactctggagaagctgcttcagaagatggatgagtatatccgggctgacaatgacttccgccaaagaagggaggaagcatacaggttctctgagatgaccaggggcttcgaaggaagaatccacccgaggcatgtcaggtcaattcacaactccactcagagtgatgatagagaaagtcagctgcagaggccacaatatactttacaatctttggggcagcaacaaagctctttccggccgccagctccaagaggcagaggcgccaggggcttcggaggaagatatgggaatcagcacaggaagatctactgcctattttgtggtgaagacaagggccacactacaagaatgtgccaaatcaccatccaaaagcagaaggagatcgcagaagccgaagctcggcaaagtcaaccgaagcaggtcctgcacactgcttcgtgtcattcaccctacataccagaatatgtgggtaatcatcctgcagcttctgttgcttcgtctagtcagccacaggtttcttggccgtag

SEQ ID NO: 62925 - DNA, 259 bp, Zea mays
  Clone ID: MRT4577_15738C.1
gatgtctatcttaggcctaagaggggtaatacactgtccgaaacttgtcaccaaacgccgtcggtgcagacgtgagatccgacatacacgatatgcatgggcgtgttggcggaggatgctctattacttgtgctcgaaattgatggtctgaaccgatgactaaggtattttgagcatggaatgctcccgcttacatacttggttctcaataaggcacgcatgtgcgcatgtgacactggcacagacgaacccgcacagt

SEQ ID NO: 62926 - DNA, 625 bp, Zea mays
  Clone ID: MRT4577_157390C.1
attcctatatcttacgtcgaggctaggtagctgaaggaacaccaatgatgaacgcgccctccaattggccctcctccagacctgagaggaggccaatcaaaaaagaaatactcgccatatcaaagatccaactcgtccccacgcctgtattgcaaatgcccatgcccgaataatccacagctcaagtaatagcgatcacggcctaagacggataccgaatagaagaacttcattcattgcgagccggtcgaggggataaaaaaaggcgtgcgaactatctgtaaatactactctaagcctacccacgaatctcaatgaccaacaaaagaactggctattagtggggcaaagagtctagatgtaccaagaatacaaaagagggactcttctattcaatccattttaaataagacgtatatgaggtcaagctaataaatagagctggggatatagataaagcagccagtgaaaaaccgaaataactagttatagcaagcatgaaggggctcaattccattttttgttactacactacatatgggggtaaaggacttacctaactacaagctatggaaaatggataattcactcgttattctagataatactaaacaaaaaaaaatat

SEQ ID NO: 62927 - DNA, 654 bp, Zea mays
  Clone ID: MRT4577_157391C.1
atgccgccgaagaaagcttcagcgccaggggctgtcgcacttcagccactagacccaaatcaggagaccctctctcttcgagaggcccgaagccagaaaagaaaggccaccagtccaacactccaggaggagttggaccaggagatcagaaacatggagataatccatcagcaggtacaacggaagaaggaaaagatgtcccaactagctgatcttcaaaggcagatcgatgaagctactgaagaagtacgccatcttgctcaagacgaacaagatcgaaggcctcaacacagggagcttcatcaagaaggcctattcaatgaggatggatggtatgatgattttaatcatgatacctttacatttgatgatgcttctcccttggcagcagaactacaggctatcccatggcctccatcatacaagccacctcagctccccatgtatgatgggcattcagatccgaagcagttcttgatgagttatgaagcgactatatcttcatacggaggcaatgcagttgtcatggctaaatccttcgtcatggcagttaagaatgtggcacaaacatggtattcttctcttcggtcagggactattacttcatggcagaagcttaaggatatgctagtgacaagtttccaaggcttctag

SEQ ID NO: 62928 - DNA, 139 bp, Zea mays
  Clone ID: MRT4577_157392C.1
cagtcaaagcaccatttgattataatagtatctgttacccagacggacacaaaccagtttctcgcactggcatcatacaccgccacaacaaaacggaaccaactatttgttgactgaaacaaggtccacatttattcac

SEQ ID NO: 62929 - DNA, 268 bp, Zea mays
  Clone ID: MRT4577_157393C.1
cagaaatggcttggcgaggatggaagcatagagacggatttggccgagcgcacaacagctcgccaaagacggcgtcgaagcagcagcgaccgtcgatcgagtgagggagtcatcctcgattcgcggtctctcgactcggcacgggggcaaccatggcgttgaaagtaggcaacatgaggagccatcgattgacgccggtctttggaatcggcggatctcgacgatggcgacaatgaggaggccacgaagcgtcatcgagcggagcgcg

SEQ ID NO: 62930 - DNA, 520 bp, Zea mays
  Clone ID: MRT4577_157394C.1
ataaaaaaaaaaaaaaaaaaaaaaaaaaaaaaaaaaaaaaaaaaaaaaaaaaaaaaaaaattaaaaaaaaaaaaaaaaaaaaaaaaaaaaaaaaaaaattttaataaaaaaaaaaaaaaaaaaaaaaggtttttccttgggccggaaccaccttagggggaatttttgaaaatttccttaacattgggggccgtttaaccttgtttttaaggggccaaattgcccttttagggggtggttttaaaattaattggccgtgtttttaaaacgttttatttggaaaaaccttggggtacccaaattaaatggctttgaaaaaaatccccttttccccagttgggttattaccaaaaaggcccgccccattcgcctttccaaaaatttgccaaccttaattgggaattgtccttcccctgaaccggccatttaaccggggggggtgggggggtacccccaagggtgaccgttacatttgcaaggcccttagggcccgttcttttggtttttttcctttcttttt

SEQ ID NO: 62931 - DNA, 290 bp, Zea mays
  Clone ID: MRT4577_157395C.1
aaactacttctcacagttcttatttaataccaccaatgctgaaccaaccgtgggtattttcaatattggttgggggcgcacgcttaacaccttcgatgtgtcttccccaactaccaccataccagacgggtgtttacgtctgacggttgacacccagcatctgagggatgtcaatttccccaccaactctctataccaatttattgatgaacttcatatccagaaattttatgattttcatgaccctcattactcaagggactttattgattgtttccaccctgctctat

SEQ ID NO: 62932 - DNA, 312 bp, Zea mays
  Clone ID: MRT4577_157396C.1
gttccgggcaggcaaccaaaacgcaaggtgtcccggcgagcacaggaccaagagagcacaggaggatggctcgtacgacatacaccgccctgaagaacacgggaagcaaggccctcccgaagcagctcggcaccaaggccatgtggaagttcatgtccacgaccacccgcgtgaagatgaacaacatgttcaggaacggaaccgtggagctgggcgcgatcccgaagtaccagaagagcacggacctgatgatccataagctggccttccagcccctggtgcgcgagatcacgcatgtacttaatacagacc

SEQ ID NO: 62933 - DNA, 907 bp, Zea mays
  Clone ID: MRT4577_157397C.1
aatgatgtttatttatcagttgtcttcttgttctttgacgttcccatatgtctatgctgcccgctaggaaccttggtaggcaggatgacagagctgtatgcctgaatgcaaccaggtgcttagtatccttactgaagccacctggaataaccagttcaaataaggttttgttaacaggcaacttacacagttacactgcatgtgaaatccccaagtttctgacctaagaacccgtatgtgggttgagaaatactgtcctccccccctttcttcggaatgaaattacctgaattcttatgtctagcatactgaccattatctcgagatcttgtactttgcagttgtcttgcaggttagtggttcgtggactgcacctcatagcccatgtacagcgatggagattcagcaaggtgcaatcaaacttattcacccgttgctgaatttgtgaatgccatccgctgattcctgttgatcaaatctgcgttgtcaaacaaacagtctttttctgttattgattctcatcaagagattatctccatttctgtctgttctgccaatttacagggctctggagtcacaaactcactgtcatgaagtgcagggtatctggttagcgttgcttaagcatagcttatgatgtttcactgttcccaagtgagtaaactaagaaatttacgaaatagctagattactatagaatttttttgaaattatttgagtgaagattgttcatgccatttatgggcattggcttgggttgattctcttttctcttatacctcacccctcggatattacagattctgacaggagcagaattagaacagcccccccttaacatcacaaatggatatggtttgtgctgtaaatcatcatgtagtcatttgcatagaattcttttttttat

SEQ ID NO: 62934 - DNA, 228 bp, Zea mays
  Clone ID: MRT4577_157398C.1
atccttaattattctggatcgacccacgcgtttcgctaagatggactttggtcgaatgaaatagtcttgttagcattcaagtataatggcagacatctacaactccctacaagctttgggtccttaaaacattgaggatacacataagtctggagtagctttatgtgtaaggctttttgcgatattaccttgatagcgttatgtactttattgtgatatgtatttttg

SEQ ID NO: 62935 - DNA, 205 bp, Zea mays
  Clone ID: MRT4577_157399C.1
agagagaggaaacctacccagcgagcatggagagtgccaacaagaaggtcgcagccgcggggcgggttttgctgctgctccaggggagggcagctccgacgacagcccgcctcctgcagcaggcggacacctcccccgactcacgcctgcacatcatgacgagggagcttgaccatcaaaatggagcaatcccctgcggcgaatc

SEQ ID NO: 62936 - DNA, 347 bp, Zea mays
  Clone ID: MRT4577_15739C.1
tttcctgtggcgtggaggcggcccataccggcgtgtgatgtgcgcgccgcgtgcgcgaagcgcgcgagggacttgactgcaacgcagtggggctcggcagacgagatggcgtggctgccttaccccggggggtcgtcacgccgctgaccataaggggcatgctcctaagggcggcagctttgagagaatgcaacgaatggcatgatcaacgctcaagggcgagagcgcactgtggaagcactacgtctccttcgacggactctccaaggccagcgatgacgcaaggaccatcaggggacacatcgtgtaaccatagggccgcatctccatctggaattcaaacactg

SEQ ID NO: 62937 - DNA, 1876 bp, Zea mays
  Clone ID: MRT4577_1573C.1
ggtctagaagtcccgggtcgacccaaacgtccgcggacgcgtgggcggacgcgtgggccggctcccctttcccattggcctccacgatggcgctccgcctcaacgacgtcgcgctctgcctctccccgccgctcgccgcccgccgctgccgcagccgcagccgcagcagcggcaggttcgtcgccgtcgcctccatgacgtgcgccgtctccaccaaggtcgagaataagaagccatttgctcctccaagggaggtacatgtccaggttacacattcaatgccacctcacaagattgaaattttcaagtcacttgatgattgggctagaaataatatcttgacaccctcgaggccggccgggacacgaggccggccgggccacacatcccaatctcgcgagggcccgcagcagcggcaggttcgtcgccgtcgcctccatgacgtccgccgtctccaccaaggtcgagaataagaagccatttgctcctccaagggaggtacatgtccaggttacacattcaatgccacctcacaagattgaaattttcaagtcgcttgatgattgggctagagataatatcttgacgcatctcaagccagtcgagaagtgttggcagccacaggatttcctccctgacccagcatctgaaggatttcatgatgaagttaaggagctcagagaacgtgccaaggaaatccctgatgattattttgtttgtttggtgggagacatgattaccgaggaagctctaccaacataccagactatgcttaacaccctcgacggtgtcagagatgagacaggtgcaagccccactgcctgggctgtttggacgagggcatggactgctgaggagaacaggcatggtgatctgctcaacaagtatatgtacctcactgggagggtggatatgaggcagattgagaagacaattcagtatcttattggctctggaatggatcctaggactgagaataatccttatcttggtttcatctacacctccttccaagagcgggcgaccttcatctcacacgggaacactgctcgtcacgccaaggactttggcgacttaaagcttgcacaaatctgtggcatcatcgcctcagatgagaagcgacatgaaactgcgtacaccaagatcgtggagaagttgtttgagatcgaccctgatggtaccgtggttgctctggctgacatgatgaagaagaagatctcaatgcctgcccacctgatgtttgacggtcaggacgacaagctgtttgagcacttctccatggtcgcgcagaggcttggcgtttacactgccagggactacgccgacattcttgagttccttgttgacaggtggaaggtggcggacctgactggtctgtcgggtgaggggaacaaggcgcaggactacctctgcacccttgcttcaaggatccggaggctagacgagagggcccagagcagagccaagaaagcaggcacgctgcctttcagctgggtatatggtagggaagtccaactgtgaaatcggaaacccattgcgactgcttgagttggagcatagtctatcatgcaccctatgacgcatcgcgacgacaagacctggtgtgtcgcgtgacatagttgttcaggttttgaccaaatggtctgggagcatttgttttgccttgtgccgtctcatagagcgttaggatagtgtacgtctgtgttctagctttgttttgtctgctgctttgatgtacaacttgtggccatgaggctggacatggagtgaacatgttgtacattgtcgctggcggtatgtttcggtatgttatttcagttgttgagatctgttaatttttttgtgagctatggaggtcgttctgttctggtcgtgg

SEQ ID NO: 62938 - DNA, 333 bp, Zea mays
  unsure (1)..(333): unsure at all n locations
  Clone ID: MRT4577_157400C.1
cctcgcctcctctccctagtgtggggggggggaggggggggtgacagaaagcgacgcggggcgagcgaggagggccaaggcgaagaggggaagcaccgcaccaggacccttgttcgccgccgccgcctctgatctccgcgaggttgtcatgattcaatatgtcnaccancacattggggttttgctnggggcggttnnncaatnttanaacaacncanncctcccaaacagcaataaaaaacccttcntctctaancttcttcanccaanttacnaannttccaancctnaanacctccaanaaactttatttctccnccatnnctttataca

SEQ ID NO: 62939 - DNA, 532 bp, Zea mays
  Clone ID: MRT4577_157401C.1
gggtacctcgaggccggccgggccggggatacatcagatcagccgatcctgctcgcggtaaccgccgccattctacccctcctcgtacgcacccttgtcggagacgagtatacgccacagctggaattatcggacgtagagtaccgcgaaccgagagatccaatgctgtgggtggaggggcgggggttgttcatggcaactggcgcgatcgccgaccagctttgcgtgcgatcaagtactgggggaagcggcacgaggcgctcatcctccccgtctacgacagcatcagcgtagcgctcgaccccgaccatgtctccgccaccaccactgtcgccgccggcccctcattcccttccgaccgcatgtggatcactgtcgcggagatctctctattaggagctgggtttcagagctgtctcgcagaaatcacaaagcgtgctcgtgactctgaggacaaggagacatgcgtcaagatcgataaagaggactgggataagtggcctggtcacatagcctcctactacaacttccc

SEQ ID NO: 62940 - DNA, 325 bp, Zea mays
  Clone ID: MRT4577_157402C.1
gggggcccaacaggtgggcaaatttaagaatttaattaacagaacccaaaggggggtctaaccttgggggaaaaaaatggccaaattcgtttaaaaaaaaggggcttttacaaataatgggtcaaggaaacaagggggttccctaaagggttttttaaaaacagggttaaacaaaaaccataggggcattgggcaatttctggttaacccgggttttttgaacccggtaaaaaggggaaagagaaaattccccacattattcccaaaaaggtttggccaaaccttagggccaaacgggggaaaacttaacacaaccccccttttg

SEQ ID NO: 62941 - DNA, 487 bp, Zea mays
  Clone ID: MRT4577_157403C.1
atcactgttctccttcctcctctccgctccgttgccgccggccctgcgcccccgccccggctccccgccacgccgaccgcgccctgcgcctctacacctcaaatctgctttgtagcataagctcgctgcttgttagggtcgatggcagagagggagcatcgaacagtatttgtcacggtggggaccacgtgctttgatgcccttgtcatggccgtagattctccggaagtgaagaaggctttactgcaaaaaggttacagtaatcttctcattcaaatgggccgaggaacatatgttccatccaaggtcagtacgcttgtacctctgtagtaaactaacaactatttaattcctgtctactagtttgcattatgacaatctgtactctttcttatagggatgttcgtaactggtgatttaagtcatcctaaatgaaaaggccaactgaaagcacaacatatatgttttttttggcaaatggatgtca

SEQ ID NO: 62942 - DNA, 226 bp, Zea mays
  unsure (1)..(226): unsure at all n locations
  Clone ID: MRT4577_157404C.1
cgtgcgtgttttnaannagttataaanangggcggggtttgatttatataggtggtcntaaaaaatagacaagatcgtacagtctaagcagactaggcacgcccgcctgtgcgttgcggaccctaatctgctgagctcgctgtcaggcacctgctcgtaagtcatggtcaccgtccctaactaacacttttagcactttttacattttcattaagaggtctacctt

SEQ ID NO: 62943 - DNA, 435 bp, Zea mays
  unsure (1)..(435): unsure at all n locations
  Clone ID: MRT4577_157405C.1
tctcgctctggcttttgttgttcaaggctcatagcatgatgatcccctcctctccatgactccgtcgccatgggcacgtatagctctgatcagcttcaaccatcatggggagtcaagagtcggagcaggccaaggtgctcccgggaaccgactgcccgcagcagccaccggcgagcaggacctggcagaggaggttcgacgatgaaggcaagaacgtcgccatgttcagcatgaccatgagcgacctggtggaacttatgcccttgatggtcaaaatactcaagctgcacgtggaagaaaacgccgaaggccgagtgggttaccaaactctatctaggattattgcgnttctttctctctctctctctctctcttggcaacacccagttcatgatcatgtttcagtgagtgctgaaacatgactaaagcatgact

SEQ ID NO: 62944 - DNA, 2230 bp, Zea mays
  unsure (1)..(2230): unsure at all n locations
  Clone ID: MRT4577_157406C.1
ctgtgcggcgctcgagccggccttgccgtacgagaacctctcaagtctcattacccgtcctcgtcccttccgcggccagccaggcagtcaggccggctggccgaggcagccgtgcccacgtgcacgaagcagcgggccgtgacgtggtttggggcgagcaggtgaccggcgagtagaagtagaagtaggctagcaacctgcacgcctacccgtcccacgcacctcccgacttctccggttctcccttcttcatagcagccacccacgcatctcagcgccgaggcgagcgaggacctcgtggttcgtgccctgctcacctcgtgaggatgtggatcgcgaggcggctcttcctcgcggcggcggcgctgctgatggctgtgcttctgctcgtcgcggggccggtggcggcgcaggacgcggcggtggagggcgtggccccgcctgcggaggagatcgcggcgaacgcgagggccaaggaggcggcggttctggccggcgagctagtgcagctcagggcgaagatctccgcgttagagtctcgcattgcaaagcagaacctggagttcaagaccaagaatgatgcaatcgaaacactgaatatgattgtcaaggaaaagtcacagaagattgctactatgcggacggatgtaacttcgcttggggccaaagggtctttagctgcagaggagcaggcaagcaaggccaatgcactggctattgagctcaagaagcagaccgagaagctcaagaaggatattacagaacaaaaaattaaaaaagcagctctggaggctagggctggcaatgctgataagaaggtgcaagagctaaatatgaagctggagaagctccaaggacaagcagtgatcaaaagcgcaggattcagaagactgaacatgctcttaaagctgctgaggaggagctgatgaaggctcagttggaaacaacaacaaaagtaaaacagcttagagaggttcatggagcctggttgccaccatggttagcgacacatgcagcccgctctatggaggtgatgtcaaatcactggaatgaacatgggaaacctgcctttgacagcttcttgcagaaggcatctgaaaaaacagtgcagacaaagaaatgggctgagcctcatctggaaactgctaagacaaaatggatgcctgttgctaaagaaaaatgggttaccttgaagaaacatgcaaagccctatgtccaaatggtctcagagaaatcattggaggcttatcaaacatcaagtgactttgtcaggcctcatcttgtaaatgcacatcaagttgttgatccctatttccaggaagccaagaaattatccaagccatatgttgatcaaattgctacagctactaaaccacatgtcgagaaagttagaactgctctcaagccttatactgaaagagcacgacatgtatatggacagtttcttgagacagctactacatatcatcagcaggctcaggcaactatctcggattaccttcaccggcatgagtttacaaaacagtttgtaactaaagagttggtgtggtatctggcttctgctttattggttacacccttctttgttttgtacacactcctaactgaaacattctgtaccaagaagaagaagaaaacacctcggagcagtaataccaaccatggtcataggagacataagcgccggcatgctgacaagtaaaacattgatcaaccatggtcattactttttttataacgatcttggaagcttgaccatttacctttcacttatgcgtccgttgtctggtatagacactatcatccgtcatcgccgaaccttgttgtgtatccacgaactagaatacacacaagaaatgtgtttctgccccccatcgtgttgggagagttgtgtttttcatcagagtagggaccgcgagcttaaatctgtgggtgtcatttcataggttatttgttgtagcattgtgcttgagcttgtgtaattcatgattattttgtctcgcgtttgtggatcacttcagccactacattattctacagcttcaaaaaaaaaaaaaaaaaaaaaaaaaaaaaaaaaaaaaaaaaaaaggggggncgnnttaaaaaaaaccaacgttccttcccgcgccttccaacggaaaaattttttttttggtggccctaatttaatttaattgcccgccgttttccacacccgggccggggaaaaccccgccggtccccaccaaaa

SEQ ID NO: 62945 - DNA, 415 bp, Zea mays
  Clone ID: MRT4577_157407C.1
gaaatcctggattaaacaccatgatggtgaatttctgggtgggagggggaatcaattggaccacctgattttctcttctttgatatcaagttttaccatggaaagagactgccatgtcaaagcgagttcagctgcttcaaggtgctcggaaaggggatgctgctgtccaaccccatcgtcgttagggccaagctcatctccaaggtcaccgagaagaggatcaatgttactggaggcactatcttgctgaccgccacataggatctgcgtaggaacatggaacattgaggcgcatgtcaacccaatgaattggatattgaaaaatggctggatatagatgaaccagctgatatttatgttcttaggggatagcaggtttaagcacaaagagaaatgagtccatcataagtgagat

SEQ ID NO: 62946 - DNA, 146 bp, Zea mays
  Clone ID: MRT4577_157408C.1
ggcaccacagattcattaattggttagggcagccgtgtacctggattatatcgcgtattcactgcttttccgagagataaaaagataagttttcatgaagcagaaacacgccacatctatttttatgtttggctgggcgttgccgg

SEQ ID NO: 62947 - DNA, 311 bp, Zea mays
  Clone ID: MRT4577_157409C.1
tttttcgcgtgcgctcacctgctggcggaggcgggccccatatgccaaattaccgatcccacaccacctgcacactccatgatagggcttgctgtcggcgaggccagatcggcagccgccgccggagccataggatcatgtggacctggagtggtgacgacgacggcatggacgacgacgacgccagataccgtcgccgcggaagccgggacgactcggaggagcccatagaggacgacgacaatgacgtgcgccacagagtcatcgactacgacgcccaggtggatcccgagccggccggaagttaatgc

SEQ ID NO: 62948 - DNA, 969 bp, Zea mays
  Clone ID: MRT4577_15740C.1
caaaacttacactgttttattgatcattcgtagtatcagccatactataattttggaaacaacagaccattatgtgccacaaagatagcgaaaacgaacttgctttgtattaaaattagtgggggcatacctcatcacaaccctttatgtataccttaccaaatatacgcaaatgacaatcatacatagtcaaacatgatcccgcaacgtagttaattacaaactaaacatggtgctcatgtaaggaaaaaaaccttcaacattcccagtgccgttggcatcctcagtgctcaagctggaggcaacgaccttaagcggctgttgtaattgtagtcaacagaggttccaggtattccttgaacttgtcttttatcattgccccttctcgtcggctgcctggcacctcttggccatccttgaagagaatcaaagtcgggagaccataaaccttgtactcttcaatcagctgtggattggcatcatgatcaatcttgacaatttttaatcgcccagcatattcctcggaggcccaatcgacgacgggcgcgatgaggcggcacggcccgcaccagtcggcgacgaagtccacgagcacgggcagctccgactccagcacctccgcggggaactcgccctgcccaatgaacctggccgccgcgccgcaccgaacgcgcgcgcgagggcgagcgaggcgacctggcgccgcgcggcatccggccgaccggagctgagcgagcgagaggcggagcgcggccggaaggcgggccccgcggggacccgaggagaacggcgtgtggatagaggctgcgatggtggacgccgtggtgctcggcgcggacgacatgagcggagcggaggcagcgcgcggggaggagaggagaggaatcttctcgaaggtgttgccagaggacagtacgccaccagttcggttccgcggccgagatttgtgggcgaggggctcccggccgg

SEQ ID NO: 62949 - DNA, 598 bp, Zea mays
  Clone ID: MRT4577_157410C.1
ggggggggggggggtttttttttttttttttttttttttttttttttttttttttttttttttttttttttttttttttttttttggtttttttttttttttttttttttttttttgggggaaaaaatttttttaaaaaaaccccccaaaaagggggggggggggggggcccttaaaaaaattttttaacacaagcctccaacccggggggggtttttttgtcccaccccccggggtggaattaaaccggccccctccccaaagggccgggcaaaactaaagccctttacccggtttttttacccccccccaatccccgggttatttacatgccaaattccccgggggtaaggggccaaaccggttgctcacccccgggcgaggggccaaaaaatccccccccttttccctttttttccccttattctaaggcccaaccgggggggggggggggcccattaaattcgggccccaattccccaaaaaaaagtggtggggtaatttccaaccaaattcaatttccccccctcctttccctttgggggtgttttagccatcccccctgccaaaaccaattttaccaaccagattcccccgt

SEQ ID NO: 62950 - DNA, 624 bp, Zea mays
  Clone ID: MRT4577_157411C.1
ttgggtacctcgaggccggccgggaaagtatactctaaatcttcccatgcttcctgccctgtgcctacgttctcccaatactacaccagccccaggtattggtaaagaaagccatacaaatccaaagcattttggagtcaattatgcgtttcaagtccctattgctaccaaatatcgctatgtcattaccaaggctgcaaaagacaaccaaagcacaaaccgaaacacaaaaccgaatagtgtgatttgtgctgactgtgatggaaatggagctgttctatgctctcaatgcaaaggcagtggggtgaactctgttgatattttcaatggacagtttaaagccggtgactcttgttggctttgcggaggcaggaaggagatgttatgcgggaattgcaatggagcaggctttgttggtggcttcttgagcacttatgatcagtaggaaaaaagtccttgtagccatatgcgcaataacatacacatgtatattgtgtctttaaatactttcactctgtagatttcatatttggtaattctcagttcacttgtagacatagcggtcgtttaaaaatgaataaacagatttatgtagtatcgaaaaaaaaaaaaaaaaaagcggcc

SEQ ID NO: 62951 - DNA, 464 bp, Zea mays
  Clone ID: MRT4577_157412C.1
ttcttgtgggaggtgccctgccgacaaaagttgtgtgtctgacacaggttgtgacagcagatgaactgagagatgatgaggaatacaatgacattgtggaggacatgagggaagaaggacgcaaatatggtaaactgcacgaggcccatcgagttctcttatacctttgttttaaaagctcttacattcaactggtatgaacttatgattatgattgcctaccctcagttactgaattggatcccttttgtggttttgtcttttgtgtgtcttttttggagtgccacataatgccattgcagagtgttttatagtgcgaccctatgcaatattggcaattgggctttaacccacagaagacactattcttttgagtttgattaatcattatatcattagccttttgcctatataattttactgactaacacttggacaggttacttggtgaaaggttgtatttc

SEQ ID NO: 62952 - DNA, 565 bp, Zea mays
  Clone ID: MRT4577_157413C.1
ataaaatattttttttttttttttgcgactgaactgccatctttttgctgcacaatacaaacaagcacgaggagagtaaacacaagaatattccagagcaagtacaaaattatgggctaatatctatttatgtgtgtgctctgcactgccaacctgctgggattaacgttagccatcaaactattgtacagtttgttgcacaccaagatcacccaaaaagatgcttcttttttttttcttttttggcatgagtgattaattggtcgttcgtggaatgatttcaccagcaaaattctactcccaatccgccgctagtcaacgaggtgaagcgtgtgtgtcttgcctatgcccagcaaaaaaaaaaatatctgatgataagtcaagtgtcgccgtcgacgccgctcgaggcggctacggcggcgctggtgccgtgccgcaggtgcaccgagaccagcaggtgctcgtcggcgaccacgtactggtaggagcccatcgagtagcacctccgccgctcgacgcggctggtggcgccgccgtcgctggactcggcctcggcggattcggc

SEQ ID NO: 62953 - DNA, 578 bp, Zea mays
  Clone ID: MRT4577_157414C.1
cattgggtacctcgaggccggccgggaccgcctctagactctatcccctatatgcgatctggctgagtagaccgtggaacaccaacactccattctacgaattggttgatcagctaatggactagttgctctgactcttaacactccaatatcctttctatgctacgagtctcgttcaaaaaaacatcgatcgtatcttactgcttcacttctctctctttgccgtaggacgatggcttcagagcgtgtcctctcactcttcatctccgtgtttctactctcttgcaacgccaaaggtatacctgcatcggtcatgacgaatggcaataatacatacttgcttctcgacgtcgacttcctggccgagaagttcgggctgccgctgctgaagccgtccgagcagaccggctcatacttactccactatgtccacgtgctcaatgattgccccaatcaccccgcactccccatttcttccaacctctgggcatcccccagtatatctgcaacaagggggccctcatccccatcatcattggttacagtggtatgatgccgtccatctgcggctcgacaca

SEQ ID NO: 62954 - DNA, 162 bp, Zea mays
  Clone ID: MRT4577_157415C.1
tacctcgatgccggccggggtatattccatctactctctgctcgattagaaatgttccactagcagcacggagagatctcctcttggtgggccaaaacttacggctagcttcaccggagttggtcggctacccttcatctatgtcgttctattccactccca

SEQ ID NO: 62955 - DNA, 415 bp, Zea mays
  Clone ID: MRT4577_157416C.1
gcatcaccaataatcaccatttttttccttagggggtaacttataataaagactgacggacgtaacagcacccatcgatccgctaaccatgctggctgatgcatgggtctgctggatcccacgatgaacacagcactaacaactgacacacaaacacctttaatcaaacacacagatggacaacaacacacacgagacgaacgaagataaacactatggactacgacaaacaacacggtacccaacaggataacttgaccacacgggccccacccctcaaatcctccagttaccgtgggaactgccgtagccaccgacacggttgtcaccgacgtaaccatcgtcaccaccaccgtatccgccgtcgacaccatccaaaacaccgacaccgtcgtatccggcgccgccatcacgg

SEQ ID NO: 62956 - DNA, 204 bp, Zea mays
  Clone ID: MRT4577_157417C.1
aaaaaaagcccccacccgggccttggtttttggggaataggcatttccctcaccctccccttggccccgggggccggggtttccaatcttttacaacccccgcccacaagatcggtgacctaggggttcaggaaataaaaatttaagcggggggttccccagagggggcataaactagatcagggcctaaacttacgggcccgg

SEQ ID NO: 62957 - DNA, 201 bp, Zea mays
  Clone ID: MRT4577_157418C.1
gagacttgttatcagaatatgtactcttgggcaaagtttggaacaatttggatatgatttgcttagcgaaataatagttgcccaaaaaggaaaaggatttcacctatgaaatgaggacacctagtagttaagtgaagcgatgaagttgcttaagaagttttaagattttggatgagatctaagatggattagttctctggt

SEQ ID NO: 62958 - DNA, 461 bp, Zea mays
  Clone ID: MRT4577_157419C.1
catcatagctcgcatccgatttcaatttcaatccttcgatagcgcatcgtcgcccgccctctcggagctctctccgatggcccgtacgaagtagacggtgaggaagtcaactgcgcggaaaggcgccgcggaagcagatgaacacctaggcggcgcgcaagtcctctccgggcaccggcggcgtgaagaagtcgcacaggttccgtcccggaagcgtcgctctccgagagatccgcaagtaccataagagcacggagctgctcatccgtaagatgcccttccagcggctggtgcgtgacatctcgcaagacttcaagaacgacctttggattcagttctactttgtcgccgcgctgcaggaggacgacgatgcgtatctggtgggtctctttgtagaaccaacctctgcggcatccacgccaagagggtcaccatcatggccaaggacattcagctcgcgc

SEQ ID NO: 62959 - DNA, 361 bp, Zea mays
  Clone ID: MRT4577_15741C.1
atccgtgcgcattccgtttacaccctttcaaccgcggcaatgtctcatcttcagtttttatagttggcaaccagaatactagagcctcctttgaggaatttttagtaataagattatagtttcgttttcgtagcactaaaacattcagatattatgaatttcctagcaatttttatattacctaggaagttcaggaaattaagattgccctgcagacgtttgtctgccaatcattagcagagcttcgtcctagccttgaagtgatccagacttgaagctcaatgttagtaaaggggtgttgaatgcactagagctaatagttagtggctaaaattagttagagacatccaaacaccctagc

SEQ ID NO: 62960 - DNA, 295 bp, Zea mays
  Clone ID: MRT4577_157420C.1
agacgccaccgccgaggaaaaccgtgtgctattagccatggtcaaccccaccgtgttcttcgacattgccgtcgacggcgagcccttgggccgcgtctcctttgagctgtttgcagacaaggtcccaaagacagcagaaaattttcgtgctctgagcactggagagaaaggatttggttataagggtacctgctttcacagagttatcccagggtttatgtgtcagggtggtgacttcacacgccataatggcactggtggcaagtccatctatggggagactttgaagatgaga

SEQ ID NO: 62961 - DNA, 943 bp, Zea mays
  Clone ID: MRT4577_157421C.1
gcacgggcccggaatgactggctcgaccgacgcgtgcgtccacgcgtccgcagaaggccccaacccatctcatcactcaccgctcccaaggcgagagatctcacctccccattcccaaaccaacccaaacgccaaaattcaaagctgacgatcgatccaaaaacgccacaaatcccaccaaatccacctcaaatttgccacaaaatgccccagattggcacccaaaccccgcacccaccgtttcaaatctgacctcgccattcccactcctcccactctacccaccgcatactccagatccccaccgcaatggcgaccgcggtctccaaatccgccgtcaaatcccaccccaggttgcccaccacagcgcagccgccgccgccgaaccccggctccaacgccgcgtcggctggcggaggggcggcgcctccgccgccgccgtctcccgccgccggcgcgacgccgtcgaagaacgcggcgatggcggagctcaagtcgcgcgtgctcgccgcgctcgtcaagctctcggaccgcgacacgcaccacatcgccgttgaggagctggaccgcatcatccgcgcgccgccgtcgaccgacgccgtgcccatgctgctcaatgcgctggcacccgactccccggggctcgcctccccggccaggcgcgagtgtctgcgcctcctcgccacgctctgcacgtcgcacccggatgccgccgcgccgcacctccacaaggtgctcgcccacctcgcgcgtcggctaaaggacccggcgtccgacacttccgtgcgcgacacgtgccgagacgtcgcggggcagctcgcggcagtgtacctccgccctctgtcggcttcaggcgtttgcgaggcgggcaatgcgaccgtgacgctgttcgtgaagccgctgttcgaggtgatgggggagcagagcaaatcggtgcagggcg

SEQ ID NO: 62962 - DNA, 254 bp, Zea mays
  Clone ID: MRT4577_157422C.1
ttgtcaaagtattttctggtaaaatgtatcaacaaagctaaaaggcaaaggactatgttctgtcttcgatagacctgcagtataaacttgaatgtttttgtgtgttctacagcttacagctaagtcggcaataggaataaaggtcgaaatcttgtttaacctgccctattagcaaatatacattccattgtggaccatgggctgtacaatggaatgtatatttgctaatagggcaggtttaacattccattgtg

SEQ ID NO: 62963 - DNA, 243 bp, Zea mays
  unsure (1)..(243): unsure at all n locations
  Clone ID: MRT4577_157423C.1
ggccgccgtgtgcggggatacgccctatggcgaggtcgcggacgcggcccaagcgtgttctttttctttgttctgttttaataaggtaatggagccgttgactagctacctatagctagttcactcgtttagcggggatgagtaatggagtgttacccattaccatgggtggnagtgtgagcaatgagcgggaggaaccattgaaatggaaaggaataatatatagggaaaaaggatgtttgg

SEQ ID NO: 62964 - DNA, 216 bp, Zea mays
  Clone ID: MRT4577_157424C.1
gcgggcatcaacagtgcctctcttctgcgtctgcggtggcaaacgacacggggcgagcagggtgcgcgaacctgaggttcgtaggcgtcgccttccgcccctcactgaagtcgtcgtcagcagctccctccagtctctgccacgattggactccatgtcggcggcgctcgcggtgacggacgaggtggccctgccgatccgggcggtgggggatct

SEQ ID NO: 62965 - DNA, 1154 bp, Zea mays
  Clone ID: MRT4577_157425C.1
gtacctcacttcatcgccccgccgccgcttcgacggcgcgccgaccggctaggacgcgcctccgacccggatagtgttccgctcggtcgaatccgacggccgctcgctgctgcagcgggcgcttgctgtgcgtcgcgtgggctcggctggaggcaggcggaacctttcctgggtctcggagatggcggcgcctccggcgagggcccgggccgactacgacttcctcatcaagctgctcctcatcggagatagcggcgaagacgctacccttcgctcgatgccttcgccaatctcgctgcaccaacggaggtgaaacgaccggcgggttccacccttcgtccactacgctgcaagacgaaggcctacgacgaggtcgcccacgtcccgcgtcctcgtcgaacacgaaggcccacgtggaattcgacccattgtaacaggccccgcatggctaagtgtattacgggcccgatttgcaatggcttttctgtaatgacagtctgtaaccccactttatgggaatattccggggatagcttaggcgcctgagggcacatgcgtccttactccaagacgttaggcactcagacacctataaatacctttgtacagtgtccttgaaaggctggattaatagagctattgccatctcgagtcaaaactttgtttatgttgctttcatacctccgttggatcaacttgcccagaagagcaagttctaacactactgcagagcgagcagaaggtgcagtaggcaacaacggctttggagagccgagcgcaggcacggtgatgcaagagctagagacggtgacgttcagcagctccacgagacgacacgctagagcaaggaaaaagaagtctggtggctgcttccgagcgtcacgaggacaacgagtgcagcttgaggctggggcggtgttgagcatgatggggagcatgtgagcaggtgtagggcgctgggcgctgggcgctggtatatgcagaggcagagacgagcatgaccaggccggacgcgacgccggtgtccaacggcctgagcgccgagtactggcgacccggaacacggaggccagagcgagccggtggctgagacagaaaacgtgagggagatgaagtcctggaagactcggttgtgaagaaacacgtcccggccg

SEQ ID NO: 62966 - DNA, 266 bp, Zea mays
  Clone ID: MRT4577_157426C.1
aacaaacaaacaatataaaaaaaaaagactacaaaaattatactaattatcatcgggaagcgcacattcatacagggtcgatacctaacttatcacttcacatcaatgactaatactgacacatcactttacatcatgcatcatctcttaaagataactctactcctataactctaactgacatctccagacaatccctctttaacatattatcagatgctacccaaacagccactctacctgatcggccattaaatccgtctcta

SEQ ID NO: 62967 - DNA, 753 bp, Zea mays
  unsure (1)..(753): unsure at all n locations
  Clone ID: MRT4577_157427C.1
cctcgaggccggccgggccgggaatcgaacggggcgagcagggtgcgcgaacctgaggttcgtaggcgtcgccttccgcccctcactgaagtcgtcgtcagcagctccctccagtctctgccacgctaaatggcgtgacctgacttagtacaagcacccagggattggactccatgtcggcggcgctcgcggtgacggacgaggtggccctgccgatccgggcggtgggggatctggcggccgccgccgaggtctcgcgggaggaggtcgccgtcatcacccagtgcgcggcgctcggtgggaagttgccttttgaagatgcatcagttggtgcggttcttgcagtcattaaaaacgtggaaagcttgagggagcaattggttgctgaaatcagtcgggtgctgaaagctggtggaagagtattggtgcagagccctgcgccctcatccagtcagaagccgaacactgaaattgagcgcaagttactggatgggtggatttgctgaagtgcaatcttctgctgcgaactcgcaagatagcgtgcaatctgttacagttaaggcaaagaaggctagctggagcatgggctcttcttttcncctaaagaaaacaacaaaagcccttcccaagattcaaattgacgacgactctgatctgattgacgaagacagtctcttgactgaggaggacctgaagaaccacaacttcccagttgtggggactgtgaggtgggggcagcaaagaaagcatgca

SEQ ID NO: 62968 - DNA, 1212 bp, Zea mays
  Clone ID: MRT4577_157428C.1
ctgtgcggcgctcaggcggcggtcgggaaagaagaaagaatcagaaacctgccgccggaagcgagcgcccacctctctctctcgtttcgcctcgtcgtcgtctcgtttgaattggactccatgtcggcggcgctcgcggtgacggacgaggtggccctgccgatccgggcggtgggggatctggcggccgccgccgaggtctcgcgggaggaggtcgccgtcatcacccagtgcgcggcgctcggtgggaagttgccttttgaagatgcatcagttggtgcggttcttgcagtcattaaaaacgtggaaagcttgagggagcaattggttgctgaaatcagtcgggtgctgaaagctggtggaagagtattggtgcagagccctgcgccctcatccagtcagaagccgaacactgaaattgagcgcaagttactgatgggtggatttgctgaagtgcaatcttctgctgcaaactcgcaagatagcgtgcaatctgttacagttaaggcaaagaaggctagctggagcatgggctcttcttttccccttaagaaaacaacgaaagcccttcccaagattcaaattgacgacgactctgatctgattgatgaagacagtctcttgactgaggaggacctgaagaaaccacaacttccagttgttgggactgtgaggtgggggcagcaaagaaagcatgcaagaactgtacttgtggcagggctgaggccgaggagaaggttgggaagctggagctcactgcggagcagatcaataaccctcagtcagcttgtggcagttgtgggttgggtgatgccttccgctgtggaacctgtccctacagaggtcttccaccattcaagcctggcgagaaggtttccttgtctggcaacttccttgctgctgacatatgatggcgatgcaatcggcaaaacaaggagacgggggttacctacgttgttagtcgagtgcactgcattccaaatagcttctgttagccaatgcgaatgtgcgtgtgagtgacttgtctttcggatgctatataagctggccaatcgcgcctctacacaaacacaagtgtgcatcagtgcatgtgttttcagattgactttgtgagcctggatgtgaagaatatcgctcaaccacattgtaaagctttacatacagactgcagagctactcgccgctgaatttctaagcttaagaatcaattct

SEQ ID NO: 62969 - DNA, 1662 bp, Zea mays
  Clone ID: MRT4577_157429C.1
tcggcgggcatcaacagtgcctctcttctgcgtctgcggtggcaaacgacacggtgcgagcagggtgctcgaacctgagggtcgtaggcgtcgccttccggccctcactgaaatccgtcgtcagcagcttccttccagtttttgccacgcgggttatatgctgccgtcctgtaacgaattcgcaagttttagttcttttgtgctttgttaagaataaacaatgaggtttcagttttaaaaaaaaaaaaaaaaaaaaaaaaaaaaaaaaaaaaaaaaaaaaaaaaaaaaaaaaaaaaccggccccgaggcgctaccgttcccccctcgcgagaagggttccccctccggcaacttcagtgctgctcagatatgatcccaacgcaagatgggcgtggacatcctcatgacaacttggaggtgcctccatgccgtgttcgctggcagaactggacttccatgagggccggaggcgggcggtgagggatgacggtgggtctgccgtgctgtgcagaagggggaccgtcggccgccgccgaggtctcgcgggaggaggtcgccgtcatcacccagtgcgcggcgctcggtgggaagttgccttttgaagatgcatcagttggtgcggttcttgcagtcattaaaaacgtggaaagcttgagggagcaattggttgctgaaatcaggcgggtgctgaaagctggtggaagagtattggtgcagagccctgcaccctcatccagtcagaagccgaacactgatattgagcgcaagttactgatgggtggatttgctgaagtgcaatcttctgctgcaagctcgcaggatagcgtgcaatctgttacagttaaggcaaagaaggctagctggagcatgggctcttcttttccccttaagaaaacaacgaaagcccttcccaagattcaaattgacgacgactctgatctgattgatgaagacagtctcttgactgaggaggacctgaagaaaccacaacttccagttgttggggactgtgaggtgggggcagcaaagaaagcatgcaagaactgtacttgtggcagggctgaggccgaggagaaggttgggaagctggagctcactgcggagcagatcaataaccctcagtcagcttgtggcagttgtgggttgggtgatgccttccgctgtggaacctgtccctacagaggtcttccaccattcaagcctggcgagaaggtttccttgtctggcaacttccttgctgctgacatatgatggcgatgcaaacatcggcaaaacaaggagacgggggttacctacgttgttagtcgagtgcactgcattccaaatagcttctgttagccaatgcgaatgtgcgtgtgagtgacttgtctttcggatgctatataagctggccaatcgcgcctctacacaaacacaagtgtgcatcagtgcatgtgttttcagattgactttgtgagcctggatgtgaagaatatcgctcaaccacattgtaaagctttacatacagactgcagagctactcgccgctaaaatactattctgaataaattaggaaaaatttcatgaagaaaattgtaaaatatataacttttagactaattactttaaaaaaaaaaaaaaaaaaaaaaaaaaaaaaaaaaaaaaactcgaggaggggcgccg

SEQ ID NO: 62970 - DNA, 211 bp, Zea mays
  Clone ID: MRT4577_15742C.1
cgtcaagagcgacccatgtccacacgacacgaaccaccatcaccaaccagcagccgcatcacgcacccagcgcacagcgatggcgtcgctcacgcatgatggcgtccttcgccgccgtggccgtggccgcgccctcgcgcgacggcaccttcgccgtggtcaggtccgcctcggtcgaccgctgcgaggagcacgccaggttggcacgtgc

SEQ ID NO: 62971 - DNA, 187 bp, Zea mays
  Clone ID: MRT4577_157430C.1
acccatacctaagctcggaattcggctcgagcactatccacaaccaactttttttctttccttcatatacattttctttgggcggggtatataaaaacaagcgccgcaatccaccccctcagtcttttccctcatcagcccaaacatcccctctctcaactaatccctacttttcacccatttttct

SEQ ID NO: 62972 - DNA, 492 bp, Zea mays
  Clone ID: MRT4577_157431C.1
aacgaaaggctttgcaagattagttcaaagacagaggacttattggtcaagaagaggatatcatggccctggaaagggcacgaacatagtggtcctgacaagggtcacatgaacccattgcagttccatgataagcaagacaatgaccagatacatctggtcggcccagagtcaattataattccagactaccaagattctgatagcacccaggaaagcagatatgaagtaacgggtaattggtggtctttcaacaacgatagcttcaatagtttgggtagcagtttaagttctaatagcagtgctattgagagagttgatcttgaagcagattgcctagactatgagattctatgggaagacctagtacttggagaacaagtaggtcaaggttcttgcggaacagtgtatcatgctcagtggtatggctcggatgtagctgttaaactattctctaagcaggaatattcagatgaaatgatagataccttc

SEQ ID NO: 62973 - DNA, 331 bp, Zea mays
  unsure (1)..(331): unsure at all n locations
  Clone ID: MRT4577_157432C.1
cccggcacgnccaagaagcggagggccaaaaacgcgctcgtttttgccccaccgccaccgcgccgaccatccgctggggagccacgcgaaggaggaggaaagagggcggaggaggcgcggcgcgccaaggaggccggcaacgacgcataccgcaaggccttcctcgagacggccggcgagcactacacccgcggagcgctccacgacccccgagagatcaccggcctcaccaaccgcgccgccgcctacctccacaggggcaagcataaggagagcgcgagggattgtttgggggcggcggagcgggggaggggacccagcgccggcaaca

SEQ ID NO: 62974 - DNA, 298 bp, Zea mays
  Clone ID: MRT4577_157433C.1
ggactatctcagcgatttccgaaccctccccacccccacacccacccgatccaaccgagtcccggcggcgatggcggcggcgacgaacgccgatttggaggtggccgacttcaacctcaatgacaacaacttcagggacaaggaccccggccaagttcaacaacggcccccggcttccggcttcggttcaacaaccgcgggcaacaaccccccccttaggaccaaggcccgcggtttccgcaaggaccttaatctcctcggctacccgagactcgcgctttggcgcgggggagacgcc

SEQ ID NO: 62975 - DNA, 510 bp, Zea mays
  Clone ID: MRT4577_157434C.1
tagttttctatatgatgtattgatgtccaatgccttcttgatcttcttggctttcagtggattattattgactgatagattaccttccaatgcaaactcaggaagtacttctattcccggctatgaagcctcaagagtagtaatccacagccaaaagccacaaaagggtatgcttacgagtctgtaacttttaagactctttgtttgctcggttgaaaacattaaagcatgtaaggcattttttctatgcatttttcaagttgaaagaacatttaaataatgcacctttctgaggtatggtttagagttagggtgtctataattcaatacacatttttaggccaagtgacctcttaacgtttttctgcatttagactgtgctcaggatcgttcaactctgtgtatgtgtataggtgttctcacagactttttaaggctggataaaattatgacttccaccacagaaattataattttcgacagcaacggaattcgagctggacccgggaa

SEQ ID NO: 62976 - DNA, 439 bp, Zea mays
  Clone ID: MRT4577_157435C.1
ggggaatataaaaaggatcaaaacatatcatcggggaccaattaatatttgggtacaggaaacccaatcggatcaaccaacatgcagggggacccacgtacgttcatgagcccaaagactggccccaaacatgccgagggggatagcaaactgaaaaactttgttttttttttttttacacacacccacacaatacctatgtttgggagccagctcggcctcgcttattattggtcaaccccccccccaagctagatagataataatcatatccctgggcgccgatcgatgtgaacaacaattgcaggggtcgcacttgcagttgccaccccaactgcagccgtgggcggccttgccggactcccccggggccttaacaaactcgggcgcggccttttttttcggggccacccccaggaccacggtggcctgcgcgggg

SEQ ID NO: 62977 - DNA, 386 bp, Zea mays
  unsure (1)..(386): unsure at all n locations
  Clone ID: MRT4577_157436C.1
cggtcgcgtgggcgcagcgcagccacgccgcggcagcagcaacaccgcaccatggcgcttcttcttcatccccgcctcccgtcccatcctttccgggcggcagcccaccaccaccacgccatctnggacgcctcttgcttccttaccctccacggccccggagggaagcgccgaaggtgtttgcggggggacatgccgcgcgcagccagggccaaggagccggctcagagcgcgggcgcctcgctctccgccgccgccacaggcgctgacaaaggaggcgcacaagtacttcgaccacgccgtggacaccgtcgccgcgggcaacggtggacacggcgccgtgctcgccatgccgccggcgccctccgnggacgccgacaagcccc

SEQ ID NO: 62978 - DNA, 644 bp, Zea mays
  Clone ID: MRT4577_157437C.1
gatcagtgaactttataggtcttagttttatttttgttatattttgttgtgttgatatatgttgcttctcactttgatgcatgtggctgatgtgcttggtaaggtttaatactcatatctattatcgtttgaaacttgaaagcatggcattcatctacttgtgagcttttatgataacagtgaaagttggttttattgcaattggaatgaacatgacaaaagagaggtgtaacagaagaaacaaaattgtatgtaggtaaatacccgtgcgttgcaatagggaaaaaatagtgtaaatgttcctgttcggccaatatttttgggtgcttttatagaaattggtgtaggtgctgctccaccttccgttgcataaggctttaccaatccacatgtcagttgttctgcaaacaattaataagttgcggttttatagaacacaaggtgtgtataaatcatcacaaggcttcactattttgtgaatacttattggaaacttgatcttttaaaataaagttttgttgatttgcaccttttgcaaatgatatttttagttagtgatttataataaaattttgttgatgatataggaaccctgttgagactgagagcaccaaggttgtgagcgtttttggagcttaatggct

SEQ ID NO: 62979 - DNA, 337 bp, Zea mays
  Clone ID: MRT4577_157438C.1
aaaaagggaaaataaaccttttaggttgtttaggatttggtaacaaacaaccaattgggtttttggggggggcaccaaagttgacaagtttaacccaaggttgtttactgggcttaaactgttggtaaaaataaaaataaacctctctttccaaaaggggaaggtggggaccttaggggttgggggcccgggggggcccaaccttagagctttttttggggggcttggggtccaccttccgggagatggggaccagggttttgggccttcacttgggttggaacaaggcactttccatgccccatttgttgaagcgggcctttacaggggttaaagg

SEQ ID NO: 62980 - DNA, 1748 bp, Zea mays
  Clone ID: MRT4577_157439C.1
agcccaaacagctacccatagtcgatgctgaattccttcataacatccattttgtaatgcgtatccgtcagactggcaattcttgatattacatactagtctttacactttacaatttgcctctaatgatttcttgaaagtttatggagtccccagtcaggtaacctggccatcaatttcctgataagttattgtccagcatttctatgcgagttctcgccaacagtctacattctaccggaaaaaaatgctcttatttgtgtctgtcatcttgttgaagctgcctgacggatgagcctgagggactcggcgaagtcgtccaaaagctgatgagagtctggaaactgagcatcatccactgcgaggacaagcttgatggagttcgtatagctttggtaatgtatagtcagagcatgtggatgcccgtagacagagggagcgatgtagacgattggatggccgtagaactccaccttctcagcaggtccgaccatgcttgagaatgacatggtcgtatttgtgaacataccatagcagagagctgctgcagccttcatgccaaatagtttgactattaggttcccactccagtacgtgaaaaccgcttctaatgaagccttcttcctttgagctgtccttttcccttggcggatgtattcaagaggatcatcgtgcatggctatgtggaaaggcagtatcatgtaaccaatcaggttcccccattttgccctattgttcttgatagaatccatcatttccgccaatgcatgtaaaccaggtgttctcctaatgttaacaaggagagctgatcggacacgaatattctgcgattttttcctctcgttgttggtatcactggtttttcgaaaataataccgcgacaaccctgcgttagtcactccaatcaggacatcgttgacagtacacttcatgacattcttgacgaacttgacgtcgtcgaggctgagcgtgcggtgcacgaagcgcttgcggcggaactcgacgccctcggacgcggccatgaagggtgtgcgctggtcgcgcaggaaccacgccgtggccacgaagcacgcgacgtccaccagtgtgtgccacgcgagcaagacgtaggaccacagccacagcgcgaacgccacgaggcccgcggaaagcggggggcgctgcctggcgtagacagggctcgcgcggcgcggcgcgggcggcagctccggcagccgcgccgggtccgcggcgctgcgggtgcacgcgatgagcagcgacagcagcgagacgccgtcgccgagggagtggtgcatgcggatggcaacggtggcggtggcctcggacgtcgggaagtccaggacgtggaactcccagagcgggcgggagtggtccatgggcgccgtggacagccaggacaggtagtcctccacggcctggtccggcttggtcgacgtggcagcgggttccaggcaggggacgatgatgtgatcatccaggttcaccctcgggccgcacccaccgcggcttggcgttctttctcgcatcactatcattcacctgccagcggaatcacagatcaaaagcggtcgttttcaccaatcaattgataatgccacacaatcggtttcttttgggagattttattataatataataattgacctactccattgtttttcatcaatactgtatcagtatctctggttaccagctcagtcaagtggcaaagaaacattaggctgtccatagcggttacctctaatttt

SEQ ID NO: 62981 - DNA, 1882 bp, Zea mays
  unsure (1)..(1882): unsure at all n locations
  Clone ID: MRT4577_15743C.1
cgttgctgtcggtaataaacattgggtacctcgaggccggccggggtccgctgttcggctccggaagtccccatccgctccacctctcctcctccactcccccgccccactgatcgcggcggtgagaacatgctctttctacatctcgttgaagttttaaattatattggcattcgtgttgtcaagtctgaactaaagcctcagccaaggtggcatgtctgctaaggtgccaaggtgcctagaagtttgttccagtggcatggcggattgggcctctattcaaacggatattcttggtataataataaagaagcttccaatccctgattacattagattccgtgctgtgtgcacatcttggaacaatgtctgcaaggatgtgtcatactgtccaagggtggacccatggctgatgctccccccaaaccagaatcctcttggtgctcagttcttttgcattcctgaaagaaagaatcaaagtatccgcctccctaacaccgcctcactgttcgaatcggtctgggctccggttggttcttccaatggatggcttatctacttcagtcacacttacggaaccatgcagctggttaaccctgtaagtggcaaacatatccagctccccccgatagggcgcaggaccttctctaaggccaagctgcttgaaatcagcgagaggaacttcatcgtcgctgtcctctatggtgatgagaaaggctacaaaataacacggaaagggtccagcaactggtcgtcggtcgagtcaaaattcattttggatgacatcatcaagcatggaggccggctatacacgtgcgacatgtatggcacagtggagatgtgggcagagccgccccgcgcatggccagacgaggaagtcacgcatcggtggaggttccgctgtcttatagagaccccagctggtgatctggtcagggttaagcgcctgtgccagaacaagtttgctgtttggatattggacaaggcgagctcttcctgggttgggaccgagaacattggggatctcgcgctgtttgtgagccactacaactcattctgtttccctgccagtggccagcccaacctgaaagcgaactgcatctacttcatcgacatctacaacaacctgtgcgctttcaaccttgagcatgggaccaaggaactcgtccaaactcttaccatcggccgaggccaagggcgcaatgactaccaccgttggcctgagcgagaccaggtcttatggtttatcccttcactaaagtaaataccgaaggtaatggtggatgatgcgtgtccgtttaccccccagagatggagctcatatagtactgtaggctcctcctatggacggccatttatcccgatatgaaggtcgtatagtatcctgtatttccaaagtattggatgtcgcacatgcaactgcaggtctatgtatatgagtaccgaacatcgtcttaacttgttgctaaatcaactgtttgaaccatttgaagctttcgtttccggattttcaagttccttgaggattccgaatttttaagtcaatcttcctcaataaaaaaaactggaatgcttcctcgttatcacatacttaagaggccactgtcaatgaccacacaaacttggttaaattgcatatgggttttcctgtcatcagttctaattcttgtgcattcatattttgaaatgaatgatttaaatgggctacctcacacatgnctttaatggtattcaaggaaccatgttttggttcagaagcttgcatatgcatgacgcatgcagctgacacgcccatatctatccacggggttatattatctgaagattcatatatggataagtgatggtctaagatttggtgacatggattgggaattttggc

SEQ ID NO: 62982 - DNA, 629 bp, Zea mays
  Clone ID: MRT4577_157440C.1
cctcgaggccggccgggagtattttagtggacgtctcgcgccgctacttgaagtgtgttccaacgccaggagcgtgtactagatgtcacataagtcggtgtgacaactggactccattgtgacacgaggagaagtacccctactgcttcttgcaccacaagaatgacgaggatgacacggtcgaaaagtacgggtactcctagaccgaggcgttctccggcaccgtcctggatcaggagaaaaggtacacatgggaggatattgtgcacataaaacctcatgacctcaaggtagacggtgacattcgccgcacgtatacttcgctgtctatcgacgaacccgaaagaaagtacgtttcctagacaccgccaagcgcactatcctacttgcatgacattgtcgcgatcatcgcggacaccatattgtatcgtgttatcacgatgacatcgataatgaaagtgtgcactgggacggcgaggatgccgtaggttacaaaaatgccaaactctcttctgctgatctcaggacgctgacgaattgcctgcgatattacttcctacggcgtgacaagcacaaactgctattgtctgagtgatgggcgagtcatcctatggtgcactataatgaga

SEQ ID NO: 62983 - DNA, 382 bp, Zea mays
  Clone ID: MRT4577_157441C.1
gggaaccgaaaacccaaaaccccattggcattgcaaaaccaaaggtaaaaaaccgcggggaaaacccaacccccacaagattgggccggaaacccaaaccacaaaacccggcccaattttaccccttttaccccaacagggaagacaaaaacggggactactacttccacccccaccgggacgaccccaaggccccctccccacggaaaccgggggcaaaccggaagtccctgggcaaaaaggggacccccctggcggaaaaggcccaaaagttggggtccccaaaaaaccccacgagggaagccctggacccctcctgcaacgcgggaacgggggaactctgaaaacggagggcggtcttaaaatcctgggggaacccacc

SEQ ID NO: 62984 - DNA, 350 bp, Zea mays
  Clone ID: MRT4577_157442C.1
atgcagcagctcaaggcctggctcaaggccatgaagaagcagctggaagcgacccgccggcgcgaagcgcgcggctgaggccggggccgcccggatctcagggcgcccggcgcggcccggcgggcacgatcttcatcagcggcgcggccggcttggccgcggcgtccgcgcgcggccggatcatccacgggaagaagcgccacagatacaggccgaaccccagcgcccaagcgcaggccgaggcgtgcagcaaccccgccgtggcgccggttggcatcaaggcggccaggcgcagcagcgccgccaggatcaccaaggcgtagctcagcaccatgctgcggtcggcgcgc

SEQ ID NO: 62985 - DNA, 441 bp, Zea mays
  Clone ID: MRT4577_157443C.1
ctgttctgatcgcgagcggccgccgtgttgtgcgcgcgtacgtatgtatgcgctcgtgtgaggcgcgaataaggggggcgtacgtaatctatcgtatgtatacgtgtgtgtatgcatgtgcttgggtatgatcggggtacgaggaccgaaaaaatggatgcaactctgatttacttaaaaaaaaaaaaaaaaaaaaaaaaaaaaaaaaaaaaaaaaaaaaaaaaaaaaaaaaagagaagcaaaaaaaaaaaaaaaaaataaaaaaaaaaaaaaaaacaaaataataaaatattaaataaaagtaaaaaaaaaataaggggggggggggttttaagggaccaagggttactggcgggggattgggagttaataatttttttttgggggcccctaatataatttcttggcgggggggttaaaaagggggggggggggaaaacc

SEQ ID NO: 62986 - DNA, 339 bp, Zea mays
  unsure (1)..(339): unsure at all n locations
  Clone ID: MRT4577_157444C.1
tacaaaaaaacaacctataatattttaataaaaaatacccatcctactgggggattaaagaaaaatagctaaatgtgtccatannttttctgctttttccttgttacttatcccccactatctttcccttttcttccagctacacctttatataaaaggaatacctctatttactcgatatctacatataaacaactgattcactaaacaaacaataaaattctcgtctaaactatttgaataaaaccatgaattttctccgccctctatatgatccaacattacatcccctttcatgctaccaaataaattttctatattgttacctaaattcaattc

SEQ ID NO: 62987 - DNA, 277 bp, Zea mays
  Clone ID: MRT4577_157445C.1
ccggccgccgccgttcccagtaccgccagctggtccgcccaccggtctcctcccgtcgccttcgacgccagcatagttcagcaggctcgtcatgccattgtcgaacaccggcggcgagcagtaggcgccgcccatctcctggccgaactggtagcagcagtcgtcagccatggtggcggcgtgcggcgggaactccacgacgaggtcgccgggtggtggtgcgaggtaagcgtaagcagcgccggccggcgggtaggcggcggcgtagaacgcggcc

SEQ ID NO: 62988 - DNA, 495 bp, Zea mays
  unsure (1)..(495): unsure at all n locations
  Clone ID: MRT4577_157446C.1
ccggccgggactcttccctctttcccacctcttctacacaagcaagctcagcagtcactacagtccacgccaagctcggctcccctcccctcccctccgctccgcctcttccacagcgccactgctgctcagcatggattgacgagaggtctgtagcttttggttcctgtggcacgggcggtgcggtggcgagcatcctcccatggctggcagccatggatggtagatatacgtgggtcaaaatggcggtggtggtggcggcgggaaaagcgagtggaccccgcccatgtccaagcaaccactggtaactacagcgtgcgtgatcctctccgccgtgcaatgcaaccaagccattcgagaccactgctacctcctgtgaaactgtcaaagccctctctctatctctccgtaaatttgtactgctactccgcggtgattctttttgttttatctgaatctcttagtactaaaaaaaaaaaaaaaaaacccgcgnnc

SEQ ID NO: 62989 - DNA, 189 bp, Zea mays
  Clone ID: MRT4577_157447C.1
aatcgggggaatgcatgtatatatatcccttcagatacggccatgaaaggagctacattcttctctagcacccaaccaaacagtaatcccgaactggcctctaatactaaccaaccgggcttgcactacaaaaagaataccaagatgacccccctccctcacactttataaacatgaaaaagctaggcc

SEQ ID NO: 62990 - DNA, 659 bp, Zea mays
  Clone ID: MRT4577_157448C.1
ccggccgggagtatactctctaggtacagttgcctatcccatgctaccacgtccagttacccacttcccagtatcctccttctcgcgtgcccggactccactcaacatccaggaccaatggcttccctatcgtgaccgccatggatacactcgctgggatgatgatcgaccggcgactcaaactcaaacacgaagacatacaacgttcggaagatcaagaagctaaataccatagaagcgactatgaaccagactatgcttatgatatatcacagttgaacatgcagggatggctgatagacgtctcgcataccaacatagaagcaaatcatgttaaagggatccggatagaccaagatgttggataaggacttcctgcccaagtgctcttgttttcttttgaaaaaataaagaggcactgcacagtggaccttcagggctagggctagattgttgactgtctgagttggcaattataacttctttggatcagtagcaagaggtgcttctgtctacgagagcgcaaaatttctgatgatttggtgagaagagcttcaggatatcctggcaccagatatctgacgatctgagatcaagctgccgacgtgaataaggaataaggactagctgctacaccagtgttagaagaatactaacgc

SEQ ID NO: 62991 - DNA, 302 bp, Zea mays
  Clone ID: MRT4577_157449C.1
aaagagccttcactgcaggcgtctgtgctaagtcctgggccagctcgccaatccgatggtccggctgaacatacaggtgaacacgccgctaaaaagcaagcgacgtaaccaagggcgacgccaaggcggacatcaacgccgctatcagctctgctaatatccctttgactgtcacgttcacagacacttgcgcaagctacgacaccaacgtcgagatcgagaagatctaggagaagctccagctgaagaggcacctgaagatgcacaccatgctgaacacttacatggcggatatcctcgcc

SEQ ID NO: 62992 - DNA, 614 bp, Zea mays
  Clone ID: MRT4577_15744C.1
ctacccgctgcggttcaggggcatctgcggcggcatcgctgccgtcgccaactgggtctccaatctcatcgtgacgcagacgttcctgtccctgaccaaggcgctcggaacatcggccaccttcttcctcttctgcgctgtctccttgctggcgctcgtcatcgtctgtgtgaccgtgccggagactaaaggcctgcagttcgaggaagtggagcggatgctggaaagggaggactacaagccctggaagaggtaccatggtggcagcagcagcagcatcgagccggcgaagaacagtgatattggcctcaccccgccatgaaatccacttgttctgttatctagattcaagtagaagtagcaataattcgtagtggcagtttataataggccatctgctgctgatctctctctagatttccaagaagtgaaaaaaatgaggtattagtcattcagtatgaaaatacgacatttggtagctgctatactttgttctagagcatttaatcttgattttagcactggggtggcttgtggcattagttgcgcactgtgtttaagacaacattcagaattgtttccttttttactttttaccatttggtgatgaagat

SEQ ID NO: 62993 - DNA, 227 bp, Zea mays
  Clone ID: MRT4577_157450C.1
gcggccggccggacgggcacaagactatgttttgtatcctttgtctagctacctacactcgttagttcactcatttaccggcgatgattaacagtggtgtcacccatcaccatggtcacactgccacagcatgtgagacgggatgacacctacgaactcatcggcgttatatgtgtagacaaacgagctacgtagctagccagcggctccattacattttgaccgtg

SEQ ID NO: 62994 - DNA, 492 bp, Zea mays
  unsure (1)..(492): unsure at all n locations
  Clone ID: MRT4577_157451C.1
ccccataaaaaccgggaaaggaacctttttatttggggggggccccaccccccacccaaaaaaccttttttatggaatcccggggaaaaaccaaccaaaaagaggccccccccaatgatgtgttgtgggaaggaggctgctggttttgccaaaccaggtgggccaaaggccaacaattgttgtatttgaaaaagggtgggggggttacccccaacctgcgggtaaaacggcaccaccggttgttgggccaaaaaggaaccccggctggctgaacctagcgggctaaaggggagaagtattggctgcggcaaaaaaccaggggggtccaggccccccaattggttaaaggaaaaaagttgttgttgttgaaagtgcccacnccctcccggcgcaaagggaaaaagtggtggccccaaaaaacccccggggtccagggtaaaccgttggttgaatggaaaaaattggtgtccccgaaagtagggaaaaaggttc

SEQ ID NO: 62995 - DNA, 129 bp, Zea mays
  unsure (1)..(129): unsure at all n locations
  Clone ID: MRT4577_157452C.1
nccagctgntccagccggtcctcccgcgtagcgtanccgtaggcgtanccgtatcaccgtgtgcgacaggggaacaaatgctggagggaacggcacgggtggaggacacggacatgccggcgcggatgc

SEQ ID NO: 62996 - DNA, 377 bp, Zea mays
  Clone ID: MRT4577_157453C.1
agctactgaaattcacagtgatttaaacaaaggcggagatcatactggtaggatgcagaaaatatggacattgtagctaacaccgatcaaatcaagaattacacagaaatcaagtgttgagttgactagacttcgtataaggcgtattcaactgataaagagccctgctgaatatagcaaagtccctaataagattaccttgcttcaagtgctaaaaaaaaaaaaacagggacaacaacgactagaaaaactctaagaacagcgaattaaacctacaagatctacatgttgaaggaccagatttacgtataccgagacatattaaagttctgcaaagacatgtgcatcatgaactccctgatcaaaaacattttcca

SEQ ID NO: 62997 - DNA, 369 bp, Zea mays
  Clone ID: MRT4577_157454C.1
ggattcatggaactagcgccattcatttttacttcacttcaaattggacattattcatgggggattccaaacgttaatgggttattggacaacgaaacttaccgaacgttcctttaagaacccccccatcaattaacttttgcccgcggaaaacaaggttaaataaaacggggtaaaattattcttgaaggttccgaacgggttccacaagaaagttccggcccttcccggccgccggaaagttaacgggtgggtaacccttaaccggggggccccccccaaagttggccgttggccgaaacgccgggccgcccttgttggttcggaaaacaacctgcgggggggcgttcccgtgcttcgttggggggg

SEQ ID NO: 62998 - DNA, 386 bp, Zea mays
  Clone ID: MRT4577_157455C.1
attgtactaaatctgtagcgcaccccttaattttttttcttttggaacaggaactactgtgagggcgattaacacatcatgggtagggactgtattcataacaataaaagaggggaaatataatatatgtttccacaactcccacggctaacatgtatgacctacatactaggtggatatggaccgaaaagattaggcctgatcaacattccatgcttctttacttatgcagccacactccaacatttgtctgacatggagatgccttatctatagtcctaaaaaacaaatactacttttatacatcaggggtaataaatcctacatttcctgcctattcttgattgacttaactttataggtttttgcctattttaccatcaaaa

SEQ ID NO: 62999 - DNA, 293 bp, Zea mays
  unsure (1)..(293): unsure at all n locations
  Clone ID: MRT4577_157456C.1
ggcgtaaatccagccgccggncgcaaaccncgaggagcacaagaaggaggggcggcagaacgccagcaagaacngagacgcnncccgaccaaggaaaaaaccggggcaacgagaaggggcaacaggagcccaggacaagaaagagaaaagcacagcaacagaaggaanacaacaaacgngacaacacgacangananaancgggnnncagaaagagaaaacngaacgaggcaacacacacaagngagaaangaanaaggccngcagccccaaggcncagctagcacagcacaa

SEQ ID NO: 63000 - DNA, 507 bp, Zea mays
  Clone ID: MRT4577_157457C.1
caacgacatcatccactcgatcatcgacatggacgcggacgtgatcaccattgagaactcgcggtccgacgagaagctgctctccgtgttccgcgagggcgtcaagtacggcgcgggcatcggccccggtgtctacgacatccactcccccaggatcccgtcggctgaggagatcgccgaccgcatcgacaagatgctggcggtgctggacaccaacatcctctgggtgaaccccgactgcggcctcaagacccagcgccaagtgagcaccttttttttgcctttttcgtttccgaggagggcgtcgtcgatgccaatttgtttccaataaacagggctgtgcccgccgttctgttgtactccgtctgtggttaggttagtagttttcttgatctcgcccccacgcggtacctgttttactactctctgtttggtggtttctgaggaagttgcccgtgtacttgtatcgtaaaaaccgagtgggacatctgcatcgtttcatctgcc

SEQ ID NO: 63001 - DNA, 436 bp, Zea mays
  Clone ID: MRT4577_157458C.1
gagcaaccgtccccgctcacgccgtctgttgccgcggagatcgacttggtggggcgcatgccaggcctgcgccacccgtccgtgctgtctgccatgacccgcgccgtcgccgacgtctcctcggcgcgcgactcgatccgcctcctgggcccccggcccgaccacgagcaagtcgacgccttccgcgaacttctccgcttggccgatgctgggaagaaggcagacgccaacgcggacgtgaagacgaaggatctcgacgaggagaagctggccaagtgccgggaggtggtgcggctggaggaggaccacgaggcgtacggcgccctgctgcgcgacgcggatgggaagctggagcacgtgtaccagatggcgatgcacgtgagggacatcaagaaggcggtcggcggtgatggcaaaggggaagaggggttccggg

SEQ ID NO: 63002 - DNA, 162 bp, Zea mays
  Clone ID: MRT4577_157459C.1
cttccttcctcctataccggatcctctcacccagccaccggccatgtttgtggagactgggcggaggtgcaccgagtccttgggagctttcgcgctctacttcaaagacaccgagcttacgctcacccttcgccttccgggcttcttgcctaccgccgccgc

SEQ ID NO: 63003 - DNA, 238 bp, Zea mays
  Clone ID: MRT4577_15745C.1
ctcatctgcgtacacgctctccctgttcgtttctttaataaagttaaagttaggcaacaattggtttacaatccttaattcttaagtttgcaacactaatcttcatttcacatttctaccggtattcacttttttttttttatatttactaaagtataaaaaaactcttaatcattttattatttattatatactatttttctactcttatttctcattatattattttattatctta

SEQ ID NO: 63004 - DNA, 2987 bp, Zea mays
  Clone ID: MRT4577_157460C.1
ggaagaagaaaaaacctggcaatgcaagtgtatatatatagatgcacacagtggagcatttagcttgccgatacgacatctttctttgagccgtgaaacaacacacctcgggggagtggtggcagatgaaacgatgcagatgtcccactcggtttttacgatacaagtacacgggcaacttgcctcagaaaccaccaaacagagtagtaaaacaggtaccgcgtgggggtgagatcaagaaaactactaacctaaccacagacggagcacaacagaacggcgggcacagggggggagccctgtttattggaaacaaattggcatcgacgacgccctcctcggaaacgaaaaaggcaaaaaaaggtgctcacttggcgctggcgagctgggtgcggatgagcttagcagcggagaccatgttggtcagggcgggcttgacctccgtgtacttgcgggtcttgaggccgcagtcggggttcacccagaggatgttggtgtccagcaccgccagcatcttgtcgatgcggtcggcgatctcctcagccgatgggatcctgggggagtggatgtcgtagacaccggggccgatgcccgcgccgtacttgacgccctcgcggaacacggagagcagcttctcgtcggaccgggagttctcgatggtgatcacgtccgcgtccatgtcgatgatcgagtggatgatgtcgttgaagttggagtagcacatgtgggtgtggatctgggtggtgtcctggatctcgcagttggtgattctgaaggagtggacagcccagtccaagtagaatgcatgctcagccttgcggagcggcagcccttctctcagtgcagcctcgtcgatttggataacctgaataccaccagcctcgagatcctcgacttccttcttgatcgcaagagcgatctggtagcaagtctcaaacctcggctggtcattccggacgaaggaccagttgaggattgtgactgggccagtcagcatccccttcattgggcgagacgtcatgctctgcgccgtcttcgaccagaaaacggtcatggggttggggcggctcacgtcaccgtagatgatcggaggcttgacgcaccttgacccataagactgcacccagccattggcagtgaacgcaaaaccggagagctgcacaccgaagtactcaaccatatcgtttctctcaggctcgccatgcacaagcacatcaatgtcaagctcttcttggagcttaacgaccttgttgatttcctccttgatggcagtgacgtattcctcctcagagatcttttttgccttgtactcacggcggaccctcctgagctcaacggtttgtgggaacgaaccgattgtagtggtgggaaggatggggaggttaagcttcttctgctgggcatccaatctagcactaacgttggtcccacggcggtggtcagagcccttgagagcagcagcagccttctggacttcttcattggtcacacggggtgaggatttcctcgaggcctgagcagcagcatttgctgcgaagtaagcctcatccttttgaccagccaatgccttagcaagagcatcaaccgttgagctcaggagggtccgccgtgagtacaaggcaaaaaagatctctgaggaggaatacgtcactgccatcaaggaggaaatcaacaaggtcgttaagcttcaagaagagcttgacattgatgtgcttgtgcatggcgagcctgagagaaacgatatggttgagtacttcggtgagcagctctccggttttgcgttcactgccaatggctgggtgcagtcttatgggtcaaggtgcgtcaagcctccgatcatctacggtgacgtgagccgccccaaccccatgaccgttttctggtcgaagacggcacagagcatgacgtctcgcccaatgaaggggatgctgactggcccagtcacaatcctcaactggtccttcgtccggaatgaccagccgaggtttgagacttgctaccagatcgctcttgcgatcaagaaggaagtcgaggatcttgaggctggtggtattcaggttatccaaatcgacgaggctgcactgagagaagggctgccgctccgcaaggctgagcatgcattctacttggactgggctgtccactccttcagaatcaccaactgcgagatccaggacaccacccagatccacacccacatgtgctactccaacttcaacgacatcatccactcgatcatcgacatggacgcggacgtgatcaccatcgagaactcccggtccgacgagaagctgctctccgtgttccgcgagggcgtcaagtatggcgcgggcatcggccccggtgtctacgacatccactcccccaggatcccgtcggctgaggagatcgctgaccgcatcgacaagatgctggcggtgctggacaccaacatcctctgggtgaaccccgactgcggcctcaagacccgcaagtacacggaggtgaagcccgccctgaccaacatggtctccgctgctaagctcatccgcacccagctcgccagcgccaagtgagcacctttttttttgcctttttcgtttccgaggagggcgtcgtcgatgccaatttgtttccaataaacagggctgagggctcccccctgtgcccgccgttctgttgtgctccgtctgtggttaggttagtagttttcttgatctcgcccccacgcggtacctgttttactactctctgtttggtggtttctgaggcaagttgcccgtgtacttgtatcgtaaaaaccgagtgggacatctgcatcgtttcatctgccaccactcccccgaggtgtgttgtttcacggctcaaagaaagatgtcgtatcggcaagctaaatgctcccctgtgtgcaactatatataaacccttgctttgcccaaaaaaaaaaaaaaaaaaaaaaaaaaaaaaaaaaaaaaaaaaaaaaaaaaaaaaaaaaaaaaaaaaaaaaa

SEQ ID NO: 63005 - DNA, 769 bp, Zea mays
  Clone ID: MRT4577_157461C.1
tgggctgtccactccttcagaattaccaactgcgagatccaggacaccacccagatccacacccacatgtgctactccaacttcaacgacatcatccactcccccaggatcccgtcggctgaggagatcgccgaccgcatcgacaagatgctggcggtgctggacaccaacatcctctgggtgaaccccgactgcggcctcaagacccgcaagtacacggaggtcaagcccgccctgaccacatggtctccgccgctaagctcatccgcacccagctcgccagcgccaagtgagcacctttttttttgcctttttcgtttccgaggagggcgtcgtcgatgccaatttgtttccaataaacagggctgtgcccgccgttctgttgtactccgtctgtggttaggttagtagttttcttgatctcgcccccacgcggtacctgttttactactctctgtttggtggtttctgaggcaagttgcccgtgtacttgtatcgtaaaaaaaaaaaaaaaaaaaaaaacctccgtctggggttaggttagtagttttcttgatctcgcccccacgcggaacctgttttactactctctgtttggtggtttctgaggaagttgcccgtgtacttgtatcgtaaaaaaaaaaaaaaaaaaaaagccctccggctggggttaggtaagcagttatctagatctcacccccacccgggacctgttttactactttctgtttggtggttcatgaggaagttgcccgtgaacttgtctcat

SEQ ID NO: 63006 - DNA, 2880 bp, Zea mays
  Clone ID: MRT4577_157462C.1
ctcgaggccggccgggacgaacccagagagtggattataaataagccctcccaaaccccttccatttcccgtgctcctctcctcctcctcacctatcatcgccgctgcgccgtctcctccgctcccgtcgtccggaaagatggcgtcccacattgttggataccctcgcatgggccccaagagggagctcaagtttgcacttgagtctttctgggatgggaagagcaccgctgaggatctggagaaggttgctaccgacctcagggccagtatctggaagcagatggctgatgctgggatcaagtacatccccagcaacaccttctcgtactatgaccaggtccttgacaccactgccatgctcggcgctgtccccgaacgctactcatggactggaggagagattgggtttgacacctacttctccatggccaggggcaacgccactgtccctgctatggagatgaccaagtggtttgacaccaactaccactttattgtccctgaattgggcccaaacaccaagttctcctatgcttctcacaaggctgttaacgaatataaggaggctaaggcgctcggtgttgataccgtgccagtacttgttggaccagtctcgtacctgttgctctcaaagcccgccaagggtgtggagaagggattccctcttctttcccttcttagcagcatcctcccagtctacaaggaggtcattgctgagttgaaggcagctggggcttcatggattcagtttgatgagcccactcttgtcctcgaccttgattctgacaaattggctgcattctctgctgcatacgcagaacttgaatctgtactttctggattgaatgtgcttgttgagacttactttgctgatgttcctgctgagtcctacaagaccctaacatctctgagcagtgtgactgcttatggttttgatcttgtccgtggaacccaaactcttgggcttgtcacgagtgctggtttccctgctggaaagtacctctttgctggtgttgtggatggacgcaacatctgggctgatgatcttgctacatctctcagcactctccagtctcttgaggctgttgttgggaaggacaagcttgtcgtatcaacttcctgctcgctcatgcacaccgctgtggatcttgtgaacgagactaagcttgacagcgagattaagtcttggcttgcttttgctgcccagaaggttgttgaggttgatgctcttgctaaggcattggctggtcaaaaggatgaggcttacttcgcagcaaatgctgcagctcaggcctcgaggaaatcctcaccccgtgtgaccaatgaagaagtccagaaggctgctgctgctctcaagggctctgaccaccgccgtgcgaccaacgttagtgctagattggatgcccagcagaagaagcttaacctccccatccttcccaccactacaatcggttcgttcccacaaaccgttgagctcaggagggtccgccgtgagtacaaggcaaaaaagatctctgaggaggaatacgtcactgccatcaaggaggaaatcaacaaggtcgttaagctccaagaagagcttgacattgatgtgcttgtgcatggcgagcctgagagaaacgatatggttgagtacttcggtgagcagctctccggttttgcgttcactgccaatggctgggtgcagtcttatgggtcaaggtgcgtcaagcctccgatcatctacggtgacgtgagccgccccaaccccatgaccgttttctggtcgaagacggcgcagagcatgacgtctcgcccaatgaaggggatgctgactggcccagtcacaatcctcaactggtccttcgtccggaatgaccagccgaggtttgagacttgctaccagatcgctcttgcgatcaagaaggaagtcgaggatctcgaggctggtggtattcaggttatccaaatcgacgaggctgcactgagagaagggctgccgctccgcaaggctgagcatgcattctacttggactgggctgtccactccttcagaatcaccaactgcgagatccaggacaccacccagatccacacccacatgtgctactccaacttcaacgacatcatccactcgatcatcgacatggacgcggacgtgatcaccatcgagaactcgcggtccgacgagaagctgctctccgtgttccgtgagggtgtcaagtacggcgcgggcatcggccccggtgtctacgacatccactcccccaggatcccgtcggccgaggagatcgccgaccgcatcgacaagatgctggccgtgctggacaccaacatcctctgggtgaaccccgactgcggcctcaagacccgcaagtacacggaggtcaagcccgccctgaccaacatggtctccgctgctaagctcattcgcacccagctcgccagcgccaagtgagcacctttttttttttttgcctttttcgtttccgaggagggcgtcgtcgatgccaatttgtttccaataaacagggctccccccctgtgcccgccgttctgttgtgctccgtctgtggttaggttagtagttttcttgatctcgcccccacgcggtacgtgttttactactctctgtttggtggtttctgaggcaagttgcccgtgtacttgtatcgtaaaaaccgagtgggacatctgcatatcgtttcatctgccaccactcccccgaggtgtgttgtttcacggctcaaagaaagatgtcgtatcggcaagctaaatgctccactgtgtgcaactatatatatacacttgcattgccaggttttttcttcttcccaaaaaaaaaaaaaaaaaaaaaaaaaaaaaaaaaaaaaaaaaaaaaaaaaaaaaactcgagaa

SEQ ID NO: 63007 - DNA, 756 bp, Zea mays
  Clone ID: MRT4577_157463C.1
ggaagttacagcgtgtgtgttgtttgtgaacaggatatacagacagttattgtctgttcatttcggtcgataaaaaaaaaaaaaaaaaaaaaaaaaaaaaaaaaagtcaggagacatctgaggcgtcgtttctttctcccacaaaaccctagtggtcgccccccccctttttccctttacttggccgcccttcccccttcccctttgcagccgccctccactgcttcctcctccctctagatctccccccacgcagcaaggatcgagaagaggaggagcaatatggattgaagaggaagagaggatcaaggagatgttctacccccatatcttgcagattttcttggggaaaccctaggtaaggatgggatccttgttcctccctataattatgtgcttttggaggttgtggatcatgtggattgaaggattagaggttggattagatgtggggttaggttttgatcttgaatttaatttctgcagaatggcagattcgacagtttctgttcatgccagttttccgtggtcttagtggcctcaaaaaaataaaaagtttatatatgagtcgtagataatttgtagatctttccgtgtccatgaagaacacctcaatcggacatcagatcagaaagttattgcagtttgattatagcagtttttcagtctcataattctgtgcagaatctgttctcttaagagttaggcaattttatcaacataattaaactatgggttggtaaaagaagttgtaga

SEQ ID NO: 63008 - DNA, 370 bp, Zea mays
  Clone ID: MRT4577_157464C.1
cgctcgctcttcgtccgcgcccgcacgggccgtgtggtctaaacgaattttggggggcccaacccccaacctaccggatctctgtcctccccacacgaccaacctttaagaaggcgcctaaaaccaagaagaaaccggggctatggaagcgtcttcctgggacccccttcccaaacaagcaaagaagtttgaaactcaattaaatgaccaaatgaatgcataccctaaaatggtttctattaaaacaaaccgttcaaaagaccacctttagtcttatataaaaagaacaattaaacaattaccgcaaggtaaatcccaaaagcaaaccttggtattaataagaaggtcctaaatttttttttaatcctct

SEQ ID NO: 63009 - DNA, 2822 bp, Zea mays
  Clone ID: MRT4577_157465C.1
ggaccctcgaggccggccgggccgggctcacgaacccagagagtggattataaataagccctcccaaaccccttccatttcccgtgctcttctcctcctcctcacctatcatcgccgctgcgccgtctcctccgctcccgtcgtccggaaagatggcgtcccacattgttggataccctcgcatgggccccaagagggagctcaagtttgcacttgagtctttctgggatgggaagagcaccgctgaggatctggagaaggttgctaccgacctcagggccagtatctggaagcagatggctgatgctgggatcaagtacatccccagcaacactttctcgtactatgaccaggtccttgacaccactgccatgctcggcgctgtccccgaacgttactcatggactggaggagagattggatttgacacctacttctccatggccaggggcaacgccactgttcctgctatggagatgaccaagtggtttgacaccaactaccactttattgtccctgaattgggcccaaacaccaagttctcctatgcttctcacaaggctgttaacgaatataaggaggctaaggcgctcggtgttgataccgtgccagtacttgttggaccagtctcgtacctgttgctctcaaagcctgccaagggtgtggagaagggattccctcttctttcccttcttagcagcatcctcccagtctacaaggaggtcattgctgagttgaaggcagctggggcttcatggattcagtttgatgagcccactcttgtcctcgaccttgattctgacaaattggctgcattctctgctgcatatgcagaacttgaatctgtactttctggattgaatgtgcttgttgagacttactttgctgatgttcctgctgagtcctacaagaccctaacatccctgagcagtgtgactgcttatggttttgatcttgtccgtggaacccaaactcttgggcttgtcacgagtgctggtttccctgctggaaagtacctctttgctggtgttgtggatggacgcaacatctgggctgatgatcttgctacatctctcagcactctccagtctcttgaggctgttgttgggaaggacaagcttgtcgtatcaacttcctgctcgctcatgcacaccgctgtggatcttgtgaacgagactaagcttgacagcgagattaagtcttggcttgcttttgctgcccagaaggttgttgaggttgatgctcttgctaaggcattggctggtcaaaaggatgaggcttacttcgcagcaaatgctgctgctcaggcctcgaggaaatcctcaccccgtgtgaccaatgaagaagtccagaaggctgctgctgctctcaagggctctgaccaccgccgtgggaccaacgttagtgctagattggatgcccagcagaagaagcttaacctccccatccttcccaccactacaatcggttcgttcccacaaaccgttgagctcaggagggtccgccgtgagtacaaggcaaaaaagatctctgaggaggaatacgtcactgccatcaaggaggaaatcaacaaggtcgttaagcttcaagaagagcttgacattgatgtgcttgtgcatggcgagcctgagagaaacgatatggttgagtacttcggtgagcagctctccggttttgcgttcactgccaatggctgggtgcagtcttatgggtcaaggtgcgtcaagcctccgatcatctacggtgacgtgagccgccccaaccccatgaccgttttctggtcgaagacggcacagagcatgacgtctcgcccaatgaaggggatgctgactggcccagtcacaatcctcaactggtccttcgtccggaatgaccagccgaggtttgagacttgctaccagatcgctcttgcgatcaagaaggaagtcgaggatcttgaggctggtggtattcaggttatccaaatcgacgaggctgcactgagagaagggctgccgctccgcaaggctgagcatgcattctacttggactgggctgtccactccttcagaattaccaactgcgagatccaggacaccacccagatccacacccacatgtgctactccaacttcaacgacatcatccactcgatcatcgacatggacgcggacgtgatcaccattgagaactcgcggtccgacgagaagctgctctccgtgttccgcgagggcgtcaagtacggcgcgggcatcggccccggtgtctacgacatccactcccccaggatcccgtcggctgaggagatcgccgaccgcatcgacaagatgctggcggtgctggacaccaacatcctctgggtgaaccccgactgcggcctcaagacccgcaagtacacggaggtcaagcccgccctgaccaacatggtctccgccgctaagctcatccgcacccagctcgccagcgccaagtgagcaccttttttttgcctttttcgtttccgaggagggcgtcgtcgatgccaatttgtttccaataaacagggctgtgcccgccgttctgttgtactccgtctgtggttaggttagtagttttcttgatctcgcccccacgcggtacctgttttactactctctgtttggtggtttctgaggcaagttgcccgtgtacttgtatcgtaaaaaccgagtgggacatctgcatcgtttcatctgccaccactcccccgaggtgtgctgtttcacggctcaaagaaagatgtcgtatcggcaagctaaatgctccactgtgtgcaactatatacacttgcattgccaggttttttaatcaaaaaaaaaaaaaaa

SEQ ID NO: 63010 - DNA, 713 bp, Zea mays
  Clone ID: MRT4577_157466C.1
ccggccgggatataattctgtactacgttacggcccaaaaaaaaattaaaaaaaaaaaaaaaaaaaaaaaaaaaaaaaaaaaaaaaaaaaaaaaaaaaaaaaaaaaaaaaaaaaaaaaaaaaaaaatgggcttttttgaggtatcaaaggagcccaagggaatcaaagttggttacgttgttcccaactcatcgggagggggggttggctcgccctctcaggttgggggttgctgcatttgagggggggcacaaagtcatacaaaggcacaaggttccccctgaaaaatcttgatgtttgcctaaagttgaacccgaatgatttgttctttcacccatcttgtttcaatccataaaaaaatcatcttcagggttaagctgccctttatacttgggcaattcccaataagaaccctatgggtcttgggaaaccaaattgaaaccagttttatggaattcttttgtccaacaggaaaatatgcttctctggttagccatgtttctctgcaaccaagttgaaatttggcagggtttatatttgcaaacccaaggccttgttcaaaaatctctcgctgagggactgcattacttgattctgaaaaggaaatcttcccaattactgcccaaggggttattttctgaaagccaaactgcaaccgggtttattatggcatttatttgttaaaaatgaaaaaaaaaaaaaaaaaaggggcc

SEQ ID NO: 63011 - DNA, 227 bp, Zea mays
  Clone ID: MRT4577_157467C.1
gtgagctgctcactactcagagcggagactgcgttgacataacggcctacgcatggagctctcggtgctaaccccgccgcgacacacacgaaccgcggagggctagccggcctgcccctcgcgcggcagctgagaggtacgataccgcgtgactgcctccgccccggccaacgtgatgcccaagtccttcggcccgaataagcggcgcacgacggactatcaggaga

SEQ ID NO: 63012 - DNA, 283 bp, Zea mays
  unsure (1)..(283): unsure at all n locations
  Clone ID: MRT4577_157468C.1
ccgggccgggnaaaactcaaaaaaaaaaaaaaaaaaaaaaaaaaaaaaaaaaaaaaaaaaaaaaaaaaaaagtaaaaaaaagaaaaaaaaaaaaaaaaaaatagaaaaaaaaaaataagacccaatatggaactttaagggaaaaaaaaaccaaggctagagggcgccattatgcttttcttaacccccgaatatcctgcccaccacattacactgaggaaaaggggggccagttttcgcccctcccttgggagaaaggctttcccccgcgttgagctttggg

SEQ ID NO: 63013 - DNA, 248 bp, Zea mays
  Clone ID: MRT4577_157469C.1
tataggcaaatcaggtgagggttatagagggtggctagtggactgcgccagccccttgggcgtctcctacgtctgcttttcccccccttgtttcccttttccttttcttccttcatgatgttggcttgctgtttttcagattggtatacatcatcataccatgttaataactactttggggttttggatttagttgtatggatttttgatttgcagtctcctgtattcaaagtattcattagagatgc

SEQ ID NO: 63014 - DNA, 174 bp, Zea mays
  Clone ID: MRT4577_15746C.1
ggggagcatcccaagcgcacctgatgtccccggcacgctttctgcttaacgcgccgaacgtgatgctacccatgctggggatacacgactccacagcgcactctgaacacaccatctgccacacggggcagcactccaccctggagactcatttgcaacgcggacgctgttacc

SEQ ID NO: 63015 - DNA, 381 bp, Zea mays
  Clone ID: MRT4577_157470C.1
gatgaaaggattgcaccacagtacagaggttgtcatcacggatccatggtttgaaaaacaagcacaagtgccaaatgcttattacatcggatagctcgccatagcaggacacaacgacaggacagaaactaagcacacacactcacggacacattaccaccgccgaccgcacacgacttttattctaccgacacggcaacagatcacaggccgatctctaccaaactccgggtcacggtggcgatcaactcagcttcagcagcatgacacgtttaccaggggaggatcttccagcgctggttgtcgccctcacaccacttccacagcacgagggaggtgccgtcgcgcacgccgccgtgcttcttgtcgccgcggacgcgt

SEQ ID NO: 63016 - DNA, 189 bp, Zea mays
  Clone ID: MRT4577_157471C.1
actcagcactccctctggcccaaccacgtacctgtgcccacccggctacgcgaccttcccgatctgccataacctaccccaagctcccaaccgatccgtctcctgctacgtcgcgtccctcaggcgcccctcacgaccgcacgcgtccgcctgtgtctcgaccgggtacacggactcttcaccttcacg

SEQ ID NO: 63017 - DNA, 154 bp, Zea mays
  Clone ID: MRT4577_157472C.1
ataagaaccaagctttttttttccagcatgctacatctaaactctggggggccccaaaaatattagggggctttcaaacaaatctcaacatcccaactaacttatatcctccccaccctttctaaacttactagcaccagatccaaattttttc

SEQ ID NO: 63018 - DNA, 613 bp, Zea mays
  unsure (1)..(613): unsure at all n locations
  Clone ID: MRT4577_157473C.1
cctcagaagccccatctcctcatggcgtataatgatgatggtactataatagcagcgggcactaacagtggacgtgtggtgttctatgatattcgaggaaaaccaaagccattgaccatccttcgtgcatataatacttctgagatcccttgccttcagcaacacctgcaggccttggttctggggtggccactacaagtcttctctctttgacagcaaacacaagtggctatctttcggcctcaaattcttctactatggaggaaacaccatatagaactcgtccgctgactggtggaccgttatcaaagctacaggctcctcttagtaactataatctgaaggatgatatggatgtattttctccacttgttgatgtccagcctttcacaccatctagtggcaactggtgggatgagcatggaagtgatgatgcaaaaaaggatgataaaccaggagaaaagaaattttcaacaaccaggaagtatccgtatatggaaggcaatgatgagccacatccgattgcagattggcggtctactgcaagacaggatagcatctcatctgtgactactacatccatgccatcatggnaagagctaactgtctgtat

SEQ ID NO: 63019 - DNA, 579 bp, Zea mays
  Clone ID: MRT4577_157474C.1
cacactattcctatgaggccccattctcctcattggcgtataatgatgatggtactataatagcagcgggcactaacagtggacgtgtggtgttctatgatattcgaggaaaaccaaagccattgaccatccttcgtgcatataatacttctgaggctgtgacaggtttatgctggcaacggtcgaagcctgtcgttgttaatgagaacagttcttctgaagttgctcttcttgggggaactaatgaagagtctgttcttatgccagatcccttgccttcagcaacacctacaggccttggttctggggtggccactacaagtcttctctctttgacagcaaacacaagtggctatctttcggcctcaaattcttctactatggaggaaacaccatatagaactcgtccgctgactggtggaccgttatcaaagctacaggcttctcttaataactataatctgaaggatgatatggatgtattttcctccacttggtgatgtccagcctttcacaccatctagtggcaactgggggggatgagcatggaaagtgatgatgcaaaaaaaggatgataaa

SEQ ID NO: 63020 - DNA, 438 bp, Zea mays
  Clone ID: MRT4577_157475C.1
ttcattttttcgattggagggaggcccctgcacaaggcaggagaaacctttgcgcgctgagagggaggaagggctgactcacacgcatactcttactcaaacgggcgaacaggatgagggagattatcatcatacacatcggtcaggcctggattcaggttggcaacgcctgctgggagctttactgtattgagtactgaattgatcacgatggtaccatgcccagtgattgctcggttggcgtctcacatgatgccttcaacacgttcttcatagagactggtttcggctagcatgtgcccagggccatattctttgaccttgagttcactgtcatcgactaggttcgtactggctcgttctgccagatgttacactcagagcagctcattttgagcaatgaggacacagctaacatctttgtctgtgttcactaca

SEQ ID NO: 63021 - DNA, 745 bp, Zea mays
  unsure (1)..(745): unsure at all n locations
  Clone ID: MRT4577_157476C.1
ggccctaggggccttttttttttttttttttaacgatataaatatgtagtatttttataaatacgtcgacccaaatagattgaactgatgtcgaacaaacatttgataaaatttgataaaacgctagtatacaacaattacatggaaacgaatcacatatactatcatcgacctcaatatctcacaaattctttgccaaatacatatatacaaattggtacgagtaaaaaacatggtcagtccgtgctgtgtttatctagaatattttcatgtaaatgcacaaccactcctaaactgaatctcagttccgtttacgcgtagttcccatctagatttttcttatgacatttgagcagcacattcttgcatctccatagatatatttgattgagtctttgagctacacttgcacaggaatcacaaaaaagttgagcgctccattactgcattgaagggtatttgcagtgatgtgccagattttgcaaatacaaagcgtttgttcatcgagattgtgcacctcttctggtatgggcttcaatgtctcactaatgtagcctgcttcaggagggattagagccctcctcttgcatgcacagtgcacaccaagtcatgaaaaaggctagaataanatagatgtcctgaaaccatagcttcaaaccatcaagatttacaccatttttataagagagtagactanacaaattattttactaatcaaattagtttactacactggttggaactg

SEQ ID NO: 63022 - DNA, 1992 bp, Zea mays
  Clone ID: MRT4577_157477C.1
atggccccgaggaggaggaagcaggatgatccaccaccagaatacggagccgatgagatgaagttttctgttgaggttcaccatggtggggttttctatggcagtggtcagaatcgtgcctacattgatggtaaggtagattggtgggatcatgtggatgcttggtcatggtcctatttctgggttgaagaaatagttatgaaacttggctatgggttaaatccatccaacttgacagtgtactggctcttaactgggaaagatttgtcagatggtttgaggtatttgtccactgatgatgacacaagagtgatgagcagagtggctgataaggtgaagaattttgtcatctactttaaccatgcacctacaggaaaggacaatgaagatgatccaattttcatggacgatgaagatgatccatttgtcatggacaatgacagtgatgttcaacagggagatgatccagatttcatggacagtgacaatgatgttcaagagggagatgatgaccttttcgttgacagtgttgatgaaggcgtggtaaaccctgtagctgttaaggataagtcaaagaaggcaattgggagcaggatgggaaaggggaatgcaatagtagtttctcaaccacagagtactgatgaggaaagcgatgatgaattggaactaccagaagatgaagatggagcaaatggagtgagacttaaatttaaatcatttgtgcctgatgaccttaacaatccaacatttaggcttggtatgaccttcccttcagttgagatggtcagaaaagttgtgacagagtatagcttgaaacatagagtcgacatcaagatgcctaggaatgataggatgaggattagtgctcactgtgcacttggttgcccttggacattgtactgctcatgggacagtagggtgaagacctttctagtgaagaaatatgtggcagaacataattgtagaagggaatgggatctgaagagatgcactgcaaagtggctagcagagaaatatattgaaagctttagggctgatgagaagatgactttgggtaatttctctaggacagtacagaaggaatggaattttacacctactagaagcaagctttggagagccagaaggctagctttggagaccatctatggagatgagcttggacagtataataaactttgggattatggcaatgagatattaagatcaaaccctggaagcacattctatctgaagcttttagatggtcattttagccatctgtacatgtctcttgatgcttgcaagagaggatttctcagtggttgtaggccagttattttccttgatggatgccatttgaaaactaaatttgggggcattctactaactgctgttggggtagacccaaatgactgtatatttccaatatcaatggctgttgttgaagtggagtccctagccacatggaagtggttcctagagacactcaagaaagatcttaatattgacaacacatatccatggaccataatgacagacaaacagaagggtctgattccagcagtgcaacaagtttttccagatgctgagcataggttctgtgtcaggcacctgtaccagaacttccaggaacacttcaaaggtgagaatctaaagaaccaactatggatgtgtgcaaggtctagtactgttacacagtggaatgaaaatatggatgccatgaaggtcctagaccctgctgctcatgcttggttagataaaatggcaccaaacacttgggttagggccttttttagcacatttcctacagacattcagcatggtccactaccagattcagtttttattggagacaatcagcctgttgctcgacctgttgcacccaccaccgcatccaaggcgggaaaggcagcactcaagaagaggaagagtgcaggcaatacggcaggagcaaccaagacaactaagaaatccaagacaaaacccaagtctggagggaagaaaacgtag

SEQ ID NO: 63023 - DNA, 399 bp, Zea mays
  Clone ID: MRT4577_157478C.1
ggggggcgggggtggaaaatattttgaccccacccggataccctggtttactttttaaaaaaagggaaaaaactttaaactgggggtttacaaaaggcaattggcaaacacaaaagagggggggaaattttttttcaaaaaaaaaaacaaggaccaaaaactctggggccctattttttttaaaaatggtgaaaaaccccccccccctctttttcttaaaaggaagggaggaacaaacccggagtccacacaagaaaacaaattttttgccgctttttatattttttacacccgaaaaaaaaacaacggttccgggtttaaccctgcccttgaacccttaaaaaaatttggcccccccttggaacctttgaaaagcctttttttcctaaaaaaggaaaa

SEQ ID NO: 63024 - DNA, 255 bp, Zea mays
  Clone ID: MRT4577_157479C.1
gatgaacccacctatgaagcagaatattaattaacccatatatgtggggactcattatgttgcgagagaaactactggccagcaaaatccagcatctggggagtgcatgaaccactgccttggggccaacagcggttattctccagttatgcgcgagtattctatctactacggcggctagtggaatctctacaccaacccttcccaacggaaagatggggctcaggcatcctgggcccgggctcctggggcagc

SEQ ID NO: 63025 - DNA, 527 bp, Zea mays
  Clone ID: MRT4577_15747C.1
ccggccgggacacgggctcagctcttacttgaccagccacacgatgaacgccacgctctctgctcactagctcggagagaaggacacgcggcggcacgcaaggctcgacctcccccgctaataaatattagtattttatccttagacataaacgatatattagccatggggaattgcatcgggcctctcaaccttgacgtacgagaacaaaggaggttgcctgcggctgcctgagctgcagatgctgcttgctgttgttcatcgcgtggaatctgggctcgaggtccgccatacttgttcttctcgtataagcccactgcgccagcctagtgcgggaggaacactgccctgtctcacaacgctagattgcaactgtcagatctgacgctgtacataaagttcaccgtcctcccacgcgctcggagaagcccaactggatgatcaagatcacgtacggggacggggtcgcagagcgtgatcatcatacagcgccatcttcgatgtgatcaagaaagcttgcgagcttc

SEQ ID NO: 63026 - DNA, 368 bp, Zea mays
  Clone ID: MRT4577_157480C.1
gctttggtctccacctagttcaatcgcccctgtacgtgctcccagtgtgacaatggtcacaagttcgacaactccaccaccaccaccccctgctctttctttctctcacggggttcagttgcgactctcgtgcccctacacctcccctcggaacggtcaggtcaaaggcatgattcgcaccaccaccaacatgatttgttgcattctcttccaagcgtcactcccgctagctattgggtggaggggttgaatactgacagccatctccccaaatgcctcccctccaaggcggtcagtcatcccattcctttcttcgccctcttcggcattgccccttcatacacacacacacacacccatgtctttgg

SEQ ID NO: 63027 - DNA, 607 bp, Zea mays
  Clone ID: MRT4577_157481C.1
ttaagcgccctgctctctctctctctctcttactctgagaccagcagatacgttgtccgaagagtgaagaactaaccaacccctgtgctccagggaccttggctgcacctactccggttctatcctcggcgaaccattgccttcgatactacagcccaaaacatcacccacactagaccacgtcgcttgcatcagatgcgcagaggtgcgctgactgcccaggactcttccccgagctcctgtagaaacgcacactggcgaagatctcctcctctccgatggatatgatggagaactgttccagtggtgtgtgcgacgtgctggcgccgctgcgaattctggtgccccgcgtgtcaaggacaagacggacctcccccctgaggacatggatgacgacgtgagattgatcctgtaccattgaagagaccccctctctcatgcattaacagattttacttagaggtgccgaagactatcttagtcttatgttatgtctctaggtgtcttgttactactaccctagattgttacgttttgagatgtgctttatggcatggactcacagcatcttatgactggtgaacctgtttctaatttccgacaaagc

SEQ ID NO: 63028 - DNA, 343 bp, Zea mays
  Clone ID: MRT4577_157482C.1
aatgtgtgtttttcacattccggggactatcgggaggaatccatatttcgttcgttacaagcaaacatacagacctccaaacatacatacatacaaaggggccccaacctttagggcacagcaccaagacacaacaaccggaaaaaaggggggaaggccaatgtactggccgcggactgttccccaagtccgggggacaatttacctatagaggttttaggaagccagggcctttaggaggccccagaaccaaagggccgaaacctaggggagcctgaagagcccttccttggaagcgaaaaacacaatgcccaaccacttggggaagcccaaaaccccctcg

SEQ ID NO: 63029 - DNA, 601 bp, Zea mays
  Clone ID: MRT4577_157483C.1
caccgatttgctgacgccacgccctcagcatcgaccgcgtggctgctcggtgcccgctggcgccaggggcacggcaggaggtgctttgcgagcgccgcctccccggcgcaggcgacgccgggggaggcgtctgagctggtggatgtgccactggcgcagactggggaaggcatcgccgagtgcgagcttctgcgctggttcgtcgccgagggtgaccaagtagatgaattccagccactctgtgaagtacagagtgacaaagcaactatcgagataacaagtcgtttcaaggggaaagtacataagattcactttgtccctggtgacatagtgaaggttggtgaaactttactgaaaatggttgtgggtgacagccaaattgtttccccagataatatagttccatccgctgggaaagatggtagggttttgaaagaagatgtgttgaattatgctgtcagcaaaggtgtttgcaaacaacaatcgttagcttcggaagggaacattggtcaagttgagttactagaggaagggaaagcattactcgatgaggacttctatgaagataagaaaatccttctcaggggataccagagatcaa

SEQ ID NO: 63030 - DNA, 2040 bp, Zea mays
  Clone ID: MRT4577_157484C.1
tcgggggtacccggccgggccgggactttacctccttgtcagctgctcgcacttgcagcgtcccgttcccgcacttctcttccttctcgtttcgtcctgcacagcgcacgcaactgccaccggccaccgcgcaaactccattgcgcgcagatcaagaccgccacacccaccaccagcgcttcagcgggagacgtgacgactgacgagacgaagcctctccccacggcgcctccccctccacatggcctgggctcgccttgcctcccgctcccgtctgcgccccgcggcctccgccgccggccgatcccgacacgcctcaacaccggctccgcctccgcctccgtccccacctaccacacgcacggtacctgcggccacctccgcgccaccgctccggcgtctcctcctgcttccgcggcaccggtttgctgacgccacgccctcagcatcgaccgcgtggctgctcggtgcccgctggcgccaggggcacggcaggaggtgctttgcgagcgccgcctccccggcgcaggcgacgccgggggaggcgtctgagctggtggatgtgccactggcgcagactggggaaggcatcgccgagtgcgagcttctgcgctggttcgtcgccgagggtgaccaagtagatgaattccagccactctgtgaagtacagagtgacaaagcaactatcgagataacaagtcgtttcaaggggaaagtacataagattcactttgtccctggtgacatagtgaaggttggtgaaactttactgaaaatggttgtgggtgacagccaaattgtttccccagataatatagttccatccgctggtaagtcccttggagtagagtctgcagttttctcaagtgaaggcaatgttcctggtggaaatctctctacaccagctgttaggcatctagcaaagcagtatgggatcagcataaatgaaattgttgggacagggaaagatggtagggttttgaaagaagatgtgttgaattatgctgtcagcaaaggtgtttgcaaacaacaatcgttagcttcggaagggaacattggtcaagttgagttactagaggaagggaaagcattactcgatgaggacttctatgaagataagaaaatccttctcaggggataccagagatcaatggtcaaatcaatgagcctggcagcaaaagttccacattttcattatctagaggagataaattgtgattctcttgtgcaactaaaaaccacatttcaaaatgagaacaaggatcaaactatcaagcacactttccttccgttcctcataaagtcactttctatggcactgagtaaataccctatgttgaacagttctttcattgaggaaactaacgaagttgtgttcaaggggcctcacaacattggggtggcgatggctacaacacatggattagtcgtgccaaacatcaagaaagtgcagtcgctatcaatattggagatcacgaaggaattggcgcgattgcatgagatggcatcacaaaacaggctaagcgctgcagatattgaaggtggcactataacacttagtaacataggtgccattggtggcaagtttggctctccacttctgaacctacctgaagttgccatcattgcccttgggcggattcaaaagcttcctcgcttcgatgatgacgaaaacgtttacccttcatccataatcaatgttactgttggagccgatcaccgagttgttgacggggccacggttgcaagattctgtaatgaatggaagagcctcgtggagaagccagagctgctcttgttgcatatgcgatgacccagtaatgtaccggtacatactacgacctgaaacggaggcattttggcataaaaaaataaatccatgtattcaaataaataaccaacgtggcttctctgcctggaaacagtggaaataaattgggagttattttcggagtcctaaaaaaaaaaaaaaaaaccacggcctctataaaaaaataaaaacgggtgcgcgtgcatgtcacagctcttgcatagtgtcac

SEQ ID NO: 63031 - DNA, 230 bp, Zea mays
  unsure (1)..(230): unsure at all n locations
  Clone ID: MRT4577_157485C.1
aatgacaccaccattgntagtactaggacccctcaatatgatggcactcttagctacacctgccggttgctcaggcgggaatactgctggcgggctacgcaggtgtgcgccaagctctgaactgccacaacatcatgagcgtagctactaacacggaatataaaggcgcggtgggcaaggcactagttccccatgacgagttaccccggtttacaatctttctgataccc

SEQ ID NO: 63032 - DNA, 452 bp, Zea mays
  unsure (1)..(452): unsure at all n locations
  Clone ID: MRT4577_157486C.1
ggattaaaattagcattgatatttcgatttcgaatcaagaaaacaaaagtaacatgcngaatatctagtaagcttcggcatgtaatgaaggaataaaaagaagaaggaagaaaagaagacatctgtatgactgtatcatattagtttgtctaagtaaaggcatcaattgccttccttccactgagtgatcaatttacaaaaaatggaagaacctgatagatccaaatctgcctgcatctaccacctcctccggcacggcggcggcgccagccgagaaggcgtcgtggcactcggtgctgcaggacgccggcttctggtccacagcgccggcgccccacgggtacgtctccgaccgccgcagcacgggcgggttgctgacttccgggggngtgccttgccgtgccgtcgccgtcgtcgtcgtgctggaagagggcgagccgccgctggcattg

SEQ ID NO: 63033 - DNA, 299 bp, Zea mays
  Clone ID: MRT4577_157487C.1
gccggccgggtcgggatccaccatcacacacaggaatccacacaagtacttcgacgaccacgggcgctgcaacagacgaccaagggtcggcaccaatggcttactaccaagaggtggactactgcatctaaggaggtgaggtcgaatggccccgtgcgtcttcggccgccacggagacgacgtgcagcagtacgtcgtctaagaaaagctagaggagagacgacacgagcgcacgcgccggcgaccagaccacgcaccaccgccatgatcatcacgcgggacacggcttctgtggtgag

SEQ ID NO: 63034 - DNA, 247 bp, Zea mays
  Clone ID: MRT4577_157488C.1
tgcttgagcgggtacagcgaccaataaagatatcgccaagaatacgctttcgtgtaagtctcgggagcgaggtctgcgttcattgccgataggatccgttaagttacgtctagccttccgagaaatacactccccattaaagtagcggaacggtccaatagtacgtctcggataacgccacccgaatccgtcttgaatacgtccacgcccaaaggcccatccacaattctcgcagcgagctctcgtc

SEQ ID NO: 63035 - DNA, 152 bp, Zea mays
  Clone ID: MRT4577_157489C.1
tccggaatcccggtggaccaccgtcgccaaatcttaactgactttattcaggagatattttcggctcaggaacaggcctatgctgccacagtttcgaagcgtctatttcatggccccaaagccgtacgaaacaggaaaaccacttacatata

SEQ ID NO: 63036 - DNA, 380 bp, Zea mays
  unsure (1)..(380): unsure at all n locations
  Clone ID: MRT4577_15748C.1
gtggaggagtaaagtaaaccttnctgaagggaggaggagcagcggntttgaaccaagaaactgtccggtttgatgctaatgttaaggatcgcgagtcggtatgtttgaacgtgatgaagatctccatggttccttaatccatggaagtagtcacagggaaggagagcacgcgtactttgtctgtgttttctggtgtccctgactatgtaaggaacctttnaaagtacacctgttacactttggatgtaccagagtttaatgatgacttgaacagtgaggtttttgntgatttgnatgatntgttagggagattatgataaaataggatatattttgagtatgttgttgatgattttaggtgaattagatttatttttttg

SEQ ID NO: 63037 - DNA, 244 bp, Zea mays
  Clone ID: MRT4577_157490C.1
tcccgacccaagccacccctcccctgccaacccatctacttcatacatttctcattaccaatcataacattacatctatgagggcttactccatcttacagtcagcacctaccatcttatcttcatctgacctactatccttactactatatttacactgtataacataaaaactatcctacaaaataaatttcaaaatctctacactatcgtttaattcatcacttttcaaatactctctttc

SEQ ID NO: 63038 - DNA, 533 bp, Zea mays
  Clone ID: MRT4577_157491C.1
aaaaaaaaacaacagttattccttaagaaggtaaacaagaattttttgatagggggggagcagggtcaaaaaattcttcaaatctatcatttcaggccccccaaaacaatcgaatttttaagaaaaacaaccccccccggtttggctaaagaaaccccccccccctatccgagggaccccgatggaaaaaatatcccggggaaagcaaaaaaaagccgcaaagaaataatggggggggaattgccccaccccggtgggaaacccgttcaacccccccagggtcccccttcacagaatttcctgaaacccggggacccattgccaaaccttttttttgaactcaacccggttttttttccaatcctggggaggttcaaaatttgggggaaacccgccattcggaccaaaaagccttgaaaagaagcccaaaactatactttcaaccgggggcccgggggccccccggtcgcttggaagcctataacccgggggatcttcacccggggggagaaaaataaaaaggccaacccccc

SEQ ID NO: 63039 - DNA, 387 bp, Zea mays
  Clone ID: MRT4577_157492C.1
agcagtggtaacaacgcagagtactttttttttttttttttttttttttttttttgagttgaggccaaattaagttatgattttctttattcaaataaaatgcattacaaaaataacatgagcatgggatgcatattcatttatttaattattggtcacttgactattttactatcttaattgattacaaaagaaaaggtcctaataattttcaaaggtgacaaaaacaaaaaaaattctagaattactatcataagtatatttttattttccttctttatttcattattttttttccttgttaccgattttgggcttcacagatgctgctgacgtttccttgcttccgtaggcccgcgtactctgcgttgttaccactgctttggg

SEQ ID NO: 63040 - DNA, 261 bp, Zea mays
  Clone ID: MRT4577_157493C.1
cactaggcggcttggatataccattggtttagttgattgtgcgttggcggaaactgtggtagctgttgttgttgttgtttttgcactacgttcgccagagcacgtgggctggatgccagcagctgctctatgcacgtaggctctaggctccaccatgggtaggaggatctgtgctggtaggaaccgctggcgctgcggcgaggctatccctcgaagggcctgatgtggcaagaatatgctgttgctttggagccatccctt

SEQ ID NO: 63041 - DNA, 408 bp, Zea mays
  unsure (1)..(408): unsure at all n locations
  Clone ID: MRT4577_157494C.1
cgaacaaaaccaagtccccgaccacactctcactaggccgccctcgntttttttttttttcttttttttaattttgggtttggttctatttggtgggataaacaattttcatccacaaatatttttggttatttttacaccaccggtttatgaaacaagttcccccccactgaagacaggcccccccattttcataatcccgtccccccctttttttttcaccaaaaaaacacccctttttttttttctccccctccccttgggcgccaaaaataaaaaacttcctgctagggcgcaattttggggggggggaaaactataaaaaaattggttttttaacccccaccctttttttgtaaaaaggaaaaaaaaaccttttaacccctcctttgacaaaataataaaagg

SEQ ID NO: 63042 - DNA, 2290 bp, Zea mays
  Clone ID: MRT4577_157495C.1
cccatcttatgttcacttgccatttctgataatgggtatcaagtatgataactgtcatagcactaagtactaagtagctttgcttttgagtgctcaggctttggaacgtgctaaaaatagacattacctttgctccagagcttcaagatgacagtgacatataatttccttcattacaagggcagagggtctatttgttgaccatttgacggtggctatggtcctatggagtatggagggcttgagaattcactagtgtatatgcttttatatgtgtttctcttcattctcctgtgacatgcttcccatctacaataagtttaaactatattttgtataatccccatgagtcgtattttccagagctgctcctccaaagatctgataagctggaccactgtcgtccgcataattcccgttttctcccgcacggccggcagagggcagcaagcagccgttcccccaaaaaaggccagagctcagcagagccccgcaggccgcacccaccagaaaccccagtcgatcggcggcggcgatgtcgctgtcctcggtgaagatcggcgaggaggtttggctcacatgcctctcccacgccctcactaccgagaccgaggaggtcatgggcctcctcctcggcgacatcgagctttccagcaagggcgccaccgcccttatatggggagcgtctccgcagatgaggtgcgagcggaagaaggaccgcgtcgaggtcaacccggagcttctcgccgccgcatccgcgcaagccgacaaaatgacggccaccatcaagaagactacgagggtgatcggatggtaccactcgcacccacatatcactgttctgccgtcccatgtagatgttcgtacccaagcgatgtttcagttgctggatacaggctttgtgggccttatattttcttgttttagtgaagatgctcaaaaggttggaaaaatccaagtgactgcctttcagtcagagggtggacaacagcatgcccttcctcttgccattgctccagttattgaccttgattcatcccttagttcatcagataatgcactcacttcacattctgcattggttgaaggcatggaacaggacacaggggattccagggcctcaaagcataacaaggcctggaaaagatctttggatttctactctcatcctgacacaaatcattccacgaattatcaacccaatgaaaacactctcgctctgtacaatcctgataacacacaagaagcgcctgttgatccatacgattcagatatgactcaaagcctccaggaggctttgcaccggtcaactatggacataagtggtgcagagtatagagggaaggaggtaccacttcttgtggtccctacaaggtatctcctcaagctggacaccacgatgacctcttactgtgatatgcaacgagtcctctttgaagaggagcaatcagcatataatcaagctatgcaacaaaatatttgtgatgggaaaattcaccctcttacatccattcactgtacgtctacatacaactcctctctatgcaaactaatggagtattgtttgagtccagctgttattacgcttcaggatcgcctgaaggaaaatgaacttcggctatcaatgttaaaagaggaggctaagcaacttgaggctgatacccaaaacatgagaaacggttctcctcgtcgcctcatgaatcatggagctggtggcaagagttcacctacggctcagagcaggcatcctttctccaaccaagggagccctagaagcccgagcggtggcagccggaggagggcttgttgatgatcctgttccgcctgatccattggcttgtggcttaaccagatgctccctgaatccccagatatatgatggatggacgaagtgccccggcaatagcactgtacctgtacatacccattgccgtccagcgctgtgctgttgtcgaatcccaacggtctcactttgtttttttgtagtattggcctattggggttccttatcctgttgtcggagttgtgccattatcctttccatggttgacctgagctttagcctgtacactgtagactctactagaggtttacctgaggctgaattcccgctgctaagatgtgatgttcccggccataagcaaagatgcaggttgtctttgctttgtaaagatgaaggttgtctttgttttgtaatcgaaaaaaaaaccctccgacttcgatagcaatccatttcttgaaacgatatagctataagctgcagccaaaaaaaaaaaaaaaaaggccccta

SEQ ID NO: 63043 - DNA, 180 bp, Zea mays
  Clone ID: MRT4577_157496C.1
aattgatcgggggctcccccaaaaatgggaagcgctacaatcaataatgcggccgagcatggatgtataacaatcgagcactatatccgaagctggaggacgccatccttgccaggagacgcaaccttttaaacgggagggcactaatgcacggccaacaacgtaaacgcgtagaccggc

SEQ ID NO: 63044 - DNA, 766 bp, Zea mays
  Clone ID: MRT4577_157497C.1
agcaatcagcatataatcaagctatgcaacaaaatatttgtgatgggaaaattcaccctcttacatccattcactgtacgtctacatacaactcctctctatgcaaactaatggagtattgtttgagtccagctgttattacgcttcaggaccgcctgaaggaaaatgaacttcggctatctatgttaaaagaggagtgtaagcaactggaggctgatacccaaggcatgagaaatggttctcctcgtcgcctcatgaatcacggagctggtggcagcggttcacctatggctcagagcaggcatcctttctccagccaagggagccctagaagcccgagcggcggcagccggaggagggcttgatgatgatcttgctccgcctgatgcgttgatgaactgtccgttgtggcttaaccagatgcttcctgaaaacccagatatttgacggacgaagtgcccagacaacagacactgtacctgtacataccccattgccgttcagcgctgtgctattgtggaactccaacggtctcattgtgctttttctgtagtatggggggggttcctttccatggttcatggctggcatgagcttttatagactgtagactctgtgctagaggttttccagaaaggctgaactgccgctgctgggatgtgttggttcccgggcataagcaaagatgaaggctgtctttgcttttgtaattgaaaaaaaaaaaccccgacttcggtagcaatacattttcttgaaatgctataac

SEQ ID NO: 63045 - DNA, 381 bp, Zea mays
  Clone ID: MRT4577_157498C.1
gcagagtatagagggaaggaggtgccactttttgtgctcccgacaaggtatctcctcaagctggacaccacgatgacctcgtactgtgatatgcaacgagtcctgtttgaagaggagcaatcagcatataatcaagctatgcaacaaaatatttgtgatgggaaaattcaccctcttacatccattcactgtacgtctacatacaactcctctctatgcaaactaatggagtattggatcgcctgaaggaaaatgaacttcggctatctatgttaaaagaggagtgtaagcaacttgaggctgatacccaaggcatgagaaatggttctcctcgtcgcctcatgaatcacggagctggtggcagcggttcacctatggctc

SEQ ID NO: 63046 - DNA, 958 bp, Zea mays
  Clone ID: MRT4577_157499C.1
gccggcctggtccggattcagggacaaagatgcatcaaatggttctcctgtttgcactggcaaccaaaagagcgccagccccagccccagccatggacggcggcggaagcggatacatcccaaatccaagcgacagctaacacacataacggcaggggcaaaaatgtcatatcgcttgcagtggcggcagctgggatcaaaagaaaaaaaactagttccaactagtccctctccccaaccaccatggccgcttctgatgaccatgacccgaaggcgctgctgcaggtaagggtgagcgatgaggatggtgcgctggtggacgcgctcaaccgtcgagctgctgtttctgccgccgcccccagcttcttcgaggggttcgcgctccacgggatccgcgtggagagcatccgcccaggccacatcctctgctccttcacggtccccgcacgcctcacctccggcagcgatcacatagcccccggcgccgtggtggccctggtggacgagatcggctccgccgcctccgtgtccgacggccaccacctcaaggtctccgtcgacatgtccgtcaacttcgttgacctcgacgccgccgcgcccggggacgccctccgcatcaccgccagggcgctcggccacaagggcgcctactccggcacgcacgtcatcgtcgccaacgccgccacggggctggtggtcgccgaggggaggcactcgctcttcggcaagatgaagatcaggagcaacatctgaattggagcatgtgtgcacacagtgctgtgtttgttgtcgtgtgctctgcttctcgactccttgtcaggaatgtaatggcagcagcttgcttcttcagtaaaaaataaaaaaaaaacagctccattattatgtttaaaaaaaaaaaaaaaaacacccagcccggccgcacttcacacggaaaaaaaaaaaaaaaaaaaaccggggc

SEQ ID NO: 63047 - DNA, 935 bp, Zea mays
  unsure (1)..(935): unsure at all n locations
  Clone ID: MRT4577_15749C.1
cgttctcgagactgctactagactgctggcgcggagtggaggacgagtggtgttgcccacgcagcgcagacgcagtctccttttcatcatcaagtccggagggagagccggagaaccggttcagccagcagagtcgccaaaacaaaagcaaaatgaggagctccgtctctgagcgcagcctcatcatcgagagcgacgacgacgacgacgaccatccccaatcccggtcatccgccgccgcccgcagcagaagacgccaccaccaacacgaggaggactccgccgcaggatccgactccgattccggttcctcctcgtcctcctgcggcaccccgcgcggtccggccaccgactcctcctacacccagcaatggccacagagctacaggcagtccatcgacattcttagtagcgtgcagtcaccaaatctgagcttcttgggaaccccaactctaagcagattgtccaactcttttcggggtaaaacccctgaaatcatctccaatcttgttaagccacttcttcgccccactacaagtgatgaccaccaccaccaccaccagcagcagcctgaagaaagaaagagttctcagtaccttctgccttcgagaaaaccatctttgcaacagattcctgaggatcaaaagccagtgccagttgctcatgaggtgtctccgtatcataaatgcacttacacccaagcagttgtgaatggaataaatgttctatgtggtgtgggaatcctatcaacaccttatgccatcaaacaaggcgggtggcttggactggtgatactctgtttatttgcaattctagcttggtatactggtgtgctcctgcgccgctgcctggacagcaaggagggccttgagacatacccagatattggtcatgccgnctttggagccaccggncgtatagccatctcaataatc

SEQ ID NO: 63048 - DNA, 250 bp, Zea mays
  Clone ID: MRT4577_1574C.1
ttgacatggggtatgaggatgagcccccagaaccggtgattgctgaaggacgctcaagaagagcctggagaacacacgatagatgcctctgacgactcaattggtggtgtgggtgaagataacgcactggtataagagctagggtggccggcatgcatcacaggtcatgtctaagtacgagcgtgcgcacatgctgcgtgcatctagcctggcagatagaggaatgctccagatatggttgaggttgagg

SEQ ID NO: 63049 - DNA, 1969 bp, Zea mays
  unsure (1)..(1969): unsure at all n locations
  Clone ID: MRT4577_157500C.1
cagaggggcagagggcagcaagcagccgttcccccaaaaaaggccagagctcagcagagccccgcaggccgcacccaccagaaaccccagtcgatcggcggcggcgatgtcgctgtcctcggtgaagatcggcgaggaggtttggctcacatgcctctcccacgccctcactaccgagaccgaggaggtcatgggcctcctcctcggcgacatcgaggtcgatcgcatccccacctgaccctttcagttccttcctctcacgaatgcttgggtggatgttttggttttctcctctgacgggatcgtggttgtggctgattttacttgcctacctgtagctttccagcaagggcgccaccgcccttatatggggagcgtctccgcagatgaggtgcgagcggaagaaggaccgcgtcgaggtcaacccggagcttctcgccgccgcatccgcgcaagccgacaaaatgacggccaccatcaagaagactacgagggtgatcggatggtaccactcgcacccacatatcactgttctgccgtcccatgtagatgttcgtacccaagcgatgtttcagttgctggatacaggctttgtgggccttatattttcttgttttagtgaagatgctcaaaaggttggaaaaatccaagtgactgcctttcagtcagagggtggacaacagcatgcccttcctcttgccattgctccagttattgaccttgattcatcccttagttcatcagataatgcactcacttcacattctgcattgggttgagggatggaacaggacacaggggattccagggcctcaaagcataacaaggcctggaaaagatctttggatttctactctcatcctgacacaaatcattccacgaattatcaacccaatgaaaacactctcgctctgtacaatcctgataacacacaagaagcgcctgttgatccatacgattcagatatgactcaaagcctccaggaggctttgcaccggtcaactatggacataagtggtgcagagtatagagggaaggaggtgccactttttgtgctcccgacaaggtatctcctcaagctggacaccacgatgacctcgtactgtgatatgcaacgagtcctgtttgaagaggagcaatcagcatataatcaagctatgcaacaaaatatttgtgatgggaaaattcaccctcttacatccattcactgtacgtctacatacaactcctctctatgcaaactaatggagtattgtttgagtccagctgttattacgcttcaggaccgcctgaaggaaaatgaacttcggctatctatgttaaaagaggagtgtaagcaacttgaggctgatacccaaggcatgagaaatggttctcctcgtcgcctcatgaatcacggagctggtggcagcggttcacctatggctcagagcaggcatcctttctccagccaagggagccctagaagcccgagcggcggcagccggaggagggcttgatgatgatcttgctccgcctgatgcgttgatgaactgtccgttgtggcttaaccagatgcttcctgaaaacccagatatttgacggacgaagtgcccccagacaacagacactgtacctgtacatacccattgccgttcagcgctgtgctattgtggaactccaacggtctcattgtgtttttttgtagtattgggggggttccttatcctgttgccggagctgtgccattatcctttccatggttcatggttggcatgagcttttatagcctgtacactgtagactctgtactagaggttttccagaaaggctgaactgccgctgctgggatgtgttgtcccgggcatatgcaaagatgaaggctttctttgcttttgtaattgaaaaaaaaaccgacttcggtagcaatacatttcttgtgcatgctantactctaagctacagccacgtgnccacaccttgcctggat

SEQ ID NO: 63050 - DNA, 1103 bp, Zea mays
  Clone ID: MRT4577_157501C.1
atgggaccctcgaggccggccggggttttttctctcactttgtaatcgatcagctgcaatgaagtgggtagagtgggtagccgctgtcgaggatcgccatcgagagggcgacggccgcgctctcgacggttcggccagcatcagtgctcaccccacggttcttggcctcaaggtttacctcctctgccctccctcaccttatcttcttcggtatgcacttgtgttgtgttgtgttgcagggccagagcagcaactgggtggtcgtcgagttcaggcatccgaacccctccaacgacgactgggtcggcgtcttctctccctcgggtttcaggtactcgacggactatggcatgtttaggctctgcatagcgaacacggaggaggactggaggccgggaacggagcagtacaagttcatcgatcgaagcagccctggctcgtcttcctcgcgcaccgtgttctcggctactcgtcgggtggctggtacgagacaatgatgggctcgtacggggagccgatgggccgggacgggcttcaagacctctggcagaggtacgatatagcggtcttcggccacatccacggatacgagcgcacgtgccccgtctaccaggcaaagagccggtgagtccaagatgatatggatcattacggcgggcggggcggttcaacgcgacgacccatgtcaccgttggctgcggcggcggcgcgagcctgtctacgttcagagacagtgtgccgtactggagcttcttcagggacgccgacacttgatgttcggcaagctcacggccatcaacagctcgttcctcttgtttgagtacaagaagagccgcgacggccatgtgtatgaccgtttcagtctcgcacgactaccgtcacctggtggcctgctccgtcgacagttgcccccgaagcaccttggccgtctgatcgagctccggactctggagacatgtgttgatagatacactgtttgatatactttcagcattgtttttagttaccattggttctgaatgcactgaaccttctacctcgacactacatgctacatatcaaaagggcaatggtgtagaacaaatcatgtgcttctcacctcc

SEQ ID NO: 63051 - DNA, 470 bp, Zea mays
  unsure (1)..(470): unsure at all n locations
  Clone ID: MRT4577_157502C.1
cttgaatacgaaaaacacaaagtccggactggtcagcttcagataccaccgcctggtttaccacagcctagtggtgctgaccgtgaggtagttgtaaatcaatcatcttctgccagagttagaagggatgttgcagcacgtgctatgcagggttggcatgctcaccgcctccttgccaatggcacttatggggataacattttgaaggacaaagattcaatgccatcttcaagtcgtgataacctaaaaagctttggtacacttcatgattttaatacaatacacatcatgatttttctcttgctaatgtgcactatactattttttcttgcgtatctttcatgatatgtttaggggtgctcaagagaaagaaaacatctagtccagagtatgctctcaagtcgtcctgctcaaaaataaataagtctgagttaagggctcctgtacatacatttgnctatatctatata

SEQ ID NO: 63052 - DNA, 671 bp, Zea mays
  unsure (1)..(671): unsure at all n locations
  Clone ID: MRT4577_157503C.1
ggccggccgggaccatagtactacgctgcacccccggcccggccccgcgtaaccctctccaagtcccaccgctcgcgcgccggcgatcaggcagggggctcccaggttgtactgcggtgatggctacgtcgtcgacactgggccagacgcagcggtacgcggcgggggcactgctggcgctcgcgctccgccaggcgcagacgcaccagaccgtcctccttggctcccacggcctcgacgacgagccccaccccgacgcggccaccgcagtcgaacccgacgcccgtgacctctggacccacgagtcccgcggcctcctccgccccgtcctcaggtttcttgagatcgacccgaaggcctgggtcggggtggagaagacggccgcgtcgtctgatcccaagcaccacattggcgcgttccttcgcaaagtgttcgaggacgaagacgacgacgagaaggcccggtcagagcgatccgatcacgagctggcgctcgccaaggccgtggacgcgatggcgatgggcctggaagcggccggtgtcggatcggtggctgaggcgctcagaccggagagccacggctccgacgacgacgacggcgacccggcgctggcgggcgtcgacgcgcaccaaggactaccggaagattggcggntgctgtacatgctcctc

SEQ ID NO: 63053 - DNA, 1312 bp, Zea mays
  Clone ID: MRT4577_157504C.1
attctacagccaatggagaaaggatgcctgctctgagccatatgtgaaccgctatcaccaggtccgtgagtcatgaggcgactaggagaaccatttctgcagccaagggagccgccggagcccgcgtgtacttagcccaattatggcttggtcttttctcgtatacctatattttatgcatgattcaagaaactgtgcatgttttgctcgctagaaggacaatgcttaaaaccataaatcatgctgaaaagctggtatacagtatactggcaaactaactgaacaatagcaatgacatttcaattggggtcaatactgtaagcttttcaagaactgtgtctacttacttactggtatacagtacagcctaaggttactgcaaccttttcaagaactatatagccttttcaagaactatgcgtctacttactcttacttactgtatagcctaaggttaatgtatttcgattgggttcaatactgtaaccttttcaagtactatgtgtctacttagggggtgattggttctactcaactaaagtttagtccctatcacaccgaatgtttgaatgataattacgctatgtgtctacttactggtatacagtatactggcaaactaactgaacatatttctgatcgtgatagacctggagaagatctatggattctactcccatcatgacacaaatcattccacaaattatgaacccagagaaagcgtactcgttccgcacaatcctgataacacacaagaagcgtatgttgatccatatgattcagatatgactccaagcctccaggaggctttgcactggtcaactatggacataagtggtgcagagtatagagggaaggaggtaccacttcttgtggtccctacaaggtatctccctcagctggacaccacgatgacctcttactgtgatatgcaacgagtcctctttgaagaggagaaatcagcatataatcaagctatgcaacaaaatatttgtgatgggaagattcaccctcttacatccattcaccatacatctacatacaactcctctatctgcaaactaatggagtactggtgaaagcacagtctccttgtctcatttcagctaaattaatatactgcataatatcagttaatttatgcgattcacattttattcaatagtttgagtccagctgttactacgcttcaggatcgcctgaaggaaaatgaacttcggctatcaatgttacaagaggaggctaagcaacttgaagctgatacccaaaacatgagagacggttctcctcgtcgcctcatgaatcatggagc

SEQ ID NO: 63054 - DNA, 975 bp, Zea mays
  Clone ID: MRT4577_157505C.1
tcatcatcgtcgaccatgaatttgaaattcaatatgaatattggaccaatgcattgggagttgttgcaaagggcaatgtaataaatgactttgcaactcaaattgtagcaattatgctacggctatatggatgtagctcaaatattggttaaggagtgtctccaaatattgacataacttatactccgtcgcaacgatcggtgatgggaagattcaccctcttacatccattcaccatacatctacatacaactctctctgcaaactaatggagtactgtttgagtccagctgtcactacgctccaggatcgcctgaaggaaaatgaacttcgggtgaatagactagcctgcatcttttgacgactcttggccttgtaagtcattagcattgaacctgcatgtgtcagctatcaatgttacaagaggaggctaagcaacttgaggctgatacccaaaacatgagaaacggttctcctcgtcgcctcatgaatcatggagctggtggcaagagttcacctacggctcagagcaggcatcctttctccaaccaagggagccctagaagcccgagcggtggcagccggaggagggcttgttgatgatcctgttccgcctgatccattggcttgtggcttaaccagatgctccctgaatccccagatatatgatggatggacgaagtgccccggcaatagccctgtacctgtacatacccattgccgtccagcgctgtgctgttgtggaatcccaacggtctcactttgctttgtagtattggcctattggggttccttatcctgttgtcggagttgtgccattatcctttccatggttgacctgagctttagcctgtacactgtagactctactagaggtttacctgaggctgaattcccgctgctaagatgtgatgttcccggccataagcaaagatgcaggttgtctttgctttgtaaagatgaaggttgtctttg

SEQ ID NO: 63055 - DNA, 436 bp, Zea mays
  unsure (1)..(436): unsure at all n locations
  Clone ID: MRT4577_157506C.1
gcgcgcagagcaagcagcaggcgtgcagccgcacgtgcgagtcggaccactggacgagtgacgtacagttaacccgcctcttccatgatcttctgccgctctcaccggcgttaattctttgcgacagcgccgccgttcctgcggtacggcaagtactgcggcatcatgtacagcggctgccccggcgagccgccgtgcgacgcgctggacgcctgctgcatgcaccacgacaactgcgtccaggcaaagagtacgtctgcgttgctccagtcgtcgtcttcagttcctatagctccagtagtgaatcttcagttcctatagctccagtagtgaatcttcagttcgacagcacgcacggacgtgggctgacgacggctgctgcgcgcgtgttgtgtactaccatgtgcagtggactacctgagcacggnctgcaacg

SEQ ID NO: 63056 - DNA, 514 bp, Zea mays
  unsure (1)..(514): unsure at all n locations
  Clone ID: MRT4577_157507C.1
aattcggcacgagggtaaagggggggcgggggggcctacttccatgaaccaccctgcaccccatcgctgcgcttaagagccacctattatgacgcaacatcgtgagtgtatcacgggacctcctgagcggatattctccctgaacaggaaccgcatatgcaccttatctttactggaggggggggactnacatgcttttttattggagtccaaatgggaagcccctcgaagatcccacagaggaactggttcccctctgacttcaccttaagggcgggcacttcatcgtgccatattcaatgagcttggaatgaacagggaaagggggaaagcaactgagatcacttctgccactatcatgcggaaaggatactggacgggatcaatttatacattggagcgaattcctaccatatgtacaaaacggacgtcacattgctcacggaaatgggcatggacgcatatacgcgctctatctcttggcccaaaatactgccgaagggaaccaaagaag

SEQ ID NO: 63057 - DNA, 642 bp, Zea mays
  unsure (1)..(642): unsure at all n locations
  Clone ID: MRT4577_157508C.1
tgggtaccctngcaggccggccgggattaaaaaaaaaaaaaaaaaaaaaaaaaaaaaaaaaaaactcatctcttacaacgaaaccctcttcatcttgttctatctgtgacgagcatcatggcctcgagagcagtgttattgtcggctatgtgtgtgcttccggcgatggttgtggccattcgcccagcaaagaaccctttttgcgtgaagggtcgtgtctactgtgacccttgccgtgctggttttgagacctcagctaccacctacattgctggtgctgagattatgttgcaatgcaagagcagggttagcaacgaggttgtgtacacgaagaaggggtacaccgactcaaccggagcatacacaatgtacgtggatgaggatcacgcagatcagatctgcagtgccaagcttgtaagcagccctcaccctcaatgcaaggaagtcaccccaggccgcgacgaagccgtcgtgattctcacccgctacaacggcattgcctccgacgataggttcgccaatgccatgggcttcatgtctcaggaggttgcttctggctgtgctgagatcctcaggcaataccaggagttcgacaatgagaattaattacgtaattaatntcagtatattattaatctactt

SEQ ID NO: 63058 - DNA, 339 bp, Zea mays
  Clone ID: MRT4577_157509C.1
gtgaaagggccccttcttatcatatcatatcaagagatagaagatgtttacatctctgggaaccaaaatcgagctgactatttgggggccgcgcagaaaaatgggtgataatacacattaggggacggtggactcaatcacaagaggcccatcctgtttacatgagaagaaggcgctctggatctatcatggtccctagagcttaggaggaatggaaacggagcacaggcgattccgggagctaaaagtatgctccctgaggagccgtggacctggttcgcgacggcccaagggatgcacagctggtaaaatgcccttactgcccagcctttgaagggg

SEQ ID NO: 63059 - DNA, 637 bp, Zea mays
  Clone ID: MRT4577_15750C.1
ccgaacccgacgacaacggtcaattgatactcaatcacgccctctttgacttctaaattacccatcgtggctccgagttgacctatccctccatcctcacaactgcaaacatggccgatatccaggagcgtctgaagaagcttggcgctgtgtcgcgcatcggtggcaagggtacccctcggagaaaggtcaagcgcgcccctccccggtcggccgccgacgacaagaagctccaggcttccctgaagaagctcaacgtccagcccatcacccagatcgaggaggtcaacatgttcaagagcgacggcaacgtcatccactttgctgcgcccaaggttcacgcctctgtcccctccaacacctttgccatctacggcaacggcgaggacaaggagctcactgagctcgtccccggcatcctgaaccagctgggccccgactccctggcctccctgcgcaagctggccgagagctaccagagcctccagaaggccgacgaggaggccaagaaggacggtgccgccccggaggctgaggatgacgatgccattcctgacctggtcgaccgcacgttcgaggataaggtcgagtaagcccagtatctagaaaggggaaaatatcacacactacaaactct

SEQ ID NO: 63060 - DNA, 124 bp, Zea mays
  Clone ID: MRT4577_157510C.1
ggagattagggggtcgatccctataaatagacacgccgtttatctatttataggcgatcgagctcctaatctcctatacaattatagtaatgcttcgagtctatcaaatgggttggtcatttac

SEQ ID NO: 63061 - DNA, 283 bp, Zea mays
  Clone ID: MRT4577_157511C.1
gaattaccgatcgacccactcgtcctaccgacacacctacaacattttaagattccaactacactaaagcgactgaggcttatagactctctaaaaacctcaataactatctcaccattcatcaccacccatataaaaaccctcaacttattaacaactctccataatatataacttcacatcacatactacaaaacattaaaatactaccaattactattctaccaccaataataactcatagactccatcctcaaatgtatccaaatcattcaaatcacac

SEQ ID NO: 63062 - DNA, 607 bp, Zea mays
  Clone ID: MRT4577_157512C.1
ccggccggaatcccgtaaccgcagccttgccccactcgcatcttcctctccctctcagcgctggtgctcaatctacaggtcgtcccactccctacacacccgccctccggtgtgaacctccatgacgtctgcaaccactctccgatctgctgtcgtgacctcatccagccgtgctgtggcagtggatcggagttcgctccagctctgattggaattccactactatattgccacttgaagttgttatgtcaaaatattatggtgaaagcaagcgtctattgggatctattttttatcttgcaaatgatcttcctgaaggaggtaatatattcttagatgaggtatatatcgtaatacttatagcataaacactcaagccactacaagtaagctcctgccctttgcttgtttctagattgatatgtcaagatacgcttgtttcatttgagctcactgttatctgaaaatctatagactgccttcgtccccttcatcactgccgatgaccgtgacttggccaccacagcaaaagcacggaggatccttgatgtgtgtggtctagacgtgattgaattgggggtgcctgactttgatccattacttgaat

SEQ ID NO: 63063 - DNA, 168 bp, Zea mays
  Clone ID: MRT4577_157513C.1
gtcgacccacccgtccggtcatacattattgacaagcacccagccttagaagacgatttttttttaccgcaaacaaagtcccgtgcccgggcagggggcgtgtttgtccttctctgagcatgatgacttggactacaccctctacctatggttctgaccggatatcta

SEQ ID NO: 63064 - DNA, 1752 bp, Zea mays
  Clone ID: MRT4577_157514C.1
aattcggcacgaggctcgcatcttcctctccctctcagcactggtgctcaatctacaggttgtcccgctccctacacacccgccctccggtgtgaacctccatgacgtccacaaccactctccggtatgaatcccgcgtgcgcttacacgaagattggtaatagtggcgacccagtcgcagccgtggaccttctcctcctcatcgcttgctcgttgtcgtcttttgcctacgtctgcacccgacgctgctacccttcgctcacctgttcatcatcctttcagatctgctgtcgtgacctcatccagccgtgctgtggcagtggatcgaagttcgctccagctctgattgggggaaaatgactagggtatcaagtggaaaaacataatggtccaggttctactgcggcacctctttcaggctaagcatctaaacaacaatatgtaaattatccttttccaataaaatacatgcttaaatcgtggctgctaggcgaatggtcctactttggtcatcaaatgcaggttagcttaactttttctaatgcattattatttgtggtttccatcaaatgtacgttagcttatcttttagcaaatttgtagctgatgtcaattaactttttagtggaattttatctgctcattcttatattcaggaattccactactatatgtgccacttgaagttgttatgtcaaaataatatggtgaaaacgagcgtctattgggatctattttttatcttgcaaatgatcttcctgaaggagattgatatgtcaagatacgcttgtttcatttgagctcaatgttatctgaaaatatatagactgccttcgtattcttcacctcgagggaggccgggacccgcggggccgcgcggaatcccggactcgtccctcccgccaaccctagcttcccttctcttcccctcccccgatggacccgccgccaaccagggacagaggggaggagctggagcctgaaacccgcgccttccccgacgccgacgacccggagacctcccgatctgaacgcgaagagggtatccctccaccgccaccgccaccgcctctgcgccagcagctcatgggggcttgccgcgccgacgagcgcctcaggccgctcctcaccctcaacgtctcctgcggcgcagcggacgaccgactcatcgcacacctcgcgcagcacttcgaggtgtcggaggtgggcatgctcgcgcgttgcctctgtgttcccctcgtttccctgcgcgttggcaaggttcagagggaaggggccctcctctgcccaacacacattagagggaagctgaaccttgttcttctgccatcatctagcatgcggcttacctttgtttgtgatgatggttatccagagcaactagctctcttgagcaatggctttgaattttcggaagttatgattgaagaaatatcagctgataattctggacgctctttcctaatcagaatttcagaatctaaagtgttttactactggtgtgctgagaagtcgaaggaacatggaatggaacttcttgcaaagatgaaaaaccttttggacgggaggccaacactctctgatctcactggcatctctaattcacgacttgatgcttttgccactcatttacatgcttatcttcttgcatcaagtatcggggatgttacatcattgggctcacttaatgacttcctgagtacttccagatcacatgatcaatatttacagctccagtcagatttttccaaa

SEQ ID NO: 63065 - DNA, 459 bp, Zea mays
  Clone ID: MRT4577_157515C.1
gtctgtcttgggcgatatcgtttcctactccatcacgtgacgctggacggaaccgggaaggcggtgggcgaccggcaccctatgatcggggacggcgttcttatcggtgcctgcgtgactgttcttgtaaacatcaggatcggtcggcgctcaagtacgggccctgtactatcgtgctcatagacatgccgcccaagagcaccggattgttgaaccccgccaggctgatcggcggaaagaagggccaggaggtgatgccgtgtgagtccatggaccacatccttttgatactggagtggaaggtctatatgattggagcccccaagctagaaaaaaaaagagctcttttttgtactgttggtatactgctgataggttttctgtgtctgtgcgtggatgtgatagctgtatgctattgttccactgaggtgaaccgtcgacatgctggtgtggtgttca

SEQ ID NO: 63066 - DNA, 2186 bp, Zea mays
  Clone ID: MRT4577_157516C.1
ctcgaggccggccgggccgggatctcctcacgccagccgcacgagccccaatcccgtaatcgcagcctcgccccgctcgcatcttcctctccctctcagcactggtgctcaatctacaggttgtcccgctccctacacacccgccctccggtgtgaacctccatgacgtccacaaccactctccggtatgaatcccgcgtgcgcttacacgaagattggtaatagtggcgacccagtcgcagccgtggaccttctcctcctcatcgcttgctcgttgtcgtcttttgcctacgtctgcacccgacgctgctacccttcgctcacctgttcatcatcctttcagatctgctgtcgtgacctcatccagccgtgctgtggcagtggatcgaagttcgctccagctctgattgggggaaaatgactagggtatcaagtggaaaaacataatggtccaggttctactgcggcacctctttcaggctaagcatctaaacaacaatatgtaaattatccttttccaataaaatacatgcttaaatcgtggctgctaggcgaatggtcctactttggtcatcaaatgcaggaattccactactatatgtgccacttgaagttgttatgtcaaaataatatggtgaaaacgagcgtctattgggatctattttttatcttgcaaatgatcttcctgaaggagattgatatgtcaagatacgcttgtttcatttgagctcaatgttatctgaaaatatatagactgccttcgtccccttcatcactgctaatgaccgtgacttggagacccgacagcggccctcgacgttgtcgccgccgagcccatgctggttccaccagtggtccaccacccggatgtggtccgccaagacgagcagtaacggtggcagcgaggcgaggtggtagatccagcaccgcttctgcacgaccatccattcctccacccagagcatgtacccaggcttgcctctcctcggggaacatgccgaggtcgtccgactggagcagaaggcgacatcgctcaacaagctggtcgaggagcagtgcgagagcataaacgatctcaagtccaagagccatccgattctgggcccagaacactttgccaaacaaaaagttatcgctcttcatccttgataggctacagaaagggaagctgaaccttgttcttctgccatcatctagcatgcggcttacctttgtttgtgatgatggttatccagagcaactagctctcttgagcaacgactttgaattttcggaagttatgattgaagaaatatcagctgataattctggacgctctttcctaatcagaatttcagaatctaaagtgttttactactggtgtgctgagaagtcgaaggaagattgaatggaacttccttgcaaaggtcttcaagggagaagcggcttaaaatgtgtgagcaggtattttcggactggccgggccccccgccacagaggcctgtgctggcagcataagccatcgggtgggatctcagccatgtgcttctatcagcacagtgcagacgataaattccgaagcattagcaagccagcaatgcggatccgtaccacaggtttctataaaccgaggcgaacgtgctgttgagatgaagggcagcactaataatcttcacgggcacccggccatgccgcaaactatgaatggtttcaatgccgttccaggacgggtgctgttcccacctgcggctcaactggtggtgagtcagatgcagacacatacggctgattgagtaacaagtagccattggatcaacattgtcaacatggcaattgaacattgcccgcttccattcatcagtcgcggtcaccaagcgacgacggccttaagccgcaccctgccagtggcttggcgcccaccacattgggggtgtctggtcgctgttgaaccgtcgcgcctcaacctggcgctgcaactgtgaatctgttgtgtaattgcgtaagtaggaattaggatgataacgtgcatagatgtgttgggcggatggtgtaacagcggtgagttgcagtttggagatttagcgattctgaatgtgtagtagaaaaaccacaggggaaacgaaacaacatctgtatagactattcaggatcaggaggtttttttagggcgcgcggggatgaaaatttttggcccagcctggcccatg

SEQ ID NO: 63067 - DNA, 618 bp, Zea mays
  Clone ID: MRT4577_157517C.1
gtcccgctccctacacacccgccctccggtgtgaacctccatgacgtccacaaccactctccggtatgaatcccgcgtgcgcttacacggagattgatctgctgtcgtgacctcatccagccgtgctgtggcagtggatcggagttcgctccagctctgattgggggaaaatgactagggtatcaagtggaaaaacataatggtccagatgaggtatatatcgtaatacttatagcataaacactcaagccactacaaactgccttcgtccccttcatcactgctgatgaccgtgacttggagacccgacagcgaccctcgacgttgtcgccgccgagcccatgctggttccaccagtggtccaccgcccggatgtggcccgccaagacgagcaggaacggtggcagcgaggcgaggtggtagatccagcaccgcctctgcacgaccatccattcctccacccagagcatgtacccaggcttgcctctcctcggggaacatgccgaggtcgtccggctggagcagaaggcggcatcgctcaacaagctggtcgaggagcagtgcgagagcataaacgatctcaagtccaagagccatccgattccgggcccagaacac

SEQ ID NO: 63068 - DNA, 179 bp, Zea mays
  Clone ID: MRT4577_157518C.1
agcggatggatcctggcctacacaaagagagtagctgaactatacctgggttccagagcatgcttaaggaaagtatgaacaggtttggtgggtatttatcgagggacaaacgaagagttctcccttgtcccacaggaaaaaggagatacgattttagtgctgatattggacagccctgg

SEQ ID NO: 63069 - DNA, 212 bp, Zea mays
  Clone ID: MRT4577_157519C.1
gccacagcaaacacaaggggctttcatcgcgcgacggagcacataggggccaagagatgtccctccttatgctccatgcctgcagcatgtgttgataacgagaccatttatgtcagtgccaacaagctcatatagctcccgtccatctgcaatcacctgatgaatataagtcagatgtgaaaacccactgttagacatatggcttaacaagc

SEQ ID NO: 63070 - DNA, 2395 bp, Zea mays
  Clone ID: MRT4577_15751C.1
cattgggtacctcgaggccggccgggactgggccggacactattataaaaataaaaaaaaaaaagattaaaactccggccctaatcaaaagctggccccttccacagcgcactccctcaccttcctccacggctccaccatcccctcccctgccctgcccccaccgccccgcttccttccgccttgctccgttgcttcctcccaccacagtccactccactcgccggccctgcagctcagtatttgactgagactggtggtggagctgctagcagcgagcctgctacttcctggtcctgacggtgcgttcagacctcagaccagtgccgacgacgagctgtgaggagagggcaaggaagcaagcctgtgaggaaggcggcgatggagaggtacgaggtgatcaaggacataggatcgggcaacttcggggtggccaagctggtccgggacgtcaggaccaaggagctcttcgccgtcaagttcatcgagcgggggatgaagattgatgagaatgtccaaagggagatcatgaaccacaggtcactgaggcatccaaacatagttaaatttaaggaggttgtgctaactcccacacatttggccatagttatggaatatgctgctggtggtgagctatttgaaaggatctgtaatgctggaagatttagtgaggatgaggcgagatttttcttccaacaactgatttcaggagttagttattgccactcaatgcaaatatgccatagagatttgaaactagaaaacactctcctggatgatagtatagcacctcggctaaagatatgtgattttggttactccaagtcctctgtgctgcactctcaaccaaaatcaactgtcgggacaccagcttacattgctcctgaggtccttgctagaaaggaatatgatggaaaggtcgccgatgtttggtcatgtggagttactctgtatgtgatgcttgttggtgcctatccctttgaggaccccgacgaaccgaagaatttccgcaagacgcttactcggattatcagcgtccagtacgcggttcctgattttgtccgagtttcaatggagtgcaggcatctgctgtctcggatctttgtggcgaaacctgagcaacggataaccatcccagagatcaagaaccacccatggttcttgaagaacctgcccatcgagatgaccgacgagtaccagatgaacctacagctagtcgacatgaatgtcccctcgcaaagcctggaggagatcatgtccatcatactggaggcccggaagcccggcgacgggctgaagcatgcgggacagctccccggccttgggagcatggagctggatgacattgatgttgacgacatagacgttgaggacagtggcgactttgtatgtgccttgtgacgcggttcaggctgtccggcaccgttgctgcggtggactctcccccactctcctggtctttgtgtcttgctgttattccatgttgtttgtttcagcgagctccgagctcccattttgttgttgtaatatcacatgttttgtgtaaccaaggtagtgacgctgtggataaataatagacgttatgtgttgtattcttgctgaattgttgttcagctccttctgtttgccctgtatgaactgggcagtttcatgagtaaaaaaaaaaaaaaaaaaccttggcggaccccgacgaaccgaagaatttccgcaagacgcttactcggattatcagcgtccagtacgcggttcctgattttgtccgagtttcaatggagtgcaggcatctgctgtctcggatctttgtggcgaaacctgagcaacggataaccatcccagagatcaagaaccacccatggttcctgaagaacctgcccatcgagatgaccgacgagtaccagatgaacctacagctagtcgacatgaatgtcccctcgcaaagcctggaggagatcatgtccatcatactggaggcccggaagcccggcgacgggctgaagcatgcgggacagctccccggccttgggagcatggagctggatgacattgatgttgacgacatagacgttgaggacagtggcgactttgtatgtgccttgtgacgcggttcaggctgtccggcaccgttgctgcggtggactctcccccactctcctggtctttgtgtcttgctgttattccatgttgtttgtttcagcgagctccgagctcccattttgttgttgtaatatcacatgttttgtgtaaccaaggtagtgacgctgtggataaataatagacgttatgtgttgtattcttgctgaattgttgttcagctccttctgtttgccctgtatgaactgggcagtttcatgagtaccacaatgtgtatgttgatggctctgtcttcccttgtctc

SEQ ID NO: 63071 - DNA, 1859 bp, Zea mays
  unsure (1)..(1859): unsure at all n locations
  Clone ID: MRT4577_157520C.1
cccacgcgtccgcccacgcgtccgcacgcaacgacgcgcctcggcctcgcagaaggaggggccaaaaaggaaaagagaaaagaggaaaagaacgcagggaatgggcaagcagcagcaggcgccaccggcgcggcggtccacggcgatgtcggcgcctccgccaccgaagcgccggaagaagaagggccggccttccctcctcgacctccagaagcggagcctccgcctcgagcagcagctccagcagcagcagcccaaggggcgacgctccaaccgccggagcgccggcctgcaggacgaggagtccgacggattcccgtccgcgacccacgcgtccgtttcagagctgctgtcgggacctcatccagccgtgctgtggcagtggatcgaagttcgctccagctctgattgggggaaaatgactagggtatcaagtggaaaaacataatggtccaggttctactgcggcacctctttcaggctaagcatctaaacaacaatatgtaaattatccttttccaataaaatacatgcttaaatcgtggctgctaggcgaatggtcctactttggtcatcaaatgcaggaattccactactatatgtgccacttgaagttgttatgtcaaaataatatggtgaaaacgagcgtctattgggatctattttttatcttgcaaatgatcttcctgaaggagattgatatgtcaagatacgcttgtttcatttgagctcaatgttatctgaaaatatatagactgccttcgtccccttcatcactgctaatgaccgtgacttggagacccgacagcggccctcgacgttgtcgccgccgagcccatgctggttccaccagtggtccaccacccggatgtggtccgccaagacgagcagtaacggtggcagcgaggcgagccggccgatccagcacccctcatcccatcccatccaagggtccatccgatcaatcccggactcgtcctcccggccaaccctagcttcccttctcttcccctcccccgatggacccgccgccaaccagggacagaggggaggagctggagcctgaaacccgcgccttccccgacgccgacgacccggagacctcccgatctgaacgcgaagagggtatccctccaccgccaccgccaccgcctctgcgccagcagctcatgggggcttgccgcgccgacgagcgcctcaggccgctcctcaccctcaacgtctcctgcggcgcagcggacgaccgactcatcgcacacctcgcgcagcacttcgaggtgtcggaggtgggcatgctcgcgcgttgcctctgtgttcccctcgtttccctgcgcgttggcaaggttcagagggaaggggccctcccctgcccaacacacattaggtaatttgggcgtttgtcataatctctgatatatgaggaaagagaagagggaagctgaaccttgttcttctgccatcatctagcatgcggcttacctttgtttgtgatgatggttatccagagcaactagctctcttgagcaatggctttgaattttctgaagttatgattgaagaaatatcagctgataattctggacgctctttcctaatcagaatttcagaatctaaagtgttttactactggtgtgctgagaagtcgaaggaacatggaatggaacttcttgcaaagatgaaaaaccttttggacgggaggccaacactctctgatctcactggcatctctaattcacgacttgatgcttttgccactcatttacatgcttatcttcttgcatncaagtatcggtgatgttacatcattgggctcacttaatgacttnctgagtacttcaagatcacatgatcaatattta

SEQ ID NO: 63072 - DNA, 710 bp, Zea mays
  Clone ID: MRT4577_157521C.1
agcgaagtttgacgagcggaagaggggaaaaccaagaactctggcgcgatggcgaggacggggcggtccgtgctgctcctcctcctgatccccacggtgctctccccgctactgctctccgagcgccgcctcaccgtcgcgattaaccccaacgaaaggaaggattttcctgccgagattgcgagtcagggccatagcgtcaaggataggaagctaaatgcgtttcctctggaaactctgagttctctgaaggaatctgtcggtgccgtattagtggaggaaccgccccatttagccaacgattcgattgaatccgcggaccaagaattgctaccggggaagagagctaacagggtgctttctgagaccacttctggtgatggtgctgtattgaagggtggagacctgatcgaccaagtgacaaggcggacggcagaagatggtggtttggcgacgggctcaatggataagcaggagaagcacacaggatcccagcagcagtcttcttctgagggaagatcattggaggctataacacagatacctcagggatatcaaggtgcagggaagaaccctcaaaaagaaaacacagatggcaggagtaaaaatatggcttcgtcggatactagagtccgggatatcaaggatcatttaatcaaggcaaaggtctaccttggtcttggagccattcgagcaaatcctcaatacct

SEQ ID NO: 63073 - DNA, 744 bp, Zea mays
  Clone ID: MRT4577_157522C.1
cccacgcgtccgcccgccctccggtgtgaaccttcatgacgtccgcaaccactctccgatctgctgtcgtgacctcatccagccgtgctgtggcagtggatcggagttcgctccagctctgattgtaaggaactaagcatgcccctctcatatttgcgtagatgcgttgtttgtctcattctacagaatcactctcccataatgttgatttctatacgtattaatgttggttagagtaggcatgtgcaacgaaagttacaagaatggtagaattcttccatgagttctgtatggtagtgctcctagatggtatgttgtaaattagatattaccttgcgtcggacgcgtgggcgcacacgtgggtggtttttatagggggaaaatgactagggtatcaagtggaaaaacataacggtctaggttctactgcacctctttcaggctaagcatctaaacaacaatatgtaaattatccttttccaataaaatacatgcttaaaccgtggttgctaggcgaatggtcctactttggtcatcaaatgcaggttagcttaattttttctaatgcattattatttgtggtttccatcacatgtacgttagcttatcttttagcaaatttgtagctgacgtcaattaactttttagtggaattttatctgctcattcttatattcaggaattccactactatatgtgccacttaaagttgttatgtcaaaatattatggtgaaagcgagcgt

SEQ ID NO: 63074 - DNA, 1359 bp, Zea mays
  Clone ID: MRT4577_157523C.1
cgcgtgggggatcatatgcagttcagggtgtctgcgcagcaactcaaatgtttgcctatacaatttgttcttatactatattgtctatgtatgctcctgcttcctgcgttttggtttacactagtttaggcctcctcgacacgcgctctggcgaagtgcaccacattggaggatgtcatctccatagtaaagtgggtgatacctgacctattttgccctaacatgtagcactttcacatattacaacctgattcttttgcgtggtacccccaacatgagcgttgttataacctcattcttgtgatgttcactcccattaaaataccattacattaagtagataatctggtaataggacatctagataattttggtaattgaccttgggggaaaatggtacatccaattactgcttacaaattgatctttttacggttctgcttatcgcgtttgtgcattgcgttttttcgttcaattgttttagttttacatattttatgttatttgaataactatagatatatatccaaactgcactagtagagaaaactcttaaaacgcatgtcccaatatagatataatatgaaggattattgtgcttaaacaaattttagattatgggcatagcctacttagttcatactgaaatgaataaatttatgcattttcaaactaaattttacgacacttcttgttgtgttttatgtttctattaaaaaacagtcttactgcgttttacaccaaatttatgacactttttgatgtgttttacagcaatctaggtgccaccagtgtgggcgcaacccatcacgaggcgatgctggcgagccagccatagcgcgacatctccgtccgcgtcgttaatccctatgggtgtgcaacagcagcggtattcaacatgttaggtaaaagtatcgatgcagaccaaagattaacacttgatggagacaagttgaccactgaccttgctggtctatttactagaacatcaaagagtcctgcataccatgtttatgtcatgagaagtaataggaagtagaggatatctaggtggttttggcaatgtatttagtgattttaaccattcaccctctaatgcaaaggaatacccccttgccttgccatcacgattattttgtcctctttctgttgccttggcaagtcaagattctacatatgcatattttaaaattgctggactcatgtatgctaaaaattgtacttatttacgcagttttgattctgttttatgcttaaaaaaaaacgaacaaaataaaaaacaaaaaaaccattaaaaagtctattaaatataaatttataattaaaatttatatttttttacttatacttcatactttt

SEQ ID NO: 63075 - DNA, 3149 bp, Zea mays
  Clone ID: MRT4577_157524C.1
cgggatagcccctgacgccagccgtcaacgccccaatcccgtaaccgcagcctcgccccactcgcatcttcctctccctctcagcgctggtgctcaatctacaggtcgtcccgctccctacacacccgccctccggtgtgaacctccatgacgtctgcaaccactctccgatctgctgtcgtgacctcatccagccgtgctgtggcagtggatcggagttcgctccagctctgattgggggaaatgactagggtatcaagtggaaaaacataatggtccaggttctactgcaccttctttcaggctaagcatctaaacaacaatatgtaaattatccttttccaataaaatacatgcttaaaccgtggctgctaggcgaatggtcctactttggtcatcaaatgcaggttagcttaactttttctaatgcattattatttgtggtttccatcacatgtacgttagcttatcttttagcaaatttgtagctgatgtcaattaactttttagtggaattacttgaagttgttatgtcaaaatattatggtgaaagcgagcgtctattgggatctattttttatcttgcaaatgatcttcctgaaggaggtaatatattcttagatgaggtatatatcgtatacttatagcataagcactcaagccactacaagtaagctcctgccggttgcgtggtggtggatggttgtgtcttcgtcaaaccactcatcattcagccccatcccatccaagggaatccgatcaatcccggactcgtcctcccggccaaccctagcttcccttctcttcccctcccccgatggacccgccgccaaccagggacagaggggaggagctggagcctgaaacccgcgccttccccgacgccgacgacccggagacctcccgatctgaacgcgaagagggtatccctccaccgccaccgccaccgcctctgcgccagcagctcatgggggcttgccgcgccgacgagcgcctcaggccgctcctcaccctcaacgtctcctgcggcgcagcggacgaccgactcatcgcacacctcgcgcagcacttcgaggtgtcggaggtgggcatgctcgcgcgttgcctctgtgttcccctcgtttccctgcgcgttggcaaggttcagagggaaggggccctcctctgcccaacacacattagatgctgttggaatgatgaagaagtgatcctgtagctttctctatgtctctgcttccaggaaaaaaaggtaatttgggcgtttgtcataatctctgatatatgaggaaagagaagagggaagctgaaccttgttcttctgccatcatctagcatgcggcttacctttgtttgtgatgatggttatccagagcaactagctctcttgagcaatggctttgaattttcggaagttatgattgaagaaatatcagctgataattctggacgctctttcctaatcagaatttcagaatctaaagtgttttactactggtgtgctgagaagtcgaaggaacatggaatggaacttcttgcaaagatgaaaaaccttttggacgggaggccaacactctctgatctcactggcatctctaattcacgacttgatgcttttgccactcatttacatgcttatcttcttgcatcaagtatcggtgatgttacatcattgggctcacttaatgacttcctgagtacttcaagatcacatgatcaatatttacagctccagtcagatttttccaaaacttccaggttccgtgcctcggctgctagtgcaattaagccaagctctgtctatcaagccagcctaagtccgagatctggcacttttaaagatggggtaccaagggcttcatgtgcaagggttgttgggagggacaagctgaagcgtcgtgtggaatggttaggcccgttaactgctccgcttgatacgaatcctttgacaatcaaccctgattctgccagtgagaagtgtgatgcagattgttcaaagaacaatgttagctcagttccgttggacctgcctctttcgtttcccctgttgccttctatttactcccttggcactcgtccggttcctgaggtttctttggagaaacagtttaagccttactattgctggtgcccaccatgcccatcatcgctgcaatacactgtcacccatttgcatctgccagctacacctgtagatccgttgcccctaccacctttgagttcactgctagcaagtgagcagccaccttcttcaacagtttctgtaaagctggatacaactgatctcccttcccttaatcttccgtccatactgcattcaccacttattcccctacatggtccacaagtgccaacattcacaccattgatgtccgatcccattgtgcatgtcccagtcattgatgtttgttcggcgggtcaggcctatctagtgagttgtgggccgtctataacttcagcagttcccctgctcccgagcttgaagcctctgctgccagaagcagagtcgttagtcgagagaagcgcaagggaaacactgatgaggctcatagcttcgacaccacctgcaagcaatcctctacctggaagtatatcctgggcgaataacaatgtgaagaagcatgttgatgtgtgtcccaatgaaaaagcatccggtacgtcttgtgttgctgctgtgtttggaagtgggattgcacacgctgaggatgaagttccaagcggaggtgattcacaagagccgtttgccgaatacgatggtaccagcaatgaatgtgatgtacatcattggcagaaattctagcttggctgcatcagcatggtaaatagggttttgaggattcgggggtttgatgtcctgtacgcagcagcagccttaaaagtttctgtgcccagccagcatctctatttggtttgcaaatgtaattactagtttgtactgtcttgtttttggcaaacttgctgcgagcctcgtgcttagtttggtttatttatttatgaactttaggcctgttcgaagcacccagtttgtaagaaaatggattatataaactgaagtgattccaaatatatcagtttatgtctcagtttataaaaaaaaaaaaaaaaaaaaaaaaaaaaaaaaaaaaccaaaaaaaaaaaaaaaaaggccccta

SEQ ID NO: 63076 - DNA, 205 bp, Zea mays
  Clone ID: MRT4577_157525C.1
cctttggggtcgtcgttaagcgcaccgtaccctagcccttatcactgctggttaaagctcaaccatacttggatttttaggggaaagaacggaagtcgcgataaacatgggcacaggcaggggtaacacatacggtggttttaataaaaaaagaggtgtcccaaagattaagctctgaaacagatccccgagatgaacaccgggg

SEQ ID NO: 63077 - DNA, 383 bp, Zea mays
  Clone ID: MRT4577_157526C.1
ggtgggcgtggcggtcaatacagacgtccacgacggagcggaggagagcaacaaggacgaggagtcatggacgggctggaccaaggacaagatctgcgaggggttgatgctaaagcacaatgccgacgtacacaaggaggagaccgagcgcaaggatggtcacaccgctaagtgcgcgcgcgagtccaaccaggacacctccatgcgtgatagggaagaaggcggcgtacgccaaggagacgggggcagatgccacggtcggtgcgtggaacaaggccaggcaagccaaggaccaggctaaggacacagtgaaggacgcagccggcgaagcgttcaacaaggcggagtacggcaagcagaagaccaaggaggccacctaggcg

SEQ ID NO: 63078 - DNA, 2909 bp, Zea mays
  Clone ID: MRT4577_157527C.1
ttgggtacctcgaggccggccgataaacaattttcccgttcgagcgtctcgcttctcccgttcccgatcccgatccctgagtcctttcgcttatcccgttgatccggcgtgcgttcgtgcgatctcctgtggcgacaactgggcgatcgacgccgccgctgctgtcgccgccgtatacgagaggtgcgcaggcgttcgttggtcccttcgccaggcttttgtctacccttcgccgacgacgagcacaatttatttgcaggccagatttctttgtctgacttgtggaagcctcttacaactattgtacaaggctgctgtattgaagatgtctgagttccttgacctagagctacaagatgggataaggatgccctggaatgttattccaggcacaaaacaggagactgtgaactgtgtgattcctgtttccgctatctacacacctttgaaaccaatttctgatatccctgttctcccatattcacctcttcgctgtcgcatgtgtcgttccatcctcaaccctttctccattgttgactatgttgctaagatttgggtctgttcattctgctttcaacgcaaccagttccctcaacactactcgtcgatctcagaaaataatctccctgcggaactcttccctcagtataccaccgtcgagtacatatcttcaactgaaactggtcctatagttccacccgttttcatttttgttgtagatacttgcatgattgaagaagaaattggttatttgaagtctgcactggcacaagctgttgagctattgccagataattctcttgttggattcattagattagggtcgtatgtgaagcttcatgtattggggcgaagttaaatccatcagtgacatataactcggacaatccctcccctaccaggagacgtcttattcacagatggtgcttttttgcagggaagaaaatgcctaccacaggcgtgattgctggtaccagagatggcctttcatctgagagcatctctagatttctgctgcctgcttctgaatgcgagtttgtattgaactcagttatagaagaaatacaaaaggacccttggcctgttccagctgatcagcgtgcgtctaggtgcactggagctgccttaagtgttgcagccaatctccttggggtttgtgttcctggatcaggtgctaggataatggcatttgttggtggtccatctacggagggccctggtcctattgtatccaaatccttatcagagcccattcgctcacacaaagaccttgataaagactcggcaccactctatgataaagctgttaagttttatgatcaaattgcaaagcagcttgtgcaccaagggcatgtgctggatttgtttgcttgtgcagttgaccaggttggagtcgctgaaatgaaggttgcgattgagaagactggaggaattgttgtgcttgctgaaagttttggtcattctgttttcaaagactcacttctccgcatctttcagtcaacagatgacaaccttggtttatcattcaatggtattcttgagattaactgttcaaaggatgtaaaggttcaaggcatcattggaccctgttcttccctggagaagaaaagtcctttgtcttccgacactgttattggtcaaggaaacactagcgcttggaagatgtgcggccttgacaggaagacatcactttgcttggtatatgatattgcaaaaaaagatggcccagattcaattgctcaatcagcaaacaatcagttttacttccagttcttaacctactatcagcataatgagggtcagatgagattaagatcgaccacaatctccagaagatgggtctctggtgacaaccatgtggaggagctagtagctggctttgatcaagaagctgcagctgcagtcatggcacgcttggtgtcatttaagatggaaactgaggttgattttgacccagtaaggtggcttgatcgagctttgatacgtttatgctcaaaatttggagattatcagaaggagacaccctcatcgttcagtttatccccacgactatcaatatttccccaatttatatttaatttgaggcgttctcagtttgttcaggtttttaataacagtcctgatgaaactgcgtattttaggatgatgttggacagagagaatgtaaccaatacagttgtgatgattcaaccttcacttatatcctattcatttcaatcagggccagagccagttctcttggatgcaactgcaattgcttctgacaagatccttttattggactcttattttactgttgtcatattccatggggtaaccattgcgcagtggcgaaatgctggctaccaagatcaagaaggtcacgaggtgtttgctcagttgttaaaagctccacatgaggaagctaatttaataataaaggagcgatttcctgtaccccgtttggtagtctgtgatcaatatggatctcaggctcgatttttactggcgaagctaaatccatcggtgacatataactcggacaacccctcccctggtggagacgtcatattcacagatgatgtgagcttccaggttttcatggaccatcttcagcgactagcagtccaataggatatgaatctgtagatcagtgcatagagcaattttatactaccaatgatatcttctgtagagtgataatatttttgttttgtatgtcttacaaattcgttgtagctggttttaaattatataagtttcttttagaggcaatcaaattttgcaacttgataaattatgataataaatgacctgtagaatgaagaattgcattttctttcacaaggacgataaattgatttgtatttaccgaagaggcatctttcaaatgattaagatgccgatttgctgaggccctctttccccat

SEQ ID NO: 63079 - DNA, 196 bp, Zea mays
  Clone ID: MRT4577_157528C.1
ctaacgactatcattaccctttttttattgaaatatgttgggccgttaagggcctttcaaattattaagtggtgggggtccattttggcacttgggctagggttcatgccttgaaattaatttggttttctacactgctgagatgtgcaagcgttttacccagggggtgcactttacgggtttttttgggttggac

SEQ ID NO: 63080 - DNA, 286 bp, Zea mays
  Clone ID: MRT4577_157529C.1
ggcagaaaagacaccatctatcctattgccgttcagatccattaacagaagcggcccacacgcaaagatatactggtatataagggtcccgctacagccaacgtgacaaaccctggcacaaaaacactggggttaaaaagaacaaacggggctatgaaagtagtcacatggccaacaccacctgaagttaaactagaaaaaccgataacctctacggaattgacttgcaacctgtatctacgggtggacacgagcaagggtaaccgtgccatgcgcgcccatccct

SEQ ID NO: 63081 - DNA, 307 bp, Zea mays
  Clone ID: MRT4577_15752C.1
aacccgtgccactacctatgcttccttcttgctaacagatctcttctgacttatgtgtggctttcaggtacatgtttaatacttatgcatgccaaaccaccacattcaatcattacaaactactgacatgatgtagcgatagctatcaaaaaggttttccctaacgcacgtcaccgttcttgactttcacacatcttaaatgcacttcctaaaaagttggaagaaattgataacaaagatgaaattatttacacattcaccacactagcctatgattatattactatgactgattttgacagaaagt

SEQ ID NO: 63082 - DNA, 2791 bp, Zea mays
  Clone ID: MRT4577_157530C.1
attgggtacctcgaggccggccgggccgggccaaaaacccttccgccccgagccgaccggaaccctacccatcctgcagcgccgccggccgcccgccccgccccctcaccccctacctcttcttgcgccgtcatcccgatcccctacgatcgctgaggcattatgggtaaatcaagcaagaagtccagtgttaaggctgcacctgctgctgtctcagttccagaggggaaatctgcaaagaaggggaagagaaatgcagaagatgagattgagaaggccgtgagtgcaaagaagcaaaagactgtacctgaaaaagctgtgccggttaagaagcagccccctccaaagaaagttgagagcagcagctctgaggaggattcttcagattccgaagtggaggttaaggtccagccgaagaaggttattcaaccgaagaaaggtacacaacctgctaaacaggagtccagtgatgacagcagctctgagagctcctcagacgatgaaccttccaaaaaaccagttgccggattcaaaaaagcctcctgccagtagtagcagcagtgatgatagcagtgacagtgatgatagcagctctgatgagggaccagcaaggaagcccacggtcctttcaaaggctcccacagcccgttcaaagaagcccacctgtcctttcaaaaaaacctgacacagcagtcagtaatggttcaaaacaggttaaacctgatagcagcagctctgacagtagctcagatgaggatgaaaaacctgctgctagcctaaagaagcctgttgttgcctctgtgcaaaagaagacccaagaatctgatagctctgacagtgattctgatgaggatgaatcagaagatgatattcctgctaaagctcaagtagtagccaagaaaaaggaagagtccagtagcagttctgattctgatagtgattctgagtccgaggatgagaaacctgctgctaacctaaagaagcctccggttccctctgtgcaaaagaagacccaagaatctgacagctctgacagtgattctgatgaggatgaatcagatgatattcctgctaaagctcaagtagtagccaagaaaaaggaagaatctggtagcagttctgattctgatagtgaatctgagtctgacgatgaggatagcaatgctaaaacagtacaacctgcaaagcctgctgctattaaaaagaaggaagattctagtgagagctcagaaactgactcacagtcagattcagaagattcagaacctgaaaaacctactgtccctgcgaaaaggcctctagcaacaaataaaaagaatgaacaatccagcgagaaatctgatgacagctctgatgagagttctgatgaaagtgatgaggaacctccacaaaagaaaactaagaattctgcaccttctggtgctgcaaaggctgccactaatgtttcaaagaaaaaaagcagcagtgatgaagatgatgaaagttcagaagaaagctctgatgatgaggatacagaacaagttgaaactaaggaaacttctgtagtcactacccagaagccggcacataatgaacctaaaactcctgccaaaagccaaagtcaggctactggttcaaagactatttttgttgggaatttagcctacagtatagagcgtgaacaagttaaggaattttttgaggaggctggtgaagttgttgatgttcgtttggctacttttgatgatgggagtttcaagggttttggacatgttgaattcgctactgttgaagctgctcagaaggctcttgaatttgttggtcatgacctgatgggacggcctctaaggattgacatggctaccgagaggggtgcatacactcctagcagcgggaaggacaacggttctttcaagaagttcgctccaaggtcaggcaacaccgtgtttattaagggctttgacacctctggtggagaggaccagatccgcaccgctcttgaagagcattttggatcatgtggagatatcacccggatttcaattccaaaggattatgacactggtgtaagcaaaggaatggcgtacatggatttcaaggacccagattccttgaataaagcatacgagttgaatggaaccgaccttggtggctacagcttgtatgtcgatgaagccaagccgagacctgataacagcggtggcttcagtggtgacaggggtggtggcagagggaggagtggcggcttcagtggtggcagaggagggaggagtgacagggggcgtggtggtagccgtgggcgtggatttggaggccgtggtggaaggggtgacagaggccgtggtggaaggggtacgcctttcagacagaccgctggtacagctagtacaggaaagaagaccacctttggtgatgacgattgaagatccatggctggctattatagtgaaaaacgcaaactatattgtaccgttcagacctattgttatctgaggctgtactgcttttttgcttgataattcgacaattgtttttaccatttttaacatttggtgctatcaaagacatgactttttataaaaaaaaaaaaaaaaaaaaaaaaaaaaaaaaaaaaaaaaaaaaaaaaaaaaaaaaaaaaaaaaaaaaaaaaaaaaaaaaaaaaaaaaaaaaaaaaaaaaaaggggggggccggggccttttttttcccatttttggggggggttttgtttttttaggggggccgggtaaaaaacccccgtttttttaatttgggcggggaaaaaataattaaccccggattttttttttcccg

SEQ ID NO: 63083 - DNA, 147 bp, Zea mays
  Clone ID: MRT4577_157531C.1
ggggctcgtgtcacatttccatccttgggaagttcatgttttacctttgccttcccaagggagggaaggggggctggttccaagggtgttattccaacgacgaatttgttaggatcatcaccaaaactctgtatagtcttggatatg

SEQ ID NO: 63084 - DNA, 876 bp, Zea mays
  Clone ID: MRT4577_157532C.1
atgatgttcaagtcggtcctcacaaccatcttcaaattttcaatattgagggcaacattgtcagagcctccacagaatatcatctctagcgtgaaaaagttggatgctttgctctatatgtatggaaacattgatgagatgactccatatttcaaagctatcgatgctcgtggaagagagatgaattattatggatttattaaagacatagtccagtactacctcattgggagcaaaaatcttaaagtagtgttcttcaaatgtgatagggtaattggttcaagacggaagttgaagaaatttacgaagaagatgagtttgaagagaaggggagataggtgggagaggatgtgcaagcggacgatgaggtggatggcccggtggatggctgaatggcctatggatgcatgtggatggtcgagtgatggggtttctagaggtggtggttctagagctggtaggtctagagacgaaggttctggaggtggtggttctagagttggtgggtctggagatgtaggttttggatgtgggagagctggagggtctacacgtgttcgaaagccatggaggaccagttgggtccctcctcctaaagatccagatgagaagtttgagataataccgattggagatggattagtgaatgaggatggtcaggaggttcttgtcgcaatgtgggatcaatatgcccttgcggtcaatgggcaacatggaaacgcgcatggtgtagtagtgcaacttcttggacgacgtccagaaagtaagagtgaggcatcgcgatatggactacagatgagtgaggaacaattccttcagatgttaaagttacttctaaatgaattgtctctacacaacattcgattccgtggatag

SEQ ID NO: 63085 - DNA, 367 bp, Zea mays
  Clone ID: MRT4577_157533C.1
atcctccaggcagacccctacagcgacatctgggagatgccctgcatctcaactgcgtccgcggatgatctccctaaccgagtgctctccttcgactacatatctgcgcacacgttccccatgctcgtgataatatacatattctgcggtatttgctttccttgacccagaactatcttaatcatttatacaatgaaatgacgcaggcatgccgaataatgtaacagcgacatcactgctgttagacactgcgtcttatcggcttattcatgacgctgacgagcgacgtgccccaatagccccatcttgtgcctcctgtaccgtacgtcccatagcacgcctgtatttagcatgagcataattgcta

SEQ ID NO: 63086 - DNA, 291 bp, Zea mays
  Clone ID: MRT4577_157534C.1
tttaacaaacatagatctccacacacccacaatcaataccatactatattgtttaatattaattacaaggaaaaatttgttacctgattgcaagcaattacatcaagattgatgaatgacaccgcccagctgttcgaatcaattaaactatgcggacatatgtggtcaaaaagggcccggtggtcaccataccgttcccggcggtcttcttcttcatgaggaaaaggtcgtcggtggtcctaatcgctgagtgcgcgccaaccatcgcgccccccaccatgactgatccca

SEQ ID NO: 63087 - DNA, 312 bp, Zea mays
  Clone ID: MRT4577_157535C.1
gtcaatacaccgttcaacagtcttgaactggtccttgctcgagcttcacagcacagtagcctcaacaggttcacttcactcacgttcgaacaccgcacccttgaacctactaaccaacttctcccggagcagctgcctgtccaatgaggacgcggagaggaggccactgttctacgttgctcgcctgatgaggtacgggacgatctgctgcaccggacactacggcaggtacttgatgacctgaaacacggcgttgctgacgtccagcgactgtccgtgcgtcatgccaatcaggtgcgccaactgcacgat

SEQ ID NO: 63088 - DNA, 306 bp, Zea mays
  Clone ID: MRT4577_157536C.1
cttaaataattctccctcaacgacaatcccacccaggggattttttattttttagggggttaatcaccaaacaccgataagctgatttggtcccaatggcttctaaagaacacacgggcaccagtgaaagtgggaggaaaactaaaccagggcacatggatggcccccggcccaaaaaaaaaaacccaaggggggcccccctggccgcatggctagcgggaggaccccacgggggccgtctcactaggctatataaacaacaaccggtacccaacctggccccgctcccatgggcgggggggccgg

SEQ ID NO: 63089 - DNA, 276 bp, Zea mays
  Clone ID: MRT4577_157537C.1
tggcgcgcagccgggtcgcgctaccatgcttgccgccgtgcaggcggcggcgcctccgccgtcatcaatcttgctcatgctcggcatgcagccacatgtaaggcagatgaggaaggcaggatgtcgcagcgtaagttcgagcagccgaggcacggctccctcggcttccttcccaggaagcgctcctcgcgttactgcggtaaggtgaagtcattccctagggatgatcccaagaagccttgccatctcactgacttccttggctacaatgctggc

SEQ ID NO: 63090 - DNA, 559 bp, Zea mays
  unsure (1)..(559): unsure at all n locations
  Clone ID: MRT4577_157538C.1
ctaaaaaaaaaaaaaaaaaaaaaaatacaaacataaaaaaaaaaaaaaaaaatttaaaaaattttaattaaatataaattggaatgaaaaaaaatatttaaaaaaaaaaaaaaaaatttttttccttcccggccggcctttttaggggctatttttgcggttttccttcaccctggggggcgtttggccttccttttggggggcccatttggcctttttgggggtggttttacatttcattggccgtggttttacacctttttgcttgggaaaaccttggggttccccattttattcgctttggggcccttcccctttttgccggttggcttttttgcgaaaagggcctgccctttttgcctttccccccggttgcccnccttgtttggtttttggcccccccttttgcgggcccttttttctcgggggttgtggtggtttcccggcggggtggctgttctttttgggggggcctttgctcccgttcttttggtttttttccttttctttttgtccttttttgtgggttttttccgtttggttttttatttgggggttt

SEQ ID NO: 63091 - DNA, 312 bp, Zea mays
  Clone ID: MRT4577_157539C.1
gagggagagcaccgagagcgacttccagaggtcccgccaggtgcgggagagcgcagaggtgcgcacggcgtcccggaggtcgaggcggacgaggatctcgtcctgcagctccgccgggagggaggagagccggtcgaccgcagccgccgcctgcttcgcctccatcacgcctccagttcaagagtctccgcctctccttttggcagcgactacagccgtacagcgtactaggctgccgccggcaaaggctccgtgcgtcggatcctctaacggtccagaaaggtgatttgattatcggcctataagctaccg

SEQ ID NO: 63092 - DNA, 928 bp, Zea mays
  unsure (1)..(928): unsure at all n locations
  Clone ID: MRT4577_15753C.1
ctatcaaagctggccccttcccagcgcactccctcaccttcctccacggctccaccatcccctcccctgccctgcccccaccgccccgcttccttccgccttgctccgttgcttcctcccaccacagtccactccactcgccggccctgcagctcagtatttgactgagactggtggtggagctgctagcagcgagcctgctacttcctggtcctgacggtgcgttcagacctcagaccagggccgacgacgagctgtgaggagagggcaaggaagcaagcctgcgaggaaggcggcgatggagaggtacgaggtgatcaaggacataggatcgggcaacttcggggtggccaagctggtccgggacgtcaggaccaaggagctcttcgccgtcaagttcatcgagcgggggatgaagattgatgagaatgtccaaagggagatcatgaaccacaggtcactgaggcatccaaacatagttaaatttaaggagttatggaatatgctgctggtggtgagctatttgaaaggatctgtaatgctggaagatttagtgaggatgaggcgagatttttcttccaacaactgatttcaggagttagttattgccactcaatgcaaatatgccatagagatttgaaactagaaaacactctcctggatgatagtatagcacctcggctaaagatatgntgattttggttactccaagtcctctgtgttgcactctcaacccaaatcaactgtcggaacaccagcttacattgctcctgaggtccttgctagaaaggaatatgatggaaaggtccccgatgtttggtcatgtggagttactctgtatgtgatgcttgttggtgcctatccctttgaggaccccgacgaaccgaagatttncgcagacgctactcggatttcagcgtccatacgc

SEQ ID NO: 63093 - DNA, 347 bp, Zea mays
  Clone ID: MRT4577_157540C.1
tgcttgatcgaaggtcgcgtaggcgtacgtcccccagagcatataactagagtcgggtgatgcccacgactcgttgaacgatacttcaggcagtacatcactattggcgatacccatagaacttcgttagacagattcagaactctacattcggtaagggccgacgaaaaatcgacgttggaaatcggactctattagtggatattccgactaatttcgaaacatgagtacctcatgcataaggatctaacccgttacgatagctaatagtctcccgtgctactcatatatctaattcaactccaacatgcgcgacaccatgcgtgggtcgtctaggaaggataact

SEQ ID NO: 63094 - DNA, 589 bp, Zea mays
  Clone ID: MRT4577_157541C.1
ccctcctcgagtttttttttttttttttttttttttttttttttttttttttttttttttttttttttttttttttttttttttttttttttaaccccaaaaacgggaaaatatttttttttttataaaaagggggaatttaaaggggttttaagaaataaattaaaaggggggcccacccaaattgggggaaccccttaaaaaaacccgtttttgggccccggggggggaaaaaaaaaatttttttttgggaaaaaaaatttgggaaggggggtttgaaaatgttccccaaaaggggggtaaacccttgtggttggaattaaaaaccccccccttccagggggtttttttactttggccaaacaagggtaaaatttttggaaagacccccgtgggccacttccctttttattttggggggaacccttaaagggtggggggggggttcaaaaattaaaagaccaaaacccccccccttgggggaaacccccggccgtggggtttttggttatgtttggccccccattagtggaaaaacccccttttggggggccctgattttttgggaaagaaaaaccctccctttttt

SEQ ID NO: 63095 - DNA, 794 bp, Zea mays
  unsure (1)..(794): unsure at all n locations
  Clone ID: MRT4577_157542C.1
cccggtcgncccagcgtccggnaattgttcctgcactgtggnacttcataaacggtgccatgcaaaccnaanaggccatttttttcgagtttgcatcttcattacctgctgatgctcctggttggctccttccctgtctgtattctgtcccatatacaagcacatgttngaagatcattgataccggggagttctatgaacaggagaaacccctttcccttaaagatttgaagtccttggttctcattttaaaacaggcattatggcaacttttgtgggttattccatcctcttctactcagaaagtgtcacccaacccttcaggccttaaaaagttgtcagtggagaatgtcaagactagagctagggttgggttgtctgaacttctcacacagttgcaagactggaacagccgactaccattcactgctgcaagtgatttctattctcaagaagctacgagcgaaaattttgtgtctcaagtatggatgcctatgcttttttggattaatagaaatgtctttcatcttctatgactatgcatatgtttttcaggcaatacttggtaatactcgagcatcagagatcataaagcttgctccttttttggctccatttacgagtcaaaatattcactgtagctattgctaattttttagtgctgcgtactaagtaaatacatctacaaaagtgatttctattcccacgaagcaacaagcgaaaattttgtgtctcaggcaatacttggtaatactcgagcatcagagatcataaagcttgctccttttttggct

SEQ ID NO: 63096 - DNA, 3749 bp, Zea mays
  unsure (1)..(3749): unsure at all n locations
  Clone ID: MRT4577_157543C.1
aattcggcacgaggccccgatcgtgcccggggcttcgttccggtacgtgagggggtcggcgatgttcttctcgggtgacccgtcggcgcggcggcgggtcgacctcggcggccggagcagcaaggagcgggaccgcaaggtgctgctcgagcagacgcgcgaggagcggcgtcggcgccagggcctccgactacagaacacctccgccacgaagatccagagggaagaaggctttggaattggcacgctcagaggttcggaagaatttttgctcaacttttggggagcattgcgagcggatagagtggaacaacttcggaactaattctgactttcttcgtcaattactgtttttctttaatgcaaatgaagacaatgacatagctatactttgtcaaatctgcaacttgctgctgcaatatgttaaacaaggcggagatgttgtaactctctttactggtgtgaatggctcctcactgcaacctctcgttgctcacagagtaaaaaaaattactctcatctgtgtgcaagcagtctatcaaaagaggcatgattggggcagccaacttttgacaaccctgnaacacatcagtgccttctgtctcattactgggaactgtaggttgcttgatattcctcgaattatgactgtcctggcataccggactgaaattgttcctgcactatggaagttcataaaacgttgccatgcaagccgatggccattttttttgaagtttgcatcttcattacctgctgattctcctggttggctccttcccatgtctgtattctgtcccatatacaagcacatgttgaagatcattgataccggggagttctatgaacaggagaaacccctttcccttaaagatttgaagtccttggttctcattttaaaacaggcattatggcaacttctgtgggttattccatcctcttctactcagaaagtgtcacccaacccttcaggccttaaaaagttgtcagtggagaatgtcaagactagagctagggttgggttatctgaacttctcacacagttgcaagactggaacagccgactaccattcactgctgcaagtgatttctattctcaagaagctacgagcgaaaattttggtccgcaagcaatacttggtaatactcgagcatcagagatataaagcttgctccttttttggctccatttaccatcgagtcaaaatattcacttcccaattaacgtgttctagacaatcaacatcacattctgcattgacaagacagcggttcaaaataagaagaagtcgacttttggaagatgcttttgatcagctaagtttgctttctgaagaagatctcaaaggaccgattcgagtttcatttattaatgaacatggtgaggaagaggttggaattgatggtggtggaattttcaaggatttcatggaaaatattactcgagcggcttttgatgtgcagtacggtctcttcaaggagactgctgatcatcttttgtacccaaacccaggatcaggattggttcatgaactacatctgcaatatttccatttgaagtctacttgggaaggcaatgtatgaaggcatacttgttgactgctttaattcggcaccagtcttgagcaaggtgaaacaaaagtacaattttttaaatatcttccttcattggatccagaattgtatcgacatcttctatttttaaagcattacaatggtgatatctcagagttggaactatattttgttattgtaaataatgaatatggtgaacaatgtgaagaagaacttctccctggtgggagggacatgcgtgttacgaatgataatgttattacttttatccatcttgttgccaatcatcggttaaactaccagatccgtgcacaaagtacacacttcttgagaggttttcaacagcttataccaaaagactggattgatatgttcaatgaacatgaaattcaggttcttatatctggctctttagaaagcttggatattgatgacttgcggtcgaacaccaactattctgcaggatatcatccagatcatgagcttgttgagatgttttgggaggtcttgaagagcttaagttcagacaaccagaaaaaatttctcaagtttgtgactggatgttctcgtggccccctccttggatttcagtatctcgaaccgaaattttgcattcagagagctggtgttccaggtctggaggagcatgcagaccgcttgccgacatcagctacctgcatgaaccttctgaagctccccccctataaaagcaaggagcagatgcaaaccaaactattgtacgcgataaattcagaagctggttttgatctaagttgatcatgatcgggattcagtatttgcagttcagatagtcgctattaaagacgcggccccaagggccgaactcaaccaaccatcggccccatttgaagccccatgaatgaaggaaatgaaggaaaaaaagaaagaaacgcagttgtttctcagagtagttgaatgtctggagggaggctgcaatatacgctgtctgctaactaagggcttcgttctccaagagaaataggcagacgctgtctaatcaatcatgggcatgtacatatgtgcatcattttatacagaaattttatatatatctaatcaatgctggtttgcggtcatctggtcctttttggcgcatcacttgctcaccttatcccaatttagggctgatttgttaacaatagaattagatgggatacatgagaggaaatccattactatttaaaattaaataacaagggattttctctcatggatctcatccaattcttttgttaccaaatcagcacttagtctttggaaggaggggattgaggggtgtaatctagcttatcaattatataaacacttaatgacctatttatggattactataatctaggtatctagattatataatctacataataatctgtgttgtttgttagtgaaaaaaaaaaaaagtgggaggcacatgcgtgtaacaaatgataatgttattacttttatccatcttgtcgccaatcatcggttaaactaccagatccgtgcacaaagtacacacttcttgagaggttttcagcagcttataccaaaagattggattgatatgttcaatgaacatgaaattcaggttcttatatctggatctttagaaagcttggatattgatgacctgcggtcgaacaccaactattctgcaggatatcatccggaccatgagcttattgagatgttttgggaggtcttgaagagcttaagttcggacaaccagaaaaagtttctcaagtttgttactggatgttctcgtggccccctccttggatttcagtatctcgaaccaaaattctgcattcagagagctggtgttccagggctggaggagcatgcagaccgcttgcctacatcagctacctgcatgaaccttctgaagcttccaccctataaaagcaaggagcagatgcaaaccaaactattgtatgcgataaactcagaagaaggttttgatctaagttgatcatgttcgggattcagtatttgtgcagtgtaggtagttgttagagaacagcttaaaggcacccagagccaaaccaccaaccctcggcctcattcgaagccccatgaggccacgaaggagaaattctgggcattttgatggtacatctgtgctggagcaagttctcatgcttgttgcttcacatgttggccatcatccc

SEQ ID NO: 63097 - DNA, 529 bp, Zea mays
  Clone ID: MRT4577_157544C.1
cgtaaacgcaggccgtagtcattgaactcttctgcttattaacagcagcaacaacggggctctttttaaacaactagctggcctgagccctgctgcctttttaacacaaccacagatgttgtcgttctaccaacacgctgcgcctaacgctagctcccttttacatctgaaacaatagctgcctttcatccaacaagctttgacaaacccagcaaagttcaaccttcatcccatcattgattgtgcccaattttagaatacttatgagttatagtacatttataaatgttattgtctgatgttatgtggcttatccagaaaaaatagtaagaatctattgctaagatttaaaaaaaattactctaaaaactcattaaaattaaattaatatttttacacataaattgctataatattatttaaaaaaattactatataaatttcgtcaaaataatatccacaaaaatatttctatcttattacaatctcttaataaaatatattactcataatatatttactctaaata

SEQ ID NO: 63098 - DNA, 747 bp, Zea mays
  Clone ID: MRT4577_157545C.1
tcaggagggcaccaagctaatattccagttgcaaaaggagcgctaggaagaggaagcaacgagccatggcctccggtggcccgaaacccaaactggcctacatcatcttgtacgtgagggacgtggagaaggccgcctccttctacgacgccgccttcggctacaccgtccgccgcctcgaccagtcccgcaagtgggcggagctggagagcggggcgacgaccatcgcgttcacgccgctgcaccagcgggagacggacgagctgtcgggggcggtgcagctgccggactcgtcggccgccggccggggctccgtggaggtctgcttcgcctacgcggacgtcgacgcggcgtacaagcgcgccgtggacaacggggccgtggccgtgagcgcgccggaggacaagccctggggccagaagtccggcttcgtgcgggacatggacggcaacatcgtgcgcatcgcgagctacgtgcgagagtagtcgcattccgctgcatcaccatcgatcaatcgatcagcctttcccatgcatgtctcgtatactacacgtctacacgtgtaccaaaaaaataaatataatcgttgtgcaggtcatgtttgtcttgggagaggtaggaccgtggaagatgtaaatggaaccgtggagcagtgaatacaaaaagcgccatctcgtccctgtttccaaaaaaaaaaaaaaaaactcgagactagttctcctcgtgcttctgctgtgtcttcaaata

SEQ ID NO: 63099 - DNA, 3654 bp, Zea mays
  Clone ID: MRT4577_157546C.1
aattccgtgcacgtctcgtcatcgccctactcgctcgccccatcccggagtctccccggctcccaaaccctagcgcctcccggacctcgtgagggaggcggcgatgttcttctccggtgacccatcggcgcggcggcgggtcgacctcggcgggcggagcagcaaggagcgggaccgcaaggtgctgctcgagcagacgcgcgaggagcggcgccggcgccagggcctccgcctccagaacacctccgccacgaagatccagaaattcttcagagggaagaaggctttggaattggcccgctcagaggttcggaagaatttttgctcaacttttggggagcattgcgagaggatagagtggaacatctttggcactaattctgactttcttcggcaattactgttcttcttcaatgcaaatgaagacaatgacatagctatactttgtcatgtctgcaatttgctgctgcaatatgttaaacaaggcggagatgttgtaactctcttcactggtgtgaatggctcctcgctgcaacctcttgttgctcaccgagttaaaaaatttgccctccactgtatgcaagaagtctatcaaacaaggcatgattgcggcagccaacctttaacattacctggaaccacaacagtgccttctaagtcaaaaatggaaactgtaggttggttgataaatccagattattttttgaagggaaacgtcattattgctgttcactagctaaggacttcgttctcatttcgaaataggcagacgctgtttaatcaatcatgggcaatttctatacatgctgcattttatactgagattttatatgtacttaatcatggttcgtttcatgttaaccatcatccctgtagttgtctgaaagtggatcaaagatggagtttctcgtctcagcttctgtctatcgcttttcgatagcatcatataccacaactcaagaaggttttctccgttaaacgggctcaacaaatattatatccatcaaatagcttgccttttgcccagtcttgttgatgtccttccaaacgatatatcagctaatcatccaggatatgcgtgcgtccttgcaaatgttcttgaagctgcaacctggattttgtctgatgcaaagttagcttctgattcagcggctgacatcattgctgtttgtacctcgtccttgtatgcgttcacagcagtcacaacacctactgtatggaccaatttcgaccatgagatggccatggatggctaaattaaaatgaaacttgggttcttttatctagctctttagaaagcttcaatagttttgacttgaggtcgaaattcaactattctgcaggatagaattccaatcatgagcatgttgagatgttttgggaggtcatgaagagcttaagttgaggcaaccagaaaaatttgctcaattttgtgagtggcttttcttgtgtcccctttcttgggatttattatcgcgctccgatactgtgcattaagagagcttgcactatggaagttcaggaaactttggcatgcaagccgaagatggccattttcttgaacctttgcatcttcatcacctactgattctcctagttggcgcctaccaatgtctgtatcctgtcccatatacaagcacatgttgaagatcattgataccggggagttctatgaacaggagaaacccctttcccttaaagatttgaagtccttggttctcattttaaaacaggcattatggcaacttctgtgggttattccatcctcttctactcagaaagtgtcacccaacccttcaggccttaaaaagttgtcagtggagaatgtcaagactagagctagggttgggttatctgaacttctcacacagttgcaagactggaacagccgactaccattcactgctgcaagtgatttctattctcaagaagctacgagcgaaaattttgtgtctcatgtatggatgcctatgcttttttggattaatagaaatgtctttcatcttctatgactatgcatatgtttttcaggcaatacttggtaatactcgagcatcagagatcataaagcttgctccttttttggctccatttaccagtcgagtcaaaatattcacttcccaattaacgtgttctagacaatcaacatcacattctgcattgacaagacagcggttcaaaataagaagaagtcgacttttggaagatgcttttgatcagctaagtttgctttctgaagaagatctcaaaggaccgattcgagtttcatttattaatgaacatggtgaggaagaggctggaattgatggtggtggaattttcaaggatttcatggaaaatattactcgagcggcttttgatgtgcagtacggtctcttcaaggagactgctgatcatcttttgtacccaaacccaggatcaggattggttcatgaactacatctgcaatatttccattttcttggaagtctacttgggaaggcaatgtatgaaggcatacttgttgacttgccgtttgcaacgttcttcttgagcaagttgaaacaaaagtacaattttttaaatgatcttccttcattggatccagaattgtatcggcatcttctatttttaaagcattataatggtgatatctcagagttggaactatattttgttattgtaaataatgaatatggtgaacaatgtgaagaagaacttctccctggtgggaggcacatgcgtgtaacaaatgataatgttattacttttatccatcttgtcgccaatcatcggttaaactaccagatccgtgcacaaagtacacacttcttgagaggttttcagcagcttataccaaaagattggattgatatgttcaatgaacatgaaattcaggttcttatatctggatctttagaaagcttggatattgatgacctgcggtcgaacaccaactattctgcaggatatcatccggaccatgagcttattgagatgttttgggaggtcttgaagagcttaagttcggacaaaccagaaaaagtttctcaagtttgttactggatgttctcgtggccccctccttggatttcagtatctcgaaccaaaattctgcattcagagagctggtgttccagggctggaggagcatgcagaccgcttgcctacatcagctacctgcatgaaccttctgaagcttccaccctataaaagcaaggagcagatgcaaaccaaactattgtatgcgataaactcagaagctggttttgatctaagttgatcatgttcgggattcagtatttgtgcagtgtagatagttgttagagaacagcttaaaggcacccagagccaaaccaccaaccctcggcctcattcgaagccccatgaggccacgaaggaaaaaagaaaagaaagaaaaggaagaagaaaagacacttgtttctcaaaatagttggatgtgtggagggagtctgcaatatactccctccgctttttttatttgtcatggtttagtttaaaaatgaactgccagtaaagaaaactagggcttcccaacataaataggtggacgctgtttaatcaatcatggacatgtacgtatgtattctatacagaaatttctatttctatatttaaccagtgctggttttgcacgaccaattgaaggtttcc

SEQ ID NO: 63100 - DNA, 824 bp, Zea mays
  Clone ID: MRT4577_157547C.1
attcggctcgaggggcgccaagctgatattccagttgcaaaaggagccctaggtcctaagaagaagcaacgagccatggcctccggtggcccgaaacccaaactggcctacatcatcttgtacgtgagggacgtggagaaggccgcctccttctacgacgccgccttcggctacaccgtccgccgcctcgaccagtcccgcaagtaaaacacgcgcgcgtgcgccctccgcctgatccggatgcgcgcctaatctgccgcatctgcgcgcctttctgggttttactttgcaggtgggcggagctggagagcggggcgacgaccatcgcgttcacgccgctgcaccagcgggagacggacgagctgtcgggggcggtgcagctgccggactcgtcggccgccgggaggggctccgtggaggtctgcttcgcctacgcggacgtcgacgcggcgtacaggcgcgccgtggacaacggggcggtggccgtgagcgcgccggaggacaagccctggggccagaagtccggctacgtgcgggacatggacggcaacatcgtgcgcatcgcgagctacgtgcgagagtagtcgcattccgctgcatcaccatcgatcgatcgatcagcctttcccatgcatgtctcgtatactacacgtctacacgtgtaccaaaaaaataaatataatcgttgtgcaggtcatgtttgtcttgggagaggtaggaccgtggaagatgtaaatggaaccgtggagcagtgaatacaaaaagcgccatctcgtccctgtttccattgatctgtacaattaatgaatagagacttctaaatc

SEQ ID NO: 63101 - DNA, 195 bp, Zea mays
  Clone ID: MRT4577_157548C.1
ctcacgcatacgcccacgcacaccctagctgcttcacaactcgcggtctaaagactgaccagtcaccattagcaagtgcatctaccatggcgtcactaatatactatctcctgactaaccaaactccaactcttcgtagagtacagatacacgcacctattcaacgtcatgaaccactgcaataccacgctaaga

SEQ ID NO: 63102 - DNA, 348 bp, Zea mays
  Clone ID: MRT4577_157549C.1
gacagttctgccaaatacattattctcatacagtctgtactggaagcggtggaaacacttaatattgtttattgggacacagctaatcacacaatataagttgcatatcatcccgagcttactggtgcaatattactgattcaaggtattccagacactacacatgctgataaacagctttaatgaaacgttgcacttaccaccaaaacaaagagaacatttacactacacatgaacaatgtaatgacctgaaccaacaattttgaagctgccagcataaagactctgtatgtctgtatttacatagctaggctatgctttatcaccatggtgatcttatatagtgca

SEQ ID NO: 63103 - DNA, 2352 bp, Zea mays
  Clone ID: MRT4577_15754C.1
atcaaaagctggccccttccacagcgcactccctcaccttcctccacggctccaccatcccctctcccctgccctgcccccaccgccccgcttccttccgccttgctccgttgcttcctcccaccacagtccactccactcgccggccctgcagctcagtatttgactgagactggtggtggagctgctagcagcgagcctgctacttcctggtcctgacggtgcgttcagacctcagaccagtgccgacgacgagctgtgaggagagggcaaggaaacaagcctgtgaggaaggcggcgatggagaggtacgaggtgatcaaggacataggatcgggcaacttcggggtggccaagctggtccgggacgtcaggaccaaggagctcttcgccgtcaagttcatcgagcgggggatgaagattgatgagaatgtccaaagggagatcatgaaccacaggtcactgaggcatccaaacatagttaaatttaaggaggactacttggtggcaacttgtttctatgggtgttggatacttggatgtctatcagcattcagcagctatgggtagcatgcactagtgccatgccccttgagtcggggaagtgcttatggcatttgggcctcggagttttttttgccaataactcatatttgttgagtggctatggggcaatgactgagtgacagttccttagcagttagcagtctgctttgtcctcttgttcttctgttatatattcttgtttgcacggaatgcatgccactgttttttgtgctacctgatttgccgtcgataaaagaggtatcaactaggtagagtgaaggagaattatcgctggatggtaatatcaaccaaaaatatcgaacttcggtccatagactgaattccttttaacttgtttttttctctcgccaggatttcatagcagcacacctttaagaaatgtttctcgcaactaagttctttggaatgtaattagctacaacaagcatgggtcaattatgattctggcagtaacttgtattcctttcaactagtttggctgcagtaccggagaaatacttagtgtactggtcattgacgacagtaaatttcgtggatttaattggagacctctttataatgctaacaacatagttatctcatgaagcttattactgcagaaaatagcaggagagggtccaaccgtgattattacatttttgtttcagaatttaaatttattaccatttccaaactacaaattaaaagagaggcttagtttttcaggttgtgctaactcccacacatttggccatagttatggaatatgctgctggtggtgagctatttgaaaggatctgtaatgctggaagatttagtgaggatgaggcgagatttttcttccaacaactgatttcaggagttagttattgccactcaatgcaaatatgccatagagatttgaaactagaaaacactctcctggatgatagtatagcacctcggctaaagatatgtgattttggttactccaagtcctctgtgctgcactctcaaccaaaatcaactgtcgggacaccagcttacattgctcctgaggtccttgctagaaaggaatatgatggaaaggtcgccgatgtttggtcatgtggagttactctgtatgtgatgcttgttggtgcctatccctttgaggaccccgacgaaccgaagaatttccgcaagacgcttactcggattatcagcgtccagtacgcggttcctgattttgtccgagtttcaatggagtgcaggcatctgctgtctcggatctttgtggcgaaacctgagcaacggataaccatcccagagatcaagaaccacccatggttcctgaagaacctgcccatcgagatgaccgacgagtaccagatgaacctacagctagtcgacatgaatgtcccctcgcaaagcctggaggagatcatgtccatcatactggaggcccggaagcccggcgacgggctgaagcatgcgggacagctccccggccttgggagcatggagctggatgacattgatgttgacgacatagacgttgaggacagtggcgactttgtatgtgccttgtgacgcggttcaggctgtccggcaccgttgctgcggtggactctcccccactctcctggtctttgtgtcttgctgttattccatgttgtttgtttcagcgagctccgagctcccattttgttgttgtaatatcacatgttttgtgtaaccaaggtagtgacgctgtggataaataatagacgttatgtgttgtattcttgctgaattgttgttcagctccttctgtttgccctgtatgaactgggcagtttcatgagt

SEQ ID NO: 63104 - DNA, 485 bp, Zea mays
  Clone ID: MRT4577_157550C.1
aagggtactgctattcttacataggaggggggggacacagtacatgaaagcagggacaagagcagacctcgagttacacttacacaagggaattggggggaggtcattaaccataaccccagcagctagcttagctaattaggggcggggccccagttgcttaccccaccagttgatagcacagtacagtaacagtaagtttcatggctcaccaccacgtttgatctgacctcagtttttcaatctcactagcagattactaacctgaaacaccagaagcaaaaaacaaggaaaatatgttttttttccctccctcctcttgatgctttgggctgccctggggatttcagtctggagctaggagctagcaaagctggtacatattctcggggcaggatctgaggaggtcgtccaaggcgggggcgccctctaaggcgaagtaggggtcggaggaaaaagcggcggcggctgggagggaaacggaa

SEQ ID NO: 63105 - DNA, 379 bp, Zea mays
  Clone ID: MRT4577_157551C.1
gcacagccgacaggtgcacacatttttttgggtcattttaatatcattttattaatatatcatggtttccatcctcaaaaatcatcgaaaaaatttgaatgtgttttataaaccagttttattttcatttgcatatattatatatattcataattaacgattgaccttaaatttgcagttttatttttgtcaaatttaataaaactaacatttaaatccttcattcaatttaatttccgagtttaattggtacaaattaaaattggttggcttaaatcatgccagtaatggacctttccttcacaagtgggttggttgtgctgactggcacctgttgccatgcatatccatctcgattttctgccaaatctgattacat

SEQ ID NO: 63106 - DNA, 235 bp, Zea mays
  Clone ID: MRT4577_157552C.1
gggggagaaaattttagttgcattattttttcacctcgcttcccgggagatcaccggtttgttagaggaaaaccccggtaaaaacgttttcaacacgccccccctccacttttggaaaacctctcctttcgaaaaggggggggggaaaggaccttccttaaaagacgggttcccaaccatacccttatatgggagtttctggggggttaaaaaggtttacaacttggaaaatttt

SEQ ID NO: 63107 - DNA, 527 bp, Zea mays
  unsure (1)..(527): unsure at all n locations
  Clone ID: MRT4577_157553C.1
caagataagcgcaccaaagagctaatagctgcatataggaatcgacagaacatggtaatcgatgcaaagacaaaagcagagtgcatcaaggccttgagggaaggtgatgagatgatgaatactggannnnnnnnnnnnnnnnnnnnnnnnnnnnnnnnnnnnnnnnnnnnnnnnnnnnnnnnnnnnnnnnnnnnnnnnnnnnnnnnnnnnnnatggtccatctgtcttgattcactttgcaggtccaaggaagcaatgagcatgtatagcaaacttnnnnnccacccgaatagtgagatcagcaagaaagcaaacatgttcgtgttcagctttcaggcaatggatttcatgaaggtgagcagcattccagtgcccaaaagcacaggctacgagacgtacttcaccaaatttggcagcaagaagaattactacgcgagcttagaagagccggagaaatcatggacgagttgctgaggttttaataccgtataggagcacatagcttggcaatagaagattattattat

SEQ ID NO: 63108 - DNA, 1533 bp, Zea mays
  Clone ID: MRT4577_157554C.1
cccaaggccctcaacctgtcatcgcagaaactccccccgctctcttcatctgccacggcctcgccaccacctccgcccgacggggacgataagccggaccccatcaagctcgctttcgcccgcgctgccgcatacaagaaggggagggacagtcacagcccgagcccggcccccggccccgcctcccacgccgccgccacagtctccaccaccgtcgcagccgcaggcttcggtcagtgagcccggcagtaaggaggcttttaagcgggcgttggagtaccgaaacggcaacggggccggagcgggcgcggctggtggtgactccccgctgctgggaggctcgccggattttggtcagaatgccctaattagtgaagaagtctcgtttggcaagagaggagggtacgagtttgatgaggctgattttttgggtctcgacttctttgagaaaaaacgttctaaaggtctaccacctgggctggctccagcttttgagcctttacgagatgacgattttcctgaggtggacataatagttggagaccccagcaaatttgacaagtctcctcgccgaactgaaatccaaccggtagacaacggggagtcaggggaagcatctcaatcgactactaaaccaaatgaagctgacaaggctgggatagcacccccttcaactgttattgagactgaagaagatgaagatgtttatagacccacagttagatcatggggaatgtttccgaggccacaaaatatttcaaaggcgtatggcggtggaagaaatatacgccttggtggagagactcaaagtgcagaagaaaaggcagccaaagataagcgcaccaaagagctaatagctgcatataggaatcgacagaacatggtaatcgatgcaaagacaaaagcagagtgcatcaaggccttgagggaaggtgatgagatgatgaatactggaaggcttaaacaagcattaccttattatgaaaaagtgatggacgctgtggactttaagactgaatttcatggaagggctgctctgcaatggtccatctgtcttgattcactttgcaggtccaaggaagcaatgagcatgtatagcaaacttaaaaaccacccgaatagtgagatcagcaagaaagcaaacatgttcgtgttcagctttcaggcaatggatttcatgaaggtgagcagcattccagtgcccaaaagcacaggctacgagacgtacttcaccaaatttggcagcaagaagaattactacgcgagcttagaagagccggaggtgggaatcgagcagatcgtcccgtacatcatctttcttgtttcgccgatatttttagttgcttttgttgcactgagaaaatccttccaactatgaacagaaatcatggacgagttgctgaggttttaataccgtataggagcacatagcttggcaatagaagattattattatgatttttttgttttcatcaaaagagcaaattattttgtgtagctgagctagggactaatttttaatcccttttcttt

SEQ ID NO: 63109 - DNA, 1219 bp, Zea mays
  Clone ID: MRT4577_157555C.1
ggccgcttttttttttttttttttgtgatgcacgtctctcattcgtccggtatcaaaaagggtaaagaaattcttgcggattggtgagcaacccaaaagtcactgcacccaaccgggctcgatttatgggaaaggacaaaatcaaaaagcagccctcactatccatgccgctgctcgctcgcttctctccacttgtgtcggatcaagcaagaccgctcgctgccttcgtcatatgatatattcagccgcttcgctttctaatgctaattttgggtgggtttgccattctcgtgcccaactgcctcgcggcggtggtggggtggtcgtatcactgcctttctggtggagccggcagtgcttgatcatgagagggatgtgacgagtaatctacaagtcggcatcgtcctcatcgggaaggggcatctgggcggcagcctccatctccttctggtaggactccatggcggcctggtcaacctggacctctgggggagcgagggcaggggcggcaacaaactccagagtctggttaccgacgagcttccttgcgagccacaggaagggcttctcgaagttgtagttggacttggcggagatgtcgtagtactggaggttcttcttgcggtggaaggtgatggtcttggccttgaccttgcgctccttgacatcgtccttgttgccggtcaggacaatggggatgttctcgcaaacgcggaccaggtcacggtgccagttggggacgttcttgtaggtgatgcgcgaggtgacgtcgaacatgatgataccgcactggccgttgatgtagtagccatcgcgaagaccaccgaacttctcctgtccagcggtgtcccagacatcgaactggatctgaccaaggttggtagagaagccgagagggtggacctcgacaccgagagtagcgatgtacttcttctcgaactcaccagtcaagtgacgcttgacgaaggtcttgccagtgccaccgtcaccgacgaggacgagcttaaggaagggcaggaaactgaagagaagtgtaacgcggtgtcggccaactccgcgcagtaaactttccggcgcgacacgctacaggctttacgggcgctctgcgagctagtcttctccacggcttcggctccgtcgccgccgagcaacgtcggagccctcttcggtcggcatgagggaataggaggtctgtgttatctttccgagcccggccggc

SEQ ID NO: 63110 - DNA, 218 bp, Zea mays
  Clone ID: MRT4577_157556C.1
gagtgtgagtcggccggcggtaggatggctcttgcttcatattcagagcctgcgagggatcggctgcttcagcagcagcattgtcttggcacgagcgagggtgcagcagtgtctggcagcggcgtcgcactcacaggcgcccctcctgcaggctaatggcggcagggcgggcctcctctcctccttcttgatccttaatgctgtcaatgctatcagtt

SEQ ID NO: 63111 - DNA, 675 bp, Zea mays
  unsure (1)..(675): unsure at all n locations
  Clone ID: MRT4577_157557C.1
ccggccgggagctcaactgacaacacaatcctcaaccactagtcttcttcttcaaacctctctacaaatcaacaaattctcaagatgaaggctgtgacctcgctcgttcttcactgcgccgtagtgactgtcgctgctgcggctcttcctgacggtagtcaagtggttgctgaccctctggagggctacgaaattgttcctatgcaatgggaagggtgttatcaaagagggagaggctcctgtctccctgaacggtactaattgagtcggttatctcccagatcaaggagcttaacccggagttcgagttggtggaagaagacaccgccgagtcatccggactcgaagcacgcaacccatccaacatcatttgcaatgttggcggaagcggntatgtcgatgtgaaagcggcccaacgtgagcaaaggtaccttcgctccttgggtaccagtgtatgtgggtgtggatggggnnnctggnaagtgcgctcgcgtctcctgttcttatggcgatgctatctggctttgcnacgaccacagccactacatccaacccaggtgcaactacttggctgactatgttgatcgcattattgcaagctgccaatcgaaaaccagcagcccgccttgtacaggcagggccttgcgcttcctaaatggaccgcatggttccttc

SEQ ID NO: 63112 - DNA, 298 bp, Zea mays
  Clone ID: MRT4577_157558C.1
tgctatagagcttggcgaccgaagtgtgggcttttgtaaacaactttttagttgtatggtacggtacccctcctagcttcgggcggaaaaatacccggactttaacaccctgagagaccactccccaagagaccaactatttgcatttgggccggggcggcaggaccctttgcgacctttttttgtcgggggggggcgcagccaggttccataccatgcgggctttccccaaaccttttgggaaggctcaaaaggggggcccccttccgggctgaccgtcggccttaggggaacccaa

SEQ ID NO: 63113 - DNA, 382 bp, Zea mays
  unsure (1)..(382): unsure at all n locations
  Clone ID: MRT4577_157559C.1
cggacgcgtgggcacgtcctgcgccgcgcggtttgttggtcaaggtgcccccacgcgccgggggtggcgccgccgccgctgccgcccaccgccgcccgcgtgcgcccaccgccacctgttgccgcctaaggggaacgcctccgttataacccaacgcttcaccatccatgccgtcctccaccaccgcttcaccatcccctccaggcccaccaccaccatggcctctccttccccttcttcccccgcccgcgcctccggccgccgcgtgccgccgccgtgctggacgaccgacgagaccctcgcgctcgcgcgggcctacaccgngcgccgnctcgccgtcggccgggagcacctgacctccaccgactgggccgtcgtagcc

SEQ ID NO: 63114 - DNA, 674 bp, Zea mays
  Clone ID: MRT4577_15755C.1
cgacgcgtccgacattgccagggccttcgaggtcctcaacaacaacgagcagctgctcagcggcggcgacggcaacagctcggaccagccgtctcccctcgcgcttgtggccacgccgtccccggcgctgtgggcgagcttcggccgcacgcccgcgcacgccaggcagctgaggatcaccgactcgccgttcccgctcggggacgacgacggggactgtggccaggtggacctggacgccgaggatttcatcaagaagttctacgaccagctgcgcacgcagcaggcccttgccaccgccacgccggactactgcggcgggtatgcgcgaccggtctctggcatcgcctagaattcaacccacgcatccacacgcgtatgcatatgtaatatatatgtacgtgtccatagagtatttgtttgaacatgcatgatgcatgcatggataaagcatgttcgtttgagagctagctactggtggtagagctagtctagagcttggtctttgtgatatgagggagagattttgtacaacatcatcatatgtttgcaagctagatccatgcatgtatagtactcctatatatgtgtacgctgtatgtgtatattttgttgtagtgacatgtatcaattttactgcaagtaaggtacatgttgccaacccattagcatat

SEQ ID NO: 63115 - DNA, 269 bp, Zea mays
  Clone ID: MRT4577_157560C.1
catcactgttctttttttcacccaatttgcgttgggggggaatcaattcaaatgcgttatggactccatcagaaaaaaacaacggccccacagtccatgtattaacaaagttgaacctacacggacttataaggttcacacattattatgagtggtactgacaaaattatggtgaattcacgcacccgatcgaccggggtcacgcaattggtccaataacgggcaaaagattttttgcctaaacgctttgcggacagatacttgcaggg

SEQ ID NO: 63116 - DNA, 380 bp, Zea mays
  unsure (1)..(380): unsure at all n locations
  Clone ID: MRT4577_157561C.1
aaccccgggccgacccacgcgtgcgagctgcgctactcgcccgncgccttgggctttattaagatcggaatcaacggctcggggacggagccgcaggctcgtggccagggtcgccctccagagcgaggatgtcgagctcgtcgccgtcaacgaccccttcatcaccacggactacatgacctacatgttcaagtccgacaccgtccacggcccctggaagcacagcgcctcaccactaaaggcctccaagacccttgtcttcggagacaagccgtgcaccggctttggcaatcaggaaccctgaggaaatcccatggagtgaggctggcgctgcctatgccggggagcccaccggcgtctccactgacaaggacaaggct

SEQ ID NO: 63117 - DNA, 260 bp, Zea mays
  Clone ID: MRT4577_157562C.1
agattatgaacctatcacactgctcgctagaggcggaaccctagatcagaggtggacctgctgctgaaaggaccctactgcaccccctccggcgcgggctcatcagacattactcgagctcgtacagtattgactctaagtcactcactctggcccggaccagcaggctgcatgccagagccctgtacgccccaagggcgcggcctgctagcgcaggcacccctctaggaaaaaaacccacccacatgcggcctgtgcat

SEQ ID NO: 63118 - DNA, 833 bp, Zea mays
  Clone ID: MRT4577_157563C.1
cattgggtacctcgaggccggccgggacagaccaccttgcagagttcatatcgtcttttttcatgctgcaccttcttctcattttctgcacacttgatatcactcatatttgcgacggagcacccttttgccttggtcaggccccatatcttcgacaacaaacccccagagaatgagttccaagcctatcaccggcacgcctggcgttgccagcgctgcgccaaaactcgagaagaagccggtcaagtttagcaatttgttgctcggtgctggtctcaacatgttcgaagtaacaactctgggacagccgttggaggtcgtcaaaaccaccatggctgccaaccggtctgaaggtttctcgggtgccattcgccgcatctgggcccgtggaggtgttcttggcttctaccagggtctcattccgtgggcctggatcgaagcctccaccaagggagccgtcctcctgttcgttgcctcggaagccgaatactacgccaagtcgtttggtgcgcccgactttgtcgccggtatctctggtggaatgacgggtggtcttgcgcaggcctatgccactatgggcttctgcacttgcatgaaaacagtcgagatcacaaagcacaaggtcgccgccactggcgcaaagcccccgggtactttggaaaccttcatgcagatctggcgcaccgagggtattcgcggtatcaaccgtggtgtcaatgctgttgcagtgcgccaggtaactaactggggttcccgcttcggtctgtcccgtgtcgccgagactggtatccgaagggtacccacaggagcatggcgagaagctgagcgtattg

SEQ ID NO: 63119 - DNA, 396 bp, Zea mays
  Clone ID: MRT4577_157564C.1
ataccgacctcgaaaggcaaagaccggcttaggactgcatgaacaacccacggaggactaacatacggtcacttaccgtaatctccggggtgaaaaaggcggcgcagccataggagtcgactaaaaagaccaggtaaagctgaacgaaaacgccgttgcaaacaaagccacggctagaggcagccagaagtaggctgacgcttccaaagggccccgcccgtggcggtccctgcctctagaaaaggggccgactgcatccgtacgttttggtggcaaaggttgcggtccctcgcaaccacccgttgcctcctgggccgtcgaaggaattgtagccggggcccccgaaccccaggccaccgatggtgcccaaccccaacctggacccggtgggcagct

SEQ ID NO: 63120 - DNA, 179 bp, Zea mays
  Clone ID: MRT4577_157565C.1
tcaaaccaaaccaaatcttgtgatctagctccttcagatatatggagcgtgtatgttggggtggctatatctacatgtcttagtttagtggatataccctttggtccccaaaagatgtaggccagtattgtaacactactattaatggttaaggtgaatgttccttgtagccccccaaa

SEQ ID NO: 63121 - DNA, 426 bp, Zea mays
  Clone ID: MRT4577_157566C.1
attgttaccattatgttttttttgttaaaaggaacacacacgggcgttttatatttaccgaggtgttaggcaccatgacggggggtttggcccttgaaggcagctggggccgattggaacaaccatgccttggggaattaacccatgacccggccgggggaaaaaaaaagatggggaaccctggcgaagcttaaaatcttggtgaaaaaaaacgggcctattgccaaattttatgatagggcgaacctattggtttcaaaggggggcattcctggattgggggcatcggggggggccccggcttaacactgcggtttaaagaccgccctgggtggaacctttgagcgaacaaaattcctccttgggttgggcccaccccaagctctaataggactcaataggagacaatcccgagcttcccggggc

SEQ ID NO: 63122 - DNA, 350 bp, Zea mays
  Clone ID: MRT4577_157567C.1
gacagtggaggtggagtcatgcttcaacatctacaatttcaaggtctagatccaggtcatggtggtcatctttccagaccaaccgcagctaatctttgatagccagcagaatcgggacgggcgcacagtctgctggtacaaacagctgacggggagctccctgcaccttacgctacctctgaggcatggcatacaactagctggtgaaagacatactggaaagaatattacgcttgaggcggattatgctgaacacagataccacggagctggccagcatgaagtacatgcggcgatgccaaaagatcaacaagaattcatttttggcgatcatcaaccaccggtcggtg

SEQ ID NO: 63123 - DNA, 297 bp, Zea mays
  Clone ID: MRT4577_157568C.1
cccacgcgtccgacgtagcaaccgctccctagaaccaccgctcgccaccctcaccgcgtcgtcgaacgccacgatgcgacaacttctctcctgttgccgcggccacggtcgcatccccaacacccaccaccaccacctcgccctcctctatgccatctccttcccccctcatcctcaacgatgggcatgaactgcagcagccactcctctcttcacgacaagcacaaccggtgactgctctaccctctgtgacgagcgcaccaagatccgacagcagctccttcctccatgcgtggg

SEQ ID NO: 63124 - DNA, 655 bp, Zea mays
  Clone ID: MRT4577_157569C.1
ttttttttttttttttttttttttttttttttttttttttttttttttttttttttttttttttttttttttttttttttttttccccccccaaaaatggaattttttgggaagaggcaggttccccctacccaaaggaaatgttttggggccccggcccccaaaaaaaatttcccgggggggcccgggtttttaaaaacctgaaaacccccgggggcaaaaaggggggccccttgaccccggggggaaaggaaaaaacccccctttttttgttggtaaaaaaaagcctcccctggagttttttggaaagggggggggggttttcaaaatcccaaaccaggactttaccatcaaatttgggggggggaaatggttggaaaaacccatcgtttttttttttaagggggacaaaacccgtttggcaattttaaggggcccccccaagagttttggggggttaaaaaggggcgttactaccccccggtttgggggggccaaaaagcttcccaggggcttaaaaaagggggggggtttttaaagctgaggggccatttttattttggcccaaaaattttaaaaaaccccaaggcccatttttttcagcagaaaaaattatggggtggcggcaaaatcccaccccacccagggggggctc

SEQ ID NO: 63125 - DNA, 622 bp, Zea mays
  unsure (1)..(622): unsure at all n locations
  Clone ID: MRT4577_15756C.1
ggncgcggcgccggcgctcgcaggtggcgccgaccgctcgtcggacgcgccgggcgaccaagccgcgtccgacaactcggacacctccgacggccaccgcggcgcccacctgctgcacggcttccagtacggccaccccatgaaactggaggccggggagggaagcagctggatggcggcggcggcggcagcgcggccggtgcccggcgtgcatcagctaccgatgttcgcgctgtggaacgactgttgattgtggcaatggcaacctggttggtagagtacgtagtagttagtgaagaaatgcatgtcattgcacctgcatgcgcatgcgcgagcacgaggtgtaataactttcggcagtagaagtggcggtgaagaagtggacgacacggcctggggaaggacatgcatggcgtactgcctccctgcaagcgagatgcatgcatgttgcacacgctcgccgtttcttcgcaagatggcgacaattttgccgcaatatgtaatgtaatggttccacatgcatgcatgttattcttcaatgaaacaccccactagtagttaaaaaaaaaaaaaaaaaaaaaaaaaaaacccacgcgcccgcggacgctgggcggacgctggg

SEQ ID NO: 63126 - DNA, 138 bp, Zea mays
  Clone ID: MRT4577_157570C.1
aaggcaaaagaattgatcaaatataaagataatttgtgtttcattttacaacccataaagatgtaacttgctagaagcatccctaaatagggaacaaaacaccgacttatacatgaatgctacataaatgcttaaaaa

SEQ ID NO: 63127 - DNA, 761 bp, Zea mays
  Clone ID: MRT4577_157571C.1
cttgtcctgagaatatgatgtattgttgttatgtgctaattagttctttcctaaggttttttatttttcatatgtagatggttacccaggctcttatttctaagagcagcaagtaccaatttggaaaattcacccttgggaaattcttgagtcttttaatggtttctggcttaatatacttgcttgcgcacagaagttcaaagggttttgtatctggtgagctccataacaaagaagtagagagtagacatgccagtaaagattctcctactatccgtacattctggagaaagccaccaaggctacctccacgtcttcctccaaatgaaatatataagaacagttcaatacttcaccaccccccttcatctgaatggacatccaggcagaagaaagttaaagaagcattcgaacatgcatggtctggctaccgaaattatgcgatgggtcatgatgagcttatgcctttgagccgcagaggtgtagacggattaggaggtctaggtgctactgttgtggattctttagacactgcaataataatgggtgctgacgatattgtgtctgaagcatcaaaatggattgaagacaacctaatgaaaaagatcagcgagaaagggcaggtcaacttatttgaaaccactatccgtgtcttgggagggcttcttagtgcgtatcatttgagtggtggagaccaagcaggaggaggtgattctgggatagcagtagcacctaacaagactaatccagatcgtctgctg

SEQ ID NO: 63128 - DNA, 820 bp, Zea mays
  unsure (1)..(820): unsure at all n locations
  Clone ID: MRT4577_157572C.1
gaatcgagccttatctctaattaatccgaacactaatgggctatactaccaatctagagcagataggtccatgacatacacctctaacactacacccctcttggacaaaaagctcatcctcgagctgcaaccacacaaatctaacacctaaaaataactattttacatctcggcttattttattattcttaatccaaaatataggtggacattttttgcctcgacaattgaaggtgaacaccatcaagatgacggagttgcatgtatcagccacctagatcccatggcatagtccacaccgcacagagaagagaggaggggttccgatggagaaaggcaaggaggggtgtgcctccccaaccgtcgtcgctacaagagaggaggggctccgatgaagaacgacgaggggtgtccctccccaaccatcatcgctatagactttgagtctgccgctcgcgagagggacaacatgccacccctgttttcaagtcgtcgactagtcgccgccgacgactagtcgtccagccggtcctgggagctcgacttggggagccggctcaacttttttggcaagtcgggcgacttgtcaacgactggaaattctcagtcgactaagtcgtcgacgtggtctggcaagtcgaccaacttgtgccccagttcagcccaaaggcccattnaacaacatattttcttgatttgngagaaatgcaatggatggtcttgatttgggagatatttagggtatctactatctagtatctatctagctgcagcagcagcttagctatctaatggagcttatttccctttcaagttgact

SEQ ID NO: 63129 - DNA, 520 bp, Zea mays
  Clone ID: MRT4577_157573C.1
tgggtacctcgaggccggccggtttttctctggacccggccataaagtcgtgtacatgtactacatgcatgtttgcatagcgtgtcatctacatagcgcggcgcggcggcggtggaacagaacaagaattgcccacgccggagagaatacggcgtttcatcttgttgttgaggtgcccatattcatcgtgatcattgtctccgtctaaatccttggcaggtcgaattcactggaggccataagtgatagtaaaaaagatgaacattgctactatgaaaaaaaaaaaaaaagccgcccaaaaaaccgtggctcgttaactcgctcgtttcgattttatcacgagctagataacatcttagctgggttattaacgagtcagctaacgaggtctctatttatgttggatgatctaataagtaatgaactatattaatttagtgtgaaaccaaaactactgcacgatcaaagaaaggacctcaagaaccacacgaaaacgaaaccaaaagaaaaagatgcggcc

SEQ ID NO: 63130 - DNA, 346 bp, Zea mays
  Clone ID: MRT4577_157574C.1
ccaagttccgcggcgtccggaggcggccgtggggcaagttcgccgcggagatccgtgacccgtggcgcggcgtgcgcgtgtggctcggcaccttcgacaccgcggaggaggccgcccgcgtctacgacaccgccgccatccagctccgcggggccaacgccaccaccaacttctccgccgccgctaactccggctccagggccggccagcgggacccggcgacccccggctacgagtccggcacggagtcctcgccggcggcgtcgtcgccgacgtccgtgctccgcaaggtcccctccctgtcctccctcgccgaggacgactcctgcgcggccccgtgcgagcc

SEQ ID NO: 63131 - DNA, 648 bp, Zea mays
  Clone ID: MRT4577_157575C.1
tccctcgcggccgtccgggttgcttgcctggcgatggtcggcctcggctggcgggatgcccacaatgtctacttcccgctgggcgggacggcgtcacagtgggcgaagatggctcacgccggtggtctctctgcttttacacggccatggcgacgccactttatatatcgtctttggttgctgcgttcggctcaggtttatggttggaggattaagagggcgcgagcctccgctatttatgcttaggggtggttggattggagcgcggttgggtgtgcttgcagcatgcgcggagtgtttgttgggcggtcgcagcatgagcgaagatctagagtcggcaggcggcagcaagagcagaggccaaggctcacgcgcaggatctgacgctggtcggcgcgtgtggaggatggtgcggagggggcatggaacggcaagtccctggccaacgagatcgaaagcctccgcgccgcgctatgtatattatcatcatcatgaaagaccaagaccttgtttgcccaatcacattccatagggctatgtgattccagccagtcataacccaagatggcgtcataaggtcccagatccaacactctcatatcagtgtgaaatgtgtggccatttgcgcaccaggcaagttgaggaacc

SEQ ID NO: 63132 - DNA, 553 bp, Zea mays
  Clone ID: MRT4577_157576C.1
ccggccgggatcacaacctccacgaccaacgaggcaacgaccaaacccttccccctccccagctccgtgctccagcgggagtccgcggcggcggtgaagatgattatcccagtgcgctgcttcacctgcggcaaggttattgggaacaagtgggatgtctacctcgacctcctccaggctgactactcagaaggggatgctctggatgctttggaattgttccgctactgctgcaggcgaatgctcatgacacatgttgacctcattgagaagttgctcaactacaacaccctagagaagaccgagacaagttaagcgagcacatcatgctccaaaaacactactgtttcgcagtatcttagagcttaggtagtatgttgtctcttctctctcagtagagatgggttgtgagtgtgaacctgcttttgctcatgagcattcaaggacttttcatgcgacagtgcttgttgcacctatgcaacgatgttggatattttaagtgatataattgctaaaagaaagctaatggaaaaaaaaaaaaaaaaaagcggcc

SEQ ID NO: 63133 - DNA, 398 bp, Zea mays
  Clone ID: MRT4577_157577C.1
aaggactataggccttagttcaatgggtaatcaacatacaaataaatcttatctacagagatagacatgtgaattggtctcttgagaaggtgagttcttttgccagatggaaaatctagcatcattctgcccttttttacacataagaggtttatgagcaaatcatcaccatgtacgaaattatctattctttcgttagtttctggtcagtaggtattgggggccttcggcttccgaaggtcctcaaaaacaagatttaacagtatttttggagtataatgtgtgaacaggtatcttcggactcgaatcggtaccacagtgggagaagcccaaagaatacgaaggtcgacacagcaccgaagctgtgagcaggaaagcctcggcgtaatagcagaaaa

SEQ ID NO: 63134 - DNA, 539 bp, Zea mays
  Clone ID: MRT4577_157578C.1
gcaagagaattaagtcatttaacatttccttaaaatcattccgatttaaaacagattatctaactcgaaaatacagctactcagttttgaacaccctaaatcatccaaagatctcatatacaaaaggatctctaaactcaaatcaaagtcacagcccaaagcataagaaacttgtggtagattcaatctatgaaggcatgttggagctcatggcttgatgtattctcgaatgaagtcttcaatctggatggtttctccggtaagtccagatgcctcagcgacagtgactttgttggagcaatgcgtgaaggagaacacttctccctcaattccaatggtgaagtcattcgctatatcagcagtagagactgcactccttgaagccctcagtttctcaatttctttctccatttgcttccggataaactccttggtgtgtgcagtgagtttatcggtcttgttacagcaaaggaggactggaatcttcttcttgacaacattcgcattggtcagaatctcgtataggtactctgaagctg

SEQ ID NO: 63135 - DNA, 667 bp, Zea mays
  Clone ID: MRT4577_157579C.1
cctgccgggaaacaaccgccaatcacaacctccacgaccaacgaggcaacgaccaaacgtccaaacccttccccctccctagctccgtgctccagcgggagtccgcggcggcggtgaagatgattatcccagtgcgctgcttcacctgcggcaaggttattgggaacaagtgggatctatacctcgacctcctccaggccgactactcagaaggggatgctctggatgctttggaattgttccgctactgctgcaggcgaatgctcatgacacatgttgacctcattgagaagttgctcaactacaacaccctagagaagaccgagacaagttaagcgagcacatcatgctccaaaaacactactgtttggcagtatcatagagcttaggtagtatgttgtctcttctctatcagtagaaatgggttgtgagtgtgaacatgcttttcaaggacttttcatgcgacagtgcttgttgccacctatgcaacgatgttggatattttaagtgatataattgctaaaagaaagctaatgtatttgtgtgaattgggtcgataaaaattcgttgacaaaagtaaaaatttggattgtgcacatttagtgatgcatgctggtacatattttattattggattctataactctaatcgacatttctgatacat

SEQ ID NO: 63136 - DNA, 776 bp, Zea mays
  Clone ID: MRT4577_15757C.1
ccggccaggacatccggagggctaccagagtagagaagtagctgtatcaacttcctgacggacagatacaagccgccgctgaaagacatcccctatactatcgcaggacaatcatggggtgcgcgcgcgcctgctctactgcaccgctcccgcatcctgtgtgatcgggcaaggcgacctcaccggcgttagaagcggctggtggtggcgcatggacgaaacaggcaggcacggggccagcggaatccacgccaacgatcgcgacgttccttcccatgatctcatcgagagatgattgtatggatggatggggagcacgtcccgcggcgcccgtcacagcaagacggattcttttcttggatcggaagccagccaaggacgcactccggatcactggcagtattggtaggcaccgggccagcgacgtctccgggcatgggcgtgacaacaagacgacctgggatttgctgccgacggtctggatccttcctttcttcatggctcatgcttcagcagcagcagcaaggcttccggaggcgggaacggaggcttcggctcagagtcacactgacacgtctccttacgccggaaaacagtgatcttcttcctgctcggcgagtcggcgatcaactgaaccgccgccatgaatgaacgggccacagacgcaagcctgtcccctgcctggaatactgactataactgatgctgtaaccttcatagctttgtaccatctcttgagcctcggacgtgtactgtgtataattccgaaacaaaaa

SEQ ID NO: 63137 - DNA, 691 bp, Zea mays
  Clone ID: MRT4577_157580C.1
ttacttagagagaccggccgggaaaaaaaaaaaaataaaaaaaaaaagcaagaatattaaacaccatctgatccctctggttcagatggatcgatatgccagtgcaagcggctcgatctctggggaacctgggaatggacctgaataaaaaaaaaaaaaaaaaaaaaaaaaaaaaaaaaaaaaacgtccaaacccttccccctcgggagctccgtgctccagcgggagtccgcggcggcggtgaagatgattatcccagtgcgctgcttcacctgcggcaaggttattgggaacaagtgggatctatacctcgacctcctccaggccgactactcagaaggggatgctctggatgctttggaattgttccgctactgctgcaggcgaatgctcatgacacatgttgacctcattgagaagttgctcaactacaacaccctagagaagaccgagacaagttaagcgagcacatcatgctccaaaaacactactgtttggcagtatcatagagcttaggtagtatgttgtctcttctctatcagtagaaatgggttgtgagtgtgaacatgcttttcaaggacttttcatgcgacagtgcttgttgccacctatgcaacgatgttggatattttaagtgatataattgctaaaagaaagctaatggaaaaaaaaaaaaaaaaaatttgcggcc

SEQ ID NO: 63138 - DNA, 691 bp, Zea mays
  Clone ID: MRT4577_157581C.1
cattgggtacctcgaggcctcccgggccggggccatcacaacctccacgaccaacgaggcaacgaccaaacccttccccctccctagctccgtgctccagcgggagtccgcggcggcggtgaagatgattatcccagtgcgctgcttcacctgcggcaaggttattgggaacaagtgggatgtctacctcgacctcctccaggccgactactcagaaggggatgctctggatgctttggaattgttccgctactgctgcaggcgaatgctcatgacacatgttgacctcattgagaagttgctcaactacaacaccctagagaagaccgagacaagttaagcgagcacatcatgctccaaaaacactactgtttcgcagtatcatagagcttaggtagtatgttgtctcttctctatcagtagaaatgggttgtgagtgtgaacatgcttttgctcatgagcattcaaggacttttcatgcgacagtgcttgttgccacctatgcaacgatgttggatattttaagtgatataattgctaaaagaaagctaatgtatttgtgtgaattgggtcgaaaaaaaaaaaaaaaaaggcgtgcgtttttggttggactacatttagtgatgcatgctggtacatattttattattgtattctataactctaatcgtcatttctgatacataggagt

SEQ ID NO: 63139 - DNA, 423 bp, Zea mays
  unsure (1)..(423): unsure at all n locations
  Clone ID: MRT4577_157582C.1
tttttgtttttttgttttttaggagtaatcagataaccatgatcactcggtcatacacccatgagtaccatgacagtggcatcatctctcacacgacgacggcatacctatcaacaagctagagggcaagctccggcagacggattgccgttagacttgagtgattgtttacgacccagaggcaggaccgagagagtagcctcagagaaatcaaccatgcgcacaaagcattgcgcggggatacccacatgaggatacagcggtcgttaacnattcatacatatcacgcagcaggcaagggaggataactttggtgagcgcaccaccacgggcatgagatgccacctaacaggtagcccagagagggagcaccgccagtagcataagtgaacctagtaggaaggacggaacgaagggaagttg

SEQ ID NO: 63140 - DNA, 522 bp, Zea mays
  Clone ID: MRT4577_157583C.1
aatagaacagcaacgctgttgcatcaactaataaccatcatgttccgtgcagaactacaggctcttcactactcagcctaaaacactacaatctctcccctcaccaagacttagtgatgcaccgaatatacttgtccttgggcatgtcgtccctccactgttcaatcgcagtagcaaggagtaaacagccaatatccctgatcactctgacacctgagaataagttgtcatttctccgattattcacgagactcaaccagcacgtatacaggttttccattcaacttgtacaaatccttgaatttcgggagcccaatgacacacgcgcactcgaccacatcggctccagcacgttcggcgacggcgtcgatgcccatcccgcggtaccgctcgacgaacaggtcgacggcgtccttgaacaccctggggcgcagcagcagcgtggtgatgtcgttgaacatgatgccttgcttggggaagtgcggcacgacgcggatggcgtcggaaagccctgcagcgggg

SEQ ID NO: 63141 - DNA, 486 bp, Zea mays
  Clone ID: MRT4577_157584C.1
atggagcagcaagatggaactatcataggggcacaactgaggggaccaataggccgagtttatggggacagaccccaccgggttgtcgtacacgggagcccacgtctttggttgtggccatccctgcacgtacctatcggaagtctggacccatggggaatccagaagggtttccggaggaaggcatgcttcagctccgtagaccggggagcacgggatccctctggggtctgtctagatgtcttcaccggagtaggagcctccggcgaagacatccttcaggtccccctcgggcgactgatacccgaggtcccgctcagccgcggccacctcaccgtcgtccaccttttctttgccaggtcggcggcaaggtggagagccgtctttggaagactactcgcgccgctcactgacgcgtttcgcgaggtcgatgatctcgcgacactccgcggcgctgtggcgaccgttggggtgcacagggcatga

SEQ ID NO: 63142 - DNA, 1021 bp, Zea mays
  Clone ID: MRT4577_157585C.1
gcacgaggctcaccactcaccagtcaccagtctagcaagcaacaacaaaggcgtaggaggaagcttgttttggaccgagcaagcgagccagccgagcgtgggagagagagaaagaggaattaattgatgggcgaggaggccagctgcgacgccgtcagcctgacggaggccggcaccaacgccaagccggtgggcaaggaggtcggccgcgagccggctgcagcccccgccgccgcggccgacccccggctgcagggcatttccgacgccatccgcgtcgtgccgcacttccccaagcaaggcatcatgttcaacgacatcaccacgctgctgctgcgccccagggtgttcaaggacgccgtcgacctgttcgtcgagcggtaccgcgggatgggcatcgacgccgtcgccgggattgaggccaggggcttcgtgttcggcccggcgatcgcgctggctattggcgctaagttcatacctctgcgcaaccaaggaagctcccaggtgaggtgatctccgagaagtacgttctcgagtacgggactgattgcctggagatgcgtgtcggggccatcgagcgatccggcgagcgggtgctggtcatcgacgacctggttgcgaccggagggacactctgtgctgcgatcaggcttctagaacgtgctggagccgatgtggtcgagtgcgcgtgtgtcattgggctcccgaaattcaaggtgtcagagtgatcagggatattggctgtttactccttgctactgcgattgaacagtggagggacgacatggacaaggacaagtatattcggtgcatcactaagtcttggtgaggggagagattgtagtgttttaggctgagtagtgaagagcctgtagttctgcacggaacatgatggttattagttgatgcaacagcgttgctgttctattattgttggttgaattttgttaaaaaaaaaaaaaaaaaaaaaaaaaaaaaaaaaaaaaaaaaaaaaaaaaaaaaaaaaaaagcggacgcgtgg

SEQ ID NO: 63143 - DNA, 448 bp, Zea mays
  Clone ID: MRT4577_157586C.1
tgctcggaattcggctcgagggctctcggaaacattttttattattattattggaaggtgaggtgatctccgagaagtacgttctcgagtacgggactgattgcctggagatgcgtgtcggggccatcgagcgatccggcgagcgggtgctggtcatcgacgacctggttgcgaccggagggacactctgtgctgcgatcaggcttctagaacgtgctggagccgatgtggtcgagtgcgcgtgtgtcattgggctcccgaaattcaaggatttgtacaagttgaatggaaaacctgtatacgtgctggttgagtctcgtgaataatcggagaaatgacaacttattctcaggtgtcagagtgatcagggatattggctgtttactccttgctactgcgattgaacagtggagggacgacatggacaaggacaagtatattcggtgca

SEQ ID NO: 63144 - DNA, 346 bp, Zea mays
  unsure (1)..(346): unsure at all n locations
  Clone ID: MRT4577_157587C.1
aggaaggcgccagccgnagnccacaggcagggcaagggaaggccacngaacaagncncgcgcgggcagaacagcaccgccgcgcccngnacaccgggaanacnggagcngagggcgcaggaacgagcagaagcacggagcaaggccaaggccgagggggagaagcaccangcccggngccgggggaggggggggcacacngacaacgcaggccnaacacgcggaccggcccaaaggcaacccgaccgaaccgacggcaagccgaggacggaaacagagaacggacgaaggacggacacgagagcagagcggaggcagcaagggcgggcagggacaaccggggagag

SEQ ID NO: 63145 - DNA, 188 bp, Zea mays
  unsure (1)..(188): unsure at all n locations
  Clone ID: MRT4577_157588C.1
aacagaacaggagcgacaacaacgncgctnacagtagtaactcggaatcggctcgagcatcgaagtgtccaccatccagataggtgctgcctgactggcacaactgcatccaacaatgacttggcgagtcttattgagtgtacagtctgctttgactatgtgttaccgcccattcttcaatgtcagag

SEQ ID NO: 63146 - DNA, 511 bp, Zea mays
  unsure (1)..(511): unsure at all n locations
  Clone ID: MRT4577_157589C.1
atttctagattcttaaaaaaaaaaaaaaaaaaaaaaaaaaaaaaaaaaaaaaaaaaaaaaaaaaaaaaaaaaaaaaaaaaaaaaaaaaaaaaaaaaaaaaaaaaaaaaaaaaaaaaaaaaaaaaaaaaaaaaaaaaaaaaaatttaaaaaaaattttagaaatttaaaaaaaaaaaaaaaaaaaaaaaaagttttttctttccccgggcggccccctttaaaagggcgatattttttgaattttacaaaaccccattggggcccttttgaacattttttttaaaggccccaattccccctttttaaaaggttttaaaaaaaaaaaccccggcttttccaaacttaggggcttggaaaaacccccgttttccccaattagaccctttaccaaaaaccccccttttaacaattttttaaaaaantaaagagccccaaaagaacccctttccccaatttttccccccccttaatgcgaaagggcccccccccttttaccgccccttaaaacccc

SEQ ID NO: 63147 - DNA, 987 bp, Zea mays
  unsure (1)..(987): unsure at all n locations
  Clone ID: MRT4577_15758C.1
actacaccaaggtcgatcgccagggtctggaggaattcatcacctccatggcgcagatccgcacggcagagtaatgaatcctactcttgtgtaggtaagttacatcacaaatctgctgttttctaaactaaccaaatcatgttcgttcgagatgggggctagaatcgagtcagtcagttgtgtcgagtcttagtgttgcgtccctggatgggatgtcgggtgggccagatgagtaacgccagagttcgcgggcgtctaccatacttaccagccggcattctggtgccaatttaccaccgcattcgagtcggcatctacctcattcggaggagttgcccaagttagtgtttcaggtcggcggtcctgagagagtcggtcgagtcgagtcggtacctatcatcactccgggggtgcagggcatacgcgtcagtccaccgagctgggagctccaagcgtgtggtgcgctggagtaaaccgggcccaccggaagggcgttctatgcccaattgtcttaagagtcagagtcccttataacaaaaaaaaaaaaaaaaaaaaaaaaaaaaaaaaaaaaaaaaaaaaaaaaaaaaaaaaaaagggaaaaaaaaaaaaaaaaaaaaaaaaaagtacctgcccgggcaggtactgcaataggcatttttgtttaagttttgcgaggggaacaaaactgtttctgttagtttcgagcttgagctctcaatgtttactctttacattgaaatgctgccgttgggacatgttttttctgagttctannnnaaaaaaaaaaaaaaaaaaaaaaaaaaaannnnnnnannnnnnnnnnnnnnannnnnncaaaaaaaaaaagggggaaaaaaaaaaaaaaaaaaaaaaaggtccctgggccggaccccccctagggggaaatttggaaaatttccttaaaattgggggccgttggggcttgcttttaagggcccaatttccccttatggggggcggtttaaa

SEQ ID NO: 63148 - DNA, 364 bp, Zea mays
  Clone ID: MRT4577_157590C.1
ttgaaagaacaggaactggggcaacacaagactataacgggctgcaaccgcggcaggcatggggcaccgtacgcactgacaccggtccccaccaccattaccacccgacgcacactttatttagcccacgtgactacgagcccgcaccggacacgttcacgcgacaggaactgctagctacgtaccgggctacgtacgacacacacacacacacacacagagagacgccagtcaccgtagcgtgctgaacaggaaaatcccgtgttatactgccatgtacgcgcgcgagagactaccgcggcacgcgcgcacgccgatcccgtgggggctggggcctgggcgccggcggtgggtgcgcacggcc

SEQ ID NO: 63149 - DNA, 287 bp, Zea mays
  Clone ID: MRT4577_157591C.1
attcggctcgagtaaccggcctttttttcggacctccaaggagccgggggagtgctggatggttaataagctggaccgcggcctgcagcggggccctatgggtcatcaactggcgcacaatcaccacagtagtctgttttaggttcaacctcaatcccacttttaggcgcgccatggtcatggatccatccatcaggtgttgtctagagtgtacgtgtacgatgcgtgtgtatatggggtgctacttcatagcctgtgttggagggattagccttaaggggaggggg

SEQ ID NO: 63150 - DNA, 254 bp, Zea mays
  Clone ID: MRT4577_157592C.1
ggggaggggtttttttttttcaggggttgtcatttttattatttgaggggcccgcaccaaacttaatactgggttaaattttatttcaaaaaaaaccgggtcccttaaaatttttaaaaaaacccattgtttgtggtaacataagaacaggttttacatcttttaattatactattcattactgaacttggcctatggattaaacatcggtacctcctggtttcttacatatttccgcccgttacttcctcgtt

SEQ ID NO: 63151 - DNA, 499 bp, Zea mays
  Clone ID: MRT4577_157593C.1
attgagctcataattcaagcattatatactatacgaaagccttggacaacaagaggcactctgcctattacatttgcggacagcaagaatgaactatccttctatttcaaacagcacacacaatcagcagctgtgcatgacgtaatgccaactgcaagggatccggtgtgacataacaagttcaagccgtcacaccacgtacataaccatacacaacaatcagtgcgtcctagctaaccacacagaggcgaggtcaccattataagcgcctgctgcattatacccctttattatcttttgccgccgaagaaccaacaccccgcggtccctgccagtggttttgattcactctcacccttatcgctctttttatctagcaggctggtatggacatgcatgtgggactcttataagtctccggcactcccattcaaatacccgatacaccttgctgaccatgagcccgtaaattgcggaccgttacctgctaggcgtacca

SEQ ID NO: 63152 - DNA, 2322 bp, Zea mays
  Clone ID: MRT4577_157594C.1
cgattgggtacctcgaggccggccggggtgggcacctgacgccgcgaccccggccccgagctggctttgccggccaatcggctcgcccgcgccgaccaccgcgcctcttcccctcgccgagatcgcctgaaaaggcaagcgaggccagcccgatccccctccccgcccccctcaagaaccaaaaaagggtgtcatttcgtcctaggatcgcagctcgagctcggtcgctctcgctcacctcgctccctactcgcctgctttccacttcctccgcgctcccgatttcctctccgattccttcgccgactcgtttcttcttggcaattcgttgcgcgggccatcgccccgacggcacctgggtacatcagctacaggacgggacaggtccctcttctaggagaggcttcgccagccgcctcccgcccccgtcactacgggcgccgtggagcggagatccatccggacttggatcggtctcgtcgcgtgattacagctcttgttttattgccagtttgagcaatatgggttggctgaccaagttttttagaggctcaacccacaatatctcggaagagcagtatcacagcaggcctgcagaagacacagcatggaatgaaccctctagctctcctgttgtgactgacatcctttcagagtttaacaatgaggatattgaccgtgctatagcgctctctctatcggaagaggagcaaagaaaggaaaaggcaatagataaggatatgcatttggaggaggatgagcaacttgcaagagctatccaggaaagtttgaatgttgagtcaccccctcgcagaaatggcagtgccaatggtggtactatgtatcatccgcctcgcgaaactggcaatgcatatcagccacctcgtgaaaatggcagtgccaatggtggaaatgcatatcacccattaccatttatgttctcatctggattcagagcatgcgcaggatgtcacagagagattggtcacgggcgttttctcagttgcatgggagctgtttggcatccggaatgttttcgttgccatgcatgtagtcaacctatatatgactatgagttctccatgtccgggaatcatccataccataaaacttgctacaaggagcagtttcacccgaaatgtgatgtctgcaagcagttcattcctacaaatatgaatggccttattgaatatagggcacatcctttctgggtacaaaaatactgtccttcacatgaaatggatggtactccgaggtgctgtagttgtgaaagaatggagccaagggaatcaaaatatgtattactggatgatggtcgtaagctctgcctggagtgccttgattccgcagtgatggatacaaacgactgccagcctttgtatcttgaaattcaggaattttacgaaggactgaatatgaaagtggaacagcaggttcctctgcttctggtcgagcgacaagctttgaatgaagccatggaaggagagaaggctggtcaccaccatcttcctgaaacaagaggactatgcttatcagaagaacagactgttagcacgatactgagaccaagaatggctggaaacaaaattatgggaatgataacagagccatataggctgacacggcgatgtgaagtgactgcaattcttattctgtatggtctcccaagattgttgacaggttcaattttagctcatgagatgatgcatgcatggttgcggcttaaaggataccggacactgagcccagacgtagaagagggcatttgccaagttcttgctcacatgtggatcgagtcagagatcatggccggatcaggcagtagtgccgcatcgtcatcctcaggatcttcgtcatccacatcatcgaaaaagggcgggcggtcccagtttgagcacaggcttggggactttttcaagcatcagatcgagacggatacttccatggcctacggagatggtttcagaactgggaatcgagccgttcttcattacggcttgaagcgcacccttgagcatatccggctaactgggacctttccattttgaagtagcatggattcatattttgggaaagcttatattatatacatgattttcttccagagttccattacaaccaaagagataaattgtaaaaaaacattctttccagaatccagagatataatatctatgaaggccaaaatgaagtattaaatgattgagatcgatggtcagtctgcccaatcattttgtattctgatcaaactctggaatgaaacaatggcaatctttttttatatggtgtcagtttcaataaataccagtacgattttacagt

SEQ ID NO: 63153 - DNA, 685 bp, Zea mays
  unsure (1)..(685): unsure at all n locations
  Clone ID: MRT4577_157595C.1
aattcggcacgaggggcgcggagcccatcaagcccctgcggcgccactatgcgcccgacacggctcctcgccgccgcctcctcaacgttccgacggcgccgcctttacactgccgccgcagtctccaccgtggcaccttcttctgcggccccgccaccgcagagcgccgtccagcccctctccacccaattcgctagaccatcccccgcccgtggccacggcgtcgccgatgacctcgcttcctccctccgcgcactcctcgcctcctcgcccaccgtccagcacgccttccatctgctccgttccgctgcgctggatacgcgcctcccgccgaacgagctcgtcgacgccgtcctctccaccgtggacgctggctcgccggccgcggttactctcctcagccacgtcctcacctgcctctcccgcgctgccagcgactgcgcggccgccgcggccgcatactctcgcatggtcacgagggggcgttgtcccggacgccaagtctcgcaccgacctgctagtcaccacggcgcggggcgcgtcggctgcggatgcgctaacgctgttcgacgagatgcggngcaagggatgctacgcggatgcgaagatgtacgacgtcgtgatacgggcctgcgtcaggggagggatgcactgtgatgccgtcaggctggttgatgaaatggct

SEQ ID NO: 63154 - DNA, 585 bp, Zea mays
  Clone ID: MRT4577_157596C.1
tcggcattgttggcatctgacttttagtagatctatttaaagttgtggtccaggttgactttctctgaatgtaattctttgacaatataggtcttaaatctttggcacatgacatgattttcccttctggtcctgaccaataacatcgtatcctttggaaagtttaacatagttcactaacatttttactttatgcagttgcacactgaatgacttaatcaatactgaaaaaactgctacaatatgcaggtcaacaaatttggattcatggactccagaacaactgaaaatgatggtctatggcggaaataaccgtgcgcaagctttctttaagcagcatggttggacagatggtggaaaaattgaagcaaagtatacttcaagagctgctgacttgtaccgacagttgcttgctaaagacgttgctaaaagctctacagaagatggaaacaatagttggccatcttcccagttgcagcatcccaggctccaaatcaagctgctgcatttccagatctcaagctgacagaggtgtcaaaagaaaatgtaagtgaaaagaaagattctgagattgttcgttcgcct

SEQ ID NO: 63155 - DNA, 686 bp, Zea mays
  unsure (1)..(686): unsure at all n locations
  Clone ID: MRT4577_157597C.1
aattcggcacgaggcttgcatgcatgcatccaatgcaagctagaggctgagatttgatcgagagctcggacattaattatcctgcagctggatcaactactggtgtcatggcggcgcacccacatccacatggttcccggaagcagcagccttctccttccaacaagcaggatcaggaggacacgagggtggcaaagatcgcggaggtactaagcgtgttggagcccgttcgggcgagtatctctcaacagctgggtgctggtgctgccggccgtcgctgcgtcgtcgctgcaggttacactagacggcgctgcttggccttcatggagacggagctgagcatcattgcggagtttctcaagacacttagccagcaacatctggatgccgacacgaggagatggatggagcactatgagcttgtcttcagtaaactcgacagcgtcatccaagaagttgatccctcacgccgcacgctgctacgaacgcgattgagaagtgccacgcagtgcatcctaagccgcacaatagatcgtatccgttctctcctaacatanaacagctttactatcgcagcgaacatccctgcaggtttaagcatcttcttcaagctaatagtcgtcctgaggccgacatcgggcttgcaccaccccaactggtggtggcagtgggactggcaccaactt

SEQ ID NO: 63156 - DNA, 510 bp, Zea mays
  unsure (1)..(510): unsure at all n locations
  Clone ID: MRT4577_157598C.1
cccgcggcgccgtccgtgtcgccttttttttttttttttttagggnaaaacccacggtaaatcatatggacaaaacggcgaacaacatgggacgctggaggagacgctgctgctgtctgtccgccgcactgaggggcgcactaacgcatccacaagctagggcgcaggggagggcgcgtcaccaactgggcccccaagtgggtgatccaggacatgaaccactacacgcaccccagcgtggaccccaacaaggtggaggccaaggtctggggcaactactggccccacgacggccccttcggcaccaggggccagaacaggctccagaacatcgccatgaccaggatcaaggcgctgaagaaggcccccgacatgaacaacatcgagggccagacccggcgagtcacgcccgaggtgatccccaccatgatcgaggccgccatggaggacggcgccattaagagggcccccaggatgggccccacgatgggcgccatgaagaacgccggc

SEQ ID NO: 63157 - DNA, 1725 bp, Zea mays
  Clone ID: MRT4577_157599C.1
cattgggtacctcgaggccggaattcggcacgaggggaggcggagggcagaggcagcaccgtcccgtccacctgaccacctccaccattttttcctcttcctcctcgcctccaccccttcccttccatctcttctcacctggccactcctctccctctctcccgcgccgatcgattggcccacccatcgatcgagcacgggaagaagattccagtccggagaggtctcaattcgatcgggctcgttctggtgtgggtgggcaccatggcggccacagaggcctcggcagacaagaacgccgtcttccgcaagcttcgcaccaaatcagacaacaagatgtgcttcgattgtaacgccaagaacccgacgtgggcgtccgtcacctacggtgtcttcctctgcatcgactgctcggcggtgcaccgcagcctcggcgtccacgtctccttcgtcaggtcaacaaatttggattcatggactccagaacagctgaaaatgatggtctatggaggaaacaaccgtgcacaagctttctttaagcagcatggttggacagatggtggaaaaattgaagcaaagtatacttcaagagcagctgacttgtaccggcagttgcttgctaaagaggtcgctaaaagcgccactgaagatggcaacaatagttggccatcttcaccagttgcagcttcccaggcttcggatcaaactgctgcgtttccagatcttaagctgacagaggtatcaaaagaaaatgtaagtgaaaaggaagactctgagattgttcgttcgcctagagttccaacccgttctatcaagaagccgattggtgctaaaaagcctggaaataagaccggcggacttggtgcacggaagccccccgcgtccccaaatgaaagcctgtatgagcagaagcccgaagaaacagctcctgtcctgccatcatcggtgattgcaagtactacagctaggagcaaaccccatacttcccgatttgagtatgtagaaaatgcacctgctcctaagactgggagcagctcagaaggcaatctcatgagtggacatgttgcacccccaaagtcatcgaacttctttgttgaatttgggatggacagtggatatcacaaaaaatctacatccagttcatccaaagtgcagattgaggaaagcagtgaagcaagacagaaattctcgaatgcaaaatcaatttcatcctctcagttttttggtgatcaggccagtttcgaaaaggacactcaagtctctctccaaaagttttctggttcctctgccatatcaagtgctgatctatttggccatccagcaaacaattctagcgtggatctcagtgcttcagatttgatcaacagaatatcattccaggccactcaagatctgtcttctctcaagaacatggcaggggaaactgggaaaaggttgacatcgatggcatccaacatcatcactgatcttcaggaccgcatcctctaagcttaagttacagcaaagtaaacttttacgttgcttcagtggctggtcccgtcaaccgggtgacaaactggcctgccccgcagatctgtctaggagttcgagttcgtaggcgtctgaaaacttcctggcatatctgtctaggagttcggaagcatctgaaaaaagtgtaagctatttccttaatatgaaagcaggaaggattgccgctctcacgttagtccacgtcggcaaaaaaaa

SEQ ID NO: 63158 - DNA, 192 bp, Zea mays
  unsure (1)..(192): unsure at all n locations
  Clone ID: MRT4577_15759C.1
gcccantcaatggctgaatcccgttcacacctctcgtccttcaagcggctgcccantcaatggctgaatcccgttcacacctctcgtccttcaagcggcttattccgtccggtgacgtanctctgtccgaagttgttccaccttggcctccaagtctccaattgggtcattgctgccgctactactcccttc

SEQ ID NO: 63159 - DNA, 977 bp, Zea mays
  Clone ID: MRT4577_1575C.1
tcgaggccggccgggagtgtccgcagcagcggtggtggcgagacgagaggccgctaaaacccaagcgcggcccgagccgaacctgaacctgaggtggagagatcgcacgcgccctctgccgcttgttcgttcctcgcgctcgccaccaggcaccaccacacacatcccaatctcgcgagggcgccgcagcagcggcaggttcgtcgccgtcgcctccatgacgtccgccgtctccaccaaggtcgagaataagaagccatttgctcctccaagggaggtacatgtccaggttacacattcaatgccacctcacaagattgaaattttcaagtcgcttgatgattgggctagagataatatcttgacgcatctcaagccagtcgagaagtgttggcagccacaggatttcctcccggacccagcatctgaaggatttcatgatgaagttaaggagctcagagaacgtgccaaggaaatccctgatgattattttgtttgtttggtgggagacatgattaccgaggaagctctaccaacataccagactatgcttaacaccctcgacggtgtcagagatgagacaggtgcaagccccactgcctgggctgtttggacgagggcatggactgctgaggagaacaggcatggtgatctgctcaacaagtatatgtacctcactgggagggtggatatgaggcagattgagaagacaattcagtatcttattggctctggaatggatcctaggactgagaataatccttatcttggtttcatctacacctccttccaagagcgggcgaccttcatctcacacgggaacactgctcgtcacgccgaggactttggcgacttaaagcttgcacaaatctgcggcatcatcgcctcagatgagaagcgacatgaaactgcgtacaccaagatcgtggagaagctgtttgagatcgacctggatggtaccgtggtcgctctggctg

SEQ ID NO: 63160 - DNA, 319 bp, Zea mays
  Clone ID: MRT4577_157600C.1
atattgccggatcgacgcgctcacttgtctgcggccggccttcttgatccttgatacaagaaaaaagttatagagtattacattgatagaaatttcacgaagatggcccccatgtgggaccagaaacaattgttgtgagtaagagggctatatcgtaactattgtagctctacggctgcaccagttaagagtacattagcggccccagcttatagtgcataagatattgtggtggcccgtgtctttgatgaactggacagtattttggatggtacaaatgaacctacggtagttcgattcaatgagcttgaaaagaaca

SEQ ID NO: 63161 - DNA, 2582 bp, Zea mays
  Clone ID: MRT4577_157601C.1
cccgatttgagtatgtagaaaatgccctgctccctaagactgggagcagcttagaaggcaatctcatgagtgcagaggtggagaacgaggcacaagcgtggtttttttctatgttaagcgtacaagctttttttttttttttttttgttttttttttttacccgcccgggcgggccaacgggggggttaaatattggggtcttgacatgattttcccttctggacctgaccaaaaaaaaaaggataactttggaaagattaacatagttcactaacattgttactttatgcagttgcacactgaatgacttaatcaatactgaaaaaactgatacaatctcgaggccggccgggtgtcccctcgaggccggccggggacaacgcacgcaaaggctgatgcgtatcaacgtatgcggatgcaggggcagcaccgtccacctccaccatctttcctcttcctcctcgcctccaccccttcccttccatctcctcccacccggcgactcctcttcctctctgccgcgccgatcgattggcccacccatcgatcgagcacggggaagaagattccagtccggagtggtttcaattcggtcgggttcgttgcccgtgtgggtgggcgctatggcggcgatggatgcctcggcagataagaacgccgtcttccgcaagcttcgcgccaaatcggacaacaagatgtgcttcgattgcaacgccaagaacccgacgtgggcgtccgtcacctacggcgtcttcctctgcatcgactgctcggcggcgcaccgcagcctcggcgtccacgtctccttcgtcaggtcaacaaatttggattcatggactccagaacaactgaaaatgatggtctatggcggaaataaccgtgcgcaagctttctttaagcagcatggttggacagatggtggaaaaattgaagcaaagtatacttcaagagctgctgacttgtaccgacagttgcttgctaaagacgttgctaaaagctctacagaagatggaaacaatagttggccatcttccccagttgcagcatcccaggctccaaatcaagctgctgcatttccagatctcaagctgacagaggtgtcaaaagaaaatgtaagtgaaaagaaagattctgagattgttcgttcgcctagagctccaacccattctttcaagaagccgattggtgctaaaaagcctggaaataagactggtggacttggtgcacggaagcttacatcaaagccaaatgaaagcctctatgagcagaagcccgaggaaccagctcccgtcctgccatcatcggtgattgagagtactacaactaggagcaaatcacatacttcccgatttgattacgttgaaaatgcacctgctcttaagaatgggaatagctcagaaggcaaccacatgagtggacatgttgcacccccaatgtcgtcaaacttctttgctgaatttgggatggacagtggatatcagaaaaaatctacgtccagttcatccaaagtgcagattgaggaaagcagggaagcaagacagaaattctcaaatgcgaaatcaatttcttcctctcagttttttggtgatcaggccagttttgaaaaggacgctcaagtctctctccaaaagttttctggttcctctgcgatatcaagtgctgacctatttggccatccggcaaacaattctagcgtggatctcagtgcttcagatttgatcaacagaatctcgttccaggccactcaggatctgtcttctctcaagaacatggcaggggaaaccgggaaaaagttgacatcgatggcatccaacatcatcactgatcttcaggaccgcatcctctgagctttaaactcacagtaaacttctgcgttgtttcagtggctggcttctcccgtcgacccgggtgacaaactggcctggcctggcctgcagatctgtctaggagttcgtaggcgtctgagaacttcctggcaatctggcatatctgtctaggagttcggaagcatctgaaaagtggcatatctgcctaggagttcgggagcagctaaaatcttgaagttagagagagagagagagaaagagagagagagggtgaaagaagagaacttatgaccaatactgtaattggctaaagtcatgtatgcttctagagctgtaacgcaaatgtcttttgccattggttttatctcgggtttgagatatatacttttgctttgtaatgatacatacatgttttctaattatgcgtagatatttcttgccccaaaaaaaaaaaaaaaagagccaaaaaaaaactcgagacctgttttattcagccatatatgattaatcctcattcatcaatatgtgaactccattgagcaagtatattgtaaagtcagaactaaaaagaggcacatttggttcccccatttccccttattttgtactaagggcaagtatttagagattgacacagacactagttcttttggtagtgttcagtccccctgttagggcatcaaaatctgtggccacatgctacgaataattagtttgttattataaaaaacaatgatgtgcccatgttgaaccct

SEQ ID NO: 63162 - DNA, 182 bp, Zea mays
  Clone ID: MRT4577_157602C.1
agtttggacatggaaatacacggcaggggcgggtgatccctgagggcgcaggtgatgctttgtttggtcacttatgggtacgttcgaattccaaatttgattgcatgccgtgggcttgtatctccaaactaaaataataggttggacgccctctacttagctcgacaaaacaagaattaatt

SEQ ID NO: 63163 - DNA, 244 bp, Zea mays
  Clone ID: MRT4577_157604C.1
ggcacatcatatagtcgtgaacctgtgtgtgatgaatggaagagtactgtaccggaaacacttgaaaagagtgggagcacacgttataactgcagctagcagtgataacacacaaccatccattattgaataagaaaagaataacctggctgtaagcccttggcgcacaggttgcagatcctttgacgactatactgatagtacctattgtagatgatgctgaacaccttgatcatactacgac

SEQ ID NO: 63164 - DNA, 404 bp, Zea mays
  Clone ID: MRT4577_157605C.1
cgcccatcaacctgacggaccgcctccaccaggtgctgcgctgggcgaccgggtcggtggagatattcttctcgcggaacaacgcgttcctggcgtcgcggaggctcatgttcttgcagcgggtggcctacctcaatgtcggcatctaccccttcacctccatcttcctgctggtctactgcttcatcccggcgctgtccctcttctcgggcttcttcatcgtgcagacgctcaatgtcgccttcctctgctacttgctgactatcaccgtcaccctcatcgcgctcggcgtgctcgaggtcaagtggtccggcatcgagctcgaggactggtggcgcaacgagcagttctggctcatctcgggaacaagcgcgcacctgtacgcggtggtgcatggtctgctc

SEQ ID NO: 63165 - DNA, 434 bp, Zea mays
  Clone ID: MRT4577_157606C.1
ctgtcgtcctttttttttttttactttatttttggtgtgtttggccattccaagcttgttgattagcaaactacaggcgttacatgaaaataaatgttccaacgatgttattcacacagtaatgcaacagacattgcacccaattgtgcgttataccgcaaaatttcagacatttaagtccccctatatattgaaaccattactcttgcaaatgccacaaacagaagttaaaaggtgcccagctatgcctgggtagcattttttattgttgcagcaaaaaaggatacatttcccgtttgcgaggtcgatttaagttcctattttccagcttggtgacagaaaaaccagaaatcacttccatgctttaaggggaccacccctcccacatgccttgatgatagcttggttactgttgcgcgcaatggactttttgg

SEQ ID NO: 63166 - DNA, 140 bp, Zea mays
  Clone ID: MRT4577_157607C.1
gctcccggtccttcacgccgtctggcagagcgcccgatctactgcgggctgaggttgggccggaccgcaacgaagggcgggcggcgtaggccaggcaacacgcctgctgcaccaacttgagcggttccatgggcgccatg

SEQ ID NO: 63167 - DNA, 307 bp, Zea mays
  unsure (1)..(307): unsure at all n locations
  Clone ID: MRT4577_157608C.1
ctagttctaaatcgcgagcggccgggcttttttttttttttttttttttcncgngcctgctacgtcctngctcttctgtggtgtcgcctatcttcagttctctggccgtcgttttccgtcgtcgcggctggggnnnccctggcgttgcccttctttttcgccttgctgctcttggggggggggggggctgtctcttttgcgttgtggtccgcgccgcttgccgttcgcgtctttttctcttcctggctgccctntgggtcctgccctgtnggggcgccttctcccccgcggttttttttgccccgcg

SEQ ID NO: 63168 - DNA, 1905 bp, Zea mays
  Clone ID: MRT4577_157609C.1
ggccgggagaattcacatcgaacccaccaccgaaagctgctgcaattaccggtcgggccactctcgctgctttttcccggcctccctcactcacccgaattcgaaaaaccaatctgatacgcgtgctgcagatttccaccccaagggagtgtggcagctctcccacagatcctacccaaaccacaatctcgccgcggtctccaatgggagccgagccggtggacttctcgccgccgccgccgccggagccgacgctttcgccggagccggagatctccggcaaggacagaggagggaactggaaggcggacatgatgtcagctctcggggagtcggtttccttcggccgcttcctctcggagccgctcgaatgggggaagaggtccgccttcgcgcacaaccgctacctcgaggaggcggcggtgcaggcgcgcccgggctcagtcgcgcagaagaaggcattcttcgaggcgcactacgctaggaagaagcgcaagagcgaggaccacgccgccgccgccagtgatgatgttgcaggcggtgatggcgagctcgaggcggcagaggatggtggtgccgcgtcgtggtcgttgtctgctactgagtcttcctgcatgacggatgaaccaccggcaccagcagaggaagtgtgctgcggttgggaggaggacagagtggtggattgtggtggcagcgccagcgacaagccagtacacgtgccggaggagctcgcggacatcaccgatgccgttgggccctgttgcaggatggatgcgcccacggatgagacacagcacatggagggcggcgacgaagtggttggagcagttttgcccttgcagaagcaggatttgtgcatggatagtttgacggctgttgatgccactttgaagggaatctctattttgaatcaggatatcacagattctgtgtcgagaaggcgtccgccgatcgtccgcctgcttccaaagccggcaaagctcagctctccccccacagcaaagaaagggcagaattcctcagctaaaagaaggtcaatgcggcattctgcaaaggagaataactcacctcctagtgcaggcagtaacaagctaagaacaacttcgacccccaaaaagaggtcaacgctgtcagccttgcatatgtctatgagtttcccgagatgtgaatctggcaatacttccatggcgtcaagaaatcttggtaccacaatcgctgctaggattagcgagttggaacatgcaaatgcaaccaagcctgcagaaaaaaacactaagcctcatgatttgaggctaccaagaaagaaattttccagcgctttaccagaaattgctccaaggacatctcaagtcgatgaagaaagatcatcacatataatgaaaatcaaagaaaagctatttggttcaacatttccaacactgcatcagaaatatggtataaccaaagaaaaagagagaaagatcaacaatgaacatgggtttaaagaatcacgacatagcttttgcttcaaagccacgctgttgccaaatttctatcgaagcaataaacaaccaaaggatacaagtcatcaggctactcaagaaatcctaagttcttcgaagtctggccatctatcaagggatattaatcaagcacaccaaacgggtaaagatgcacaaacgagtaaagatgcatctgatgccaaacaaatatgttgtttcccccttagaaagatgtattagatctattttatttagtgtttccattatatattagcctattcttttcattcatattcagtgacctatttgggacacctaatatgtagcaaggttatcttttaagccagcttggaggataacattctcaatccatccaatctcatggcaaaaaaaaaaaaaaaaaaaaaactcgagggggggcccg

SEQ ID NO: 63169 - DNA, 660 bp, Zea mays
  Clone ID: MRT4577_15760C.1
tgaagatccagccggcacaccatcggcgaagaagaggccggagagaggatgatactggccgtgctcttcgccaactccgatggaaacatccttgtcgagcgattccatggggttcccgcggaggagaggctccactggcgctccttcctggtgaagctcgggtccgagaacctcaaagggtccaagaacgaggagctccacgttgcctcccacaagtctgtgtctattgtttataccacggtcggggatgtctgcctctacattgttggcaaggatgaatatgatgagcttgcttcagtcaaggatgtttgtgcgaaacctcctaccgagcgcctcttccttgacaaatacgggaggatctgcttgtgccttgatgagattgtttggaaggggttgcttgaaaacacggagaaagacagagtgaggaggttgattagactaaagccccctgtggagccataatttgcatgtaaagcttatgttggcgttgctgtaatccaaatccaatcccatttgcatttgtaggcaaattttcagagttttcatctgcactttgtatctacagaattatcatcacttattggaggattgcgtgtgtgacatcaaaaacaatgtatcatctgtgtatttgctatgttgataagtgtgttactgcgttgt

SEQ ID NO: 63170 - DNA, 230 bp, Zea mays
  Clone ID: MRT4577_157610C.1
cttaactttttcgcctcacatcggaagcaacagtggcggttggggtaccgacaaaaaaaaatacattgggtacctatctacctcaacacacgtggccaatgcagcttctctacaaggacaaagtgaactgtatccactccctcacctgaccatagattctcaacccgaaattcctccagaccatcataaacatcctgtaaacatgccgcgcccatgagctggtgccaaat

SEQ ID NO: 63171 - DNA, 813 bp, Zea mays
  Clone ID: MRT4577_157611C.1
gcttattagaacccggcctcgctgcctccacaggcagccgccagtgctcaactgcggcagctaaaactcgattttatccccggaaaatagatcgcctctagtcagcggcgccgccgccgcttcgcttctcggcttgctcggctggtttctctgtaaaaatggtcaatgcacagatggtgagtgggtacttggacaattcgttcaatgcactcatggtttccggtggcggtgagagtggacagacacagaatggtggcacggacaccaccttgtcaggttggaaggacctccccatggagcttctgctgaggatcatatcagtagctggagatgacaggatggccattgtagcctccggcgtttgtaccgggtggcgtgatgcactaggatggggagccacgagtctctccttctcgtggtgccaggaccacatgaatgagttggtgatatcactggcccacaaatttacaaagcttcaagtcctttctctaaggcaaatcaagcctcagcttgaagacagtgcagtggaggctgtagcaaattcttgtcatgatttgcgcgagttggatctgagcagaagcttcaggcttagtgatcggtccttgtatgctctggcacatgggtgccctcaccttacaaggctgaacatcagtggatgttccaatttcagtgatgctgctttgatctacctcactagtcagtgcaagaacttgaaatgcttgaattctgtgcggggtgtgtgcgggcagcatccgacagagcattgcaggccatagcccgcaactgtagtcagctgcaacttttgaaccttgg

SEQ ID NO: 63172 - DNA, 871 bp, Zea mays
  Clone ID: MRT4577_157612C.1
atctataagaggagcctccgtgcccgtccgcgtcctcttcgttactccctctctcttgaccgccgccgccgccgccacgccaaaatccggcgtcaactgatcggcggcagccatgagtaagctccaaagtgacgctgtcaaggatgctatcacccagattgttggggaggccagagaaaagaagcgcaagttcactgagactgtggagcttcagatcggtctcaaaaactatgacccacaaaaggacaaacgtttcagcggctcagtgaagctgccccatatcccccgcccaaagatgagggtgtgcatgcttggtgatgcccagcatgtcgaccaggctgagaaaatgggacttgactacatggatgttgaaagtctcaagaagatgaacaagaacaagaagcttgttaagaagctagccaagaagtaccatgctttcttggcatcagaggccataatcaagcagatccctcgtctccttggccctggtcttaacaaggcaggcaagtttcccactctggttagtcaccaggaatctcttgaagccaaggtcaacgagacaaaagctacagtcaagttccagctaaagaaggttctttgcatgggtgttgctgtaggcaacttgtcgatggacgagaagcagatccaacaaaacatccaaatgagcgtcaacttccttgtgtccctcctgaagaagaattggcagaatgtgaggtgcctgtacgtgaagagcaccatggggaagcgtgtacgtgtgttctaagtgtgtgcgctccagtgaagttgataagatactgggctgtcctgccgacccctgcttgtctttggattagatctgtttcactgataccaattttctgtttgcctagcg

SEQ ID NO: 63173 - DNA, 400 bp, Zea mays
  unsure (1)..(400): unsure at all n locations
  Clone ID: MRT4577_157613C.1
ggaggggaaaacacatgcactgggcncggggcaataccaacacgcgggacgggcacccacccacacgacgccgcgccgtaacacacacaacgacgcgcccgaggccactgcgacccgggcggcggccgcggccgacgaacaggcggcagacaaggcggcgggggaggagacgcctgccgcggccgacaggagcccaccaaggcgaatgcggcgggcgccccagaggcgggcgagagcgagcccgaacacaaggaggaggaagccgaggagaagacccccggcgaggaggagaagccggccgcaggcgccaaggcagaggggaaggacgccagcgccgcggagaccacgacgacggggggggcaaagaacaaggacccccaggaggccacgaaggaaaagc

SEQ ID NO: 63174 - DNA, 1116 bp, Zea mays
  Clone ID: MRT4577_157614C.1
cgttaattctccgctctcctttattcctttccgttccgccgctccttcccactcccacaccaaggcaatccctctccgacatccaatccaatacaatcacgcctgcgcacacgcaaccccagctcaagccccaagtccaaaccctaacccggcggcggaagatatggccgttcgttcccctctgttccgcgctgcccaactctgagcgatggaaggcaccgtgctgtgcgcggccaaccacgcgccgctcacgcccatcagcttcctcgagcgcaccgcgctcgtctaccccgactgccccgccgtcgtcgccgccggacacgccgccgcgccgccgccgcgcacctggcggcagacccgggaccgctgcctccgcctcgccgccgcgctcgcggggctcggcgtcgcgcgccgtgacgtggttgcggtgttcgcgcagaacatcccggccttctgcgagctccacttcggcattcccatggcgggcgccgtgatctgcgcgctcaactcgcggctcgacgccggcatggcgtccgtgctgctgcaacactcggaggccaaggtcgtgttcgtggacgccgcgctactgggcgtcgcccgggaagcgctccgcttcatctcccagcaggccggcggagcgagcagggtaccccccgtggtgctaatcaacgaggcgctcgacgagccgccgccagcggcgacaggaaacgacaagatcccaggcgtcgatcggtgctacgagtacgaggccctcctcagcaacagcagaggcggcgatccagagttcttgatccggtgaccggacgacgagaacgagccgatcgcgctggatccgcgtgcagggggcggtgaatcgcggggaggggcgctggatctgcgggcggtgaatcgtgaggtggggggggttggatccgcgggcggacggtgaatcgcgtgcgggctgacgtgagcgctgagcgggattcgcggcgtggacgttgaggcgggggcagtctacactttactcttaatagttagtagagatttggggttctctctgtacatttactctctcatctctctgtaatgggctagctctaacaccaaggctattaatatattgctccatcctatttt

SEQ ID NO: 63175 - DNA, 443 bp, Zea mays
  unsure (1)..(443): unsure at all n locations
  Clone ID: MRT4577_157615C.1
gcgaccttacctgctggggggggggggggctctctgattgtgtgtggcggcgcccttcaccgcggtgctcaagtgcgccgcggaggagttcanggtcccgccccagaccagtgccatcatcaccaacgatggaatttttttcaacccccancaaanngcatgtgggggtgtggggggagtctttttcngagctgcgtctcatccctcgcgatggagttggagctgtngtcatgtcttccggttngaggctctctcctgtccaatgcttactgagcaaaacttgcgagaaataaagctttgctgttggccttgcttggctgtgggctgttgtgtccggggtgttttgcgacccttaccgtgcctggtctccggtgtctgctctctgtttgcttgtggggcggtttctgggcgtgggtcctgcgtctgggtcggctcgttttgcc

SEQ ID NO: 63176 - DNA, 647 bp, Zea mays
  unsure (1)..(647): unsure at all n locations
  Clone ID: MRT4577_157616C.1
aatatatccaaagatctggccttgaataggatgcatggaaaacagcttattctcaagtgtctgaacttgatttgtggcttctgttgtttttcaactctagcccgcccaacttgtttgggaccaaaaaaactttgtttgttgttgtattatgtatgctggtgcatccatacaatggtctgccaaatccttgatcatatgcatacactgataagcgtatatatgatccaggtctctagttgtcttgtggcatggttttccttcatggcctttattgtagttacaaactcacttacaggtgcatctccttgtgatgttttgctattcctgcagccagagcagctgactaagatcttcgagctttgtggtacccctgatgacacaatctggcctggtgtcacaaaaatgccttggtacaacaacttcaagcctccccggccattaaagagacgagttaaagatttctttaagcattttgatcgacatgcactggatctgttagagaagatgttgactttagatccatcacaggtatgctacattgcgtgaattttactgaaagtttaatttgtttagtcatttaaatggttagttcctatttcgtacttttntttggctgctgtgtgttggccacacctgtcatttgggtc

SEQ ID NO: 63177 - DNA, 526 bp, Zea mays
  Clone ID: MRT4577_157617C.1
cccaactctgagcgatggaaggcaccgtgctgtgcgcggccaaccacgcgccgctcacgcccatcagcttcctcgagcgcaccgcgctcgtctaccccgactgcccagccatcgtcgctgccggacacgccgccgcgccgccgccccgcacctggcggcagacccgggaccactgcctccgcctcgccgccgcgctcgcggggctcggcgtcgcgcgccgtgacgtgtaccgaatcgaatcaaacttgccggccggtcctcaaccgaagccgttgctgcccccgtgtaggttgcggtgttcgcgcagaacatcccggccttctgcgagctccacttcggcattcccatggcgggcgccgtgatctgcgcgctcaactcgcggctcgacgccggcatggcgtccgtgctgctgcaacactcggaggccaaggtcgtgttcgtggacgccgcgctactgggcgtcgcccgggaagcgctccgcttcatctcccagcaggccggcggagcgagcagggtacccgccgtg

SEQ ID NO: 63178 - DNA, 295 bp, Zea mays
  Clone ID: MRT4577_157618C.1
aaaaaaaaaccaatggtggataacaccctgatttgacataggcactgtgccataaaagggtagttcttggttttatgcgcacttatttttggggggggggggttgattttttggaacaggaggagtggctggggtggtcaatgatgttaattacccagtttttaccttaccatggttggatacactttttttctttatttgggggtggccatggttggtaatttattattacggggttacagaagtgttgtgtgtggaaaaagatggagtgatttttttttgttttttgtgggtt

SEQ ID NO: 63179 - DNA, 757 bp, Zea mays
  unsure (1)..(757): unsure at all n locations
  Clone ID: MRT4577_157619C.1
ttgggtacctcgaagccggccgggaacactttcctacccccggctcagccgccatgggtcgcaacaacccgccggaatgcgcgcgttccagccaggcacaacaacggcctcccaaccaccccgcatcgagctcgggcctacatgacccatgccaccggcccaccgcaaccctgagcccttgattcgggcggatcgaagttagcctcagccttgcacgcggaaaggggcgtgaacggagaaattgggggcaggcgccgcagtcgattgcgcccgtacaccatcggagggtccatgggccgtgtccgggagcttccttaagccaccgcgggggtgctcgtctcatctcgggcgtgtgcgacggtcggcgagcagcaatttctcgccgaactttgacttcgccgcacaactacgtatcgtcgtggattacgccgataccgtctagctccccgatgaacaagtgaccgaggacccaggtgttcagtaggtggaaattgcggagcaggagctcattgaaggtgaagagcaggtagtccaggaggaggtctacaacgatgagtatgagctaatctaggtggcatctcccagtcagcttgatggcgccaagaaataattattagttcattttattgttatcatttatttttgtaagatacttctgctatgtaataatatttgtgacatttgtctctatacactntgtcattaatatgtgttgttatctttggcacacatatgagaagcacctgactttaccccg

SEQ ID NO: 63180 - DNA, 1021 bp, Zea mays
  Clone ID: MRT4577_15761C.1
gggcgaatgggatcctcgaggccggccgggccggggacctctccttcttctattcatttcgccgagaggcgagagaactgcttcgcacctacgttactgctgaagatccagccggcacaccatcggcgaagaagaggccggagagaggatgatactggccgtgctcttcgccaactccgatggaaacatccttgtcgagcgattccatggggttcccgcggaggagaggctccactggcgctccttcctggtgaagctcggatccgagaacctcaaagggtccaagaacgaggagctccacgttgcctcccacaagtctgtgtctattgtttataccacggtcggggatgtctgcctctacattgttggcaaggatgaatatgatgagcttgctttggctgaggtgatctttgcaattacatcagcagtcaaggatgtttgtgcgaaacctcctaccgagcgcctcttccttgacaaatacgggaggatctgcttgtgccttgatgagattgtttggaaggggttgcttgaaaacacggagaaagacagagtgaggaggttgattagactaaagccccctgtggagccataatttgcatgtaaagcttatgttggcgttgctgtaatccaaatccaatcccatttgcatttgtaggcaaattttcagagttttcatctgcactttgtatctacagaattatcatcacttattggaggattgcgtgtgtgacatcaaaaacaatgtatcatctgtgtatttgctatgttgataagtgtgttactgcgttgttggcaaggatgaatatgatgagcttgctttggctgaggtgatctttgcaattacatcagcagtcaaggatgtttgtgcgaaacctcctaccgagcgcctcttccttgacaaatacgggaggatctgcttgtgccttgatgagattgtttggaaggggttgcttgaaaacacggagaaagacagagtgaggaggttgattagactaaagccccctgtggagccataatttgc

SEQ ID NO: 63181 - DNA, 570 bp, Zea mays
  Clone ID: MRT4577_157620C.1
aggccggccgggccgggacagccatttggaggcatatcttgcttggattcccagaattcttcttcattaattcctttatcaaattgcagttgcaattgccgaaactttatttgttactgttaaatactgtgtgtcgtttatttataaccatgcacaaactaactaaagcgaccatgatcaggtggaccggcggtaccggcgataccgcgagcagatgaggtcagtggaggtgtcgttcgaggcggtggccggagccggcgcgtcgcaggtgtacacgcggctggcgctgcgggccatgtcgcggcacttccggtacctgcgggatgcgctggtggcgcaggtgcgcgctctgcggaaggccatgggggagagggacggcggcccagctggtgcggcggcgggcgccaccaagggcgacacgcccaggctcaaggtgttggaccagtgcctgcggcagcagcgggcgttccagcacccgggcaccatcgacaactacccgtggcggccccagcgcggcctgccggagcgcgccgtcgccgtcctccgagcctggctcttcgaacacttcct

SEQ ID NO: 63182 - DNA, 166 bp, Zea mays
  Clone ID: MRT4577_157621C.1
ctcctcgacatgcacacaaacacgccatcacgattcccattctctgcactgcaattcctcacagactgaccgaatcctaaccgtggctatgacgacgaatcaactgatgcgggtgcgcacgctgggctgcggcgcatcgggcgtcgtatgtagtggctggccttcg

SEQ ID NO: 63183 - DNA, 253 bp, Zea mays
  Clone ID: MRT4577_157622C.1
actaacacaaaaacatcgaagttccaacacatgctaattgaattgacagcataaccagatcatcagaatgatggcaaatcatgccttatacatcaccaaaggaaacctccattgttgcataacacaactttcacgggtaaactattggccggatcaaaacaaaaccctcagaaaaatacatggtcgtgcaacaccgaaccccgcactggttaacaattaagggtgcctataacattcctcgaagcgggggtct

SEQ ID NO: 63184 - DNA, 161 bp, Zea mays
  Clone ID: MRT4577_157623C.1
gtgaatgttttcgggtcacccacctcctccgggggggcgcctatgcggatggggcggttctaaaaagaggttgtgttttagcttatcctcgtagacgcctaccttgttaccaagcgcatgccccatcaccttaaggtaaagcacggaacgacgagcttgct

SEQ ID NO: 63185 - DNA, 411 bp, Zea mays
  Clone ID: MRT4577_157624C.1
cgcaggcgtcggcgcagtcggcgacagggtctacggacacgggaccgggaccgaaacggcggcggggaacggcggcagtcacgccgaggctggcgtccacgattgcttccagcactcgtccaagcgctcctcgatccgctccatgctgcacgacgaatgcgtcgaaggcatcctctacgggctcaaacatgcgacgatgcatttcatgatgcagctgctgaagaatcccatgtacattgtgtggcccctcctgatgccggccgtgatctgctcctccacctgctgctacgctagccagtacggtatacaagtttgcttgcatcacatgagctgtcacgatgacatgactgatgagatgactcatgaactgatacatgctcatgatgactgtgatgacgaatatcttgactg

SEQ ID NO: 63186 - DNA, 542 bp, Zea mays
  Clone ID: MRT4577_157625C.1
gggagggaaacttcaacattttatccaggttctacaaaaaaaaactgggtggaccagggacccccatacataaggccatttagctgggggccgggcccaaaaaacagcagcttaaagttgcccacgtcccgtccttaaaaagattaacctttttccggggcagtttttggtttcccaaacatatggcaggtttggaacttcggaaaatacataaaaaattggctcctcattccacaacagggggggcttatgaatggaaattatcgggaaaaaagggccaaccaaccggcattaaaaaggaccatttccctaccctttttttacccaaagggggcaaaccagtcgaggcctttttattttccaagccccccaggtagctgccaaaaaattcagtttccccagctttcatttttttattttttttgaagacggcaatcaaacttcgggtggcataaaaacgccgttttatttggcagggaacttgactacaaacctttcgaaaactcaaactgggcggttgaccaaaaaaggcttttgttttt

SEQ ID NO: 63187 - DNA, 373 bp, Zea mays
  Clone ID: MRT4577_157627C.1
tgtttcacaaggagacacgctttcacgattccaccaccttgcgccataagatggccgattgtataaccgcccgaaaggcaaagcctactagctcctgtccaaccccctgatggcggtgggggtcaaacccttgcacaacgtacgcgcaagccctgccggttacattgcgcacctccacccattgctgagctcttcgcgccccttcgctccggcggccgcggatcccgtgtctgcaccttcaaccccgtcaaggtctcgtgcgcgaggagcactggctcatgtcacttcggctgcgccttcccctacatagggccttctgttcggctgggaggaaccttgagccggtgagggcgatagccacgcaagcgccccc

SEQ ID NO: 63188 - DNA, 457 bp, Zea mays
  Clone ID: MRT4577_157628C.1
cagggaaggccccccctcagatcaagaacccataagggggggtttacatggggaatccaggggaccccccctttttttacaagaacacaggtgaaagggggaaaggtgaaaaaactaaaacgaggggggaacataagcccgggccatgggtcccgacaacatgttgaaaaaaaaaacagggcgggggcaaaaaaaatggggcattttttcattatcgcaaatggagcgctgtttgtgggttagccgggggccctcaaacattttggggggggcccccttgagcttttaataaaactttaccaggggggtaaaaaacactggaccgagacccatccccaaaaaatgctcccatgggtggcccatgtaggggagcttggggaaagggtttgagtacatttgggggcccacccccaggagggccccgaatgatcgtggggggtccccggaatcctggggc

SEQ ID NO: 63189 - DNA, 243 bp, Zea mays
  Clone ID: MRT4577_157629C.1
tatttttttttttttttatttttgggggtcgtggtcttatatacaacataacaagcatttctgttactaatattgagaaaaataagctcaaactacaccaaaaacatttttactgtatgtggaaatgtaaaggaaaataaatgaaagaaatttcctccattacgtattgttaagtggatacttttctttgcttaatggataaacttttcctggtgatgttaataaacaaatgattttttttta

SEQ ID NO: 63190 - DNA, 582 bp, Zea mays
  Clone ID: MRT4577_15762C.1
ccgggatcgctgtctcaaggaatccacacaggcacttctacgacgcccgggcgctgcgcacagacactccgagcgacaacaccaatgacttactaccaggaggaggactactgctcggaggaggtgaggtcgagtggcccctgccggcttcaggcgacacggcggagacggccagcattgcgtcaccaaagacaagtcctaggagggcgacacgagctcacgcgccgggggcaaccaccaccaccaccatgtccaccacgacaggcacggtattcagtggtgcgctgagaccagagtagagatatgtgacatcaacacctgcgccggcgagtgccaccaacgcagggtagtagcttcctcgccagtgctatagctgagccgcccggcggccgtgatccacgaccggtcatgcttgcctgcgtgccttatgtatgtctgtggttgactgggtgtgcagggtctctcgtacttgggtatcgcacgtgcacgcactcatgctcctagtacgaattatcgacaatcaagctacgtgacactgaataaaacttctctcgtaatactactacccagaaaaaaatataa

SEQ ID NO: 63191 - DNA, 281 bp, Zea mays
  Clone ID: MRT4577_157630C.1
agtaccctgagtacggtcggaatccgggtcaccacgcgaagaacgagcgggaggtgggacgtggcggacgcgtgggcggacgcgtgggaaacgagagggccggagcatccgcagatccggcgatccatccgccggtcgatctcatacttcctcgtcactgccttcgtttctctttccaacaatcaagatgagccgtggcggtagcgcgggtggtggtcaaagttctctgggttacctctttggaagcggtgagccccccaaaccagcagtggcaccagctg

SEQ ID NO: 63192 - DNA, 125 bp, Zea mays
  Clone ID: MRT4577_157631C.1
gatgcttggggggactcataacattacaaactctctcagagccctacattccaaagagagccggggagagcagctgctaatctaaaaatggcaacagagcgcccacctgaagggagcggaccaca

SEQ ID NO: 63193 - DNA, 576 bp, Zea mays
  Clone ID: MRT4577_157632C.1
gctccccagagaatgcgaataggccgccgacgcctcccggctgatctgagagggacatggagcccgctacctcaggatctcctcctaccccaggggcttcatccaccggagcttgatgatctgaagtatgctgactgttctgagagggagaaagtgatcggtctgctgaagcgtgtctagtactgaccatgcccaggaccatatgagcgatgatgcttatgtggagctacgaaaaggagctctatgcgcataccatggaaagaactttgagggtggaggaagtgggcacgtaaccagcgatatgagttctacaatgggtgcagaggtggaagaagagacctacaaactaagcggggagacagcatggcagaatgctagaccctatgagaaggtagggatctatgctgggagagctcagaaattcaggagaccgcaattctctcatggaggaagataagtactctgaattctgcgaggaagagactatcattgaagacatcagagtgacttctgaacccatgacctggttctgcaggtttactcgtgcttatgtgctggagataatggtctgcacac

SEQ ID NO: 63194 - DNA, 812 bp, Zea mays
  Clone ID: MRT4577_157633C.1
tccaacggccgacgccgtgttccccatctcccgcagagctactgccggctgtcccgagtaccgacctccgtcctccgctccccgccgggaatccttcctcctcccgcggtggagacctgttccgtcacccgcaacaacatgcctacctactaggatctccgcagggtgaagcgtcgtcgccgtgcaagtactacagcgatggctggcctactctctccgccaagctgaacttcgagaaggcggtcttcaccaaagcccagaaagttagtgctggaacggatgatattggaatgcctgacgccctcattgagtaatacaagtgtattcacgacctgatcttttttgttaccggcggagaggacgagaatgaccttattttcacatcgattcttcaaggattctctgatgctgaggaactgcttctccagaacctggttgacgaccaggacggcactcgagaatcttgaacctgatcctattgtgtcttgatgaaattgttgacggagggattgtacttgaaacatacggaatagagatacctgaagaggagtctgatcacggatcggatggcgcttcatcggctgaccatactttagcctatgccctaacgcaagccatagagcatctggagaagactcttctcatgtgatgttgagctccatattatgagggtgactactgagcatctattattgtgcctggatgacacaattcttgttggtagccacggagagatatgaatgtctgaaggatttgaatgtgcttagtggcacatagctatcaacattctcatggtcatctgtaagccttca

SEQ ID NO: 63195 - DNA, 430 bp, Zea mays
  Clone ID: MRT4577_157634C.1
tttgttggtattttactgtttttataaaatgatcaccggaaacagatgggaataaggaacaacccaaacattggagggatgaatcgacccaaatgcacacgtctaaacatgatacgaccatacttactagaatgacacccgctgaataacaatgctgctcacgcatgggtcgaatgcatgtaaaggtgtgcaagcctcttggcacaatccacgctggagtccagcgtctcctgcactccgaactggaatctgaaccccaagtcctacagcttgctggtgtagggctgaatcctgacaccttatagggacacctgagacagctgcatgatgaggtcgctgtgctctacatcaaagtgtacgaccatgtcactcatattggggtacccggctgtgcagaggaagcggtcggtcatggactcctgcttatgca

SEQ ID NO: 63196 - DNA, 677 bp, Zea mays
  Clone ID: MRT4577_157635C.1
tcttttattacactttatagcttagggaatatagatacccgaaaacataatatcattgtaggaaatagctcaattcttcgtagctgctgatttatatatcctaggtcttgatttatttacattgatttgtagtaaactctgtttccttgaaatgtaagatgttccccattatttgctgaacttgcagatttacgtggttgattcactggatagagagagaatcgggagagccagggcggagtttcaggctataatcaatgacccttttatgcttaacagtgtgttattggtgtttgctaacaagcaagacatggtatgttcagccacattttctctggagcatttattttgtgttgtgattcattttagtgggtgatttagaagggctggcttggtgaagtggttctatctttttttgttcaaatgtaatgttaacgattatgttttgttcataaatgtaaacatgcaaattatggtttcttgctgaagtctggccattccaatgcgtgtactggaaatagctggctgctccatcctttagttgtgtaagcagttctgtttctttgtcgacagaatatgtcaatatgttgggttttccataaatgtcatgctgctggcgttatgagttctgtattggtggcatgttgggtgattacactagatgtttgtactacact

SEQ ID NO: 63197 - DNA, 318 bp, Zea mays
  Clone ID: MRT4577_157636C.1
aaacaaaacccttaaactgtttgggaacaggccgacgggagacagtaccttatggctaagaagaagaagaagaaaaggaaacccttttttgggataaaaaacttgggccaacggaatccaagttcaaccgttaaacaggcccgattggtacagaccaacggtttgaaaacatcaaaaaaaaaggggccgccccccaacagggggccaccccccccgccttttaaaaggaacggggggggaaccccccaccggggggggacctggggcctcccatccttgccgtaaaacagttttttaaaacggttgtgtttgccaagc

SEQ ID NO: 63198 - DNA, 1780 bp, Zea mays
  Clone ID: MRT4577_157637C.1
cattgggaccctcgaggccggccgggaaaaggaactcccccgtcccaaattcccaagacagtaccgccgagaaggacagggagtcagagactgagagactggaagcgcaagagcaggcgccgcgcgtgccggcgatggagagggacgtcgtgctctccgcacccgaggccgctgggtcctcgtcctcccccgcctcctcgtcgtactcctccttcgccgagaccagggtcatctgccgcgtgtgtcagaagcagttcgcgcagtacacttgcccccgctgtaacgcccggtactgctcgctctcgtgctacaaggcttgcagcaggtaggatatggtaatgtcgcactggtgtcaatagtcttccctgacgacatcttggcaccccctggctctgataccacttgtcaggaaccacgccggagagacaaccttcagcaggttgccgacaaactcctacctcccagggtcatagtgttcaatgcactgaatccttcatgcgtgagaatgttatggacgagcttaagcagatgcaacctgaggatgaatcaaagaaaaagatgctagatatcctcaagcggctccacttggaagaagagatggcatcagatggtgaagatgagtccatgctatcagaggagcttattcaaaaagttatgtctggggaagagataaagctggaagacctctctgattgtgaaatcaaacgattccgtcaagctctggcctcaggtgagctcagtaagatgattgaaccgtggacaccttggtggaaaaaaccctcagccagatctatttcccttggcccggatggaagccagcttatcagacaagtaaacgcagaagacactgctgtaccatatccagatgcaaatactgaccaagaggctagcatcaacgaaatccctgaagggccagaatctcctctcccgtcactgaaacagttaacaaggacagagccatctcctttgcttgctgtccacttggttgacattctgtacagttactgcttcacacttcggctctacaacggtgattggcactcagatcctttgggtgcttgcactgtcgccctgtcgatgtcgaaagtcatgggccaggatgctaaacctgagactgtacctgaagcactcgcagcctgcatcgaggagacatgctcaccagcttacaggcatactggtggtttcaggtttgctattggactcgtggacgatatcatcgccattctctccttgggacagaacgcacttatttgtgccttatgcgacttccatcgactcattgaagttggtaagagcatgctcaaggtggagaaagtgggcaagacggagagggcacagaactctccgaagcttcgtagtgcagctaggaagctattcttcatgacttgttgggtccatgagcagccagatgaggcgtggccatctttagctcacatcgtccaggtgcagaaagcatctatggaggagttggagaccgggaattggaaggcggatagaaagagcaaaccacaatccgcggttcttatcgaggagctgtaggcatatggatgtaccactggaaactggatcgcgaggctctgtacccttgtgtatcgctcaggatgaatccaacgagagaccttgtccttgtaatgcagttagttgcttttgtgtacactttttttttaaaaaaaattgtatttgtcgagtttgaaatcctagttgaagcgatcctgctttactttgcttgttaagttgcgggctgatttaatccatgcgttggagcttatgcggttcagat

SEQ ID NO: 63199 - DNA, 417 bp, Zea mays
  Clone ID: MRT4577_157638C.1
actaaggggaaataagggatggcgtgaaaaacaggggcaaatgaaggattagctcaaacgaaaatggtcttgcggtcttgctctccttcctcgtggtcggcggccggtgcagctgtagccacgcgcgcctcggcaaacccttcgcctcctcgcccatcctcccctccattccgtcccagccgaagggccatggactctgctgccggcgcaggccgccaccgtgattgaatcgtagtcgatggtgacgtgcacaatgattgggcccttgaggaagatttaaaggctcttttatttcttcagccgcgattttgttcttttttacaggctatttattttatgagattgttctactttctctgaagcctttttatactctttgcttaccctttgtttcttttcttgtctcattattttttt

SEQ ID NO: 63200 - DNA, 3207 bp, Zea mays
  Clone ID: MRT4577_157639C.1
aattcggcacgaggttccgacctagacgcagaagacactgctgtaccatatccagatccaaatactgaccaagaggctagcatcaacgaaatccctgaagggccagaatctcctctcccgtcattgaaacagttaacaaggacagagccatctcctttgcttgctgtccacttggttgacattctgtacagttactgcttcacacttcggctctacaacggtgattggcactcagatcctttgggtgcttccactgtcgccctgtcgatgtcgaaagtcatgggccaggatgctaaacctgagactgtacctgaagcactcgcagcctgcatcgaggagacatgctcaccagcttacaggcatactggtggtttcaggtttgctattggactcgtggacgatatcatcgccattctctccttgggacagaacgcacttatttgtgccttatgcgacttccatcgactcattgaagttggtaagagcatgctcaaggtggagaaagtgggcaagacggagagggcacaatgctctccgaagcttcgaagtgcaacgatgaggctatgcttcataactggctggctccaagcgcagacaggtgaggcgtccccatccttagcgcacgaaaggcagttgcaccatccccaaattcccaaagcgaacaccgccgagaaggacagagactggaagcgcaagagcaggcgccgcgcgtgctggcgatggagagggacgtcgtgctctccgcacccgaggccgctgggtcctcgtcctcccccgcctcctcgtcgtactcctccttcgccgagaccagggtcatctgccgcgtgtgtcagaagcagttcgcgcagtacacttgcccccgctgtaacgcccggtactgctcgctctcgtgctacaaggcttgcagcaggtaggatatggtaatgtcgcacgggtgtcaacagtcttccctgacgacatcttggcaccccctggctctgataccacttgtcaggaaccacgccggagagacaaccttcagcaggttgccggcgaactcctacctcccagggtcatagtgttcaatgcactgaatccttcatgcgtgagaatgttatggacgagcttaagcagatgcaacctgaggatgaatcaaagaaaaagatgctagatatcctcaagcggctccacttggaagaagagatggcatcagatggtgaagatggtatgttctgcgtgctacatgttcctatgccattgatctatcttactttctttaataataacactagaggtgcacataatttcatttttttttatattgtgataactgctaatgaggacaaaactacagatacctccatgccagtggtggattcagacatgagacaagagaggagctaaatataattgaaccataaactaaaagctataattttataataaagaataactatgtaaataacattgttcaagcaacatgtaaaatatttttcagctgcgagagagggagaggctggctgtgtcgttgttaggtcgggtggggctgggccttcaaacctggaatttccctgggctgcgaggtgaaaattacagggggtattctcttttctgggctaccccgggatgagcccccctaccgcttgggctctagggctgcccctgctccatgcgcagtatgctacacttacgattttactgtttggtacattaagttttcctgtttataggtagttatcgagttatggtggcttgtctgttatgaatgtatttcctttcggtattacggataaattatatgtcatcttgtagataattggttgtacatatttatatagtagactgagaaacggcaaacccagtgccggaggtctccacatgagtgggtccgggaagggataaactgtgacctggtgactttgtgcgacagctctcaccactgtaccaggcctgcccttcaatattgctttagtagactgctgaagattttatttttgacatgtacctttttgtcctgcagagtccatgttatcagaggagcttattcaaaaagttatgtctggggaagagataaagctggaagacctctctgattgtgaaatcaaacgattccgtcaagctctggcctcaggtgagctcagtaagatgattgaaccgtggacaccttggtggaaaaaaccctcagccagatctatttcccttggcctggatggaagtcagcttatcagacaagtaaacgcagaagacactgctgtaccatatccagatccaaatactgaccaagaggctagcatcaacgaaatccctgaagggccagaatctcctctcccgtcattgaaacagttaacaaggacagagccatctcctttgcttgctgtccacttggttgacattctgtacagttactgcttcacacttcggctctacaacggtgattggcactcagatcctttgggtgcttgcactgtcgccctgtcgatgtcgaaagtcatgggccaggatgctaaacctgagactgtacctgaagcactcgcagcctgcatcgaggagacatgctcaccagcttacaggcatactggtggtttcaggtttgctattggactcgtggacgatatcatcgccattctctccttgggacagaacgcacttatttgtgccttatgcgacttccatcgactcattgaagttggtaagagcatgctcaaggtggagaaagtgggcaagacggagagggcacagaactctccgaagcttcgtagtgcagctaggaagctattcttcatgacttgttgggtccatgagcagccagatgaggcgtggccatctttagctcacatcgtccaggtgcagaaagcatctatggaggagttggagaccgggaattggaaggcggatagaaagagcaaaccacaatccgcggttcttatcgaggagctgtaggcatatggatgtaccactggaaattggatcgcgaggctctgtacccttgtgtatcgctcaggatgaatccaacgagagaccttgtccttgtaatgcagttagttgcttttgtgtacacttttttttgaaaaaaattgtatttgtatacgagtttgaaatcctagttgaagcgatcctgctttactttgcttgttaaaaaaaaaaaaaaaaaagcggcctgatttaatccatgcgttggagcttatgcagttcagatattcttataaaaaaaaaaaaaaaaaagcggcc

SEQ ID NO: 63201 - DNA, 209 bp, Zea mays
  Clone ID: MRT4577_15763C.1
cttgcttgtgctacacggtaaccaaagaaactgatatggttgtgtgcatggacatggaagagaatgatgctctgcactgcatgaggccataatagcgtgaactccagtgtataagctacatgggggccagcggaaccatgatacctcatgagggctgcgctagacgtagtgtaccaatattaagtgtggcggtcatgcaagcccgtgta

SEQ ID NO: 63202 - DNA, 576 bp, Zea mays
  Clone ID: MRT4577_157640C.1
caaaatctcatcgataaaagtatgcatgtatatctaggcttaccgctaagatggtcatgaattttgcatatcttgaaggcttgtgaactatggaatctaggaacaacaccgttccatctttgggatgaatgatgaagtagatccgatggtccctacacgaatcaaatttgtggtgcatgtctattgaaattattaattttatgtatgcaaactcacacttattcgaagttgtaaggggccactagggattccctatgttgaaactgaagcattgcgtgtcctaggtagatagcgtattgagcttcaaaattcttcttcattttctctatatgcttctgagcttcttcaggtgacttcccctgtaattcttcatggcccagaccgattttgaatgtgtgctgattctcgcatattttcatttggttgagataagttatacgtccacaatggcccctccatcattaccagcgttgttggagtgcaagatatgcttgagaagcagattgttctcttcctgttgcttcttaaactccttaaactccctttgagtttttgccaacttcttgttgagttcat

SEQ ID NO: 63203 - DNA, 154 bp, Zea mays
  Clone ID: MRT4577_157641C.1
ggggtttttccgaatgagtacctcgaaggcggccgggccgggcctactcaacatagaagcgcgtattgaggatctgtctctgactagctctggagcaggcagcgcaaccacgaatcatcccctggcacgtacctgctgaccaccgccccatgca

SEQ ID NO: 63204 - DNA, 289 bp, Zea mays
  Clone ID: MRT4577_157642C.1
ggaatgaacgatccatccactgggacgttttggttgatttagacagaaacaacaaggttttcactgatgacgatcattgctggtccattggtacaaccatcattccattcgagggctggttcaacaaagagggcggtataacaggtttagagaacgggcggacagcatacgaccggtaagtcaggttacagatactcacgctggcgttaaaacagagcattttttaacaggcgcctacgggaatgggtcctacctatcgccttaagggggccttaccctccttgatgtt

SEQ ID NO: 63205 - DNA, 1398 bp, Zea mays
  Clone ID: MRT4577_157643C.1
cattgggtacctcgaggccggccgggacggcagtcgtccggttctgttccagcagccccacaccccacgccaccggaccggaaacgcgaagcagccccacactgcccacgcggacacgctctgcaccaccacctgccggccgttcccggctcgccgctgccgttgcgccctcgcgctcacacctccgccagcccaggtccatcgagcggagaaacccatggccccctcgccgatcctcgtccggccgccggcgctggcgaattcaccccttccgcctccccgatgcgtggccgcggtagcagcggcgccggcggttcggacggctccggcggccccattctctaggctccgtaccaagtgtaggttcgccgcatcggatgtgagagaagactactcttccactccgatagatattgtcgctgatgttaagacggagaagattgtggtgttaggaggaagtggattcgttggttctgcgatttgcagagctgctgtatctaaaggcattgaggttgtgagcttcagcaggtcaggaagaccatcttactctgatccctgggttgatcaagtcaattggctgccaggagatgttttctatgcaagatgggatgaagtattggttggggctactgctgttgtgtctacccttggagggtttggcaatgaagaacaaatgaaaaggataaatggtgaggcaaatgtcatagcagtaaatgctgcaaaagaaaatggagtcccaaaattcattttaatctccgtccatgactacaaccttccatcctttcttcttacatcgggttacttcactggcaagagaaaggcagaatctgaagtcctttccaaatacccagcctcgggtgtcgtgttgaggccaggcttcatttacggtaaaaggaaagtaaatggcttcgaggtaccactcgacgctgtcggacaaccattggagaagttgctctcctctgtcgaaaacttcaccaagccgttgagctcgctgcctgcctctgacctaatccttgcaccccctgtgagcgtggatgatgttgcctatgctgtaatcaacggagtcatagacgacagcttctttggggtgttcacgattgaacagatcaaggaagccgcgtccaaggtacgagtgtgaacccggggtcttgttccacaatctctgaacgtgtgttgtaggtggaaagttcataaacttagcagtaactcattgatccttgtgttctttatttctcgctgaattttgaccatagtcaaccgttcaaaagtcagtgcagcattcttttttctgctggaatctcttgagaaaatatagtttccaaactagcccttaatgacttaaagagctagcaaaatatgtagtactgtgtgggtcagaaaagtctcatgttggttcac

SEQ ID NO: 63206 - DNA, 775 bp, Zea mays
  unsure (1)..(775): unsure at all n locations
  Clone ID: MRT4577_157644C.1
atatagacaagagagagagcaataatactcacatgactatatatctacagaaagatacacaagaacgtattctagctatcaggtcatgcgaacagcaagagacgatcaataggcgtgtgtgccgctcgctgcttctccagctgtggtgatgtccgacaacacggacatccctcctcctgcaataggataccttcaccgcggctgagctggacataatctcgagagcatttgcccatccagcgacaggcatcctctgtggcagaaacctgtgtattcttaccatgttatacgctgctaatgcaccgccaatgcattgtgcaaatctgcatgatgagatatctgtactaacgttatttgaaatgtgtgtcgagagaaactcaaggacggaactgaggaggtgaatttattgcatgtgcatggtgagctaataagtaaaggataataaaaatggatatgctcggatgtcgtcgacgagcggcagcatcgatctcatatccgtcgcgcgtgcttagctgttcttcccaagaccaccttgcctgggatgttccaacgctcgggccgggcgagaatccatcatgtagcgcctactgcgggaaagtacaaggatgagatcatcaagaatgatgcctacattggcacccccggtaagggtatccttgctgctgatgagtccactggcaccattgggaagcgcctttccagcatcaatgtcgagaacgttgaggagaaccgccgggccctgcgagagctcctattctgctgccctggngctctc

SEQ ID NO: 63207 - DNA, 161 bp, Zea mays
  Clone ID: MRT4577_157645C.1
gccacccccccccccacgtgacagggatattcacaattcccggcccacgagggaacccaagcacccggcacacgggtcaacccggatcccattggctgcaggaggcccaaacaccaaagttgggttccatacctatggacaggaagacactacaccttcac

SEQ ID NO: 63208 - DNA, 2012 bp, Zea mays
  Clone ID: MRT4577_157646C.1
cctcgagccggccgggaaaatcggcacgccacctttctcctgctgctgtggtcccatgccccggcgccggcgctctcgctgccgccgcgccctccggtacgctgcagcgatggcgggaccacgggctgcgtgctctccaacgcctacggcgcgtggtcgagcgaccgcgccgactgccccgtctcctccgtcgcgtacccggcgtccgagcaggaggtggtcgcggccgtggcgcgcgccagcgccagcggcgcccgcgtcaaggtcgtgagcggcttcgcgcacaccattccgaagctcgcctgccccggcggcggcaacggcactaccaccaccctgctcatcagcacggcgaggctggcaggcgtggaggtggacgtcgcggcgcggacggtgaccgcggacgccggcgcgccgctgcgggccgtcatcgacgcggcagaggcgagcgggctcagcctcacggcggcgccgtactgggagggcgtcagcgtcgcggggctcgtgagcacagggtcccacggcagctcgtggtggggccgcggcggtgccgtgcacgaccacgttgtggggctcaggctcgtcgttaccgccggggaggctgacggctgggccagggtcctgacgctgcgcagaggcgacgagctcttcccggctgcgcttgtctcgctcgggctgcttggggtcgtctccaagatcacgctgtcactggaaccgaggttcaagcgcagcatcaccttcgactacaggaacgattccaccttccaggacgacttcgccgctcacgcggcgagccacgagttcgccgacatcacctggtacccgtcccagcacacggccgtgtaccgcatcgacgaccgcgcgccggccaacgcgcctggggacggcgtcaacgacttcatcggcttccaggcgacgcccatcgctgtcaccgccgggctcagagtggtagaaacttcactggagcggtccaagaacatgaagggcaagtgtgcgatggcggcggcggagggcgtggcgaagcggctggtcggcaacgggctgaagaacaacggcctgctgttcacggggtaccccgtggtggggtaccaggggaagatgcagacgtcgggctcctgcgcgcgctcctcggcggcggacctgctcagcgcgtgcgggtgggatcccaggttccacggcctcttcttctacgagagcacggcgatcttctcgccggcccggttccgggacttcatcctcgacgtgaagcgcctgcgggacctcgccggctcggacagcctctgcggcgtcgacgtgtacaacggcctcctggtccggttcgtgaaggcgtccgcggcgcacctcggccagccggaggactccgtcgtggtggacttcaactattaccgcgcgtcggactcggcggcgccgcggctgagccaggacgtgtgggaggaggtggagcagctggcgttcgtcaagcacggcgccaggccacactgggccaagaaccgtttggtggcgttcgccggcgtgcggggcaagtacccgcggtggggccagtttgcggcggctaagcggcagctggacccccggggcttgttcgacagcccgtggtcggacgaggtcgtcggcggggtggagctggccaagggcgacgggtgcgcgctggacggccggtgcgtgtgctccgaggacaggcactgcagccccgagcaggggtactactgcaggccggggctcgtgtttacggacgccagggtctgcaggtactcggggtcgcagaaccagtgagtcaccatatttctctgtggattggtttcgagcttgactgaaagctgtgagccgtgtggataatagatttcacatttaaagagtgcttgtagctatacgttagggtcataatacaaaaaggagaagaatttctgtaatattggcattctagaaattaaatcagtgacaatgaagaagttacatgtatcaaatatccttataaaggaagggaatcctaagaatatatgatttaaaatgct

SEQ ID NO: 63209 - DNA, 240 bp, Zea mays
  Clone ID: MRT4577_157647C.1
cggacgcgtgggaaaaaaaaaaaaaaaaataaaaaaattaaaaaaaaaaaaaaaaaaataggacaaacgtaataaaaaaaaaaaaacttacgtactcctacatgcaccaagtcttactatcctatacattcacctaaataaaatttcattagggcgtcacttttaattcaatttatattgccaaaaccttatacattacttaacttaaatatctttgaggtcatccaactttatccattt

SEQ ID NO: 63210 - DNA, 1937 bp, Zea mays
  Clone ID: MRT4577_157648C.1
aattcggcacgagggcaaagtcgcgccgccgtcgcctcgcacgcacgaacgccatcacttcggcgcttacccatcagacagacaaacaaggccaaaactccacgacgtcccccgctcggcagcagcaacagccgagaccctagcgcagcatggcttggacaactgcggccacagtgtgctggcgcctgctccacctcccctccgcccgctgccctctctcgtcccgggcccggtgttccgctgcgcagagcccagacgccgtggacaaggagtacgccgacctcaacctccggcctctgtaccccaacaggggccatcacatgcgcatacggcagcacgtgaacccgctcagctcatccttctcggagcccacggggccgccagagtggaaggaggtgttcgacgaccccttgcttcccctcatggtcgacatcggctgcgggagtgggaggttcttgatttggcacgcgaagaattctggcaagagtcagaactaccttgggctagaaatccgccaaaagttggtggagcgggcacagttctgggtgaatgaattggagcttatgaacgtctattttatgtttgcaaatgcaacagtgtcttttgagaaaatcatatcgtcataccctggtcccttgtcacttgtttcaatactgtgtcctgatccacacttcaaaaagaggcatcacaaaagaagagttctgcagcaaccattggtcgattcaatcataaataatctctgtttaggcggacaggttttcatacaatctgatgtactggaagtagctgtagacatgagggaaaggtttgatgggtactctggtattttggcacatgttaattatgttgatcaagatcttcagtgtgacaatgaaggatggcttctggacaacccaatgggaatccggacagagcgagaaatccatgcagagcttgaaggagcaacgatatacaggagggtgtaccaaaaggttagagatgcttctttctagctgtttatcagctacagaagttgtccaaggagtaaggtttccaagaatgttcattgcatgtattccattaagagaagttgggaaaaaaaacaaagcatccaagtacaaagcctggcgaaccaaaacaaagagaagcccaagcagtaacacctgatgtcttcctgcttgaaccatgccacaagttgcctttactacatcaagctgcattacatttctgacagtgcgcttgtgcacatctaatcttttttttcacctgatgcaatgagtcagattagccaatgcttttgatgaagatgacaactggcataagtgttcctttgttggtcagattgtacttatggtgtttagcatcgggtgctgtcttcgttctgtccagaattcaggtctggaattgctcaccatctatcggtatgcagactgtttgtagaggcaatccagatgaggcaatttgatgtgcgctaggattgttcaaactttggtccgctcaacgttcccttgacttggtagatatacaagaatggacaacgttttcttgacttggtaaagtttggtcattagtttgtgaaacagaatgctgcattgctcttggcatttgataagtgacaggtgaataagacgacaccgaggtgcatgtgggcactttttagtgtttgatgtttgctaagtcctctaccaacaggtcaatacatatgttaatcaatttgaataactcattaattgaaattttgttgctaatggtatcgaattaactcaccattgtattcggcttttcgctgagaaacagtttagtatcagaatcatttatcgaataatttttcgtcgcaacacagtcatattgtactagtgatagctgacactgttgggttacccatgtattgccacgatgtctatatatcatgtgtaaagaatttgtaataagacacataaatatatgttctattgatt

SEQ ID NO: 63211 - DNA, 705 bp, Zea mays
  Clone ID: MRT4577_157649C.1
ggccctaggggccttttttttttttttttttgctttttttttttttttttttttttttttttttttttttttttttttttttttttttttttttttttttttttggaaaccccctaatgggaataaaaaggaaaaatcccccggggaacccccccttaaaaaaaaaaaagggggaaaaaaaaccaagaaaaaaaccgccccctaaaaggtaaaaggggaaaggtggacccaaaaaaaaaaaaaaaaaaccccctcctccctgaaaaaaaaaaagggaagggacccaaaaaaaacaaaaaaaaaaaaggactggacgggcaaaataaaaaaaaaaaaaaccctgggcccagggaataacgcccccaaaggggaaaaaaaccccggaaaaagaaaaaaaggtggggggcccacaaagaattttttggaaaaaaggaaccaactcccccaaaaaatcccccccccaaaggttttttaaaaaggggcaaaggtttcttaaatccccccccgaagcgggtttgaaccccaagggggccaatttgaacaagggacccccgaaaaaccggaaaaaaaccccggggggggcaattaacaccctgaagaaggccgccctggaaggggcctccaggaataaacccgggttcaaatggaaaaaggccccccccttgaaaaaaccccgggaataactcaaggccaaagggcggaaaa

SEQ ID NO: 63212 - DNA, 568 bp, Zea mays
  Clone ID: MRT4577_15764C.1
aagagatggtgtcagtatgatgaagcgtagctttggactggacagcacttcagctgcttcttccagcgatcttggatcttcaaggcaatcaatcatatgttttgagcgccttaggagtggtaagaggggtgacttcgagaagtctcagataagcagcactatgagtcgtcaaagcattgcttctgtgtcagatatgtcaatctgtagctcttcagcttcactttgccctcagattggtgctgtaggtgattcctgtttcccaattgacactttagaaagcagcacttcaagaacattgatctcttctgaagaaaatgatgctttttgtaaggatgctttgccaagtgatatggaatgtttgtctccacaggttattgctgatgatgacagtcatgttgacttgaaaattcagagctatttaagtgaggtaggagatacaacatttgagaatcatagtgctggcagaatgcctgacatggatcataccagttcaaatatgtattctttagattctgaattgtcctgtgcttccccgttgttctcttgcccagaggaaagttgcctgcct

SEQ ID NO: 63213 - DNA, 1621 bp, Zea mays
  Clone ID: MRT4577_157650C.1
agggtttctcacactcctccgcctcccctccgtccgctgccctctctcgtcgcggggccggtgttccgctgcgcagagcctatacgccgcggacaaggagtatgccgacctcaacctccggtctctgtaccccaacaggggccatcacatgcgcatacggtagcacgtgaacccgctcagctcatccttctcggagcccacggtgccgccagagtggaaggaggtgttcgacgaccccttgcttcccctcatggtcgacatcggctgcgggagtgggaggttcttgatttggcacgcgaagaattctggcaagagacaaaactaccttgggctagaaatccgccaaaaggttttattggatttaggctttagcttgttaatttgggttctggattggatgatttttccttttttttaatgtataaatggccggatctctgactttcagcttaagagagaagagagaaggtcagaacagttttagaaacaaagcactgggaacctcaagctcaagcagccccccgccccaaagcatgacacagcacacagactgcaccctcataacacggaacaaagataatgaactgcagaatcgcatgccatcatttcgctttcaaagacacttgctttgctgtttggaacaattctcgaagatgattcagtttcattctttcctgagtcccacattacatagattgccaggccgttgaaatattttggcataaaagatataagcgtatgccagtatcacacggtccattgcgcataatgcaattatcttggtgtggccagccccttaaatccaagttgtctgctgcagaattttgtcttgtataagtgtccaagcaaaccatttaaatgtgcctttgaactgcacccggtacttatgcattgttaaatttgtagtttggtgacactctacttgttttgcttctgtagttggtggagcgggcacagttctgggtgaatgaattggagcttatgaacgtctatttgtttttcacctgtggcacgatgtcagattagcaaatgctattgatgaagatgacaactggcaaaagtgttcctttgttggtcaaattgtacttatggtgtttagcatcaggtgttgtcttcgttctgtccataattcaggtctggaattggtcaccatctatcggtatgcagagagtttgtagaggcaatccagatgaggcaatttgatgtgcgctaggattgttcaaactttggtccgctcaacgttctcttgacttggtagatatacaagaatggacaacgttttcttgacttggtaaagtttggtcattagtttgtgaaacagaatgctgcattgctcttggcatttgataagtgacaggtggataagacgacaccgaggtgtgggcactttttagtgtttgatgtttgctaagtcctctaccatcaggtcaatacatatgttaatcaatttgaataactccttaattgaaattttgttgctaatggtatcgaattaactcaccattgtattcggcgaataatgtttcgttgcaacacagtcatattgtactagtgatagctgatattgttgggttgcccgtgtattttgtaataagacacataaatatatgttctattggtt

SEQ ID NO: 63214 - DNA, 987 bp, Zea mays
  Clone ID: MRT4577_157651C.1
tcgtctccaaaaggctgcgggtcgcacccggcgctcgtccctccctgccgcaaccaacgccaccgcttcggcgcttacccatcagatcagacagacaaacaaggcaaacgagaccctagcgcagcatggcttggacggctgcgggcacagtttgctggcgcctcctccgcctcccctccgggcgggggcctctctcgtcccgggcccggtgttccgctgcgcagagcctagacgccgtggacaaggagtatgccgacctcaacctccggcctctgtaccccaacgtctgtcgtcacccttcttctcttcgtccctacccccggtgctattccaatcttaccactgattcatctatgtacgcagaggggccatcacatgcgcatacggtagcacgtgaacccgctcagctcatccttctcggagcccacggggccgccagagtggaaggaggtgttcgacgaccccttgcttcccctcatggtcgacatcggctgcgggaatcttgatgtccagggagtgggaggttcttgatttggcacgcgaagaattctggcaagagtcaaaactaccttgggctagaaatccgccaaaaggttttattggttttaggttttagcttgttaatttggtttctggattggatgatttttcctttttttaatgtataaatgcccggatctctgactttcagtttaagagagaaaagagaagatcagaacagttttagaaacaaagcactgggaacctcaagctcaagcagccccccgccccaaagcatgacacagcacacagactgcaccctcataacacggaacaaagataatgaactgcagaatcgcatgccatcatttcgctttcaaagacacttgctttgctgtttggaacaattctcgaagatgattcagtttcattctttcctgagtcccacattacatagattgccaggccgttgaaatattttggcataaaagatataagcgtatgcca

SEQ ID NO: 63215 - DNA, 161 bp, Zea mays
  Clone ID: MRT4577_157652C.1
gtgtctgtcgacgccatggtaagctcatgatctgctcgagatgggatatttgtgactgtattcttctaatatattattatgcgtccttggttctagagtgtgtatagctcagtgtggtgtttccagtttgatgttgctgcgtgtggttgagtgagtgaatt

SEQ ID NO: 63216 - DNA, 364 bp, Zea mays
  Clone ID: MRT4577_157653C.1
gtaatttctccatagccaatgaaacggggactgtggtaacaaacctagtaaggaaagcgcaagatggcgtcacactggcatgtggttcttgcaactgaaaactataagtctaaagactcaactcaacaaatcaactactatggaaataactcatgcggccacagaactcaactgctttgtcccccactctaataattatcacaatcctggaagggatcgcgatactcctcagcagagcagctcataatctcagaatttcattaaagcaaacggctcgctgccataaaatatattcctctcacaatcacatcacactagtcgcacgactgactacctgtcgtaaactcgcagttgcacattgtta

SEQ ID NO: 63217 - DNA, 648 bp, Zea mays
  unsure (1)..(648): unsure at all n locations
  Clone ID: MRT4577_157654C.1
aaaaacattttagaatgggctcttgttcgtctgtttagtaattcattcttcccgtgtttacaaattcacgtgctaatataatcctaatgtctgttgtacaggaacttacctcacacatggggttacctgatgtctccataaagcgattttctgtgactcatgatattaaaaacctgttaatgtttgtggatgttgttctctatggatctttaagacaagaacctgtcttccctcctttgttattgctgtccatgtcctccgaaattccagttgttgcaccaaatcttactgttataacaaaatatgtatgccactcgatcgaattcttaataattcacttgtaaatctttgccactacttttgacaatttgttgttccaggtcagtgatggtgtccatggattccttttcgattctgctgacccaagcacgatttcttcagctttcatacaaattttaggagaaaaaaagcttttggatactgcctattctgttgctctggaagggaagctactttccaagaacatgttagcacatgattgtatcaaagctcatgttaagcttcttgaaagtgttattcattttccttcttatgcaaaattgccatcttctgtttctaaagttcaagaacgaacatnngttgtgggat

SEQ ID NO: 63218 - DNA, 580 bp, Zea mays
  Clone ID: MRT4577_157655C.1
aaacttcttgaattctttttttattttaatagttgaattatatactttagtacgcaaagtcagtactctagtttattaaaaatttcattcgtttatttattttgattagttcacacattttgcaaagaagtattttgtggttcttttagtttataatatgcacattgttttctaaaattatatataagcatatatttagtactattatctctttcagtcatgtgaaatttttttaaaacaatagcctaaagagtctactgtcttgtttgtccgggggcccttaaaatcatagatgcacaccagggaagcctagagctaccatgaagaagtaattaatgcaatatgtgcctttttttgcaatacatcccatcatttatctatcctataactccatactttcaaacagtcgcatggaaatataacccgcatgtgaaatctcctccactcggagaggggataagcatgcgaaagaaaaaaaatcatctccctcgttttgcttgctgtctcatgttaatcacgtcaagttgccaaactagctctacggaggagaaatgatagggagaaaagaatttaaaataga

SEQ ID NO: 63219 - DNA, 309 bp, Zea mays
  Clone ID: MRT4577_157656C.1
aatagaataccctggacgtcccaacacgcagcatcagaccaaatggactgggatgttacgcctgagtaccccgatgggatcaacaacagtgaggtaactagccgtcgggtcaaagggacgagactgggaaaagccagcagtaacacagcttacgcacctggcaacacaacggccatccgcgaggcagtgtagtagccagaacgcgcgcgtcgatggcacatcacaacagtcgcgaacctcgaaaggggaatgggaagtcccaaggcacaccacattaagcacggtgtttgtaggagtgacatccacctt

SEQ ID NO: 63220 - DNA, 891 bp, Zea mays
  unsure (1)..(891): unsure at all n locations
  Clone ID: MRT4577_157657C.1
caattatagaatgggtccatacataagttaagtacttgggttcacaaaacaaaaatgaaacaaatcaagttcaaccacacaagttacaacttgtttttatgatcagtaaccataaactcttgatgactgaaagtctgaaactagggagtgcgtcaatgtctgaactggaaaactgaacctggaactcttgatgattgaaagtctaaaactagggaggggggcgcttcactggcctggcagcgcttaactgttggaggatggaaagggaagagggggcaaaggaaaggagaggagaggagggaggctgtcggcactggacccctggtagccctgtgtattttttggcctgtgaaaggtccaataacacgtagaacgtcttgaacatgcctagaacgtccgaaaacgagaaaacgacgtttaaacgtgataaacggacgttctacgcgtttttgctaaaatggccggacattctaaactctaactttaaatgacgcttaaacgatgtttaagcgacgttttaataacaatgaagcaatgcatacaagcacatgtccatgttaaacgaatactaggctataatattagattagtggttttatttatttatcaactgtttcattatcgctttggtagctaatgttcacttcttgcttctataatagatataccaatgttgctctgtttgtaggttattgaactttccccagaagaggctgagagcacaactggtggatatgcgaaaagcattagccacgtaatcattggcttaaagactgtcaaagggactaagcaattgaaattagacccttcaatttatgatgctntgatcaaggaaaagggtgcagtggggtgatgttatatacattgaaagcaatagtgggagcagtgaaa

SEQ ID NO: 63221 - DNA, 111 bp, Zea mays
  Clone ID: MRT4577_157658C.1
ccaggtaaaacaaagaaccggcgacagcaaccccggggaactaggacgcacgcagcgcgggccccagcacagccagggctcaggacacaaaggacaccacgactacacaca

SEQ ID NO: 63222 - DNA, 771 bp, Zea mays
  unsure (1)..(771): unsure at all n locations
  Clone ID: MRT4577_157659C.1
cctgccggggatcccggtactgctggacggcatccggtgagtcgcctgggtacctcctgcctcgatcctgtgaccgttcggggtgcagaggcgggccgtcgagcggaggccgagcggagctgacgcgagcgaaagaagcgactcgacgacgacgacgaaacgctcctcgcctcattcacgcactcgtcatgttccatcctacgcgaggcggtacgcgcggtggtcaaggagacttcaaatggaccgatgtcgccgctgacaaggaccgagaatactacctcggtcattccctcgacgcgcccgtcggtcgctggcagaacggcaaagacttgacgtggtaccaaaaagacaaggaccgcgacctcgaagaggaggaacgcctgcgcaaggaagagattcgcaaggtgaaagaggccgaggaagatgccctcgctgtcgcgctgggattcgaaccgaccgtcaggaacccgaatgagatcccgaccggatcgggatcgggtcctggtccagccaaggactcgaacgaatccgtgctcgaaaaggcgaaacgcaaggccgagaaggaggcgaggaaagcagagcgcgacgagaaacggaggcaacgcgacgcgaggaagagcgaacgaaggtcacaccgcgagcgaagcagaagcagagaccggagtccgagcccacggcggagaggaagcgacgaacgagatggccgacggtcgaacgacgcgagaggtccgagttacgaccgncgcagacccgatcgccgcgatgagcggg

SEQ ID NO: 63223 - DNA, 365 bp, Zea mays
  Clone ID: MRT4577_15765C.1
aaaccaagaactttgggcatgcgggactgggggcacaggttcactccacagcattcatttctaacaacatttacaatccaccctaccttgacagcgcacgaacgactcctacttgaacaataagtgctacacaggatcgacaccacctacaagcaagcggtggttttgagttttcactcaatgccacttataccacagacaaacggtgtccagggggcttgatatctgcagaacagaccggagaatccatctgggtgctgatgatgaccattgacggcaccttcgtcagtgtctcctacgtgcggccggctctgccgtgcgccactggacgactcacttaggctcaatgtacctctggacagaag

SEQ ID NO: 63224 - DNA, 1953 bp, Zea mays
  Clone ID: MRT4577_157660C.1
aggccggccggggccattggcctcctggaggaggaccgggaaacgggtccaaatctcggacccgcaaacggacctcacccacccgttcctccatctccgccccttgccggcgatggcaccggcgccggcagcggcctcggcggggcggaagtctcatgtcaccgttctcctcctctacgtagtgtgcggcttgatcctgctgcttctcctcgcctcctactcgccccgcctccagccccacgcccacggccgcagcctccaccgccgcctcaagctccacccaaagagctccttaccatccgacgcttcctccggtgggaacggggggcaacagaagacgcagcaccaaaaccaccatgcggcctccttcgacccgaccatcgccgagctggagcgtcggctggacgacaaggagtgggagcgcgagcactacagcctcctccacggcggcgagccggatgaccatatgaaggagtgggaggagttcctcaaggaggaggaggacttcatcaacgacgacgaccgattcaacatcgccgaccgtatccgcgcgctcttccccaagatcgacgtcgccccgcaggacggattcgtctccctcgacgagctcaccgcctggaacctccagcaggccagggctgaccagcaccaccgctccgccagggagatggagctctacaacaagaacggcgatgagatagtctcattcgaagccttcaatgctctgcgccaagaatcccatggagagggcaatatgcttgggttcgaatggtggaaggaggatcatttcaatgcgtcagatgcaaacgctgatggtttccttgataaaactgagttcaatgatttccttaatccaagtgattcggataatcccaaaatcatcaatttgctctgcaaacaagaaataaggcagagggataaagatggtgatggaaagttaaactttgaagaatactttactgggctacatgaccatatacatggttatgatgacgagaatgcagatatttcccaaattgggaacataacagttgcgaaggatcggtttttcaaacttgacaaagataatgatgggtttatttcggagcatgaactagagcctgttcttgataagctctatctttctgaacgctattattctagacagcaagccatccatgctatttcagaggcagacaaagatcatgatgggaggctgactttggaagagatggttgagaacccctatgcattttatggcagtgtttatctcagcagcagcgacaacgacgacgaagactacttccacgacgaatttcgctgagaccaatattgttactatcctgacacacgcaaggaacacagctgacgagcatcaaggtgcgcacagaggttcggaacgtctagcatactatgtgtgatgcccgggctgggctgctgacagaatgggagagcttagagttacggccatggagtgaggaactagtttttagccgcttggttcttcaagttgtttgtgttaaatggaacgacgacagcatcctagtaccggccaggcccagcagtgatggatgttacgcggcaagttgagccacctttatctaggctgagctgcattggtctccatcctgatgttcctgcagcaggggaaatgtagttcaggagaacaatgagtggaggagcgtcatctctgtggcgagcggcttcagaaatctaacgggaacgtgttgtttggtgtccgaaatgtatgtgtgtgtgtgtatgctatgaattcaattatttctggcagaatgtcgcagtctagcgagctggcccatcccattgagaaacattccatcggctgcatgagtgcgccatggacgggagatggatgtgccgaattattggagggaaagggttcactttattcgtgcctagtcatcagtgtcatcagtacggaggttacagcgtatccacgtggtctgccacgtcatg

SEQ ID NO: 63225 - DNA, 277 bp, Zea mays
  Clone ID: MRT4577_157661C.1
actggcgatattgcatccactggcggacgcctctatagggctccggctactgggccaagacttgacgtaggcatgggcttagctgctcactgtgagaaatatgaacgccgatcactggcgctcactgcataaaacgccgctgcatagacacaaatgcctagtcgagccgagtgagagtatctactaaaattgatcgctgatcactcactggccgctttccccaatgaaggccgggcgggccttctgcatgagcgatgcgtgctcagcacgagcagag

SEQ ID NO: 63226 - DNA, 400 bp, Zea mays
  Clone ID: MRT4577_157662C.1
gtcttctttggccctaaacgtgggcgtggatttcagaaggtcttgcctactggtcaacctggcggactccatcacgaatgccatggccggcctaattgttctggagaatttggaaacaaataacattgttcttgttcatggagaagggttcggtgcttgctgttggcacaagaccatctgacacttggaggaaggtgggctagatgctgtagcctacgatctcacctgctgtggcatggacgatgctgacgcaaacaggatttttacggtagcactgtactacatgccattgcttgatgacgtggacagacttgctgaagatgatgaaggtaatagtgctcgaccataatgccttctgtgcgagtgtcttgtatgcacatgggcagtaccgcctcaagat

SEQ ID NO: 63227 - DNA, 291 bp, Zea mays
  Clone ID: MRT4577_157663C.1
gtaagctgggatcctctatattggccgcccttggggtttttttttttttttttttttttcgttttcttagtggggcaaaaaataatgactgccattttaaataaatgaaagcaccccggcgttttgtaaatggtgaatcacccccaaccaaaaacattcctttgggggggactggctggtttaacccccgggggggggaggccacacgctccctgctcgcttattctcaaaaaaacccttccggacaggggcgcctttatttataaagggggaaggaaatgtccgggggcc

SEQ ID NO: 63228 - DNA, 526 bp, Zea mays
  Clone ID: MRT4577_157664C.1
cctcgaggccggccgggatcctctcacgatactctttcctgattccaaaatacctctcgagacgcgttcctcgccaccatggtacgcctcctattttcatctacatgaagctctgagctccctgcagaagtcctctcgccaagactcttacgtctctgattctccctttagatcctcctgcagccaccatgtctttgatccttccgactacttccgcacagatgaacatcgatcctgtacaactgtccaatgcgctcagccacgacctctataagaccgagcacaagatcgacgtggttacctgaacctgacaccaaagatgcacaaagaatctcgatccctagctcctacatagatacagatcgacatatgcttgcctccccattgtctagccatgctaccagatcctggacctagacggcggcactcgcaatgttgtgcagaagctactacgtgctcaccatctctatcggggcatacgacaatatcatcatgcctcgagaaccacactcgcattgaactcgat

SEQ ID NO: 63229 - DNA, 407 bp, Zea mays
  Clone ID: MRT4577_157665C.1
ttttttttttttttttttttttttttttttttttttttttttttttttttttttttttttttttttttttttttttttttttttttttgggggaccaaacaactgactgacaactgaatgacataaatttcaggggggcatgacattttttaatttgccaaacaagggggtggaaaaatttctggaacatgatgggagaacttccactgaatcaccttggagggggccttttgaaattacaattacccttttaatgtttacaagacaaccccttaaaaaatccttaaattccaataaagacccccatttaaaaaaaccagttccttggttaagggcgttttttttccaaagggggggtgttttttttcccacacccaaaccccagaaaaaaattttaggtgaacccc

SEQ ID NO: 63230 - DNA, 598 bp, Zea mays
  Clone ID: MRT4577_157666C.1
aggccggccggggctcaacagttggatcaagaatctctcaaatataataatgtgaatggtagatcaagcaggtctgcatatgacgaaattaagttagacttctctcacttccttgatctgaaaataacttttattggtacggtaccttctaagcacagtaaaaaggctgtttcgctttatatctccgacgaccctttcgcctcatgttttcattgtgttcgctgaaacagtttggattcgatgcacccgaaatttttgcaatgattctaccgagactttgggggccttatttgggagcaacaacgcatgcgattttcgggtgcgcgcttccttcctgtcgctgcaggtggtctgagacaaccgtacggcggcagaagaacatcttcaggcggaaggaaatgtggcagccattattgttgcttagtgttctattattattattactgtctagctatagctcatagctggtgtttctttccctttaactgatgatgtttgtaacaaccatagctttactgaatgatgagtaaacaatcagacaatgagcagcaggtcatgacaaaaaaaaaaaaagaaaaaaaaaaaaaaaaaagcggcc

SEQ ID NO: 63231 - DNA, 270 bp, Zea mays
  unsure (1)..(270): unsure at all n locations
  Clone ID: MRT4577_157667C.1
tttttttggtttttttttattgggagggggggcacttttccctcgattttcttaacaagaaaaggtaattggggcaacaaaaccagtgcattttacccccataaagccccccaagaaacctttgcaaaccaccggcttccccaactggaaaggcctaaaaacaaacaaacacctcangcccaaaaaccaagatccaagcaccaaaagcacgaaaccctccaagaagaaaaaaaacccaaacccattcaatgaaaaaaaacgacccgcggc

SEQ ID NO: 63232 - DNA, 739 bp, Zea mays
  Clone ID: MRT4577_157668C.1
aaacagcagccagtatcagctgcctcctctctttctcgacccatagccacatcctcgccccgcgcggcggagcattcagtcatttgccactaccctcacggcctcaccaagctcttccaagcaatccatggagtgtagcaacaaaagtggtgaccggcggctaatggaccgcttcagccagctgctcctctgtccggccaacactttcctcggctcccggtacagctcatcctcgttgacctccacggttttcacagccaccgctgccgccgcctccacaacgctatcgatctcttccacttccaccaccgcagccaactacaccggccgcgccgatcctttctcagccgctctcgaccgccctcctcccgagcgcatgcgctgcaacaaggagcagcacaaggataaggggaagcttcaagaacaccgtcggcggcgcttcaagaacgccgtcgacaaagacggcgtccggacgctctcgtccaacccctacggcttcacctcttctggcgaggaggacgatggcaccgacggttacggcgacgacgaggacacagagactttcttgtcctcaagaagcctcttgtccttcgactcttctggcttctacgcgtacaggaagctgctgaagccaccgtccaagaacaggagccacctcggccgccaggggagacgccggcgttgctgtcggcggccatctgcgagctgcgtggagacgtgcaacgcaagagccgtgagg

SEQ ID NO: 63233 - DNA, 253 bp, Zea mays
  unsure (1)..(253): unsure at all n locations
  Clone ID: MRT4577_157669C.1
gacangnngagaaaggagaggtggtggggcgatggcagcgactgccgcggagggggtggccgcgacggcgctgcgagccgtgctggggcgggcgggtatggcggcggacggtcggggtgcgccgcggaggcggtacgggttgtggcggtggggaagaccaagcctgtttcgatgctgcggcagctatacgacgcgggccaccgctgcttcggcgagaactacgtgcaggagttcgtcaccaaggccccccagc

SEQ ID NO: 63234 - DNA, 280 bp, Zea mays
  Clone ID: MRT4577_15766C.1
gggcgacgaaaaacatttacttttggttaaattttaaagggttccttttcctgttccatattattatttaatcagggggggccaaaataaatgccccaaaaaaggacaataaaaacggctattcgattactcccaaacctaaactaactaaaaaacctgaaatgaaggttatttttttaaaaaacggaactttttcaaaaatggttacaaagtataaaagggccttcatggcttcatattcaacaaaaattaggtgaaaaccatttcataaatgtttaaa

SEQ ID NO: 63235 - DNA, 567 bp, Zea mays
  Clone ID: MRT4577_157670C.1
gatgccgccacgcgctgcgaccgcgaagccgtcgtggctcggagacgcgctcctcttcgccgcgggtgccgtggtggccaccgtggcgctgctcgcgttcgccaacccgttcgctcagccggagggctactacggcgacggagcagtcccatcctctggctctggctcatcatccgtgggcgccgccggcggtggtggtggtgccgccgcccacacgttctacgacgacccggcgctggcgtacaccgtggaccggcccatcacggggtgggacgagaagcgcgccgggtggctgcgcgcgcacccggagttcgccggcggtggcgagaaggggcgcgtcctcatggtgtccggctcgcagccgacgccgtgccggtccccgggcggagaccacacgctgatgcggctgctcaagaacaaggccgactactgccgtctccacggcgtgcagctgctgtacaacatggcgctgctgcggccgtcgatggaccggtactgggccaagatcccggtgatccgcgccgccatgggtggcgcacccggaggcggagtgggtgttggtgggtc

SEQ ID NO: 63236 - DNA, 323 bp, Zea mays
  Clone ID: MRT4577_157671C.1
gagaaagagtgcgatggcaatggagaggtcgttgtcgtgcgcggagaggggcaaccagtacggcgccgtggcgtgtgctgagcctataaacctgcagagctacagcgcctgctacgagcgaccgacgacagcggcgccgtccacggtgcattgcgccatgagcgtgagcacgtggagcacgccgccggcgccgccagccgtgcattgggccatgagcaccaagagcggtcacaccgacgtcgacggtagacattcctgtgaggggctgaatggtagctcctactacgacgtttacgatgactgctacgtgcataacctggatg

SEQ ID NO: 63237 - DNA, 391 bp, Zea mays
  unsure (1)..(391): unsure at all n locations
  Clone ID: MRT4577_157672C.1
tctcgttacngcgcccggggacagcctcaacacggatgtgatccacatgggcnacttattcgggatcactatcaccaacaccggcattggcgtcntctactactgcatcttcatcggccccgggaccttcaatgtgaacatcaccggcgtgacctgcggtcctgtgcactgtatcatcatcttctgtctanggcggtacaaggacgagaaggacgtcacggacatcaacgtcaaggattgcactcttaatganacggtgtgcnncgnncggggcaatgcgtactatgacgccggctccgtgctcaccgtcttcaacatccactacgagaatatcaagatggaggactcagccaaccccatcttcatcgacatgaagtactgccccaacaag

SEQ ID NO: 63238 - DNA, 237 bp, Zea mays
  Clone ID: MRT4577_157673C.1
caagatcagaagccagatgctagacgacgaactggatggcgcaaaggtcaaggcaagaggcaacataatgcagactaacattgtagttgacgatccaagtgattatacaagcctatttatggaccgaggattccagatagaacactagactgcacactgggactgacactatcacttgcactacctaagtcattaaaggatcaagagtagagctaccagtaaaggtatgataagaac

SEQ ID NO: 63239 - DNA, 449 bp, Zea mays
  unsure (1)..(449): unsure at all n locations
  Clone ID: MRT4577_157674C.1
tcgcccacgcgttcgcccacgcgttcgcggacgcgtgggctcgccgtcgcctgcccgggcctcgtcgacctcgacctctccaatggggtcgacctcggggacgccgcggcggccgaggtggcgcgggccagggcgctccggaggctctcgctggcccgctggaagccgctcagcgccatgggcctnggatgcgtngtcgtngggtgcacggagctgagggagctctcgctcaagtggtgccttgggctcacggatctggggatccagctcctcgccctcaagtgcaggaagctcaccagcctggatctcttctacaccatgatcacaaaagctagcttgcctcccatcatgaagctacccagtctttaagagttgacactggtggggtgtattgcgatcgatgaagatgctcttggtagtcttgagagagaatgcagtaaattactaca

SEQ ID NO: 63240 - DNA, 383 bp, Zea mays
  Clone ID: MRT4577_157675C.1
acctatctctatctctcttctgatcttgatttttctcgaaaacaaaagcgcatcggctaccccccccaccccgggcgacaaaacgaaaggcccccccccaacctccgaaagcattgctgggcgccacagactagagcgccccccaagaaaccaccaggggccccgggggaaaaaaccatccgagccccggcggagcagcccccggctttgcccccccccacagaaaaaaaccgggggggcgacacaaagggaagagggggccgccataggccccaccatccaattagacgggacgaaccaaacatgtttcattaaaaaaagcaaatgcggcactaccgtgtacccacccaacgaaaaaacttgcgggagttccttacagaccg

SEQ ID NO: 63241 - DNA, 333 bp, Zea mays
  Clone ID: MRT4577_157676C.1
aaaaaacattaagccccttttaaaaaagggttccctgcaacgcaacttgtttaaaaacagacgccggctaaaaatccaaattttgctgccgaagggaaaaattatgaaccttgcccaggggaatccggtatttaaaaggggggatgaactttaaaacataaccttggggagaaaaagggtcttgccttttttcaggaaccccaacttaaggttcttttttagcaaaaccccaggttctaaaggggggactgggcttaaaacagggggaacaaagccctgcttttctttctactcctaaggtttaggcccaccactttttttggtgcccttcct

SEQ ID NO: 63242 - DNA, 700 bp, Zea mays
  Clone ID: MRT4577_157677C.1
caactttctttttttttttttttttttttttatgcttttttttttttttttttttttttttttttttttttttttttttttttttttttttttttttttttttgggatttttttttttttttttttggggccccaccaaaaaacaacccaaacaaaacaaaacccgcctttgggccccggaatttaaaaccaaccccaaaaaaaaaaaaaaaaccccaaacacccgaaaaacccgggccaacccggggggaaaaaaaaaaaaccaacccgcccggggggccccccaaaagggcaaaatccaacacacggggggccggaacaaagggaacccagcccggaaccaaaccgggggaaaacaagggcaaaaccggtccccggggaaaaagggaaaccccccaaaattccacacaaaaaacaaaccggaaacaaaaaggggaaaacccggggggcccaaagagggacccaacccacaaaaatggggggggccccaccgccccctttccaaggggaaaacccggcgggccaactggataaaaaaaacggccaaccccccgggaaaagcgggttgggaaaagggggcccttccccttccccggtaaaagaacccctgggcccgggcgttcggggggggggagcgggatcagcccacccaaaggggggaaaacgggtacccccaaaatcaggggaaaacccaggaaaa

SEQ ID NO: 63243 - DNA, 502 bp, Zea mays
  Clone ID: MRT4577_157678C.1
gcccgcgtacggacgctacacaattgagtgacttgtaacatgacatcagaatcaattggttcatgtatatttcaggagcgctacctaagacattgcttgtagtttattaacacatggcatattttaagatagcgcattgtgatgattcgtcatcttcgatcatatcaagctgatgccattgaccagctggcttctaactaaaaggctgcggtggtgctagagcatccagagggttgttctgaagctgtgaccttgacattttttttttccattgtacacaggaatgcttcattaaggtcacagcgtcatggctacactatgttaaataccaatgcggaaaagcatgctcacgctgcccaaattttctatttatgggctactgcactcaaaccgcttgattttgatgagcgtagcctggcttatttaaagactatggtggctagtgttaggagaaacacatactaacttgcctatgatactctacgcaagtggatctgtgggc

SEQ ID NO: 63244 - DNA, 794 bp, Zea mays
  Clone ID: MRT4577_157679C.1
aattcggcacgagggcgccccaccattttcgctcggccatcccattccccacaaaaccgagccagccaaaccgatccgcaccgtctcaatcgcatctgcaacgcctccgatccggatggccgcgccgcgcccgtccggcgggatggacccgcgcagcggcttctgcgccgcgacgcggaccttccatagcctgcgcccgtccgccgcgctcccgccggactcgctcccggccaccgcggccgcctacgctttctccatcctctcctccccgctacccgatcgccccgccctcgtcgacgctgccaccagcatttccgtctcctacccctcgttcctcgccgccgtccgctccctcgcggggggcctctggtccgttctcggtctccgccccggggacgtcgtcctcgtagtctccccgtcccgcatggacggccccgtcatagacttcgcgctcatgtccatcggcgctgtcgtctcgcctgccaacccggcgtccaccgccgaggagtacacgcacatgggcgcgctctccagaccggtcgtcgcgctcgcggctcccgaggtggccgctaagcttccgaggaacctcaggtgcgttgatcatcggctcgaatgagtacaagagcctctcctccgccggcggtgtagcgccgtccccgccggtggcggggaagcagtccgacacggcggccggactgtactcgtcgggcaccacgggtcgggtcaaggccgccgcggtctcgcaccgcaacctcatcgggggtgatcagcgcgcacaggaacaaccgggttat

SEQ ID NO: 63245 - DNA, 503 bp, Zea mays
  Clone ID: MRT4577_15767C.1
tttttttttttttttttttttttttttttttttttttttttttttttttttttttttttttttttttttttttttttttttttttttttttttttttttggccccgcaaaaaaaaaaaagggggcccgggttattcattggggcggggaaaagggggccccaatttttttaactaccaaaaaaccaaaaacccggaaggccaaaaagggaggggaaaaaatcttaatttctttgcaaaaaaaaaagggggggtaaaggaaaaggggccctaagggtttggggaaacccttcaaggttctaaaaaccctcttggggaaaaaaaagttcccccaacggtttaaaaacggggcccccaaaaaaaaaaccattgggcccccaacccgaaaattgccggaaaagccttggaggccacaccccaaaaccaacagccccggggtttttggccccccttttgaaatcccaaaaaaaaaaagcccccggccgctaaaatttgcccggggccc

SEQ ID NO: 63246 - DNA, 1181 bp, Zea mays
  unsure (1)..(1181): unsure at all n locations
  Clone ID: MRT4577_157680C.1
gcgaaactcgtgaagacgnactcgcttgcgccaggggagcccacgaagaagccgtcgccgttttccacgtcggagatctgggcatggtcagctatattcgtcgcgtcgttcggcgtcgcatgtttcaatcccacggcgtttggtaccacggcaagaacatgccttcctttcctgcttgctgctaatgtgctgggatacatggttggttctgggttaccacctggcgtcaagaaagtgctgcatccgatcatctcctgcgcactctgtgcagatttcgcggcgctagcctatgggtacatctcagggtttggacttgatgccgtgctaggtgcttacctcacaaaggtgccctctaatcctggagccggtgacgtactaatgactttccttgggtctgtgatcatatcatttgcattctcgatcttcaagcagagaaagcttgtgaagaggcacgcaacagagattttcacatcaattgccatcgcgtcggcattctctctgtactcaactgctatcatagggcgcctgattgggctagagccatcgttaaccatatcaatactgccaaggtgtattactctggcgctggctttgagcatagtgtctttctttgaaggtgtaaactcttcagtaactgctgtcgtggttgtccttaccgggctcatcggtgcgaactttgtgctagcagccatggagaaacttggtctgaacgaccccatctccagaggagtagggacagcttccagcgctcaaggactgggaacagcagcactggcggccaaggaacctgaagcgctccctttctgcgccatcgcttatagtttcacggggattttcggcacgctgatctgctcggttccggcagtcaggcaaagcctgatattcatagctggttaagagatgatctgaatttgacggtttcattctttagataaaagaagcagcttgcttcctccctccgtgttcagaaggtcaggaagcaacgccccccacgccaggtcaggatctaatatgtgtaggggcttgaaaaaaaaaggcgaataattctgtaatcaggatgtaaccgaaatactacagtttttttttcttgtgacaaaatactactagaggaaggtagatccgttatttgtttgacaaaaaaaaaaaaaaaaaaaaataaaaaaaaaaaaaaaaaagcggcc

SEQ ID NO: 63247 - DNA, 1304 bp, Zea mays
  Clone ID: MRT4577_157681C.1
cctcgcctctgccgggatctgggcatggtcagctgcggtaccggtccggaattcccgcgtcgacccacgcgtccgggcgtttggtaccacggcaagaacatgccttcctttcctgcttgctgctaatgtgctgggatacatggttggttctgggtaaatacgtacgcttgtataaactcgatcgatcaataggatcccaagtatgcagttagttttggactgacgtacggtctgagtgttttcaggttaccacctggcgtcaagaaagtgctgcatccgatcatctcctgcgcactctgtgcagatttcgcggcgctagcctatgggtacatctcagggtttggacttgatgccgtgctaggtgcttacctcacaaaggtgccctctaatcctggagccggtgacgtactaatgactttccttgggtctgtgatcatatcatttgcattctcgatcttcaagcagagaaagcttgtgaagaggcacgcaacagagattttcacatcaattgccatcgcgtcgacattctctctgtactcaactgctatcatagggcgcctgattgggctagagccatcgttaaccatatcaatactgccaaggtgtattactctggcgctggctttgagcatagtgtctttctttgaaggtgtaaactcttcggtaactgctgtcgtggttgtccttaccgggctcatcggtgcgaactttgtgctagcagccatggagaaacttggtctgaacgaccccatctccagaggagtagggacagcttccagcgctcaaggactgggaacagcagcactggcggccaaggaacctgaagcgctccctttctgcgccatcgcttatagtttcacggggattttcggcacgctgatctgctcggttccggcagtcaggcaaagcctgatattcatagctggttaagagatgatctgaatttgacggtttcattctttagataaaaagaagcagcttgcttcctccctccgtgttcagaaggtcaggaagcaacgccccacatgtcaggtcaggatctaatatgtgtaggggcttgaaaaaaaaaggcgaataattctgtaatcaggatgtaaccgaaatactacagttttttttttcttgtgacaaaatactactagaggaaggtagatccgttatttgtttgacagtttgtggtgtcatctttctccctccctagaaacaggagagatatagtatgattgataaaatcaacgtttttcagagaccaattatggtatgcagttggataaaaaaagaaaaaaaaaaaaaaaaaagcggcc

SEQ ID NO: 63248 - DNA, 398 bp, Zea mays
  Clone ID: MRT4577_157682C.1
cctcgaggccggccgggccggaaagttgatataaacccttgctatctatctaaagacacaaagagcaagtactagctacatgcaggcgccaccaagaatgaactgagggagtgagatgctgttctcagctgaaggtagctccgaccaaggaagaagcccggctcctgcacgcgaatacctgccactcgcagttcgccctggacctgcatcgcgagctacctcgagaatccacggtaagcgatcctctgcggtgaaacctgcgccgtccaactatggtatacgctagacaagctctgccaatgcattgtgcaaatctgcatgatgtgatatatggactaccagctatatgtaatttgtgccgcgacaaacactagtacggaaccgcgacgatcaacata

SEQ ID NO: 63249 - DNA, 652 bp, Zea mays
  Clone ID: MRT4577_157683C.1
ctgcaggttcggtgcggaactcccgggaaaccactctaacctatatggattgaggtaaataagttctacttgtctgctttagagaattactagtagccttcaaaagtgagttctcgtcttgcccaattcaataatcactggtccaggtagacaataactgatcaggtggagctcctggctttatatcaatcctagtggcaaccacaatatgtttggagatacatggtctagtatcagtgacattagatgaaccaaacagcaccttagtgcatatgaactgcttttgtgaaatgcattgtggttgctctaagttagtgtccctatttcttacccaaggctcctacattatagcattagcatacatcctttctaggctcaatttttagcagtaggccactactagccccaaatcaggatcttactttcatgactccattgtcagtcacatctcagctccttttcttctctctccaatcttgcaccactgtccatagccaccgacttttgttgtcacctgccatgcatggccctcttactgccgctggctgtcatcattgctccctcgctccacagttgttagtcagagaggttaggcttccagtagagggacaataacctataggaggtgaggtttaagctggaagggagagtc

SEQ ID NO: 63250 - DNA, 144 bp, Zea mays
  Clone ID: MRT4577_157684C.1
gattaatgattttgccaatacatactggaaccatttctttcagaaagagtccgaaagaatgtagcatcctatttgaattcctgtcatggcatgctggagattacctatttgtttctttgtagtcagtgttaagcaaactgctat

SEQ ID NO: 63251 - DNA, 555 bp, Zea mays
  Clone ID: MRT4577_157685C.1
cctgtgtgctattagcgtatgccgagtcagtctgctgttagctttctatggaacactttactcttctgtctgccaacccgaatgatgattcctttcctctcttttttgtgccttgactctgggaagaacttcttgtaagaacctgcatttctagatccacactttttttacgttgcctgcttattctgcattgacttctgaatgtcagaactttctaccccgtgctcctacccagaacctgtgaccatgccctaacgtactgtctaataggataaagactttacgctggatattcgtcatcttgacgctccacactgataaccatacgcggaatcgatcccttcttagctgaaggcagtgaattggtgagcttcgattactatctcacacatcgaacatcccgtagcggttaatccgttatgaaggaaacggtatacattctttgaacaatcattattcgcaatcaactctcggcttgcttgccggattaggactcagtctcttgacctgacagcatgcatggaactttacacgaagagcttacaagaagaggat

SEQ ID NO: 63252 - DNA, 240 bp, Zea mays
  unsure (1)..(240): unsure at all n locations
  Clone ID: MRT4577_157686C.1
gacgnnncanggcggaggggcgggngaaaanagctnttgnggcccgntnnggtntttttggcttgccttnctnacgcagactctctggaacgtttcagccccgtgagaanctcatctttcatagcnttagcccacgcggggggggggggggcactgttctaangaagacgagcgcctccggggcgggggctccctggcccggtgggctttcgggggcctgctggcgcgtggcctggtccg

SEQ ID NO: 63253 - DNA, 335 bp, Zea mays
  Clone ID: MRT4577_157687C.1
gctcgttctatctgtgcagcagatctgaggtcccgggcgaccgtgaagcagcttcaatcgtcggcatggcgctcgtatcgcatagtggggctgcaaacaagaatgccttcaaagcacttattgctgcagaatacagtgggatcaaggttgagtcgaccaaggactctgagatgggtggctccaacaagacccccgagtttattaagacgaacccccttgggacgtttcctgatttggctacttctgatagccctgttcttgagagtaatggtatcgcacgctatgctgatcgcttgactgatgtcaacgctctttatgcttgcctccctattgta

SEQ ID NO: 63254 - DNA, 317 bp, Zea mays
  Clone ID: MRT4577_157688C.1
gtccgcctacctgtctgcataccctgaccggaccccgatcccgccggcgtaacgcggaatcgcggccggcaatggcgatacgccacctcatctcactgtctcgtccggtccgcgtggtttccgcgtgctagtgctctcggtagctcggatcagaggggcgcgctagggttcgccaatccccaccgtggcctcttcaaccgggctgccgcctactgcctattacgacgagagatggacgggttcttgcacacgctcaaggggctggaggagaaccggaaggggaacgaaaatttctacaatcacacgctctgcggcgg

SEQ ID NO: 63255 - DNA, 456 bp, Zea mays
  Clone ID: MRT4577_157689C.1
ttttaagaaactagaaattcactttcttattcttgggaagccacaaacgggagcaaaaaaactttattatcgaactataactcataagcaatctaaaagagggcaccaccaatgatggggagtgggcataacgctgtccacataaagacaaagctttggttgaatggaacacatggcaggatttgaaagagggtgccaacgttaggcgcatcgtgcaagtagaacggcaacaactgttgctgtgtaaagaaggcagcagggctcacagcagataactggctgaatggtagtagttgttgttgtacataagcaggagaggtcaaagctgccagtcggttgaatggaagaaattgctggtggaaggaagcagctagctggctgaatggtagcatgtggtggtgttgtaaataaaccgcacagtacaatgcagcttgttgggggaatggcagaaactgt

SEQ ID NO: 63256 - DNA, 211 bp, Zea mays
  Clone ID: MRT4577_15768C.1
tccaggatcagcctgcgatcagcgaatacgccgaatacactacagcaccaaggcatgtggacacgcattcgcagataatcgcacggccgaagcgtcgactcacattaccacctgagctacaatctaatcagccaagatccagctttataacatcatggtgattgacatatggcatcaatagctctcgacctgggcatggaatcatattact

SEQ ID NO: 63257 - DNA, 1204 bp, Zea mays
  Clone ID: MRT4577_157690C.1
gctcggcgcctcgcctcctgcccgccatagctcccaaccccaataccgccgctctgacctgctgttgcatcgccgccgtcggcaaatcgcttccactcttccccgccatctccaccgacaaggctgtctagtgagtgcgcggccctgctcggtggagccagccaccaccatgcccattgtgtgggcggaaggcgcagcacaggggcctgctacttggtggagaggaggacaaatctgcgaccttttcatcgagtagaagcatcggcgctgtggcggccctcctccttgcccattcctctctttcgattcttcgatgcccatcgtccccaatccagtgagctgtaccaatccccatcgccccagaccacagcgcgacagtgagtacagcagcagcagctgagagcgtgagagcgtgcgaagcaggagggaggacaagaagaagccgatggcggttgtgagcggcagcggcgggaggctgaacccctgggcggagcccttcgtgccttccggggcgcggtaccgcggcctgcggaccgtggaggcgacgccggagcaggaggtggaggacttctcccccgagtggtggcgcctggtgtccgcctccccggccttccgcgaccgctggctgcgcgagtacggcgcgctcggcctactcgacgccgaggacgacctggacgacgacgtcgacagcttcctccccgacgacttcttctcgcctccggccccgcgctacgagagcgagcgggaggacgccgcgggcaggagggcgggccgagggcttgaggtggcggcgtggggcatcgacaggtggtggagggcgcacggtgggccgccggagaccccgaggtacgcggagaaggcgccgcggagggtggccgccgccgccagggtgagcccccgccccatctagcagccgcgctgaaggaccagatccgttcatccaccgacggctgctcagtcagtgtcacatcttggcacaggggaaaataggcatgaaaaaaagttctctttcttgaatcgatgcagtttgctttggtgttcgtcttgcgcagtttttggatctgtgctcctcttcagctcgagatcctctgctgcgttgctcattcctgtactgtgtaaatatgaagatgtaataacaataacacgatgtgtgactttttagccttcagttttgccttttcgggctttgacaggcgcaatcatc

SEQ ID NO: 63258 - DNA, 1221 bp, Zea mays
  unsure (1)..(1221): unsure at all n locations
  Clone ID: MRT4577_157691C.1
ccgnatgctctctcagtctccctcccatatccatggttggtggccgtctctccccgcagctcggcgcctcgcctcctgcccaccatagctcccgaccctaatagcgtcgctctgacctgttgttgcgtcgccgctgtcggcaaatcgcttccgctcttccccgccatctccactgacaaggctgtctagtgagcgcgcgaccctgctcgctggagccagccaccaccatgcccattgtgtgggcagaaggcgcagcacagggccagctgcttggtggagaggagggcgaatccgcgaccttttcatcgaagagccgtaccaatccccatcgccccagaccagaccaacagtgagtacagcagcagcagctgagagcgtcagcgtgagagcgtgcgaagcaggagggaggacaagaagaagccgatggcggttgtgagcggcagcggcgggaggctgaacccctgggcggagcccttcgtgccttccggggcgcggtaccgcggcctgcggaccgtggaggcgacgccggagcaggaggtggaggacttctcccccgagtggtggcgcctggtgtccgcctccccggccttccgcgaccgctggctgcgcgagtacggcgcgctcggcctactcgacgccgaggacgacctggacgacgacgtcgacagcttcctccccgacgacttcttctcgcctccggccccgcgctacgagagcgagcgggaggacgccgcgggcaggagggcgggccgagggcttgaggtggcggcgtggggcatcgacaggtggtggagggcgcacggtgggccgccggagaccccgaggtacgcggagaaggcgccgcggagggtggccgccgccgccagggtgagcccccgccccatccagcagccgcgctgaaggaccagatccgttcatccaccgacggctgctcagtcagtgtcacatcttggcacagggggaaaaataggcacgaaaaaaagagttccctttcttgaatcgatgcagtttgctttggtgttcgtctcgcgcagtttctggatctgggctccgcttcagctcgagatcctctgctgcgttgtctcttgtctgtgctaattctcatggctgtactgtgtaaatatgaagatgtaataacaataacacgcagtgtgactttttagctttcaaattcgggcttcgacaggcgcaatcatccatccatgttcccttgcctgttct

SEQ ID NO: 63259 - DNA, 880 bp, Zea mays
  Clone ID: MRT4577_157692C.1
ccggccggggtaccaatcccatcgccccagaccacagccagtgcgacagtgaagaaggagggaggacaagaagaagccgatggcggttgtgagcggcagcggcgggaggctgaacccctgggcggagcccttcgtgccttccggggcgcggtaccgcggcctgcggaccgtggaggcgacgccggagcaggaggtggaggacttctcccccgagtggtggcgcctggtgtccgcctccccggccttccgcgaccgctggctgcgcgagtacggcgcgctcggcctactcgacgccgaggacgacctggacgacgacgtcgacagcttcctccccgacgacttcttctcgcctccggccccgcgctacgagagcgagcgggaggacgccgcgggcaggagggcgggccgagggcttgaggtggcggcgtggggcatcgacaggtggtggagggcgcacggtgggccgccggagaccccgaggtacgcggagaaggcgccgcggagggtggccgccgccgccagggtgagcccccgccccatccagcagccgcgctgaaggaccagatccgttcatccaccgacggcgacggctgctcagtcagtgtcacatcttggcacggggggaaaaataggcacgaaaaaaaaagagttccctttcttgaatcgatgcagtttgctttggtgttcgtctcgcgcagtttctggatctgggctccgcttcagctcgagatcgactgggatgggaagatcctctgctgcgttgtcttgtctgtgctcatccgtgtgtactgtgtaaatatgaagatgtaataacaaaaacacgcattttagctttccgtaaaaaggacaaaaaaaaataaaaaacccccgcagcccgggg

SEQ ID NO: 63260 - DNA, 278 bp, Zea mays
  unsure (1)..(278): unsure at all n locations
  Clone ID: MRT4577_157693C.1
aanggggaggggaaaattttgctttggtttgggacatgaagggctgacataaaggtttcaccccgtgttaatttatttggggggcccacatggtgatctacctgagggtcccagttaagttccagggatgtttcctaacgggcaaagaaacaacaaaaaaaatgggtcaatcacaggggggaactgcatatgggacaaaagctggcctaaatggggttcaacttaattaaggtttggctaataaatacacagatgcctttaacacggtcccttgggta

SEQ ID NO: 63261 - DNA, 968 bp, Zea mays
  Clone ID: MRT4577_157694C.1
tgtcgggtcccccatcgctccggaccacagcgcgacagtgagtacagcagcagcagctgagagcgtgagagcgtgcgaagcaggagggaggacaagaagaagccgatggcggttgtgagcggcagcggcgggaggctgaacccctgggcggagcccttcgtgccttccggggcgcggtaccgcggcctgcggaccgtggaggcgacgccggagcaggaggtggaggacttctcccccgagtggtggcgcctggtgtccgcctccccggccttccgcgaccgctggctgcgcgagtacggcgcgctcggcctactcgacgccgaggacgacctggacgacgacgtcgacagcttcctccccgacgacttcttctcgcctccggccccgcgctacggtaaagccgcctcctctgtctgtgtacctgtctttgctgctacaagtacctttagcaattagcactgctgactcggtgtgtgtgtgtgtgtgtgtgtcgtggcgttcggacggagcagagagcgagcgggaggacgccgcgggcaggagggcgggccgagggcttgaggtggcggcgtggggcatcgacaggtggtggagggcgcacggtgggccgccggagaccccgaggtacgcggagaaggcgccgcggagggtggccgccgccgccagggtgagcccccgccccatccagcagccgcgctgaaggaccagatccgttcatccaccgacggctgctcagtcagtgtcacatcttggcacagggggaaaaataggcacgaaaaaaagagttccctttcttgaatcgatgcagtttgctttggtgttcgtctcgcgcagtttctggatctgggctccgcttcagctcgagatcctctgctgcgttgtctcttgtctgtgctaattctcatcgctgtactgtgtaaatatgaagatgtaataacaataacacgcagtgtgactttttagctttc

SEQ ID NO: 63262 - DNA, 201 bp, Zea mays
  Clone ID: MRT4577_157695C.1
tattgccgggtcgaacagctcacttttctgagggcggcacggagacgaggtggcagctgacgcttagctgctggggacagatccacttggtgctgccgcgcgggacgctgcgctgcttgacggacatctcgactgggaagtatgactgtgagcggccacaaggagaccgcgcccaggaaccccaccacgttggcgaacaac

SEQ ID NO: 63263 - DNA, 376 bp, Zea mays
  Clone ID: MRT4577_157696C.1
attcggctcgaggcacgatggaattttggtttatacaagtgggtgtgttttttaggttcaagcattgccgtccaaatcgtacttcttttgcgaagcggagccaaagagtggcggcgagccctcgtttgttcctagccatgatctctacaggtgtaacaacgaaaaattgcccgcgtttgtccagaaactgaagaaggacatgattgaatatactagggatataggggagggtaatatcccgtactcattaatcgggcgctgatggctatttgattttctaactaaagatacagcttcctgttaggaaagggccgtaaagctcggaataaagctagactggcccgaccacggcatgaagaccgacatgggccccatc

SEQ ID NO: 63264 - DNA, 647 bp, Zea mays
  Clone ID: MRT4577_157697C.1
gctccctgcctcgggacactgcgcttccgctcccggctcagtccggaacccagatgtcatccgttagatcgccgagacacaggaccggagaccatggcggaccagctcagcgacgagcagatcgtcgagctcaaggaggccttcggcctcttcgacaaggacggcgacggctgcatcacaaccaaggaggtcggaagtgtcatgcgatcgctgggtcagaacccaaccgaggctgagctccaggacgtgatcaacgaggtcggtgcggagggcggcgggaaggccgacttgccgggcggggagaggtcagcggccgcaccgcgcacgaccccgccccggagggggggttcaggcagccgcttatggggggtccggcaagggccagaacggcttcatctcctggggggagctccggcacgggatgcccaacctcggcgcgaagccgaccgacgacgagggcgctgagatgatcccgcgaggccgacgtcccatggcgatgggccgatcaactagcgaggagcccgcctaggtcctgatggccaagtgagtaaaggctgcgggaccggccatcggtaccccgcgggaattgaacgacgaaaaccaaaccgtgcatcgcgtattccacaggcctggcaggccttgccttc

SEQ ID NO: 63265 - DNA, 1478 bp, Zea mays
  Clone ID: MRT4577_157698C.1
cattgggtacctcgaggccggccgggatctccgttgatggacaaaagccggcaagcagcggggccacccacgatgcggtgcgcgtgcctcgtgccgtcgtgcgctccctgaggtcccgatccggcattccggcgtcgcgccgatggtatgccaaccttgctctcgaattttggcgaccccacattcccacggcgcttgaagaaatcctagccccgtgctgccgcgctgcaggcggcacgcacggcatccatggagaacgacgcgaaggaggcgaggcaggggcagcacagggtgttcccgtgggggatgctcaaggtgttcctgctgctcggcttggggctgtccgcggccggcgtgctcatggcgcgtcatgggcacgaggtggcggcggccacgctgttccggccgtggctgggcgtctcccccgccgccgccgccgcggaggggctggagcactcgatgacggacgaggagctgctctggcgcgcgtcgttcgccccgggggtgcggcggtacccgttccggcgcgtgcccaaggtggccttcatgttcctcacgcgcggcccgctgccgctggcgccgctctgggagcgcttcttccgggggaacgaggggcgctactccatctacgtccacgcgctgccgtcgtaccgggccaactttacctccgaatccgtcttctatcgacgccaaatccccagtaaggttgctgaatggggtcagatgaccatgtgcgatgctgagagacgtctacttgccaacgctttgctggatatatccaacgaatggtttgtgcttgtgtccgagtcttgcattcctatatttgatttcaacacgacgtaccaatactttctcaactcgagccagagctttgtcatggctattgatgaccctggaccatatggacggggacggtatgactggaacatgacccctgaggttgatctcacacaatggcgcaaaggatcgcagtggtttgaagtaaacagggaagttggcatcgaaattgtgaaggacacggtctattaccccaagttcaaggagttctgcaggcctagttgctactctgatgagcactatatccaaacaatgctctcaattgaaactccgcagagcctagctaacaggagtgtcacctgggtagactggtctagaattgctgcgcatccagcaaggtttggcagggttgacatcacggaggaattcttgagggaagttcgagaggggcagacctgtctgtacaatgagaagaattcaacgttgtgcttcttgtttgctcggaagtttgctccaagcgcactggagccattgttagagttagcacccactgtccttggttttggataacgcatgtttttttagagatttgctggttgaatgtgacttgaatttaatcttacaatacatatagggggcttaggcttattaagggggtatttggtttgaagaattaatatattctaatgaattggtgtatc

SEQ ID NO: 63266 - DNA, 540 bp, Zea mays
  Clone ID: MRT4577_157699C.1
ggtagagaggaacccgatcggtcgtggcacatgctagagcaatcacagaggttctcgacggaggcctcctggaaggaccttgactgtcgtatcatgcttcgtcactacgcgcgcgtgaacgccgcatagcgcctcatgtacctacgcaaccagattttctccggacaggccaacttaatctacctctgcgttcggcacttcgactgttcgtacgagcgacccgtggaaggagttatgcacctctggaagagaggtagctgcacaataccattccaggacacaagatatgccctcatgcatgcgagctatatatacatcgcagacactgacaactatgatgacatgattcagcctactgattgtagaagagatcacactgtcctctgaggctttaagttaatgcttatagactgctcgtagaacctgtatttataacaactgtgagagcctaagttacattgacggcaagaataaatcatgcgggactactcgttcgcaacagcatttatgcttaggctgcctttatgaaagatagccaag

SEQ ID NO: 63267 - DNA, 182 bp, Zea mays
  Clone ID: MRT4577_15769C.1
ctgttacacagtgggctgttgggttggtggctggcttttcctctatggacttcctcttcctggccccacctgaataggcaccacaccttgaatctgcaccctctggagggcatctgtactcctgtgcaaaatgcccagtccagagacaaaacctcagactttgtgcacctaggtttccttcc

SEQ ID NO: 63268 - DNA, 504 bp, Zea mays
  unsure (1)..(504): unsure at all n locations
  Clone ID: MRT4577_1576C.1
agcagggaacaacgcagagacgcggnctttaagatccctttctcttttggagcgagcttaaataataatctcttcatgacgagtttttcattatgngaccagacatgacggaaatgctagctctttcatatactcagatccgcctccgccgcatctgctgcacgcccctccccttctgcctgtctttcactcccgcagcccatcgccccgggcccctccttcgtcctcccctccccgccgccccctcccccgccccccgacccgcccctgctccgcccccccccccccccccccccctctcccctccccccccttctcacgcccccccctccctctccccccccccccccctccccccccccccccccccccccccccccctccccccctcccctcctcctctcccccctcccccccccccccccccttcctcacccccccccccccccccctccccctccccccccccctcctgcccccccctcccccccccccccccccctc

SEQ ID NO: 63269 - DNA, 472 bp, Zea mays
  unsure (1)..(472): unsure at all n locations
  Clone ID: MRT4577_157700C.1
cccgggnagccgaatgtgatgaacgatgctgggnacgcgacccgggcaagcgtcccgagatggcggaggtggtgtccatgctggaggcgatcgacacctccaaggtggcggcatgatccctaaggaccagacgcagggctgcctctcgtgcttccgccagtaccgaggtccctaacgcagggttgtttatttatacccggtgaaatgatgatattggtctctacactacaactcagtgtaatctaatcgcagaagtggctatataatggagaagcttatcattgcttgccatgggtgtaaatggatggggcggggtggttgacgattggtgtgcttgtatgctcgcttcgagttataatgcttgctgtaagttaaggtgtggacggagttgctgttgccgtttgctcacatcgttaaattcgtgggcgtgacatgaagcaaggttatgtactacgtattggatttttttttt

SEQ ID NO: 63270 - DNA, 533 bp, Zea mays
  Clone ID: MRT4577_157701C.1
agcagtggtaacaacgcagagtacttttttttttttttttttttttttttttttttctggaatgtatatataaaaacatgagttttagttacatgtggaatatttttgttaccttgattaagcagcaaactttctgctctaatcgtcaggttgactaaagtaattcaaagcaaatgttgaaggttgattgaaactagtttttttctagactgaactggggaaataaaagcaagccaaagtctccaacttaaaatttgaaaccgaattttaaattatccaaattatgtttacagcattcgtctccatctgtgttaaaaaaatcaacttttgcatagataaattcataaggtttgtcctgcaggtttatatcttgataagaataaaatgttatgtttgcagacttggtcttcatctgtgttaacaaaaatctaggtctgaacttttgcacggataaattcataagatttgccctgcaggtttatatcctgataagaatagaaggatcccgcgtactctgcgttgttaccactgct

SEQ ID NO: 63271 - DNA, 1272 bp, Zea mays
  Clone ID: MRT4577_157702C.1
aaaaggccacacacagtaaaatctcgtcgccgccgttgggctcgtcgccgtgcgtgggtgaccgcgatggacccgaaccgccctccgcttgggcgccgcgccttcctctcctcttccgtccacgctgcaaccgcgctcctctcgatccttctcctcgtcacgctcctccgcctccccctctccacctccccgcacgccgcctccaccatcgccgaccagaagcctaaggagcagacctgcgatcccacctccccgctcgactgcgccgacccgcgcttgttccatctcatgatgcgcagcgccatcgaagccttcccggccgtccattttgctcgcttcggccgccccgtccccggtgaccccccatcctcctcttgcgacatggcctggcgctcccgctcagacttcgactccccctctaaggctaccaccaaggactaccgccgcttcgccatcggccgcgacccccacacatgcgcctactccgtcctctcaatcggcgattaccattccggccccaatgcccgcaagccccgccgcggcgccaccaatgccaccatcgctactccaccaccgcctgcgctctcccgctcccagttcgccaagggcgcgtacctcgcttacctcggcggcggcgaccgctgcaagcccatgccacactacctgcgcagcctcctctgcgccctcgccgaggctcgctacctaaaccgcaccctcgtcctcgatctcacactctgcctcgctgcctcctatgccgcccctgggactgggggaatgcctgaggaaggcaagcgccttgccttctacatcgacgtcgagcacctacactcccaggtccccatcattgaggagagacagttctgggcagactgggacagttggggggtgcagggccaactccgggcacacctcattgaggacaccaggcttgcacttataaagttctccaaggggaaggacaccctcatcatcagaaaattcggagacgtcgagccaggtaactactggtacaatgtctgcgagggtgaggcaaagcatttgctcagcccattgcactgggtgatacgctggacttcaagcttgatgcacattggtgatgatatcctctcaaggatgcaaccagactttgattcggtccatatcgatgccaagggtgaggacctgagacagaaggtcgaggaagttcttggtggaaggccgcaagtgtatttttcaagggttggggtcaacaaggcattggttgagtcacttaaagaaaagtgcattgggcat

SEQ ID NO: 63272 - DNA, 262 bp, Zea mays
  Clone ID: MRT4577_157703C.1
ggggaaaccgtgatttccattattattaaaacgtttttaaaattgttaagaacggttaggactctgacctttgagacacctcagttacattatcaagacctcaagggccacctttatgagctctagaaaggtcaacacatgttagaccggctgaactgaaccaagaacaaaaggaagggtgctggtgtttccttccctcccaccccttttaacggaatgaaggggttctattgccgaaccttaaagacaggaagggccctta

SEQ ID NO: 63273 - DNA, 340 bp, Zea mays
  Clone ID: MRT4577_157704C.1
acgaccttttgttttttctgttgaaggagtacaacctttctgggggcctgtgcccgcgcgaggcgaccaaatactagttcgtgccaaaaacgcgaagcctgacagagaacaaaccatccccttgaaaggtaggataccgcaacggattcgcgctgctgaattactacacggcgtctggcacgctgggcgacggacgtctcacggatgttgtagggatcaacaccaaactgctagtctgggccagagtcaccgccggcatggccgaccacgtgaaggtacacttgaccgccgggatcaaaaggtctcgcagtcggtacgcctacgaggctcgaaggggcgg

SEQ ID NO: 63274 - DNA, 312 bp, Zea mays
  Clone ID: MRT4577_157705C.1
ggacagttatggtgatatgcctgttcacaatcttctgtggagggagtgtgcaaagtcctcatgtgacgtttccgcatggttggcattgattccttttggtctaggtaccacatcattgttgcttccttctgtgtgatgcttgtcctatgtatatgctttatttttgtacttgagcttaatagtctccggtcttcacttggtagttgtagtttatgttttaggtgagaatgcttgttgaagaactctacattgttaaaaatgaccaatttgttgattattagaaccttgatattaagccagaggccttgatgt

SEQ ID NO: 63275 - DNA, 563 bp, Zea mays
  Clone ID: MRT4577_157706C.1
gccaggcgtccggccagcccgtaggccatccggttcgtcgatcggagcctcgttagcatcgactccacctactccttctagtacgctataaactagactagagcaatacgcgcagcggatgttccaccgcctgatgcggcgcgcgatgccgctcccgccgccgcatgctccgcttactgctgcggggatgccgggggtcaccggcggtcgcctgttcgcttcgctgccgttgcagtcgccaatacaggctcaaatagaggagcatgtgtcggatcagttgactgatgagttgaaagatgccatgcacatcaagatgcacacggagcttctttggaatactgaaaggaagactgacgtggatatgaacgggaaaaaggcgcagataggcgccgcgctgttccgtacactgctgtgcacaaatacatagagatatacagatcgcagagcagatccaagatcattagacttgaagaaaaacaaggatgtgctacctgaagtactgtacagatctgatgacagcacgatagaatggactatacatcacactatatcacacacatgat

SEQ ID NO: 63276 - DNA, 274 bp, Zea mays
  Clone ID: MRT4577_157707C.1
aaataaaaacaaaaaaataaaaaaagggccgtttttataaaaagacccaatcttacatacgcggtgcatgctacaagataggtgggatataatagccaccaaaataaaatgggtctggcctttgttttacaccgtttttactgtttcattccctgtcgttatccctcttatttgttgtgcagtacattcctctttctccggctggctttattatcgtggaggctcggaccgttcgtcctttccaacattttcgctaccttgaatggcttatggc

SEQ ID NO: 63277 - DNA, 296 bp, Zea mays
  unsure (1)..(296): unsure at all n locations
  Clone ID: MRT4577_157708C.1
atctcaaggtgcgcgggcctcggttgccccgtgcagaggtattagaaatctacagggggtcccaggaaaatccttggntttctgaattgcctctaaagatattgaactgtgttcgtgttttagctcgcccccactcacaatgcttcacggtctacattctattcagcttttgcggcagtacttttgatggccttgaaagcacatgccttaatgcttttgtctggttgagcacacttgtgcgggtccttcggattggtcttgtgacactcaaggcagcctggcccggacgcgtgggg

SEQ ID NO: 63278 - DNA, 378 bp, Zea mays
  Clone ID: MRT4577_157709C.1
accttctctggggcgggggttttttcacgggggcaaaatttaatttccatcaaagtctttatagcgtgactggttacataaatgtttgagccccacagttgggacccttttagcatgaatatacaaggaccaaaataccatgcgatgcgatccgaaaacgcaaaatacacaaaagcgggttggggttgtgcagtcactaactacggctagacttagggggtaacagtaccccctggttaaacattagggagtaaagacctaatctataattacaaacgggaagggtagacctgggatgcacatttttaaaggggggcaccaccacataccgctaaccttcaaaaggccagaaaagttgttcctgcaattcttgaactt

SEQ ID NO: 63279 - DNA, 293 bp, Zea mays
  Clone ID: MRT4577_15770C.1
caccagccgccgccatgtcgaagcgaggcaggggaggttcggcggggaacaagttccgcatgtcgctgggtctgccggttgccgcgacggtgaactgcgcggacaacacgggcgccaagaacctctacatcatctccgtcaagggcatcaagggccgcctcaaccgcctcccgtccgcctgcgttggcaacacggtcatggccaccgtcaagcatgggaagcccgatctcaagaacatggtgatgctcgccgtcatcgtccgccagcgctaccgtggcgccgcaagtcggtgt

SEQ ID NO: 63280 - DNA, 305 bp, Zea mays
  unsure (1)..(305): unsure at all n locations
  Clone ID: MRT4577_157710C.1
gggtaccnctcgaggccggccgggccggacccatacctgactgtggcgaatcggcccagcactacacgaccacgtgaggtggtgctaaggtcgtctgcgcaccatagcgacctgtcctgtggcataatagctccaggtgcagcgggagtacaaggcgaaggatgtcgtggcagcgcagtgcttcggccgccttagatctcgagctcctcgacggctaaaagcacgccctgatggagtgccgcgcctaggacggcccggccaaggccttcgatggcgctaggatgtcgaagtctctcacatgacca

SEQ ID NO: 63281 - DNA, 183 bp, Zea mays
  Clone ID: MRT4577_157711C.1
cgcggggtgttgtacagggcgaccgggacgcaccagtggctgggcttttgggccagatcgtgccttcctatacaatgtcctattttgagcccatggtgaagatgcattggtgagggactgcgcacgatcacccatctagctaccatagccctgctacacctgtactacctatcgtatatcatc

SEQ ID NO: 63282 - DNA, 105 bp, Zea mays
  Clone ID: MRT4577_157712C.1
tgcgtgttgtactgatttacataacacataattgctttctgccaaattgaaacatgtttcctatcattgtccacctcattttcttcacgacatgtaggtgaccat

SEQ ID NO: 63283 - DNA, 371 bp, Zea mays
  unsure (1)..(371): unsure at all n locations
  Clone ID: MRT4577_157713C.1
gggaggagcgcatgccgacaagagagctcttgtgtcccgccgtgattcgtgggccaggaaaggacgcacagngccggcctgcgatggcagcccagacgcgagacattcccctccttgccattatctacgctagggaagaggagagcagttaccaggctaacatcagcgggttaggacgaatttttcttgagcggctctcagagctcgggggggggggaggctttcttcctgttgccggtgggacacccggggatcccagtgcgtgctgaggcgactctagggccgcccccgtgtcggatgttaacatacgatgatttaatagaaggaggcggagtaagagataaagaagatgctggtattggagcccgggc

SEQ ID NO: 63284 - DNA, 271 bp, Zea mays
  Clone ID: MRT4577_157714C.1
tcgggccgaccctcccgtccggcagcttgttagagtgcttgccaagaagtacacatgcttccttgttatcagaggccatcatcaagcagaggctccgcttcctattttctggcatcatcatggcaggcacgttccctgccgtggttactcaccaataatccctccggtccagggggaaggagactaatgcttccgttaagttacatcttagggcggtccttttcatgtgtgcaaccttacgcacctttgcttgcgaggacatacatcttct

SEQ ID NO: 63285 - DNA, 196 bp, Zea mays
  Clone ID: MRT4577_157715C.1
gccatcctcttatccagacctgacagactgatgctggtgcatgattataacaatgtctcatccctagtcatactctctccatgatttgtgaatctatacatactcctgtttttggatactgttaccctagattaattcctacctgtacctgaagcttcccaccttcccatatagtgagccttattaaaactaggct

SEQ ID NO: 63286 - DNA, 185 bp, Zea mays
  Clone ID: MRT4577_157716C.1
cttagggggtaggctatttataaacttttgttagattttacacacaaaatggtagatcttaaaatcctcccaccattagcaccaataggtgcaattgaaacccaattttgcgcaacacaccaaatttggggagaatgcaaaaatatgttcagtggaacaacatcacttccacaccttagacagta

SEQ ID NO: 63287 - DNA, 310 bp, Zea mays
  Clone ID: MRT4577_157717C.1
catacaccaatatttcatcatgaggatatattcagttttttcagctctttttaggtcttctctctctctctctcttccctctctctctctagctagctagcgtcttcttcaaccggaggccataaacacaggagaattccagacctccctcgtccccagaccacctaaaacagctgcggccgcggccccaaaacaaattcagattcttcatcaacacccccccccccggcttcaaccaatctttccatgaggcccaccccccccccaaaaggaaacataccatcatgagcagtcattcttaggaggggga

SEQ ID NO: 63288 - DNA, 1093 bp, Zea mays
  Clone ID: MRT4577_157718C.1
acaaaaccttctctgacctgcatcctgaaccgcgtggaaagggccccgttatttagaaatccacaattcccgactgggaacagcacataaataccatcattgtgcgggaggcgttgatcaaacaaaaccaagcggtcgagctagataagacaaccatgaagatgcacgaggtcgaggagcctccagcggagatcacccgcgacgcccacccggcgcacgcgctgaggctggtggccaccgacgacggcgcgccgttccggtgcgacgggtgcaaggagcccggcagcggccaggggcggcggtacaggtgcggccacggctgcgacttcgacctgcacgtggcctgcgcgctggcggggccgactctgaggcaccccctcttcggcgagggcctcgagttccagctcctcccggaggcgccgccgcccgtcgacaagacgttctgcgacgcctgcggcctgcgggcgcccggcctcgtctaccactgcttcgacagggacctggacctccacccgacctgcgccgcgctgaagccggagagcgccttcccgggcggccacctggcccagctcggctgggaggccgccgagcaccgctgcgtcgcctgcgacgccgccgccgccgccgccggcaagaggttctgggcgtaccgctgggcctacggcggcacgcacgggtacctgcacgtggcgtgcatgaagaagatcgcctttcagagctgggaacaggcctaccaggccagcgtcgtcggcggcggcctcgtggaggcgagcgtgccgacgatgacagccgtgctgcacaggaagcgcaccgacgaaattacgggcggcgttaagattatcgacaccggcatacgcgggcagtacctttccagttcaacttggggtacttaaataattggtactatcgctctagtttattacacccaaaatactgctggcacataagagggctagctgcctagctatagtgccggcctgtgaatcaagccaacgactttgtgtaccgttgccacctcagctgtgtttaataattgggttttttaagctggtgccatcagattaagccttttttttaaaaaaaaaaaaaaaaa

SEQ ID NO: 63289 - DNA, 688 bp, Zea mays
  unsure (1)..(688): unsure at all n locations
  Clone ID: MRT4577_157719C.1
ctccggaaaaaannannaaaaaaaaaaaagccggccgggcaagaaaatagcaaatttctcggcttccgccacacccgctccaggtcccctcccccaaactgaaacgaagttgcggcggtcgcgactgagtgcagagatgctgcagttcccggcgctgatgcggcagtggccatcgccggcgctgatcccggcgtccacgctgctccccgtgccggccacctcccaggaggacgagcttctcctctccatggccgagtccgacctcgaggataagctgaacgagatccggaagaccaacagccacctggttatcatcgggaagcccacgggcgacaccaaggaggagtacgacgctgaggtggaggacgacgatgcagacaacgtcgaggagtctgacggcgacgacttcgaccaggagaccggttgacccaggtggctcccccgtgcttcgtcggcgtccttgagcgtcgtcatccccgctgtccagtctgtatttcgcaatccctgagttgctccttctatctagatacgctgttaccctattttgctgctgtctgttctcaggatctgagcatgtccttgtcgtgtggaccttgtgtatgaaacaagtacatgattaatcggtccaatttaaatgctatattgtaaaaaaaaaaaaaaaaaactcgagactagttcttcctcgtgc

SEQ ID NO: 63290 - DNA, 436 bp, Zea mays
  Clone ID: MRT4577_15771C.1
aaccgcctcttaagtatgtggcagcgcacagcggcggccaggcttggagtacaagaagaaatcaagcaagactctcatgtcgcgctgccttgatcatgagagccccgcacgcgggttagagaccatttacctaactacgcaagattactgaccgctaagctctcaagcactagctcacgagctggtactaaataatgggctatccagatgggttatctgttacaattacttggctaagaggatggacttggatagaaaaatctgcacagcggaggggcaagctgctagctcatagtctaaggcatacaaagagaaccctactctgccattggggactggaagagcagtcatcatgggagcctatcttaatgacactttgataaaagtgtatacatctggtcgaacaaacaatcattgggacggcgctttagacact

SEQ ID NO: 63291 - DNA, 162 bp, Zea mays
  Clone ID: MRT4577_157720C.1
ttcagaccgcaccacgttcactcaggcgtcacgtggcagcgctacggtcatagtctatacgcaacgctagctcaagtcggggcgcggggtcgctgtttccgtgtactatatgctctcggcacctcggatcagtagtgcctgctacggttggcttgtccccac

SEQ ID NO: 63292 - DNA, 871 bp, Zea mays
  Clone ID: MRT4577_157721C.1
gctcgagggccggccggggccgggaatccactcatccatcatcccacctctcctcgccttccttccaccaccaagcaaaccaaaaccaaggaagccaagcaaccatgtgcccgggcctccgcaacgccatggccacccacgaccatccccagccctcatcctacctgctcgacctggccgccgccgacgacctgcccgccttccgccgggccgtccaggacgacaacctctccctcgtcgccgcatccccgtggtacggcccttcgcccaagacagccaagaccaggaccacccaccatctggcgctccacctccgcacccccgccatggtcgccgcgctctacggcagcaccgccgtcctctcctacgtcctctccatcgccccctccgaggccgcccgcgcctccgcctccgacggcgccaccccgctcctcctcgcccacgccggccgcgcaccctccgcgccccacgccgcccgcctcctcctcaccgccggagcgtccgccgactccctcctcgctctcgaccaccgccatcaaaccaccagactccccgccagccccaccaagaaacaacaacatcccgattcctcctcgccgccggaggccaccaccaggaagaccaccaccaacaaggactattcggacttggcccagacggaggacatcaacgcgggcgtcttcgccaccgacgacttccgcatgtacagcttcaaggtcaacccgtgctcccgcgcctacacgcacgactggaccgagtgccccttcgcccacccgggcgagaacgcgcgccgccgcgaacccgcgccgcgtggcctaactcctgcgtccctgcccggacttcgccgcgaccgcaggcatgccgcaagggc

SEQ ID NO: 63293 - DNA, 1381 bp, Zea mays
  Clone ID: MRT4577_157722C.1
tataaactaacatgagttgagttggctaattggtgggagcttaggtgttttaaaaaaaaaaagcggcccgggaaaaaaaaaaaaaaaaaaaaaaacacaggccccggccgggatctattgagggcctccgccacaccacagccgctccgagtcctgcccgactgctccacaggccactcgtcaccccaaaccaaaacgaagctgcgggcctgcggcggcagcaacagagagcagagatgctgcaattcccggcgctgatgcggcagtggccatcgccgccgctgatcccggcgtccacgctgctccccgtgccggccacctcccaggaggacgaggtcctcctcgccatggccgagtccgacctcgaggacaagttgaatgagatccggaagaccaacagccacctgattatcatcgggaagcccacaggcgacaccaaggaggagtatgacgctgaggtggaggacgacgatgcagacaacgtcgaggagtctgatggcgatgacttcgaccaggagactggttgacccaggcggctccccgctccccccatgcttcgccggcatccttgagcgtcgccatccccactgcccagtctgtatttcgcaatccctgagtcgctcctgctatctagatgttctgtgttaccctattctgctgctgctgtctgttctcggaatttgagcatgtccttgtcatgtggacctcgtctatgaaactactagatgattaatcgatccaatttaaacgctgtagtactttcctctatctgtgccagatactgctacttctttccattttattctttgtgccaagaccaacaaaaaaaaaaaaaaaaaaaaagcggcctgaagcactgctttacagaaaagagacatcaaggagcgaattaaattgagctattagtaatgtcgacttgccgtagtaacactcaagtactgtaattgtcaggtgtcattaacctagacattcacatcgaggattcctttaaaaaaacaaagtgttctatatgagtgtcctcttagcagttgaactataaagtgtttgttgtcagtgtgttgctggaatgtgcttattaattttcattgattgcctgttgattttctgtacttgacacccaaaaaagcttattaatttacttttcagttttctaatttaataagaccagtttgtctactgtgttattaggtatgcgtattttgaagctatgaatattgaatacattgtgtctcattttcctcattctccttttactgaacctgtacgtaaaatttcatcaacatttgatgatccaaactccaaagctctgacattattacaggctgtacaacacagtatgccatagtcgtaataaataattactgcaaactgttatttgctt

SEQ ID NO: 63294 - DNA, 464 bp, Zea mays
  Clone ID: MRT4577_157723C.1
ggccgacgggtcggagatgatatgagtaataactgtagtcaacgcatacacacatgaggacaggaaagtagtaaagatgatagagctaacgactcttgaatcgaacaacttgaatatgagaaagaaaaaaagtatttgttccataaaaaaaaaaaaaaagaaaaaaaataaaaaaaaaagggggaaaaaaaaaaaaaaaaaaaaaaaaaaaaaaaaaaaaaaaaaacgttaaaaaaaaaaaaaaaaaaaaaaaaaagttttttcctttcccgggggttattttaaaagggggaaattttgaatttttccaacacatggggggccgttgaagcttccttttaggggccctatttgcccttttggggggctgaataaaaattgatggccccctttttaaaacactttaaactgggaaaaaccttggggttcccaacataaatccctttaaacaaaaccccctttta

SEQ ID NO: 63295 - DNA, 288 bp, Zea mays
  unsure (1)..(288): unsure at all n locations
  Clone ID: MRT4577_157724C.1
cggttgcaccgatggaacgccggtgtactgnnncctgnntgnggccatcgcctnnaatgaaggncgaattctaccnangaatcgtgnnacgacaaattcaggcannnnnngtgcgnnagcntnatcgtctannatttgntcgctttcgagntgannccgtggctagagcgaccaatggccttgnctctgcnngnngaaaagattgnattctcnnnnnnnnnnctcttcnnctccctcgnnattattcccgntatctnngnnnnncttttctcctgcanacaatggttc

SEQ ID NO: 63296 - DNA, 390 bp, Zea mays
  Clone ID: MRT4577_157725C.1
cacccgatcagcaacatggaaagcacaattttgtttcaacaaacacaacaaaaagaaggggctgatttatcttgcagggtgcctccctatcacatcttccagaacctttgcaatacaaatgccatacccctgcatagcgttctatgttttgtactacccttgaccacgcctgactacaataatggaaaccccaagtcttgacccctacacgatgcacctggcacaggcataacgcatcctacatttatgagcaccctacatcaaccaacctcaacttcaacaacctcagctacccaaaccttgctgaatactcttaacaacatcaagttcttccattcaaccaacttgctgtattgaactctgctgcttatttgcaacaacaattaccat

SEQ ID NO: 63297 - DNA, 675 bp, Zea mays
  Clone ID: MRT4577_157726C.1
atggcacgaactgaggacaaactgagctctataaaccagctactattcgactatagagaccttgctcatttacttactccatcgagcttgaatcgagtccaacgttcatcaaaactcactgtcagactaatcacagacttcaatgaggcaaaggaacaagttctgataataagggacaacttgagaactgcacaatccagacataaaagctatgcagatacccgaagaagtcagttagaatttgaggaaggtgatcatgtgtatctgagggtatcaccgattcggggtatgaggagatttaaagttaaagggaaattgccccctcgctttattggacccttcaagatcctaaagcgagtggaagaagttgcctatcaactggagctacccaaccatctagcggatgtacatgatgtattccatgtatctcagttgaataagtgcatcagggtgccagaagagcaactacctatggaggaacttagcgttcagggtgatctaacctacaaggaatatcctatcaagatcattgataccttgacttgtgttaagagaaacaaagtgattaagatgtgcaaggtacaatggagtcatcacgtagaagatgaagccacctgggagcaagaagatgagctacaagtagaatttccccacatttttcctagttcatcgtaa

SEQ ID NO: 63298 - DNA, 182 bp, Zea mays
  Clone ID: MRT4577_157727C.1
aagcaacctagaccaagacctctttctggtctcgcgaggagagcgcgcggggtttgtaaaatatataccggtggcccctcccttccctcctcctttcaatgttttgcacggtttccattccgagctctccagtcttttctccctcaccccgtcctctttcctgtaatgccactcttcatctc

SEQ ID NO: 63299 - DNA, 614 bp, Zea mays
  Clone ID: MRT4577_157728C.1
ctcctcgtacgcaagaagagcagcagccgcttcgcgatcggggacgcggagaggggaaaggcgagtcgtcgtccgtccacggcagcttccctccctctcctctccgcccccgcttacctagaccggtccctcctacgccccgcctcccgccggcgcatgatgattacctctccggtcgatgtccgccgttcgcgacgcctccgtcgtatattgactacgctgcctaggactcggggaagaggcacatcttggtgcatgacaagagggttgcctcaaacgtggatccggtcttcgtggaggggctttacaactgctcgagcaccgcctcatggatttacggatggaaatggatatactaaattttatgcagaacactcacgtgcagaagttcgaaatgcacaatttgccgagttcttacctaatgtgggctggtcatcgtgttgcacagacattatggtttagagactatagcgcctgtataggttcaaactaacgctcagataagaagatcgtggtcagaaaaacaccatatattatgcgaccatggaatattatacctacaactcctaagatcaagcaagaaatgatcatgacggacgagataagcttaatct

SEQ ID NO: 63300 - DNA, 446 bp, Zea mays
  Clone ID: MRT4577_157729C.1
atcaactccaaattgggttttagcacaattaatattagtttgcattatgtagcaatgctcatgactcatgagccaccaacatattttttctgggacacagaacatacaaaatcttttaaaaaggggttatattgaacacttcatcaaattggtgggggacttaagctattttcgttccttttggcagctcataccaagtttgagggttgtagtcatattctacgtatggacggggcaacttttttaaggaaacgatgtcctcaaaattatcatgcccataaagaacaaggattttgcaatcacattcttttcctgaaatatgtgttttcctttcaatagcatgcacttcagcatcaaaatagagaccactctgttcaccttaccttggaacaaaaaacagggtcccaaaaataaacattttcacattcttgggccttgtttggcac

SEQ ID NO: 63301 - DNA, 597 bp, Zea mays
  unsure (1)..(597): unsure at all n locations
  Clone ID: MRT4577_15772C.1
aattcggcacgaggattttcagtacttcttactgctgttttaacttgatgcgactaaaggctggtgttgggcgaccacgtcctgatttcttctggcgttgctttccctgatggaaaacctgagtaaacaactttactacaggcgccatatgccatggccaggcgagtgttattaaagaaggtcataaaagctttccaagtggtcatacttcatgtaagtgacattattctttacaaatatagggattagtcccatgttattagagctaactgtttgggacatgtcctattttaatgacgtgctaactacctcctcagcagtttagtgaatataataattgatgcctccttttctaggttctgatctaaatcagctaattgtatgggacanaggtgtttaatatgnttttgtatacaatatattgtttattcaagttctcaaaaacaaatgtattgatggtttttccatttctatctngcccatgtgatccttttagccctttatgtcaaatactgcattcttccttcactcttccatntgagtacggattaanaagtttgcagtcagcttgacacaaaatattgctgctgcaagtga

SEQ ID NO: 63302 - DNA, 564 bp, Zea mays
  Clone ID: MRT4577_157730C.1
actaccctgctccctctcccaagccaccgccactccttctccctcttgcgcaaccagagcgcacaaacccaatgcggcgccggcccctcctccctcttgcgcaatttggctgtgtggccacggactatcaagaacaggcagtggatcctgacccctttttctctcattccagcagcagcggtggagaagatcctgcaggtagtgcagcagtgaggcggtggatctccagacagtgcagcagttgggtggcaggtggagcagccccagccagtttcgtttctagtggggagcgtgttgtgctggtgtgagatctgggcggggcctttgttatccggtttgaaaccacgttttcgggcttcgaattttgcggtcccttatccggatgttttttttgggttcccgttctcaggcgaggtcgagcagcagaggacgccggcgacaactaacttgctctccggagcggagggcgaggaggtcgaaaggaggaaggagaccatggagctgttcccgcagagcgtcgggttccacatcaaggatgctgctgaccctagggaggagcaagga

SEQ ID NO: 63303 - DNA, 2319 bp, Zea mays
  Clone ID: MRT4577_157731C.1
cgaagattcccccgttcctgtctctgcttactcacctctcccatgagacgaagcataaaatcaaataggatatgtgggttggaaataggtcgtgaaattgattgaaatacctggggcttgagcgtgatatatagagggtggtagagaccaagcgacgttgggcgagcggcgccgccagggctgcgttggtcccttcaccggtgatgagcatccaccagatacaggaatgaacaacattgtgtaggcacctcatccagacatctaaggcgaaaaatgctgcgcctgcaccaccatagtgcacctgtctctccgcacgctgcgatttgtccaccgagtaggcttgcttgttcttgcatatgtaacaagccaaacagcagaatcaccgcttcccaggggtggtcttccataaggcggcgaatcaccactgttgccagtggccagtcagtaccaggatacacacctgatgatggcgatcaatgccttgaaacaggcaacaagctctcttttgctactgtgaaggaggctttcatcagcagcctgaactctgtgggtgtcagaagtgagctaattcttctagctctaccagcagtcttgggtcaagctattgatccaatagcacaacttatggagactgcatacatcggtagattatgtgcactggaattggcatcggctggtattgggatatcgatttttaatattgtgccaaagatcttcaacataccactgttgagcattgcaacctcatttgtggcagaggatatttctaggagtgctaccaagcatcctagttcaggcaaattggagctgacatctgtatcatctgccctgatcttagctgctggaattggtataatggaagcattagcattgttcctaggatcaggattgtttcttaaactaatgggcgtgtcacctgtatctccaatgcacagacctgctaaactctttctttcattgagagctctcggagcacctgcaaatgtgattatgttggcagtccaaggtatctttcggggattcaaggatacaaagactccggtgttttatataggtttgggcaatctttctgctgtagcccttcttcctctacttatatatggctttaagcttggcataactggtgctgcaatttctacagttgtgtcccagtacattattacagttcttcttatttggtctctaagtaaaagagctgttttgcttcctccgcgaatagatcaattagagtttggtggatatctaaaatctggtggaatgctgttgggaagaactctttcaattctgctaactatgaccattggtacatcaatggctgctcggcaaggcccaacagcgatggctgctcatcagatttgtttgcaagtatggcttgctgtatccttgcttgcagatgcattagctgtttctgcccaggcgctgatagcaagctcttatgcaatattggactacaaaaaagttcaaaagacagcaatgtttgcgttgcagataggagtgtttagtgggttagctttggccattggattgtatgcctcatttggcaatatatctagactgtttaccagtgacccagaggtcctaacggttgtcaaatcttgtgcactgtttgtctgtgccagtcagcccatcaatgccctggccttcatctttgacggtctacattatggtgtatcagattttgaatatgtggctcaagctactatcgtggtgggtgttacgtcttcactcgtcctgttatgggctccgtctgtatttggcttggctggagtttgggctggtttgactacactcatggggttgcgtatggctgcaggcatcctgaggttgctacagaaagcgggcccttggtcgtttatgcacgaggagccataagctgaggtgtatcaactaccagcctgcgcagtttggagctgctaacttacttctgggagtttacatcactgcaaagattatccgagtgtcatggactcgctgaagatgttacccctgttactcctccggctcagaacaaaatctgacttcattgaatttcttaaaatcagtctgctagatggcatggtttggtttggattggtttggtgaaggcgtgaggcccatctgaacatcggtgcggcctctattttttttggcgaactcctttgtatgctatagcagctgtgcagtttctgtagaagaaaagatacaaggatcatttatagcatcgatatatgatgtatgcaactcctctgaattgtactcggtgtaaattattttagaaccgttttgttgattattattttagaaccgttttgtaaactaggtactacgtgcatgtctccc

SEQ ID NO: 63304 - DNA, 507 bp, Zea mays
  Clone ID: MRT4577_157732C.1
tcgagcggccgcccgggcaggttaaagtaaaaaaaaaacgaggaaaaattttaaaaaatttttttttttttattattttaatttctttttcggaaaattcctatggcaaatttgggcggttgtccttccaaatggggggttttttttccccctttttggaggccctttttggccctttggcgatcctttttaaaattaattggggggatttttataacgttgccaaaataaaaaccctggcataacctaactttttagccttgggggaaattatcttttagccacctggcgttttttttatgaggccttatcccatcttttttggcaacagttcctcccctttattggcaaatgaaaaccccctgtagcggtgcattaagcaattgggatatggtggtttataacaggtttaccgttaaattttttatctcctttccccccctttttttccattttttccgttttttttttgcaaggtttaaaggtttttcccccaaaagggttaat

SEQ ID NO: 63305 - DNA, 280 bp, Zea mays
  unsure (1)..(280): unsure at all n locations
  Clone ID: MRT4577_157733C.1
atataaaacccanntgctgtactctgaatttcttccggaaatctaatacccaaattatcctcaagggggggaaatctttgaagggttaaaatggtcaaaaaaaaaaaaaattgtgtggggaaaaatggtttatagtttaaaaacaaagaccattttttaagtcatgggactgttttttcacctttctggaaaaaaaaatacacaattgaatggttgttttaaccccagagcccagtttatctgcccaaacttgtggttttggggtgcttttaattttaaa

SEQ ID NO: 63306 - DNA, 364 bp, Zea mays
  Clone ID: MRT4577_157734C.1
attcacgggtcgacccacgcatcagcatttatccagcctgatctctacagatctgattgataccatgagcgacgaattctcgaaaaggttttttgactatgttgatgagaggaagaacctagacatcgatcgtctcgctgaggctgtcgcgattccatccgtttcctcggatttggaaaatcatctggtcgacatcaacacattgatcgcttggactaagggtcatatagagcgcctcggtggattgacggagctcgtcaccatccccgcatgcaccgaatatcgccctttgcctccaattctgtgcggttctttcgtttcgaacccccatacaaagactgtatgtgtgtatggtcacttggac

SEQ ID NO: 63307 - DNA, 187 bp, Zea mays
  Clone ID: MRT4577_157735C.1
ggctcgcaggtcgaggaagaacgtagctagatacgttaatcggtgttatatgcaatagcttttaatacatcactcgactttctaatgcacaatgcggctggtttcttttgaaaccagcctcatctgactgagagtatcgttcgtctaaattttaaatttaacttgttaaatttaatataaaaattta

SEQ ID NO: 63308 - DNA, 530 bp, Zea mays
  Clone ID: MRT4577_157736C.1
attggtacctcgaggcggccgggctggccgacagatcggccatccgtgcgcggtgaaacctctgtgttctccattgtccgagcgttggcgactgcgtctcccccctcgagccgccgtgctccgtcgtcattggcggccaagttgggagagaagaggtcgtgggtgggcgggtcaggcggcggcccgcttcgggcacttcgaagcgaggagggccgcgtcgagagggcgaccgaggttgccgcagtcgaggcggttcctcggagaagaatcgccattgcgaaacgcctacgttgtccaccaccgtcgttgaaggttgttggcgacaaaaggaagcggagctcgtcgccaccgtcttcatcctccctcgattcgctcctccgcactagatctgagcaaagcaagaccatggattcagaagacgaaaagctccgaaaagcactagatactttgctcaggggttggtgagaagcgttgtgctaacatcgttgatgtgtgaacgctgacttccaacctttccactcactagtctt

SEQ ID NO: 63309 - DNA, 180 bp, Zea mays
  unsure (1)..(180): unsure at all n locations
  Clone ID: MRT4577_157737C.1
ntttatttttttttttcttccctgcttacaagggtctcattttcacgtgcacggctagagcccattatttctctttgtgaagagttgcatgcaaacaattctcccgggggagagacatattctatccactctctaacccacccatcatgggccccgcccacatttaattcccaccgcacc

SEQ ID NO: 63310 - DNA, 600 bp, Zea mays
  unsure (1)..(600): unsure at all n locations
  Clone ID: MRT4577_157738C.1
gccnggccgggtcccgggnaaaaaaaaaaaaaaaaaaaaaaaaaaatacaaaaaaaaaaaaaaaaaaaaaaaaccacccacaataaccaccaaaaaaaaatatataagcccgacaaaaaaaaaagaaaaaaagggaggggggggaacccatgggggtccaaccaactgctgaggccgcccgggggaaaaaagaaacgggccggacgggcggcgccccaccgggggattctccccctcctgccccccccccgaagggaaagggggccaccctccccaacaaatggggggccaaaaagaaaccctgcccccgacacccatggggccgcctgggccaacaacagatgggttacggggcgtaaaaagattaaccccttggtgggccccctcccggaagggctccccccaaataaaaaagaatgctaaggggcccccaacaaaaccccggtcatttgaggcttttctccaaagccccaggttttttaaaaggaatggcccgggctataccgatgcgcggaaccttaaccaaaactcctgtaccagcaaaaaaaacgccgagggatcaattaaaagttttccaaataacgcgcttaagggggccaa

SEQ ID NO: 63311 - DNA, 344 bp, Zea mays
  Clone ID: MRT4577_157739C.1
caaacgtagacttgatcaatcatgcaccatactctattctttctattattacagtgccaaacatgttaatcagtattagcaaacactgagtttttgttcagtaatgcacaacactccactgttagatacattgatttcttgttcaatttcatgtagaatcttttgttaggctgcaggtttcctgttgatcttactataaatgctattttcagcactactcgatttgtgacccatcttccattgctgaatgttcatattttgatccaatcagaagttgcatgttctcaaattgaagaaccttgtttcgtacactttctaataaagctgtgctgagcctttgatct

SEQ ID NO: 63312 - DNA, 1103 bp, Zea mays
  unsure (1)..(1103): unsure at all n locations
  Clone ID: MRT4577_15773C.1
ggagtgcgcttgttanacatgtatggaagggtggtagcatgtcagatgctaatgtcgtattttccaatcgcactaaagatgatgtgatttcatggactgcgatgatcgttgggcatgctgagcatggtcacagcaaagaggcttttgaactgtttgaggaaatgtgccgtatcgggctaaagccagaccatgttacgttcattggtgtactcactgcttgctctcacgcgggggaacttgagctcggattgagatacctcaatgcaatgaacaaaagctatgggctggagcctgaaaaggagcactacggttgtgttgttgatttgttagccagagctggtagaatacatgaggctgaggagttgattggaagaattgctgctgaggaaagagatggtgtggtttggacatccttgcttagggcatgtgctgctcgaggggcagaggaaactggaaagatagctgcagagaggatgatggaggcagagccatggggttcaggagcacatgtggtgatggccaacctctatgcaagcaaggggctgtggtgtgaggcagcacaggaacgccatttgatgaagcagaaaggtgttctaaaaggtgcagggtggtcatcagtcgaagttggaggggacgacaggggggttggagtgtttgtttcaggagatcggacaaatccccaagacagtgccatctacatgatgcttgagctgatgtactatggagccggaatggttcgacaaatccctgatcagttggatttaggatctgaaggggagctaacagtttactaagtcatcctgaaagaagcactgactaaatagagaaatttacatggtaccttgtcaatgatggaacatccatcggaggacaacataaggatacacattgtatcctgctcttcagttgcttcaacttcaagctataatacctgtccatttattgtatctattgttttttgtgggtggctttgccctattctaaatgcaccaactgttttttatttagctatttgatattttccctgctggacataaatcactacatttatggctgatgttttctactaacatggaacatagtgtagcagctctagaacatgg

SEQ ID NO: 63313 - DNA, 276 bp, Zea mays
  Clone ID: MRT4577_157740C.1
cggtccggcatcccggtcgcccaccgtccggcaatactagcttcttctactctactaggctcgtctgctgcagaagtaacagcgcagcatggagggaaggaggaggacgtccgcctgggcgccaacaagttctcggacgccagccctcggccggcggcgcaggcacggcgacaggactacaagagccccgggggggggtcttcgacccgggagctcaagtcctgtccttctccggccggctgccggttcgtcccccttcctttccttcttttctcc

SEQ ID NO: 63314 - DNA, 289 bp, Zea mays
  Clone ID: MRT4577_157741C.1
gttcctgtgcggactcctcctcctactgctgcattccggccctatcgccagtccgtatgcagactccgtacctgatcggaccatgagagccccggacggagttcagctgagcatggagggcacccctgcacacgttgtctggaactgtagactgatgcgggcgacaacaacggagcgaccgacgaccgacgactttggcagagatataattgaggtatgtagaaaggggaggggaatagcacaaagcagatgatgactgcggctgaatggaatggcttctgttaaaacc

SEQ ID NO: 63315 - DNA, 1412 bp, Zea mays
  Clone ID: MRT4577_157742C.1
ccggccgggaacacaacgaaacaaggcgggggagaagagaagccaatcctccatcaccgccaccgcccgagccccgaggcctaggccctgatctctgcctaccaaacaatggaagccacagcagccaccttgtcccgctccgcctccctctccgccggccgcccccaccgctcccgcaccgccaggttcccgccaccacccccacacctcaccccgctctcggctgccgcgtccccgcgcggcctcccgctccgccgagccaggtccgacgccgaggtcgcctacttcgcgagatccgccgtcctcgtccgccacgctccgatccccgccattatcgtggccgacgaggaagagcgccaggatgacaacagcaaggcgccagcaggcctcgacggcgccggcgccggcaggaacggcagcagccaccgcggcggcagcggaggccgtggcggcggcggcggcggcggcggctgtgacatgggcgagtactaccgccgcgtgctgcgggtggatcccgggaacccgctgctgctgcgcaactacggcaagtacctgcacgaggtggagcgcgacctggcgggcgccgagggctgctacgcgcgcgcgctgctggcgtgccccggggacgccgacctgctcagcctctacggccgcgtcatctgggaggcgcgccaggagaaggaccgcgccgcggcctacttcgagcgcgccgtgcaggccgccccggatgactgctacgtgctcgggtcttatgcgagcttcctgtgggacgccgaagacgacgacgaggaaacaggcaccccagcggtcgatgtggtcgcgtcgtgcgactcgccggcgttggtgcccgcgtgctgatcgttgtccgcgtggggtgtggacggtgtccggtggtcacctgcttcatctgctgtgttttgttaggactggtgtacatatgaggacggatgagggcggcggagggagcaccagggtaaatcaactgtcaccgccgtctacggaaccggcgaaaaataattaacaaggaacctcgccgacgggacgaacgcgcggcgaaaaataacgatggccgcagcaaaacggctgggccatcgacggtcacctcgtttgcctctactctaatcattactgtttgtgtttgatagatgtgttagtgcgaccttgtagctggatgaatagctgaatttactgagcagttgatgtacttaggctcctggtgacctaaaatgggtgtgcaaatgtgcaatcctagtgatctaaaatcagtagtgtgtaatcctgtttttctacattgatagtcgatagaggactgcctcgctatatagcttgagctcaataaatcactactaatactagtaccagtgtgttgttgcaaaaaaaaaaaaaaaaggggaaaaaaaaattttatattt

SEQ ID NO: 63316 - DNA, 252 bp, Zea mays
  Clone ID: MRT4577_157743C.1
gagagagcatgcaagaacctgactgcaggttctgagcctgttcacatatgggatttctctgggcgaacaacatacatagttatgactgaactgaaccggtcgccccatgactcaaaatctgcagatcaggaggtatcttcttctccatcaagtcttccatctcatctcatacctttacagttttgctgggattgtattgttactggtagctacttttgaacttattgttgcataacatgccaatgatgattt

SEQ ID NO: 63317 - DNA, 437 bp, Zea mays
  Clone ID: MRT4577_157744C.1
acttcgtaagacgcaagaccacctcaccagtctcctcgtccccgatctcctcccacccgcatccaacggtttccttatcgaccgtgcgcaacaagccatagaacaggaatggcgccggtgcgatacctcacatacggcctccccctcctccgcgcccacgtcgcatcctccgaatccgcggccgtcgctcaggtttcgaggggcttcatggcgtgacgacgcctccgccaagggtgatgagaacaagagccatgatgtctcgagctgcgaaagcggctgatatggcagacgcatgctcctacaggagctaacatccattggactagaaacatttgagtctgacatcaaagataacgtaaagaatctcactgataggccggagccatataaagtcgtagaggacttgaagggtgccaaagggagcaaccaagaatgct

SEQ ID NO: 63318 - DNA, 206 bp, Zea mays
  Clone ID: MRT4577_157745C.1
gagcccgggcggagcgctcgtacgagcagatctcggcgggaggaggaagtgtctcaaatgagaactttttacgctcgagaggagaaagggtgcatgtcgaaccgagcttgcacatgggtaagtgctcacctcaagggacgggggtaaacccgggagatagcgccgagcactcgcgtcatccgaaagggaatcggggtaaaatttgc

SEQ ID NO: 63319 - DNA, 255 bp, Zea mays
  Clone ID: MRT4577_157746C.1
ggaaagaaaaagacatgatctttggccccagatcccccaaagggtatcccccaggacccaaattggggcgaaattcccgcccggggaaaatccctggggggaaaacaaacggatttttcctttgccccaggggtgggggtaagacccaaccaaaagccggggggctccaaaactggacttgttcctcccctcgggggggggactgggttaaaaacgggggggattttttatttggccattatacccttaacaaac

SEQ ID NO: 63320 - DNA, 808 bp, Zea mays
  Clone ID: MRT4577_157747C.1
ccggccgggacattcatccattcatcacccatcgtgtgcttcagctactacgcatacatagatataattaattaagcgcggacgacgacgtacgtaacagtatggctgctgctgctgctgctactgtcgtcacaccatcctcgcctcgctccatggctgttgccgccgccattattgccttcttcttggcggtgaccgcggcggcagcgtcgccggtgcccgcgatctacgtgctcggggactccctggcggacgtcgggaacaacaaccacctggtgacgctgctcaaggccgacttcccgcacaacggcgtcgactacccgggccagaaggccaccggccgcttcagcaacggcaagaactccgtcgacttcctcgccgaaaacctggggctggcgacctcgccgccgtacctcgccttgtcgtcgagcagcaaccccaactacgccaacggtgtcaacttcgcttccggtggcgccggagtctccaacctcacaaacaaggaccaatgtatcagcttcgacaagcagatcgactacttcgcgacggtgtacgcgtcgctggtgcagagcctggggcaggcgcaggccacggctcacctggccaagtccctcttcgccatcaccattggcagcaacgacatcatccactacgccaaatccaactccgccgccaataccaagcaggccagtgccagtggcgccgccgccgacccatcgcagcagttcgtggacgcgctgatccacacgctcaccggacagctgcagcggctctacgccctgggcgcgcgcaaggtgctgttcctggg

SEQ ID NO: 63321 - DNA, 1791 bp, Zea mays
  Clone ID: MRT4577_157748C.1
agacaccttcgcgccattggccagatagagtcaaccatgaagagcttgcagttactgagagtgtgtgtgagagagaggatgggtggcagcggcagggctgctctgctgctggccctggtggtggtggccgtgagcctggccgtggagatccaggccgacgccgggtacggttacggaggcgggtacaccccgacgtcgactgcggccaccccgaccccgaagcccgagaagcccccctccaaggggccgaatccggacaagccgcccaaggagctctagccgcccatggagcacggtcccaagccggagaagccgcccaaggagcacaagccgacgccgcccactgtacaccccgagccccaaacccacgtcgccgatgtacactctcacccctaggcccggccgctcgacgaccccccaaccaccgccagtccaatctcccaaatccctagcagaaaatccttcccacctcgaggccagcgccgtcgccgccgaattccgaagatgcctgccgccctctcgatggtgcccgcctgcgacgcggaggagccgctcctggcggagtcgtcggaccgcttctccatgttccccatccggttcccgcagatctgggagttctacaagaaggcggtggcctccttctggaccgccgaggaggtggacctctcctccgacgcgcgccactgggacacgacgctctccaacgacgagcgccacttcatctcccacgtgctcgccttcttcgccgcctcggacggcatcgtgctcgagaacctcgcctccaggttcatgtccgacgtgcaggtcgccgaggccagggccttctacggcttccagatcgccatcgagaacatccactccgagatgtactccctgctcatcgagacctacatccgcgacgacgtcgagaaggaccgcctcttccgcgccatcgacaccatccccgccgtgcgccgcaaggccgactgggcgctccgctggatcgacggcggggagcgcttcgcggagcgcatcgtcgccttcgcctgcgtcgagggcatcttcttctcgggctccttctgcgccatcttctggctcaagaagcgcgggctcatgccgggcctcaccttctccaacgagctcatctcccgcgacgagggcctgcactgcgacttcgcctgcctcctctacgacatcctccgcggcaagctggacgagtcccgcgtccgcacgatcgtcgctgacgccgtcgacatcgagcgcgagttcgtctgcgacgccctccctgtcgccctcgtcggcatgaacggggacctcatgagccagtacatcgagttcgtggccgaccgcctgctcatggcgctcgggtgcaagaagatgtacaacgtgaccaaccccttcgactggatggagctcatctcgctgcagggaaagaccaacttcttcgagaagcgcgtcggtgactaccagaaggcctccgtcatgaacagcctcaacggcagcgccgccgccaaccacgtcttcagcatcgacgaggacttttgagttggcgcgcatgatctatttcgcagataatcttaggatttccgtgagctgcgtggtgctgtttccttctgttttacgggttcttgttcctgatgtaatgtttaatcaatttcccgttacaccggaagctgtaaattgggactaatcgggaccaatataacgagcttctggaatacaacgggatcagcctaagctgcggccatcgtgttcaatgcattggccgcaacggatgatgtccttctcggacacggcgcagggcgctcgatg

SEQ ID NO: 63322 - DNA, 993 bp, Zea mays
  Clone ID: MRT4577_157749C.1
agaccacctctgcgccattggccagctagagccaaccagaagagcttgcagttactgagagtgtgtgtgagagagaggatgggtggcagcggcagggctgctctgctgctggccctggtggtggtggccgtgagcctggccgtggagatccaggccgacgccgggtacggttacggcggcgggtacaccccgacgccgacgccggccaccccgaccccgaagcccgagaagccccccaccaaggggccgaagccggacaagccgcccaagccgaccccgccgacgtacactccaagccccaagcctcccacacacccgacgcccaagccgaccccaccgacgtacaccccttccccaaagcctccgacgcccaagccgaccccaccgacgtacaccccttccccaaagcctccgacacccaagccgaccccaccgacgtacactcccacaccgaagccgccggccaccaagccgcccacctacactccgacgccgccggtgtctcacacccccagcccgccgccaccatactactagaaagcgatgcctaccataccacactgctgtcagtctctggagcatttaggtggtctggatcaatggaagggttgtgtcctagccagccggcaaagatgagctgctgatggtaatgatgatgataagagaccactgctaccctactacgtaccctcctctttgtgtgctgccatccgtccccgttagacgatcgaggagagaataacgcagagctctctgctcccggcctgtcttctgccgtcccggccgtttaatttactagtgtgttcgtcctatatgtttagcagcagcaggtgtattgtgcgggtatgtaatggtattgcaactatattgggtgtaaaaccataataaatgtgggcaaatatgcaaggaaaaaaggcttctacttctactgcaaaaaaaaaaaaaaaaaaaaaaaaaaaaaaaaaaaaagtactctgcgttgttaccactgct

SEQ ID NO: 63323 - DNA, 492 bp, Zea mays
  Clone ID: MRT4577_15774C.1
cgcggcgacggcacgccctcagggcgtgccgttcccgtcgccacacctgctccgagtgccctgcctacaccgccgccgccgccccatcatgttccgggcaagaacgcctcgtcgccgtcgcaggggccggcgccgtcacccgccctcgcgcctgcgcctgcgcctgacgcgaacgggacgtcttcgtcaccgccgtcgccgtcgtccgccgtagcagccttcaggggtggcttcctgctggcgtgcctgctatccgtaaccgctggagcagcaattattctcgtctgatgtggcaacgtcgtcgtcgtccgtggctaaacttgcatcgatcgtgttgatttccgtctagttcgtgacttagatttgcttctaagttgtagggatcggtcaaaataatttcctgtttgtttgtttgggtcgatcttctactagaatccttcaaagtggaacatgtaaatctttgttagaaggaagggatctccaactttaatt

SEQ ID NO: 63324 - DNA, 1656 bp, Zea mays
  Clone ID: MRT4577_157750C.1
aattcggcacgagggcgccattggccagctagagccaaccagaagagcttgcagttactgagagtgtgtgagagagagaggatgatgggtggcagcggcagggctgctctgctgctggccctggtggccgtgagcctggccgtggagatccaggccgacgccgggtacgggtacaccccgacgccgacgccggccaccccgaccccgaagccggagaagccccccaccaaggggcccaagccggagaagccgccaaaggagcacaagccgcccaaggagcacgggcccaagccggagaagccgcccaaggagcacaagccgacgccgcccacgtacaccccgagccccaaacccacgccgccgacgtacactcccaccccgacgccccccaagccgacgccacccacatacactcccgcccctacgccccacaaacccactcccactcctccgacgtacaccccttcccccaaacctccgacacctaagccgaccccgccgacgtacactccaagccccaagccaccggctagcaagcctcccacgcccaagccgaccccgccgacgtacaccccttctcccaagcctccgacacctaagccgaccccgcctacgtacactccaagccccaagccaccggctaccaagcctccgacgcccaagccgaccccaccgacgtacaccccttcccccaaacctccgacacctaagccgaccccgcctacgtacactccaagccccaagccaccggctaccaagcctcccacgcccaagccgaccccgccgacgtacaccccttctcccaagcctccgacacccaagccgaccccgccgacgtacaccccttcccccaagcctccgacgcccaagccgaccccgccgacgtacactccaagccccaagcctcccacacacccgacgcccaagccgaccccaccgacgtacaccccttccccaaagcctccgacacctaagccgaccccgccgacgtacacgccttcccccaagcctccggctaccaagcctccgacacccaagccgaccccaccgacgtacactccaagccccaagccaccggctaccaagcctcccacgcccaagccgaccccaccgacgtacactcccacaccgaagccgccggccaccaagccgcccacctacactccgacgccgccggtgtctcacacccccagcccgccgccaccttactactagaaaccgatgcctaccataccacactgctgtcagtctctggagcatttaggtggtctcgatcgatggaagaattgtgtcctagccagccggcaaaggtgacctgctgatgatgatgatgagaggcgagtcctacgccctagtcctactactaccctctttgtgtgctgccatccatccgtccccgctagacgatcgaggagagaataacgcagagctctgtgctcccggcctctgtcttctgccgtcccggccgtttaatttatagtctctactgtgtgttcgtcccatgtgtttagcagcagcagcaggtgtattgtgcgggtatgtaatggtattgcaactatattgggtgtaaaaccataataaatgtggaaaaaatgcaaggaaaaaaggcttctactgtttacacttaaaaaaaaaaaaaaaaaaaaaaaaaaaaaa

SEQ ID NO: 63325 - DNA, 1093 bp, Zea mays
  Clone ID: MRT4577_157751C.1
caagccgcccaaggagcacgggcccaagccggagaagccgcccaaggagcacaagccgacgccgcccacgtacaccccgagccccaaacccacgccgccgacgtacactcccaccccgacgccccccaagccgacgccacccacatacactcccgcccctacgccccacaaacccactcccactcctccgacgtacaccccttcccccaaacctccgacacctaagccgaccccgccgacgtacactccaagccccaagccaccggctagcaagcctcccacgcccaagccgaccccgccgacgtacaccccttctcccaagcctcgacgcgcagtctatggagattctctcgcgctggatcccggggtggggaatcgacgcggtcacgctgccgctcgccgtcgatctgaacgtagccacggacagcgcgacgaaggcggtgaggacgctggcgagggacgaagacttcaaattccgggcggcccactggggcgacctgcaccggcggctgcacgaggagctgccgcccgcggtgaccgtgctgtgggggcaccagttcctgtcgttcgaggcgccggacgacacacgccgggtcgtcgcgacggcccgcgtgctgcggacgggagggacggttgaggccacgggggacctgctcatcgccgcggacggctccacgtcgtctgtccgtcgcagcttcttgccagacctcaagctcaggtattccgggtactgcgcgtggcgaggcgtgtttgatttcagcgggaaggagagctctgacaccatgaccagcatccgaagagcctacccggagctcggcaactgcctctacttcgaccttgcttacaagacccacgccgtgctctacgagctgcccaggagcaggctcaactggctctggtacatcaacggcccagaaccggagctcgcggggaactcggtgaccatggaggcgactgacgccatggtgggacgaatgcggaacgaggcggagcgcgtctggtgccccgagctggcgcgtctggtcagggagaccgcggcgccgttcgtaaacgtgatctacgacgcagacccgctgcggcggttgtcgtggac

SEQ ID NO: 63326 - DNA, 758 bp, Zea mays
  Clone ID: MRT4577_157752C.1
cccagcgtccgcggacgcgtggggggcgcacgcccgcacaagctgctccgggctccgctgctaggctagggtttggactttggattggagccgcaccgccgcaccggcaccgcagccgccgcagtgccgcacagccaccactcccatcttggtcttgcggccagtcgccctcggacctcggccatcgaccccttgcccgcttgccgagacgccgagtaagcgtcgaccgtcgtcgctgtcgtcaccgaggtccagcgcccaacagcccagcttcaagcctccagccatcggcgcccgccctcctccgccgagacgccgagtgccaagcgcccaagcaccccagtccccagcgcccaacaggctagcaggctgcagaaactgaaggaaaaggcggcattcaggaacccggatgagttctattttaaaatgatcaacagtaggactgttggtggaattcatagacctaagcctgaagataataagtatactgaagatgaacttcttctgttgaaaaataaagatatgggatatatccttcagagcgctcaaagtgaaaaaaggttactgaattggaacggggaaaaatccataaagtgctgaagactaagtggatcgagcgcgcgcgagggttgtcgtaaaatgtccaccgttattaagagggctaatgaattcccggtcgattagagctacatgcatggaggagtgcacacacatgcctatgttgtttgaattaatcaaattgttgtttgttagtaatt

SEQ ID NO: 63327 - DNA, 472 bp, Zea mays
  Clone ID: MRT4577_157753C.1
cggacgcgtttgtggacgcgtgggaggacgcacggaaacaaacgaggacggatgcgaaattaaaaaaaaaaaaaaaaaaaaaaaaaaaaaaaaaaaaaaaaaaaaaaaaaaaaaaaaaaaaagaaaaaaacaatataataaaaaaatgaagaaagggggctgcatctggggaggcttcttttaaaaacctattatataaaagggtttgcttttttttcttaacatctttaattcatccaattgggaaattttaaaaaacgctgaaaacaaaaaaacgtgggaaaaacccattaatctgctttgaaaatatttcacctatctagagggttctaaaaaaaagaaagaaccccgcaattgccccttctacaaacggttttcaaaagtaaaatgtaaatgggcttggcctttttaaaaaccacattaaacgcggtattggcggggaacccccaaaagttgaaccttaaattttcaa

SEQ ID NO: 63328 - DNA, 822 bp, Zea mays
  unsure (1)..(822): unsure at all n locations
  Clone ID: MRT4577_157754C.1
agaccacctctgcgccattggccagctagagccaaccagaagagcttgcagttactgagagtgtgtgtgagagagaggatgggtggcagcggcagggctgctctgctgctggccctggtggtggtggccgtgagcctggccgtggagatccaggccgacgccgggtacggttacggcggcgggtacaccccgacgccgacgccggccaccccgaccccgaagcccgagaagccctccaccaaggggccgaagccggacaagccgcccaaggagcacaagccgcccaaggagcacgggcccaatccgcagaagccgtcccaggagcacaagccgacgccgcccacgtacaccccgagccccaaacccacgccgccgacgtacaccccttcgccaaagcctccgacacccaagccgaccccgccgacgtacaccccttctcccaagcctccgacgcccaagccgaccccgccgacgtacactccaagccccaagcctcccacacacccgacgcccaagccgaccccaccgacgtacaccccttccccaaagcctccgacgcccaagccgaccccaccgacgtacaccccttccccaaagcctccgacacccaagccgaccccaccgacgtacactccaagccccaaaccaccggctaccaagcctcccacgcccaagccgaccccaccgacgtacactcccacaccgaagccgccggccaccaagccgccccactacactccgacgncgncggtgtctcacacccccagnccgccggcaccttactactagaaagcgatgcctaccacactgctgtcagtctct

SEQ ID NO: 63329 - DNA, 546 bp, Zea mays
  Clone ID: MRT4577_157755C.1
acggagcctagttggaggcggtaataattactaacaaacaagcaatttgattaattcaaacaacatatgcatgtgtgtgcactccatgcatgtagctacaatcaactgggaattcattagccctcttaataatggtggacattttacggcaaccctcacgcgcgctcgatccacttagtcttcagcactttatggattttcccgttccaatttagtaaccgtagtccaccaaactcccgcgaattaatcagaaaaagggaaggcaaaataaacagactagaacaccgcgcgtgcaattttcctggggaaaaacaaaggattagacaacatgagaaaccagtcaactaactaactgcataatatattaatatcataatcccattccaaccatattggtcctagttaaatggacacaaatataaatgttaagactaataaacagtaaaaatgactctccataaacagtaaaaacaaaggatcaggcatgctgctgctttgtcctatccttgattgtatttctttcgcttcttctctgtcttcaggaaa

SEQ ID NO: 63330 - DNA, 261 bp, Zea mays
  Clone ID: MRT4577_157756C.1
gggcaaaaacagcgagcaattttattaaccatggttttacaattacacagaattaacctgttttacacttgaaaatttatttcaagacccgaaaataaccacgcatatttgctcataatctacctaggctcaaacgcattttgtaacagcagcagcatcaaacaacaatgataataatttataagttttcgtttaccctcctagatagtgtcaaatttggtagaaaggaagtatgatcctaaataattaggacatggcggt

SEQ ID NO: 63331 - DNA, 1426 bp, Zea mays
  Clone ID: MRT4577_157757C.1
gcgccattggccagctagagccaaccagaagagcttgcagttactgagagtgtgtgagagagagaggatgatgggtggcagcggcagggctgctctgctgctggccctggtggccgtgagcctggccgtggagatccaggccgacgccgggtacgggtacaccccgacgccgacgccggccaccccgaccccgaagccggagaagccccccaccaaggggcccaagccggagaagccgccaaaggagcacaagccgcccaaggagcacgggcccaagccggagaagccgcccaaggagcacaagccgacgccgcccacgtacaccccgagccccaaacccacgccgccgacgtacactcccaccccgacgccccccaagccgacgccacccacatacactcccgcccctacgccccacaaacccactcccactcctccgacgtacaccccttcccccaaacctccgacacctaagccgaccccgccgacgtacactccaagccccaagccaccggctagcaagcctcccacgcccaagccgaccccgccgacgtacacccgacgcccaagccgaccccaccgacgtacaccccttccccaaagcctccgacacctaagccgaccccgccgacgtacacgccttcccccaagcctccgacacccaagccgaccccaccgacgtacactccaagccccaagccaccggctaccaagcctcctacgccctagtcctactactaccctctttgtgtgctgccatccatccgtccccgctagacgatcgaggagagaataacgcagagctctgtgctcccggcctctgtcttctgccgtcccggccgtttaatttatagtctctactgtgtgttcgtcccatgtgtttagcagcagcagcaggtgtattgtgcgggtatgtaatggtattgcaactatattgggtgtaaaaccataataaatgtggaaaaaatgcaaggaaaaaaggcttctactgtttaaaaaaaaaaaaaaaaaaaaaaaaaaaaaaaaaaaaaaaaattttttttaaaaaaaaaaaaaaaaaaaaaaaaaaaaaaaaaatccccttttatttttgggggctttaaaaacccccccagggaaaccattttaccaaaacccaaaaaaaaggggccccaaaaaattaaccccttttggcctttttggcttttttgggagcccaaaaaaaggctttttttttccaaaaaggctattttgccaaaattccatttttaaaaaattcccccccccaattttttaaaagggttttaaaacccccatttggaaagccttttggttaaaaaaaaaaattgggggagggggtttaaaaaaaccaatttcccaattggaaaaaaaatttttgggcactttaaaaaaaaaaacctttggaacgcaaaaaaaaacaaaattt

SEQ ID NO: 63332 - DNA, 605 bp, Zea mays
  Clone ID: MRT4577_157758C.1
cggtcgcgtgggaccgcacgcccgcacaagctgctccgggctccgctgctaggctagggtttggactttggattggagccgcaccgccgcaccggcaccgcagccgccgcagtgccgcacagccaccactcccatcttggtcttgcggccagtcgccctcgggcctcggccatcgaccccttgcccgcttgccgagacgccgagtaagcgtcgaccgtcgtcgctgtcgtcaccgaggtccagcgcccaacagcccagcttcaagcctccagccatcggcgcccgccctcctccgccgagacgccgagtgccaagcgcccaagcaccccagtccccagcgcccaacaggctagcaggctgcaggtatgcactctttgttgatgcgtccaaggagttgagctcaatgcccagcaggctgcagaaactgaaggaaaaggcggcattcaggaacccggatgagttctattttaaaatgatcaacagtaggactgttggtggaattcatagacctaagcctgaagataataagtatactgaagatgaactacttctgttgaaaaatctagatatcggatatatccttcagagcgctcaaagtggaaaaa

SEQ ID NO: 63333 - DNA, 1491 bp, Zea mays
  Clone ID: MRT4577_157759C.1
aattcggcacgagggccattggccagctagagccaaccagaagagcttgcagttactgagagtgtgtgtgagagagaggatgggtggcagcggcagggctgctctgctgctggccctggtggtggtggccgtgagcctggccgtggagatccaggccgacgccgggtacggttacggcggcgggtacaccccgacgccgacgccggccaccccgaccccgaagcccgagaagccccccaccaaggggccgaagccggacaagccgcccaaggagcacgggcccaagccggagaagccgcccaaggagcacaagccgacgccgcccacgtacaccccgagccccaaacccacgccgccgacgtacactcccaccccgacgccccccaagccgacgccacccacatacactcccgcccctacgccccacaaacccacaccaaaacccactcccactcctccgacgtacaccccgacccccaagcctccgacacctaagccgaccccgccgacgtacactccaagccccaaacctccgacgcccaagccgaccccaccgacgtacaccccttcccccaagcctccgacacctaagccgaccccgcctacgtacactccaagccctaagccaccggctaccaagcctcccacgcccaagccgaccccgccaacgtacaccccttcgccaaagcctccgacacccaagccgaccccgccgacgtacaccccttctcccaagcctccgacgcccaagccgaccccgccgacgtacactccaagccccaagcctcccacacacccgacgcccaagccgaccccaccgacgtacaccccttccccaaagcctccgacgcccaagccgaccccaccgacgtacaccccttccccaaagcctccgacacccaagccgaccccaccgacgtacactcccacaccgaagccgccggccaccaagccgcccacctacactccgacgccgccggtgtctcacacccccagcccgccgccaccatactactagaaagcgatgcctaccataccacactgctgtcagtctctggagcatttaggtggtctggatcaatggaagggttgtgtcctagccagccggcaaagatgagctgctgatggtaatgatgatgataagaggccactgctaccctactacgtaccctcctctttgtgtgctgccatccgtccccgttagacgatcgaggagagaataacgcagagctctctgctcccggcctgtcttctgccgtcccggccgtttaatttactagtgtgttcgtcctatatgtttagcagcagcaggtgtattgtgcgggtatgtaatggtattgcaactatattgggtgtaaaaccataataaatgtgggcaaatatgcaaggaatatacgaaatttcctttgccagatttaggcgccgcgcttgtataaagtgactttcttttgtttctctctcctcctgcacttgcttgatttgggggacaag

SEQ ID NO: 63334 - DNA, 579 bp, Zea mays
  unsure (1)..(579): unsure at all n locations
  Clone ID: MRT4577_15775C.1
cggccgcgtgggcggccgcgtggggcgataaaggtggtgttgggcgaccacgtcctgatttcttctggcgttgcttccctgatggaaaacctgtaaaactcctaacttttagtcaaaccttgataataactcacttgaagcccttgtgcaattacattgcatttgaattgtataagaaatcttatgaatttacttggcctttaggagtataacaactttactacaggcgccatatgccatggccaggcgagtgttattaaagaaggtcataaaagctttccaagtggtcatacttcatgtaagtgacattattctttacaaatatagggattagtcccatgttattagagctaactgtttgggacatgtcctattttatgacgtgctaactacctcctcagcagnttagtgaatataataattgatgcctccttttctaggttctgatctaaatcagctaattgtatgggacaaggtgtttaatatgttttgtatacaatatattgtttatcaagttctcaagaaacaaatgtattgatggtttttccatttctatctgcccatgtgatcccttttagc

SEQ ID NO: 63335 - DNA, 744 bp, Zea mays
  Clone ID: MRT4577_157760C.1
ccacgcgtccgtactgtttttctcaaatgttatgcttttagatcgcgggtacttgttagtatccatgcacagcacacggtgtggctgtgtggtgaacatatctcttttcagatttgcgctcagctcatcgtgtgtggtgtacctaattaagcttccgtttcttttctgtattctttctttcctttttttataagggcgctcctgttaaatcggttgaaacagaagtgacatcattggttattagcaaatcctggagaatgcatgcaagttcttctttatttgtatcactatctcttagcacagttctctaactttcgatgcacgtacaagtctatttttataaaaaaaaactgtctatatatgggggcacacaaaattctgtggacgtgtgcatcaatcatcacatgctgttatgcctgatgtcctgtggattggtgttcgatctcgtgaattcgagctgtcctccatttggaactgttatttttgcagctacatatataccaactgacagacatttggaactgtttttttgtgtgtgtttaggttactgaattggaatgggaaaaaatctataaagtgctaaagactaagtggatcgagcgcgcgcgagggttgtcgtaaaatgtccaccgttattaagagggctaatgaattcgccagtcgatctgtagctacatgcatggaggagtgcacacacatgcctatgttgtttgaattaatcaaattgcttgtttgttagtaatt

SEQ ID NO: 63336 - DNA, 1470 bp, Zea mays
  Clone ID: MRT4577_157761C.1
gccggccgggccgggagaccaccactgcgccattggccagctagagccaaccagaagagcttgcagttactgagagtgtgtgtgagagagaggatgggtggcagcggcagggctgctctgctgctggccctggtggtggtggccgtgagcctggccgtggagatccaggccgacgccgggtacggttacggcggcgggtacaccccgacgccgacgccggccaccccgaccccgaagcccgagaagccccccaccaaggggccgaagccggacaagccgcccaaggagcacaagccgcccaaggagcacgggcccaagccggagaagccgcccaaggagcacaagccgacgccgcccacgtacaccccgagccccaaacccacgccgccgacgtacactcccaccccgacgccccccaagccgacgccacccacatacactcccgcccctacgccccacaaacccacaccaaaacccactcccactcctccgacgtacaccccgacccccaagcctccgacacctaagccgaccccgccgacgtacactccaagccccaaacctccgacgcccaagccgaccccaccgacgtacaccccttcccccaagcctccgacacctaagccgaccccgcctacgtacactccaagccctaagccaccggctaccaagcctcccacgcccaagccgaccccgccaacgtacaccccttcgccaaagcctccgacacccaagccgaccccgccgacgtacaccccttctcccaagcctccgacgcccaagccgaccccgccgacgtacactccaagccccaagcctcccacacacccgacgcccaagccgaccccaccgacgtacaccccttccccaaagcctccgacgcccaagccgaccccaccgacgtacaccccttccccaaagcctccgacacccaagccgaccccaccgacgtacactcccacaccgaagccgccggccaccaagccgcccacctacactccgacgccgccggtgtctcacacccccagcccgccgccaccatactactagaaagcgatgcctaccataccacactgctgtcagtctctggagcatttaggtggtctggatcaatggaagggttgtgtcctagccagccggcaaagatgagctgctgatggtaatgatgatgataagagaccactgctaccctactacgtaccctcctctttgtgtgctgccatccgtccccgttagacgatcgaggagagaataacgcagagctctctgctcccggcctgtcttctgccgtcccggccgtttaatttactagtgtgttcgtcctatatgtttagcagcagcaggtgtattgtgcgggtatgtaatggtattgcaactatattgggtgtaaaaccataataaatgtgggcaaatatgcaaacaaaaaaaaaaaaaaaaaaaaaaaaagtactctgcgttgttaccactgct

SEQ ID NO: 63337 - DNA, 2191 bp, Zea mays
  Clone ID: MRT4577_157762C.1
cgtgaccacagacagccagacggctgagagcctgagacgggcgatgaccgcacgcccgcacaagctgctccgggctccgctgctatgctagggtttggactttggattgcagccgccccgccgcactcggcacccgcagccgccgcagtgccgcacagccgccactctcgtcttggtcttgcagccagttgccctccggtcgcggtcgtcggcccctcgcccgcgcgccgagacaccgcgtcagcgtcgaccgtcgtcgtgtctcgccgagtcgctgtcgtcaccgaggtccagcgcccagcggcccagctccaagcctccagccatcggcgaccgccctcctccgccgagacgccgagtgccgagcgcccgagcaccccagtccccagcgcccaacaggctagcaagctacaagtatgcgctctttgttgatgcgtccaaggagttgagctgaatgcccagcaggctagcaggctgcagaaactgaaggaaaagccggcattcaggaacccggatgagttctattttaaaatgatcaatagtaggactattggtggaattcatagacctaagcctgaagataataagtatactaaagaggaacttcttctgttgaaaaataaagatatgagatatatccttcagagcgttcaaagtgaaaaaaagaaaatcgaaaagctaagctcaacacttcatgaagttgataacatgcctcaaaacaagcatgtttattttcctgaagacagagaagaagcgaaagaaatacaatcaaggataggacaaagcagcagcatgcctgatcctttgtttttactgtttatggagagtcatttttactgtttattagtcttaacatttatatttgtgtccatttaactaggaccaatatggttggaatgggattatgatattaatatattatgcagttagttagttgactggtttctcatgttgtctaatcctttgtttttccccaggaaaattgcacgcgcggtgttctagtctgtttattttgccttccctttttctgattaattcgcgggagtttggtggactacggttagtcggtttattttctaggtagagggacaattatgcatgactaataataagggtttcattccatggctaaatataccatttgcatgatgctagttggagctagcgtccttgttcaaacaaagcatcgtataactgtttggatctacatattaaattgatggctaagtgcacgcatatgtacttgaacagcagggcttttctgaacttctaatcagcagaatccagcatctgtttttctcaaactgttatgcttttagatcgcgggtacttgttagtatccatgcatagcacacggtgtggccgtgtggtgaacaaatctcttttctgatttgcgctcagctcattgtgtgtggtgtacctaattaagcttctgtttcttttctgtattatttctttcctttttttataagggcgctcgtgttaaatcggttgaaacagaagcgacatcattggttattagcaaatcctggagaatgcatgcaagttcttctttatttgtatcactatctcttagcacagttctctaactttcgatgcatgtacaagtctatttttttataaaaaattgtctatatatggcacacaaaattatgtggacgtgcgcatcaatcatcacatgctgttatgcctgatgtcctgtggattggtgttcgatctcgtgaattcgagctatcctccattcctcctgcatgacagatatactagacatttggaactgttatttttgcagctacatatataccaactgacagacatttggaactgtttttatgtgtgtgttcaggttactaaattggaacgggaaaatccataaagtgctgaagactaagtggatcgagcgcgcgtgagggttgccgtaaaatgtccaccattattaagagggctaatgaattcccagttgattgtagctacatgcatggagtgcacacacatgcatatgttgtttgaattaatcaaattgcttgtttgttagtaattattaccgcctccaactaggctccgtacgtccacaggatcatcagctatttcatgcaagcatccgcacaagtgtcatacagctatatgttattgtgttctgatacttgagacttttattaagactatgtatgagatattgtctcttattagt

SEQ ID NO: 63338 - DNA, 407 bp, Zea mays
  Clone ID: MRT4577_157763C.1
aacaaacaagcaatttgattaattcaaacaacatatgcatgtgtgtgcactccatgcatgtagctacaatcaactgggaattcattagccctcttaataatggtggacattttacggcaaccctcacgcgcgctcgatccacttagtcttcagcactttatggattttcccgttccaatttagtaacctgaacacacacataaaaacagttccaaatgtctgtcagttggtatatatgtggacgtgcgcatcaatcatcacatgctgttatgcctgatgtcctgtggattggtgttcgatctcgtgaattcgagctatcctccattcctcctgcatgacagatatactagacatttggaactgttatttttgcagctacatatataccaaatgtctgtcagttggta

SEQ ID NO: 63339 - DNA, 373 bp, Zea mays
  unsure (1)..(373): unsure at all n locations
  Clone ID: MRT4577_157764C.1
gacccaancgancggcaactaacaacatacaaaacacaatatttttccaacaatttcaaccaaaatatttatctggcttatacgccatagtctaatatcaaccttctctaccccaaccatttttctacaattctcacaatctcctataacttcccttcttcccccatacctttcaccanctatttcattaattatttaaaacccatatttttaaccctacatcatccaacaatctatctcaacattcatattaccattattacctttatatctccaacaaccttcatccctattacaacatttacctttattccattttttttcacaaaactattatctcaacaactacaacaactttttactaacaaacctt

SEQ ID NO: 63340 - DNA, 432 bp, Zea mays
  Clone ID: MRT4577_157765C.1
aattcggcacgagggcaggatctgtgaggatatgaggcccactctccgctcctcgtattgctgatgcggagagaacaagcgacaatcgaagcccttgcgcccgtccgccggatgtatcagagctgagataccaccaaccatggcgggcgggcacaaaccttagaagaggcggaataggaacaaggttctgttggactactaggcgaagatccaaggacatccttgagatgctctgggaccttgctatataagctgtgattgactctagccttgttgtggaccactggaggaacgtcgtttgtgagacctgcaccaacaccaacctggtcgaggagattcggcgagatcaccacgaagggcattgtggactagaacaagattaaggacggagacctgtcgcaccgtcaggaatgcgtgaatcgatgttgggct

SEQ ID NO: 63341 - DNA, 316 bp, Zea mays
  Clone ID: MRT4577_157766C.1
ggaaaaaagagtctccatttagtacgtaaacatgctttctttttcatacattatgccgagcggtacgagaccagattcacagcacactccaccagacagtgcacgcacacagctgtcatttcgtacacgcttaactggtcaaagatcaaccgcgcgggggcggggctaagcatattagcaccggcaccacgcgggcgaaactttttttgtctgtagctaaaccaggcaccgcaccggtccccctcaagattgggacaccaaaagaacgcccggcccggggagcatagcccagtatttaaaaccatgggcaccggct

SEQ ID NO: 63342 - DNA, 222 bp, Zea mays
  unsure (1)..(222): unsure at all n locations
  Clone ID: MRT4577_157767C.1
aactactctcttctacccaaaataacacaaanccgagcatctgaaccattatttcgatgttcaaatacaanacgataaatctatagacatatataaaataaatacattagttatcatattaataactaaaaaggtaaaacaaattttattcagggacggaagaagtacatatagagatagttcggagagatctttctctgatatgcaatcttgcctttctca

SEQ ID NO: 63343 - DNA, 470 bp, Zea mays
  Clone ID: MRT4577_157768C.1
ctaaaaaaacaaattacacaaaacccaggaagcatcaaacaccccccattggcgccgctgaatgaaaaaaacccaacccacgccccggaaaaacagggccttttaaaacggaaaagggatttggggcaaccaaaaagcctcccctattaaaaccactctggcgtgctttacggggacctgtcaaaaacaaaaagcaaactgaggaggtagcccccggctttaaaagcaaaaccctaacaatttcacacaaaaaaccatccggaaaaacgggcccccaagtcattttcccgaattagggggaaaaatcaaaccaacggcattggggggactaaccaatatccaaacccaacccttgggacggggggtaaaaccatcaattccacctggcccagaatacaggacaaattcagtaaaggggggacggcccctaaggttttcactccaacaccgggctatgaactccccaaggc

SEQ ID NO: 63344 - DNA, 407 bp, Zea mays
  Clone ID: MRT4577_157769C.1
attatttcatatgatctccttctatcctttgtatatcattgaatattaggaaccaaggaatctgagtggtataaaggtcttctgtgctactaatacatgaaatagattgaaaactatgaagagactgccggatttgacaattagggaattttttgacagaattctcagtgagtgaagaagacagacctgactggaagtaattagagggtgaagtggctgtgacgtattggaaccaataatctttggttgctaaggtgagaaatttgacagtgaaatgaataagatacgtatgtttttgaatgtatgtcttttcttttaagcactagagactttcaatatttctgagaaagatggtgaccagagagcctcatcttgattcacctttgtgccttagatacttgtgtaat

SEQ ID NO: 63345 - DNA, 175 bp, Zea mays
  Clone ID: MRT4577_15776C.1
cgcacacgagcgcacacaattccagtttcccgagacgagcgcgacggcggacacagggcatatcaaaagcacccagaccacacacatggagccagccaaggagcacgagcgcatcaaggccaccggcaagaacgccgagatgtggccctacgtaccctacacgctcaccacctac

SEQ ID NO: 63346 - DNA, 735 bp, Zea mays
  Clone ID: MRT4577_157770C.1
gttctcgaggccgccggccggggccgcctctcgcagctgcttcgcttcttcttctttctatatacatatatagacctaataagaacaaagacgtacgataacctgcttattttgcgacccatcccgttcccacgcaaaggcgccgagcgtgatctccgtccgtgccgccatggcctcgcaccgggcgctgctgctgctgctcctcgccgccgcgctcgtcgctgcgctggcctctgtcgcatccgccgacgacgccaacgccatgcccaccatcctgacccccgtggcgcataccccgctggggtccttcgacggcgacaagccggcctctgacgacgacgccgtcgacgacgacgaggacgccgcccctgtcggcgcgcccaacggggccaccatgactgagcccagggacgacgtccccgccccgcccggcgccgaagcaaccgcgggcggcgccgccgccagcaacgcgcccgtcgcactcgccagcgccgcggcgcgcgtctgcgccgccgccgctgtcgccgcgggagccttcgcctccttctgaggagcggagactggtttcgtttcgtgcaggggttgcaaaatctctgcgatattttatttatttatttaacatggtcgctttcctcggtttgatatttgtatgtaaacacacagctaaagctaatcgtccattcgtatgtgtaaaaactttccagtgagcatatccaggttgtttatgtaagaaca

SEQ ID NO: 63347 - DNA, 405 bp, Zea mays
  Clone ID: MRT4577_157771C.1
ctatcacacggagatgaaactggggacaccacccatgcactactacgaacaggacgacaccgacagagacaaacggtggggaaactgcaccacctgcgagcaaagaacacacaagagcgggctcgggttagacggggcgcttcacagaccccaaggcactaccggaccgggagcatggggacagatgcgaccaggcattcagcgcagccacctaaggcggaaagcagccgaagagcggcgccaaagcgcccggcgaagagaagggccacccacggagacggggggtcgacaaaaggacccttaggaaccgaagcgctgcacgctgatcaggcgactaaggatgggcagacacagccagataatgccagcgtcattaccaggggcggagctcaacaaaggggggga

SEQ ID NO: 63348 - DNA, 439 bp, Zea mays
  Clone ID: MRT4577_157772C.1
tttttttttttttttttgttcagatacgaattgctggtagggtcatcttattctacaagtgcttagtctagtcatgtttctgaaacggtactcagtctgatcacatctcaaccacatcgtcaaatgtgcgtggagaaaaaagtacccggtaaattccattctaaaaatagtattaaatattaatcatgcactagcgaaaaggtctctagtataatggttaagattttcgagtagtatcttcagttgggttcgatccctcttggagacgaatttcgccacccttcggttgatccgttgcagagggagcggtggcggctcgttggcgatggggtcagggttaaaactcatgaaagaatcgcatgttgtacttggaagttggacccagcagatttgggctaagcgaaatcactctacggagccggtaagaacttcacctttg

SEQ ID NO: 63349 - DNA, 364 bp, Zea mays
  Clone ID: MRT4577_157773C.1
aaaaaaaaaaaaaaaaaaaaaaaaaaaaaaaaaaaaaaaaataaaaatttataaaaaaaaaaacaaaaaaaagaaacaatgtaaatcttaaaaaataatatctcctctaaacctcccctaaattacaattcacctaccccatatttttacaaccatcttatactataaaaaaccaccttgataaccccaacttatatccctttttttacacatcactcctattcacacaaccttccttttttatctcaaaagttacctcccccaatctcctcttcccaacatttttctcaccactaatatcctcaacccaaatcccccccttgtaaacactccattataactcctccatataatttttatctta

SEQ ID NO: 63350 - DNA, 425 bp, Zea mays
  Clone ID: MRT4577_157774C.1
ttgggtacctcgaggccggccgggaatttatgccctaagattgactaccctagccctcaccctactcgatagccgtgccgacaccaccgaagacaggccctacatgagtcagctccgatgacactgcttccgagctacccggactccacgatcccactcatcctccatgtcaccaaggctgcccggaagactagcccccaccattggcggatcgaataactctcaccgctactcgcactgcaactgaagccctcagggagatccgaaagaatcacaaaagaactgaaatgctgatctccaagctgcccttccagaggctcggcgggtaaattgtgcagcactccacaactgacatgcgatgccaaagccatgcggtgattgccctctaggaggctgcagaggtataccttgctactactgtttga

SEQ ID NO: 63351 - DNA, 885 bp, Zea mays
  unsure (1)..(885): unsure at all n locations
  Clone ID: MRT4577_157775C.1
ctcgaggccggccgggccgggctacccactagtagatagatgcctatgtttgcactgcagcagtctagtacgtgcatggagtatatagcagacagcaaactctctagaggaaaaggaagcgcgatgcatagataggcacgcaaattgtttctctagtctcgcttaggtttggtagccaccgtgctggagtaacactttgcttggttagtgtgccagtactatcaccgaagaatcgtgcaactgttccgaacacgccgcacgttggcacgcattaatgcttcgcaggcactccccattccaatgcagcaaccgcactgtaataatgtggccggcagatctaaaacagtagatccattctagaacatctagtctaaaataataaaaaaaatgtttaaaagagctctatgctatagatcttgtgaactggtataacatccagcctaactcttctataatttgtttaaggtttatcggacaaattgaaaagctaaccttagaagaaaaatttaggcaaatcatagcaagttagacagcgaactaaaacatgtgtgagattcgaagatgtcggaaggaaaaaaggaaaacataggaaccaaccgttattgttgtataacaagtgatatagtgggtaattttgatcaacgtaacagattcataagttttatgagtgcatctcttgtcgcgctctagaaaatgaatgaatttggtcttaaatgtgaagttttggtggatctagagagttggcggagttaagatatttggataaaaaataataatgagatgagagctgactctggtggatgtggaacattttgagggtctctttggaaccacatatttttacagttttttttatgtaatataatgcgntggtttagatgctat

SEQ ID NO: 63352 - DNA, 347 bp, Zea mays
  Clone ID: MRT4577_157776C.1
cctctagacggccggcgacagttctctccagttccacttcacttcatcactgatcatccatcgcgccgatcgagcagcgcaataaagcacgatgaaattggtacccgtcgccacctgcacgcacgcattccacgcgacaatgactccaaccgctggctcccccgctcgcagaactaccatgcccaacccaccactagcggattgagctgcagaattacgagcacagcaaccgacagttggctgacgttctccagtgcagccgcaggccgcacatctgcagacgcaattggcactgacgacaccataaacgaacagatccctcatcaatacaaactccatcttcaaca

SEQ ID NO: 63353 - DNA, 381 bp, Zea mays
  unsure (1)..(381): unsure at all n locations
  Clone ID: MRT4577_157777C.1
cgaggcaagaacactcttcgctccgagccccggggccgatacggccatacccactgcaatgctccgccttccacggccatggccttcctcaagaccctaaaccctctaatacgcaggcaggccaccccgatctctaaccccaggccgctcctctccctccacaccgtcctcgattcatcctcccccaacactaccgccgccgccaccccgtttgccaacgctgtgcacacccatgtccccatccggtccagcggtccgctgttcctctcgtcggccccatggatgctgtcgcagncggcgacaccgctcacggccgcggctgccgcccttggcgtcaagctccgcagggcccaggctctccccggcggccgcgcgctggcc

SEQ ID NO: 63354 - DNA, 253 bp, Zea mays
  Clone ID: MRT4577_157779C.1
tgccgatgagcatggactgcctagtaactcgatgatgtgtggagtaccatggctgactcgtcagagtatgtgagagctcataactaggccaggcataaaatgtggactcatcttcatgaatgattttcattcgcgatttgagcgtatatcgcattttaatttgttttgaactgtcattgtacgtcatttatgacgttcaaccgtttagtcatcacgtatataattcatgtatcgagatataggggatttcggg

SEQ ID NO: 63355 - DNA, 1006 bp, Zea mays
  Clone ID: MRT4577_15777C.1
cctcgaggccggccgggagtaattgctaggaacgaagcaagcatagggtacggccagcacgcacaggttgaccatggctggctttaggtaggtcgctcgtagtttcgtgtaggtagatagctagctcaatgacaatataacgagtataataaatagcgttgtccgcccaccggaacaatggcaggacgtaacacatcacatgcatatggcgatggcgagcagatcctccgcgaccggaacggcggtgctgtgctttcttgtggtggtctccctcttcatggccccgtcgttgttcgttgccggaactgaagcagcagcggcctacggtgcagcaggtgcaggtgcaggcaggaagatgaagcaggcagctgcgggagctgtggcgacgaagcaggatggctacggctaccctgcaaccagttcaccagcgggatacccggcggtgccttgttgccctcatccacctgagggcggtcggggttaagagagagagcccagctgcagctagacttcatgtgcatgatattgcagaattaccgtctctgaatacagatacagaaactagcatttatatacggatcatatattatctatatcctcatgccatgagagatgtgtatcactctcgctaaataattagcagctacgacgcgcctgcctgtcacactgtgctactattctatattcctgctccctctctctatatatacatacacacatatgtgtgtgtgaaataaagattagcttggagcatcgcgcaccacttcatgtgcatgatattgcagaattaccgtctctgaatacagatacagaaactagcatttatatacgaatcatatattatctatatcctcatgccatgagagatgtgtatcactctcgctaaataattagcagctacgacgcgcctgcctgtcacactgtgctactattctatattcctgctccctctctctatatatacatacacacatatgtgtgtgtgaaataaagattagcttggagc

SEQ ID NO: 63356 - DNA, 400 bp, Zea mays
  Clone ID: MRT4577_157780C.1
aaacaaaacaaaggctcactcacccttttccattgctaccgaaaccccccggaagacagggggcccaaaacagggaaaaacggggggatcaaaacaaacaggaaacataggcaaccccccccctgccgggggaaacaggaacttttggcaaaaaaaaaaccggggcttccttaatccaggggccttgcgtggggcgggagtcccttattcccccatttaatcccaggggccaaacaagcttaaaaaccgggggggcaacaaaacgcgggcgcggaaactgccaaccggaccccgcggggacgggtatgtaaacctggagcagaacgacggccctggcccccaccggggggccccccctttcccctttcccttccccaggcctccccttggggaaaacccg

SEQ ID NO: 63357 - DNA, 282 bp, Zea mays
  Clone ID: MRT4577_157781C.1
gaaaaaaaattactggtggatcattaagccaccgcatcgtgaatgagaaaaacacatgggcgggtggataaaactgacagcctttgatccaacgggggtgaaggggtagggataatgtggatcaaccgggttccgggacacaatttggggcggggagcgacattctaatttagtgccgttgtgctagggtttgcacaccgttttcacgatcacgaaccgtactgtattggctagcgcattatccccatttgggtgacacacacagttgagggaaacagcatt

SEQ ID NO: 63358 - DNA, 390 bp, Zea mays
  Clone ID: MRT4577_157782C.1
catctagccatttgcacacgatcatataatatattcgttcatgttagctgatgagtagccacagacttaattactaagtgggcactgggcatgccttgaacatctatcttggtgaattcattgaggctttagtggcattatatttgttgtataagcatcttgcatgagattctctctggctagtttagtgcacatgataattacagtatatgaatctgatgtgaagtctgtccatcctctgcaacggagtgcatagcatgattcactggtatatatccagcagttaaaatccatgccgtatttgcccgctgggaacctggaccaattaaaaatgggggttcctgaaccatgggccttgggccattagggttcaaaaaaccccccttggtt

SEQ ID NO: 63359 - DNA, 231 bp, Zea mays
  Clone ID: MRT4577_157783C.1
tttatcttaacacacacataatactctccatgggcgtgccatttcatctcaaaggatagcataatactcaatctctccaccaagcttttcgtggccctccttctgctcgtttgttacaccgtgacgcaaggcggtccaatgactatcgtgtcctttaggaagtgcgattcgcatagcttcctctttcaagggaccttgctcgagggacgccaactgcccaaacgtcttcct

SEQ ID NO: 63360 - DNA, 204 bp, Zea mays
  Clone ID: MRT4577_157784C.1
ctgttggagcccaaaaagtagggcataagcattccacgttccttaatgatgacaacgaccaccttaaaaagataattgaggctgggtgctcctgcaacacattggatttgagcagacaatgcaaggcaaccttttaaggagacgtcccactatattgtgggtggtgcatggttcgctgcatcatgtccagaaaggaaatgagta

SEQ ID NO: 63361 - DNA, 357 bp, Zea mays
  Clone ID: MRT4577_157785C.1
agaaccggggggaccaaccagtccggcgaaccagtcactcatgggaggagagtaaaacatcgctcaagcacaaagaagaggtggcgcgtgggttctcatagcaaataaacgtcctgaatttctgcgaagatctagcacctgctgatttagctgaggacgaagttctgttgcaaacgaggcattatgaaaccattaacactctgagacttaagtttgaaaagattctgggaattcttcacggatcatgtagaatggatcacctagaattagttgacgttgcctgagtctagacactaagttgcgagagagaactctgttctttaggtgcacttataattagaaatatgctgcacgttc

SEQ ID NO: 63362 - DNA, 523 bp, Zea mays
  Clone ID: MRT4577_157786C.1
accttaagtatacgttccttactggactggacaagacacatcagatccggtacagccaatccaaggaaaggcttcgtcacatcatgagctgagcttaggtccagcccaacggtatcacaacacattatattaactcttccctaaccaaaaactgaacggacaaaaaacccatcccaaagggaaggctccacatgaaatgccataccatacttgcaggggagggtttttttcgttcctcccatgatatgaacagagccatgacctaaggcccagaccagaacaaatgacataacgtaacgccaaaaacatccaattgaaatgaaggcccaactaaccaattaaggttggactgaacactaaaccttggctttgatcccaacccaagcaaccctccctttcttaaaggaaaatacaaaacccatcccgcctggcaagccaaagattacattccaaactccactaatgctctgattgattggaaagctgtactggacggacttgactttactgggcaggttatgtg

SEQ ID NO: 63363 - DNA, 270 bp, Zea mays
  Clone ID: MRT4577_157787C.1
atttgttgggggacgcccttggtcttggtggttagcggttaacaaaaaccttggtcactgttttttcggtccgtcccatagagggagcctccaacgggaacaacagggtaccaacacctaatccaaagtgagaacggacactaacaccgagacagaagctaacggcaacaccatactatacatggatcacatacctgggtccaacccattatggggccacacatgagtccgtacaaacggcgccggcagcaaggccggagacggcaccgg

SEQ ID NO: 63364 - DNA, 479 bp, Zea mays
  Clone ID: MRT4577_157788C.1
attcggctcgagaccggctgcagcacctgacggacaagagcgacgtgtacagcttcggcgtggtgctcctggagctgctctccgggtgcaaggtgatccagcggttcgagggcagcggcacgcccaagaacgtggtggacgtgaccgtgccgcacatcgaggcggaccgcgtgcaccgggtgctcgacgcgcggctcccgcttccgacgccggcggagatggaggccgtcgcctacgtcgggtacctggcctcggactgcgtgcggcccgcggggcgcgaccggcccaccatgagcgaggtggtcggcgtgctcgagcgtgccgtggcggcgtgcgaggagcacgacgatgggggcggcgaggcagtgctgtcgcggtcgtgcaccgatgggtccactgcgtgacgtggcacccgcgcgagggcattgcttgggtggctggactctctggtggcgacaacacgatggaaatttctatct

SEQ ID NO: 63365 - DNA, 581 bp, Zea mays
  unsure (1)..(581): unsure at all n locations
  Clone ID: MRT4577_157789C.1
taggattgagaataagggtatatgatcgtaaaatggttttgtgagtaatcactttgctgcacatctggaantgtgagcagacgcaagctgactttgaccacatttatcggacaatggctttcaacaaacctcatggatcgacagcttctgctacatctgtccaattgcacagaacagtgaatgtcaatggaaatcaggttgaagaagtgaggcctgacctagcagaagctgatatgattgtatttcttggtgatttcaactaccgcctttatggtatcacatatgatgaagcaagggacatggtttcacaaagaagcttcgattggctaagagagaaggatcagcttcgagcagaaatgaaagctggaaaggtattccaaggaatgcgtgaaggtataatcaaatttcctccaacatacaaatttcaaaagcaccaaccaggtcttggaggttatgattcgggtgagaagaagcggatacctgcttggtgcgacagggtactatatcgtgatagccgttctgtatcagtagctgaatgctcgttagagtgccctgtagttgcttcaatcacatcgtatgtg

SEQ ID NO: 63366 - DNA, 491 bp, Zea mays
  unsure (1)..(491): unsure at all n locations
  Clone ID: MRT4577_15778C.1
cccgggnncgacccacgcgnccgnaaccttacatagnaacaacaaccgacngngacggnggacngccagcaagcccncgnnagaganncaanagagaaggggcannacnngcagnnaccacaagaganaanggaanaaaaanaccagccaacacngaaggacaacgcnngcnnaggangcnngagagnagagcannngagggcncnagaggaccnccncaacaaanaaacaccaagccnccaanngncgcccnnggnccngnnncaaangncagcagnccnanagcagnaaangccgagcgaccngancggancnngccngcagngncgacaagnggcnnggcaccnanggangcnagcagaacnccagangnnaagccaagaanaacagangaanccgaaaaggncaaaaccnggaagnnggcngacanngnnganaanggacancnncgagcncngcannngacagacacagacacnaanccaagcaaa

SEQ ID NO: 63367 - DNA, 319 bp, Zea mays
  Clone ID: MRT4577_157790C.1
cccacgcgtccgcccacgcgtccagttacgcgtccgcccacgcgtgcgcccacgcgtccgtccacgcgttcggtgaaaaggagaaagaaaaagatagagaacataaccgcagaagggagatcctgaagcaggaagatgagagcgacgaagaggataataggaaaaggaagcgaaggagtagtagttcacttgaagataggaaaagaaggcggcaacgtgaaaaggaggaagatttggcagataaaataagggaggaagaggaaattgcagaagcaaggcggcgggctgtagagttgcaacagcaagcagatgaagcagc

SEQ ID NO: 63368 - DNA, 574 bp, Zea mays
  Clone ID: MRT4577_157791C.1
gccggccgggtcgggggtaccctaataataattctgctggctgcggcgatccccaaataaaagaggcagggtgcgatgcatcgcggtcttctcgactctcgagtggtgtttgcgttagacagccagccactgtgtggctagtgttccaacatttgtcagcctgcttgcgcgaggaagtgggggtgactgactcaagagaagggcctggtcataggctgctgcattatgaatttctgatcatgtcttatgtctgtactctgaatcaactatgtatgagatctcatctcctttctcctactgaatgaatgaatcattattggctaaaaaaaaaaaaaaaaaaaaaaaaaaaaaaaaaaaaaaaaaaaaaaaaaaaaaaaaaaaaaaaaaaaaaaaaaaaaaaaaaaaaaaaaaaaaaaaaaaaaacccaaaaaaaaaaacaacgcaaaaaaaaaaaaaaaaaggccccctaggcccgggcccctccaaaaattagggacccccccggcgggcgggaattcaatacaaagtttaagaaaaccgccacccccggggggggccccgaaacccattcccc

SEQ ID NO: 63369 - DNA, 612 bp, Zea mays
  Clone ID: MRT4577_157792C.1
aaggcccacggcggcgtccatgacggtaccgagatcgtgctctggaagtggtgcgagggcgacaaccagcgctggaagatcctcccttggtgtaagtcaactactcactgtgcctttgcggtttgccctcttccagttccacctaacctactaatgactctctagtacaatacaaccaccattgctgactctcgttgttgttgcttgcgtttgcaggaacgaacgaaagaaactactagctggtaccctaataataattctgctggccgcggcgatcccaaaataaaagaggccgggtgcgatgcatctcggacttctcgagtggtgtttgcgtcagacagccagccactgtggggctagtgttccaacatttgtcagcctgcttgcgcgaggaaggggggtcactgactcaagagaagggcctggtcataggctgctgcattatgaatttctgatgatgtcttatgtctgtactctgaatcaactatgtatgagatctcatctcctttctcctactgaatgaatgaatcattattggctttgctttgctccaaaaaaaaaaaaaaaaaaaaaaaaaaaaaaaagcttgtacctgcccgggcggccgctcga

SEQ ID NO: 63370 - DNA, 933 bp, Zea mays
  unsure (1)..(933): unsure at all n locations
  Clone ID: MRT4577_157793C.1
gtggcagcccgcctccgctttggagctccggccggggaagatggtaatctcagtcaaagcgcgggatgcatttcgcatctccttcggtccttccccagcccatccggtacggagccaaatctctggccgaacgaaaaagcgcggagatttccagggagaagcagtgttgcagacgcccggattcggggcgcgtcgttcctacatagaccgcgagtcgcctcctgcacctgcgggattcgccgcctgtcccagatccaagaaacgcataacgggcgtggagccagttgggccagggaagatttaaccagtcgggcccggaaggagcctaagggttggatctgatgctaccaggtcgctgagcatcgctacggaagggggcagcttctgattccggcagatggctcctgaaatgatggaggaggggcaatcagcttcctataccgtggatgacgctctcttgtcatcaggttttgggaggttccagatattgattctttcatatgctgggattggcttaattgccgaagcgatggaaatgatgctgctatcatttgttggtccatcagtacagctagaatggaagcttacttctcatcaggaaagcatgattacaagtgttgtttttgttgggatgctgattggagcttactcgtggggtgtggtttcagacaactatggaaggaggagaggctttctctttacagccattatgacaagtggagctggattttttagcgcttttgctccgaactatctatcattaatttccctgagattcttagttggtattggtttgggaggaggacctgttctgggatcttggttcttggaatttgntcctgctccaactagaggaacttggatggtggtattttctgcattttggactgttggaacaatcttggaggcatctcttgcatggacaattatgcc

SEQ ID NO: 63371 - DNA, 186 bp, Zea mays
  unsure (1)..(186): unsure at all n locations
  Clone ID: MRT4577_157794C.1
cttatttgacgcatcgatcctgctctcaaaatnagcgggtntgctgtgaccncatctcccannacccctacactcccggtcggtcggcgcaaggaagcagcagcacnctcgaggatggtgaagttctctcaagcccaggcaagggccgtgatcctacctgcagggaccggtgtcgcacggcatgga

SEQ ID NO: 63372 - DNA, 548 bp, Zea mays
  Clone ID: MRT4577_157795C.1
attgggaccctcgaggccggccgggacatatatactctaatcaagaggagacgaatggccgtctggcgctcactaggggtgattactttctagctcgcaacgtggacgaacagcgcgtcaccgtgtcgttcgcaactgccagactatggcgatctgtgtgaactcatccgccttctgcttcgggtccttccgccgagactattgatgtacgtctccaggatcgcacatgcctagctggatctcatctactcgcctgccatggatggtactcctccaagaaggtggtgagctgtcaccattgcgaagggcaagctccgaacatgtcaaaatacgcaagggagagacgtgctggctcaagatgaagtaacacggcacccgggcaaatcaccacgcccacgataagcatctacttgatcctcggagccatgcggaggttgacctattaagcttgactgatggactggagggcaagagaaggagcagcggaggcaatgagcaggaagcgaaactgataatccgcgaactgaacggcatgatcttggagacga

SEQ ID NO: 63373 - DNA, 359 bp, Zea mays
  unsure (1)..(359): unsure at all n locations
  Clone ID: MRT4577_157796C.1
ccacgcgtccgcgaaagacacgatactcgnctggcggcctcgtacggcagcgatgcccaaggctcgtcattacggtcccgttcgtgcgttcgaagatgcactaccacagaacgttgctcttatatatacacacttcactatgttcactgcgtcagacaacatttctatagctcttgtaaccccatcgccagcgatggagctggctaatattcaatatcatgcaaatcaggcgcctgcgtctgtatgacaacagcggatatcgagcctgaaggcaccaatgctgctacgtacacgtcaccagactgcgatctacggcatgtgattcaatcctgcgggaactgtgatagcatcaggttccc

SEQ ID NO: 63374 - DNA, 700 bp, Zea mays
  Clone ID: MRT4577_157797C.1
gccggccgggttccggacttcaaggcaggcatacacaccacacacaagttcttttttgttgagaagagcaaaacacactaccggcaggtagagctagctagtagcgatggcatccaacaacaacgacaagtccattgctgccaccgcgctcctgttcctagcagtggcactcatgttggcggcttctgtgcgggctcaggcactactggctccgacgcctgcgcctgcgccatcccaaaatccctgccccgccggcttccccaacttacttgcgtttaagatagccaagatgcaattttttcttagtaacggtactactctggtattctccctgtctcggccgatcaccacatcaatggcgtcgtctctgttcaagggagtgccacgcgtagtctgcatctgctttccctctacaaacagtaccatgaccatgattaggcccctcgaatgccagcaggcgtagtctggtcttcttggctgaaccccatgctcagcatgtctcgctcgcacctatttattacccacatactatatatactcatcttctatgatgaataaataagtcacgccgtttattatatgtaatatacagatatatgtaatgcgtgatatgtgttggtgttgtaattgtacctcttctaaaaatatcaatctatatacatatacgtatacacaaaaaaaaaaaaaaaaaaggccccta

SEQ ID NO: 63375 - DNA, 211 bp, Zea mays
  Clone ID: MRT4577_157798C.1
aacaaaaacaacccaaaggggcaggggttgttttgtaatcccacacacagaaccaatgggggcggaaacccatgataaaaccactttatctgacccaaggaaaacaagggaaggaccaagcaatccaataactcacagaataatgcggagctcacgcaccgcaacgactatgaataccaagctcctatgttaacccaaagagcaggtaaaa

SEQ ID NO: 63376 - DNA, 359 bp, Zea mays
  unsure (1)..(359): unsure at all n locations
  Clone ID: MRT4577_157799C.1
gcccncaagcagtggtaacaacgcagagtacgcggggacgacgcgtgtggcccgtcggatctcgcggccctgcgccacgagaccatgcccgccgtctaatgaccatcccccagggcccaggcagccgcagccagtcgattagccttcctttttttattttgtttttatttttacctttgttggctaaccttagcgagcgggcaccctttttttttgacctggatgtaaagtttttagaagggtaaaaaacagggggcgtggaaaaaacttgggaggggaaggttcagagcaaggggagaaaaaaaaaaaaaaaaaaaaaaaaaaaaaaagtactctgcgttgttaccactgcttaagga

SEQ ID NO: 63377 - DNA, 619 bp, Zea mays
  Clone ID: MRT4577_15779C.1
ccggccgggaaccgccactcacctcccgtccgtatggcggcggcataccacagacagtgcggacactgacccctactcatgcctgcaccgccgaagcacgactgaatgccgggcaagggtcggcgcccacatcaagcttatggcgaaggtacaggacgagaatgaggtgccctttcgcataaagaggccacccagatgaataatctgacgaacgcctattgcgaccagcaggctgtggatctgaatgccatgtgcattgctgcgttatgcgcgcaggcttccggagaaggacacccctgatggaatgaagatgaagaaatcctgctggaccgacaccatagcttcaccataccgaacgcagagcgcctagcaccacctaaaagcatacacctgcggagcctccatctgctctccgacctgcgaagtacgaaacgaaatggaataagactatttaacgaactagcgatgctctggctccatgagacattgctgagggacatccttagccttaatttatcgtaatgcattggtactgagatcatgcatcactcgcgtatctatccactatacatgccgacatgcttgtacttccaatgacgacgccgatcatttgctttga

SEQ ID NO: 63378 - DNA, 2040 bp, Zea mays
  Clone ID: MRT4577_1577C.1
cttttttttgttgtatccacacgacctttctgttctataagttcgttttgttgtttctgccattctgcctgctctgctgctcctcgtgagccttaactgatgatcttactatcttcctcttttgtgaagggtgaaataggggaacgatgatacactatggcggatttctccggccgggacgagaaagggacgtaaatatggagtggcggccagcaccagcagtgtccgctgcagcggtggcgagctgcgaggccgctaaaacccaagcctgaggtggagagaccgcacgggtcaccagtcaccacatccctccctcactgccatttgtttggttgttcctctcgctcgccagtcgccaccaggcagcaggcatcccaatctcgcgagagccagtagcggcggcggcgcttccggcttcccttcccattggcctccgggatggcgctccgcctccacgacgtcgcgctctgcctctccccgccgctcgccgcccgccgccgcagcggcggcagtttcgtcgccgtcgcctccatgacgtccgccgtctccaccagggtggagaacaagaagccatttgctcctccgagggaggtacatgtccaggttacacattcaatgccatctcacaagattgaaattttcaagtcacttgatgattgggctagagataatatcttgacacatctcaagccagtcgagaagtgttggcagccacaggatttcctccctgacccagcatctgaaggatttcatgatgaagttaaggagctcagagaacgtgccaaggagatccctgatgattattttgtttgtttggtgggagacatgattaccgaggaagctctaccaacataccagactatgcttaacaccctcgacggtgtcagagatgagacaggtgcaagccccactgcctgggctgtttggacgagggcatggactgctgaggagaacaggcatggtgatctgctcaacaagtatatgtacctcactgggagggtggatatgaggcagattgagaagacaattcagtatcttattggctctggaatggatcctaggactgagaataatccttatcttggtttcatctacacctccttccaagagcgggcgaccttcatctcacacgggaacactgctcgtcacgccaaggactttggcgacttaaagcttgcacaaatctgcggcatcatcgcctcggatgagaagcgacatgaaactgcgtacaccaagatcgtggagaagctgtttgagatcgaccctgatggtaccgtggtcgctctggctgacatgatgaggaagaagatctcaatgcctgcccacctgatgtttgacgggcaggacgacaagctgttcgagcacttctccatggtcgcgcagaggcttggcgtttacaccgccagggactacgccgacatcctcgagttcctcgtcgacaggtggaaggtggcgaacctgactggtctgtcgggtgaagggaacaaggcgcaggactacctttgcacccttgcttcaaggatcaggaggctggaggagagggcccagagcagagccaagaaagcaggcacgctgcctttcagctgggtatacggtagggacgtccaactgtgagatcggaaacctgctgcggactgcttagacaagacctgctgtgtctgcgttacatagttctccaggttttgatcagatggtcccgtgtcgtcttatagagcgataggagaacgtgttggtctgtggtgtagctttgttttttatttttatttttctgctttgatgtacaacctgtggccgcatgaactggggcgtggagatgggagcgaccatgccgtactttgtctgtcgctggcggtgtgtttcggtatgttatttcagtcgttcagatctgttaaaaattttgtgagctatgcagttcagttcgatgtacaacttgtggccatgaggctggacatggagtgaacatgttgtttttgtcagctatgcagttcagttctgttcaaaaaaaaaaaaaaaaaaaaaaaaaaaaaaactcgagcccgg

SEQ ID NO: 63379 - DNA, 774 bp, Zea mays
  Clone ID: MRT4577_157800C.1
ctcgaggccggccgggcagacatttcaataattcgatcttcgatttccctctttgtttgaatcatcaacccaacaagaaagacgacagtcaacgcgaaaagaaagacagaaagaaggaaagtgaaaagatgcagtaccgactagtctctatgctcgccgcaggcatattggtggccatgagcagcgccgcgcctgtcccatcagccgacaacctatccatcaccaaccccccaaacacgattgagctcggcaagccctcatcagaaatctcctggggcaggagcgtcgccactgaagtcaccaacccagacatcgtcgacatttcgcctcccacgtccgaaatcatctggagcaaggacaagaaagcccgtaccgacgagccggccgtcaaccccgacgacatcgtgctcacgccccccaactcggaaatcatctggagcaaggcccgcagcgtcgagtttgaaaagccaaaggatagcttcaacttgggtaacgccaacacggacgttacctggggcaagcgcgagtccacaaccactgttggtacgcccgaggatacgattgagctgggtaagcctagtacggagatcacgtggagcaaggagaagcgtgatgagcttgttacaccggatgatagcatcagtcttggtaagccatcgacggttgtgacgtggtcttaagctcgagagggagtaaaaaggttggttgttaaaggaggaaagatgttctcggcgctcattggcagttgcgtatatgttatctcttcggtggatg

SEQ ID NO: 63380 - DNA, 675 bp, Zea mays
  Clone ID: MRT4577_157801C.1
taaaaccctcaccttatcttctgatggggtccctcctcccgcttcctcgaatctcactgctgccgccactgttttcttgcttcgttgcgtgctggcggagcaagaggcggccatggccaccaccagcgacgccgccccagtcgcgcctgtggaggaagagagcacctccccggcaggcggggaggaggagccgcccaagaaagtcgaggcgtccatggccaccaccgacgtcgctccagtcgcgcccgcccccgtggaggacgagaacctggcctcggcggcggccgaggagagtccgagcaagaaagtcgaggcggcggcggcccaggaggaggtggaggaagtggtggaggcgccaaagaaggtcgtggcgggtgggggagaggaggaggaggtgagattggaggggatagatgagggctttgggggtccggaggccgagaacggccaggcgaagggtgtcggaggaggatatgatagcggggatgtaaaagaggcggatgcggaggataaaggtgggaatttgggtccgacagaggccgaggccgagaccgatgacggcggcgaggaaccggcgtcgggggacggggaaacacccgcttctttggcagcgcccatgccagtggtggaatccaagtcggagaacgccgaattgggggatggagatccttctct

SEQ ID NO: 63381 - DNA, 1334 bp, Zea mays
  Clone ID: MRT4577_157802C.1
cctcgcgcatccgcttccgcatccacccttcagcgcagatcggatccccacccatggccgggcgcttcgacctccagggcaggcacggcaagtcccgcgtccgggtctcccgcgtctggcgccgccccgccgaggccggcggccacctcttcgtcgagtggagcgtcgccgtcagcgtcgtctccgactgcctcccctcctacacctccgacgacaactccgccatcgtcgccaccgactccatcaagaacaccgtgtatgtgaaggccaaggagtgcacggaggtggtgtccatggaggaattcgcggtcatcctcgggaggcatttcacctcactgtactcgcaggtctcagaggctacagtgacaatcgtggagcgcccgtgggagcgtgtggctgtggacgggaagccccattcgcatgggttcaaacttggttctgaaaagcacaccacagaggtcattgtaaaaaaatctggaagcctgcttataaattctggaatacaaggatactccctgctaaagacaactcagtctgggtttgaagggttcgtgacggatcgctatagtcttcttcctgatacaagggaaaggatagtagcaacagaagtaactgcttggtggaggtatccctttgaacatgtttcgcagctcccatcgaagccattttgcttcacgcagagataccaggacgtaaagaaagtccttgcagagacgttctttggtcctccggatgttggtgtgtatagtccatccgtacaaaatacgctatacctcatggccaaggaagtccttacaaggttcccagatatatcgtcagtccagcttagaatgccgaaccttcactttctgcctgtcaacttggggaccaaagaagctccgctggtgaagtttgctgatgatgtgtacctgccgacggacgaaccacacgggaccattgaagcaaccttgagccgtcccatgacaaagctagtcgtcatgctggtgtcgtcatcctgattagtctccccagcatccccaggcttaaaatggcaagtaagctgtaagggtaagataaactgtcataaatcgtagcccctatgctttatgtgtggtggtggtaataagtgcacagacttgtattggatgttgtcagctgtagcctgtaggcgtccagcttgtgacgtttcgccactgtaatcgtgtacattggtcgtcttgtgtggaaaccagttaatatctttggaagctttggtcagttttacttcgtcgtctgtagtcttttagctcgttattaggccaccagcttcagtagatctgattgtttctccatatatttgaacatattacgtctcc

SEQ ID NO: 63382 - DNA, 1546 bp, Zea mays
  Clone ID: MRT4577_157803C.1
ctcagttttacaaagatattaactggtttctacacaagacgagcaaatgtacacgagtacattggctaccccgaacccagacggcccgccagacccaccggccgggatcgccggcgcaacgcaaacccagacggccagacccagcggtcgcttactcgcatcgcagtcgcagcgcactcgcgccacagtcggcatcacagaccagatccctgcgggtgcggcggccatggccgagaacttccaactccagggccggcacggcaagtcccgcgtccgcgtctcccgcgtctggcgccgcccggccgcggcggggggcgacgtcatcgttgagtggaacgtcgccgtcagtatcgtctccgactgcctcccctcctacacctccagcgacaactccgccatcgtcgccacagattccatcaagaacaccgtgtatgtcaaggcgaaagagtgcacggaagtggtgtccatggaggaattcgccgtgattcttggaaggcatttcacctcgctgtaccctcaggtttcagaggccacggtgactatcgtggagcgcccatgggagcgtgtgactgtcgacggaaagcctcattcgcatgggttcaaagttggtgttgagaagcacagcacagaggtcattgtaaaaaaatctggaagcctgcttataaattctggaattcaaggatactcgctgctaaagacaactcagtctgggtttgaagggtttgtgacggatcgctataggcttcttcctgatacaagggaaaggatagtagcaacagaagtaactgcttggtggaggtatccctttgaacatgtttcgcagctcccatcgaagaagccattctgcttcacgcagagataccaggacgtaaagaaagtccttgcagagacgttctttggtcctccggatgttggtgtgtatagtccatccgtacaaaatacgctatacctcatggccaaggaagtccttacaaggttcccagatatatcgtcagtccagcttagaatgccgaaccttcactttctgcctgtcaacttggggagcaaagaagctccgctggtgaagtttgctgatgatgtgtacctgccgacggatgaaccacacgggacgattgaagcaaccttaataagccgtcccatgtcaaagctgtaaaaaaaatgtagtcgtcaggctggtattagactcctgcttcgtctccccagcatccccaggcttaaaatggacagtaagctgtaagggaaagataaactgtcataaatcgtagcccctatgctttatgtgtggtggtggtaataagtgcacagacttgtattggatgttgtcagctgtagcctgtaggcgtccagcttgtgacgtttcgccactgtaatcgtgtacattgctcgtcttgtgtggaaaccagttaatatctttggaagctttggtcagttttaaaaaaaaaaaaaaaaaaaaaaaaaagtacctgcgttgttcctccaaaaaaaaaaaaaaaaaaaaaaaaaaaaaaaaaaaaaaaaaaaaaaaaaaaaaaaaaaaaaaaaaaaa

SEQ ID NO: 63383 - DNA, 451 bp, Zea mays
  Clone ID: MRT4577_157804C.1
atgtgcttgaccgtgacccggcggagtgggcgtgagaccatcgaccgtggcccgtcaccttcctcccttcccccacccccccagagcaacagcacacacacagagttggaccggacgtggatatctcggcatgccggggcagggccagcagcacggcacacttcctcccgccgacgggggggggggccagataccgcgcccgccttacccggggggacgacaagcatgccaggtggcaacatcggcggacggcgtccctttacacggatcaggccgtcaccaccgaccggggacgagggctacgtggcgcaggcgacggggatccacacgattatggcgggtgaacattgctatcgggggcgaggaccatccggggtacacggaccagaccaacaacacgcacaccatgcaagatcagaaggaagagtccatcgagcgtgctgagaagggg

SEQ ID NO: 63384 - DNA, 362 bp, Zea mays
  unsure (1)..(362): unsure at all n locations
  Clone ID: MRT4577_157805C.1
gacgtcaacacttgtctgtaactgtgccctgcagaaacagtcattccaagaaatacataatgcagaaccctaatcttaccgacgataaccagacagttcttccaaggtcgggaaatccatcagcacgcggtgaatcaaagcctagtcctggaggttgcatgcgcggcttatagactctaggcttttgacaaacatgngacaagagatatgtttagaaacggacagagtgtccctctttaccgcaagtaaaatgataagagcgggatgctcgagaacattgacatttttgtcctcgcaggccagaacaccgtacacagggcggtgttaggaaggcacctccaagtagaccacctccctggcca

SEQ ID NO: 63385 - DNA, 175 bp, Zea mays
  Clone ID: MRT4577_157806C.1
tagtgcgtggaagtttaattaccttttcttagacatcttgcgatattatgtgatgcggggatagattcgcatttgcctgcttattcttcctttgatgggatctcgcctactcctgttaatgattgtcttacttcgcctgattttaagaatggttaggctgcttgtgagccttttg

SEQ ID NO: 63386 - DNA, 531 bp, Zea mays
  Clone ID: MRT4577_157807C.1
ccggccgggatctgtctcaaacaacaccatctttccaacaaacaaacacataattaccctttgataccccaaccttgttcttttctttcttcacacacatacacaacacacacacaatgtctgctcctcgtggtcgtctcgctggcaaaaacgccgtcatcaccggcgctggtggtggcattggtcttgagacctccatcctcttcacaaaggagggcgcctcaatcctcatgtccgacatctcccagcctgctctcgaaaaggccgccgcaaaggtcaagcagctcgtccccgatgcaccccgcgttgagatcctgaaagtcgacgtctccaaggaatcagaggtccaggccatgatcgagtcactcgactcttggggcggcatcgacgtcctattcaacaacgccggtatcatgcacgcccaggatgacgacgacgtcaacacccccgagaacatctgggatcttacccaaaacatccaaccgtcaaggatgtgtggttccggcttgcaaacacgccgttctttctctg

SEQ ID NO: 63387 - DNA, 359 bp, Zea mays
  Clone ID: MRT4577_157808C.1
cccacgcgtgcgaaaaaaaatgattatataataggaatataagaagaaatagataaccaacgtagagtgaataattgcctgcttcgaaaactgctaaaaaacttacaattaattccgattcttgtggggtcacttgaggagccagcaaaccaccaaccaagggtccgagagcaggtatctagagcaagatgtacggctagaaggtcgactggctgtaggagccgttgaccaagtcgttatacatcttcttatacacctgcttcctgacgtagatgccctaccacttgagctaagactacgcgttagagcacgccgtcgcgcaaggcatgccgtactggtcgccgttcttgtcgtcgtac

SEQ ID NO: 63388 - DNA, 223 bp, Zea mays
  Clone ID: MRT4577_157809C.1
ggctggagaagtggccatctatgtatcctgtagagcaatgcacaacctatacaatacggcgacgacattcatatgctcatgcagtactgatattataatataaccatatacatatccaaaagtcataccatcaagctacatgaacggcgaataatataacaaaacacttgggaataaggtaattgagctatatcatatgtagagctatagctggcttgatgaa

SEQ ID NO: 63389 - DNA, 280 bp, Zea mays
  Clone ID: MRT4577_15780C.1
aaaacaaaggggggcctttaaagaaacttttctgaataaagcagcagcccgagccgcagccgaaggcaactcccttcaaatttcaaaatttaaccgccctggttgggttgcaatttaagagtacaaacgttaatcccccacggccttttgcaccatttgggttctttggaaacactttttttatgggattactttttgccgggccttgaccggttgggatccttatgttccacatcatatctggggctttctgattttgcttcttttcccctgggggatc

SEQ ID NO: 63390 - DNA, 565 bp, Zea mays
  Clone ID: MRT4577_157810C.1
acacgctgcagcaacttactttgctgcaggcctgaagggacatggcacaagcataccaacctatgtgaacccagatgttgctgcagaaaataggaaccttaattcaccataggtacctaacggatcgcaggcataaactgatgcaacggatgctggaacgggctcacaactacgtgaacaaaaccaagtgactgtgatgcgaccacacttgctgatgaaagataggctgtagggctgaccatgcataggtggcatataatgcgtgtttaagaattgatgacaatcttgcaggacaaaagcttgccactgtagaagatactaggcttgatgactgaaccacaaaagggcgtgattactaaacacgctctgactatgatgatgtagctacaggcctgccaagagctgatggaaaccaattaacatgcggcgtgactaactgatgttaacggaacttgaagcagataccgtctgatgataatgaacgcattgcggtgtgactcagctagagcacctcaagcgcaaccacgcttaagacgaagtccaccacactggctagcgtgactat

SEQ ID NO: 63391 - DNA, 453 bp, Zea mays
  Clone ID: MRT4577_157811C.1
agcagtggtaacaacgcagagactttttttttttttttttttttttttttttctttttttttttttttttttttttttttttttttttttttttttttttttttttttttttttttggggaaaacgactatgaacacggggggggccttaaaacgggcctttagaaaaaaacaaaaaaagggttttttaaccccagctggaaatggaccccccgggggggcaaattcaggaacaaagaaaggctacttaaacgggctaaccaattcagggggggccggggggcttttttacagccaaaagacttaaggggcccaagtttaacagcactaaaggctctacaaggctacaaactacacaaaatggatcttccaagaccaacatttttcccccacaaaaaaaacggtggggcataaaagggggaaggggcaacaaaaaaaacggggaaaaagggcc

SEQ ID NO: 63392 - DNA, 926 bp, Zea mays
  unsure (1)..(926): unsure at all n locations
  Clone ID: MRT4577_157812C.1
aaaaggggaaaaaaaaaaaaaaattacacaaaaaaaaaaaaaaaaaaaaaaccgagcaagctttccaaaggacgctacaaacctgacgtccatcgccggggcctgtgacggtcgccgccttgacgttgacgacgatgcgcacacgcaaacgcacccacgagcctgttgatccaaacactgtgaaaattctataagtacaggcactcgaggaggccggggccgagatccagcctcgagcaccgggacctgccgcgtgcttcttactggcaacttggcaagtggcacggccgcacggatccatctccatcgtcgaggcgaggacgaggaagcagatcgaagcacccaaccacaccacactggtggtgagtggttgctggcgatggccatggaagcgatgatgagcgggctcaactccggcgtggtgctcagcctgatcgccgtgctgtggacggtggtgtggcagaacctgcagcacctgcagctgcagcagttcttcgcgcggcagctgagccggcgcgcgcggcggctggcggcgatggtggacccgtacctgtcggtcaccatcgccgagtacgagggcgggcggatgaagcgcagcgacgcgtacgaggaggtcaaggcctacctcagcgacgccagcgcccacggcgtgcgccacctccgggccgagtccgccaaggacgccgacaagctcgtgctcagcatgtcggacggcgaggaggtggaggacgacttcgagggcgcgagggtctggtggtgggcctactccaagcagccgccgcgctcggacggcgccgcggcgtggtggagcggcggcgggcgccgccgcgcaggaggagcgccacttctaccgnctcttcttcctggagcaccagcggtcgctggtgctggacacgtacctnccgcgcgtncgncagctgggccga

SEQ ID NO: 63393 - DNA, 289 bp, Zea mays
  Clone ID: MRT4577_157813C.1
aattccgggtcgacgagcccacaatacggcggccggccctccttttttttttgttggttttttttggtttttttttttttttcaccaagggccccagacatgttcctttcgggtccaaacccaggtggcattcctttggcactggcaaaccaaaaggaaaccccggggaccagcaaacaggatcccttccaaaaaaaatccgtgctttcccccgaccacaaaatggcacttgaccggacggggacctaaaaactccaatcaagggggccccttaaccccaatccaaggt

SEQ ID NO: 63394 - DNA, 228 bp, Zea mays
  Clone ID: MRT4577_157814C.1
ctgggaaaataaaatttttacataatatataatagctgggtaaacataaagtaaaaaaaaatgaaaaagctaaactgggactcaatgggaaaaaacagtatgaaaagatggctgtgcaaaaaaatcccaaaaatttagactccaaccgggccgacacccgttcgtcctttcccgggtctccatttctaatatacaatttccggggcaaacgtaattccccgttacctt

SEQ ID NO: 63395 - DNA, 264 bp, Zea mays
  Clone ID: MRT4577_157815C.1
gacgcactgagtaagcagctgtaccatgtctggcatagtaaggcagcagggctccgcgcgtgtcagtataatctaattggtagagagaggctttggcactgcctcctagagcctcaatgagacgcacaacccgcgactcactccaggggtcagaggatgagaaggccatagtctgcaatagttgaccatcgccagtcaggagaggtgcttcatatacagaaccagagtcagcagctactagaacagagcatgatgatcccgcag

SEQ ID NO: 63396 - DNA, 347 bp, Zea mays
  Clone ID: MRT4577_157816C.1
ggagaacaaaacgaatgggctgggctagaattcaaaaatttaaaccgggcgacaacaggggtttccgaaaccccacttcaaaagcccgacgtaaaaccattggtaaaccaaaacaccctggtagataaaacttggtaaacacaaaaaaaaacccccgggaaactttggggccacacttagtttgggcaggacccaactggcccccaccccaattaggggtttaacccaaaaaaaacccttttatggggggggctttcgggcctttttaaaaacaggggacttcacgggctttgggttgggcttgggcctgggggggggggaattttttgggtttgccacaaattttt

SEQ ID NO: 63397 - DNA, 464 bp, Zea mays
  Clone ID: MRT4577_157817C.1
gactagttctagatgtgcttgcttcctaaaaaaatttttacatctaaaaaaaaaaacaaaaaagggaaatataaaaaaaaaaaaaaggaatcatcaaataataataaaaacactaaaaacaaaaaaaaaaaaaataaaaaaatatggggcgccctctttaaaaatcccaagctatcctccccctccttccaaccctatacctcttttaaaggggcccctaattttaatcaattgccctgctttttacaacttttctactgtaaaacccctgtctttcccaaactaaatccccttacaaaaaatccccttttccccacttttcttaatacctaaaaggccccaaccaatcccccttccaaacaatttcccaaccttaattgcaattggtcccccccctttttctccccttttaacgcaccggtttttttttttactcccatttttacccattcaatttccaaccc

SEQ ID NO: 63398 - DNA, 276 bp, Zea mays
  Clone ID: MRT4577_157818C.1
tatggataccaactagcttcatacatagtgtagtattctttaaacaacttaacaccaatggcagcctttatttttgcccttctttccctccttgctctttcaacaagcgcttctacctctactgttatttcacaatgctttacaacaatacctttttttggcgacagccgcgagatttcaatacccaactatacaaccctacatgctacaagaggccatttcatcaagcattttaccgacattaacatttacccttcaacaaccatattccctatt

SEQ ID NO: 63399 - DNA, 454 bp, Zea mays
  Clone ID: MRT4577_157819C.1
ccggtggcctcggccgcagccaggatccgggccatgccttcgtactcggccgccggatcggtggcgatgcgcagctccggcaggttgccggcatgttcgcccgcctgtgcctgcaggcgcgcctgcagttcgccgatcgccatcggctggccattccagctgagctggttggcagcgtccaggcgcagctcgatcggcggtggcggttcgggacggtcgaccacccgatcggtggcctgtggcaactgcacggcaatcggccgggccacgatcggcgcggtcacgatgaagatgatcaacagcaccagcatcacatccaccagtggcgtgacattgatgtccgccagcgggccgcttcttcctgcgctactgaacgccatgtgccgctccctgcagccgggccgttcgcccaaggccgacgttacgacgcctcccatccgctgcggcagtggcc

SEQ ID NO: 63400 - DNA, 506 bp, Zea mays
  unsure (1)..(506): unsure at all n locations
  Clone ID: MRT4577_15781C.1
ggggccgagctcagttgcgagagcttgtaaccctagtgtgggtattaaaggtggtgcgcggatgctttctgacggcttctgggcctgggcccatatgtgccactaggctggactgtccatcccaagttgggagtgtctgacggggctcaggcgaaagccttggtggacctctgtaggcctgaagcggtaggcacggcgtgaggctggtttaacagagcagcgatcactgcccgcttccaacggtgggaggataacaggccggctgcacttgagagcccaactcgggcccagatccacattaagcagaccaccatttttttttttttacctttgtaaacctttggaggtcacatgttctccgccgctgcacccaacgtgttccgacttcagcagacaacgccatctttttttttctgcccatgggatccaacgtgttgggcccagcccagtatataggagtgcatgcagtggcgggcgatgatgtaaaaagatggctacttatntat

SEQ ID NO: 63401 - DNA, 157 bp, Zea mays
  Clone ID: MRT4577_157820C.1
gtgattttagtattggaggtggtcctagcaaaggaagctgaggtattttcagcattggaaaagctacagtgacgaagatggacaaaaactccaaaaatatggtatgtttatccacaacactcgtttgatttttatgtatgcgttagaagcttgtacc

SEQ ID NO: 63402 - DNA, 412 bp, Zea mays
  Clone ID: MRT4577_157821C.1
aaacaagcgggggtttattaaaggaaaagggggttaaaaaaaatttttccctaacaacccaagattaaaagggcttaaaccccctatccatgggagggttttagggtttaaccaaaagggacttatggagggtattcgcttccaaaaaatttgggggaaaaacaattatttatttaggacattaaatttattaaaaaacctaaaaaaaacatccgttactaggggaggggattattttcaccaaaccaaaaaaaactttcactaaaaacacgggggggactataaaaaaacgctaaacttacttttcgaattactaggtagcaaaaaaaaatgggaaaaaaaacaactaaaatttttgggaaaaatttggttcaaaaatttaaatttaaaaacctaacgggaccacttaaaa

SEQ ID NO: 63403 - DNA, 393 bp, Zea mays
  Clone ID: MRT4577_157822C.1
gccggcaactcagcagcggggtctcggagatccggcacactgcggaccgctggcgcgtgtccctggatgtcaaccacttcgccccggaccagctgacggtcaagaccaaggatggcgtggtggagatcaccggctagcacgaggagcggcaggacgagcatggctacatctcccggtgcttcacgcggaaatacacgctgccccccggtgtggaccccacccaagtttcctcctccctgtcccctgagggcacactgaccgtggaggcccccatgcccaagctagccacgcagtccaacgagatcaccatcccagtcaccttcgagtcgcgggcccagcttgggggcccagaagctgcaaaatccgatgagactgccgccaagtaaagcctta

SEQ ID NO: 63404 - DNA, 1302 bp, Zea mays
  Clone ID: MRT4577_157823C.1
cattatgcccttcaccgcgcattgtccgaatcacaaaaggcttcgctttacggcgctgtgtattgaaaagccccctaattgacgtgacaaatccatcacctgcaccatcgcctggcctcttcaaccatgaagctgttaattgatcatgtcttccaggttgaccaacatcactgtcactcaagttaagatcattttcaggaatagaaccctcaagtgtttccctatggttgctaaacttcttcccctgcattccggttaccgacttcaaaactccccagatgatatgttttttgactctagagaatagtcgcctccatgtaccagtaaattctgccttgtggaaagtatccataagcaaccttaggtcattaatagcaagccttgatccctcgtatgtaacaagaagttcaaccttgccaatcttgatgttatgaaattccattgacttccgaggttttgtcttcttttcatcattagacttcccaagcttcttttcttcgtgagatagacgtccagacttggcaggcttagaatctttcgttttacttctccacatctcacttcccacaacagggttctctaagacagaattgctagcatctacttttgaagaaacaattgaagaattcaggagtgataccacatcattacttgcaacactttctgcagcgctttcttcccaattcctttcaaatgaagacgaccggtgcaactcttgatgcgaaccacataccatatttgcttttatactctgaaactttgacacctgtgagttatcgctgagtataccttgccaacttgaaacatttgttgatgtagatacagttgtacttgatttcccaggaagttcatgatctctgacagaatagctgctagaagtaacagcatcgacaccagaagagagccttcttgttcttctaggcccggttgatgttgaaactctccaaacttcctgtcttcgttgtgaatcgtcttcttcagggaagaagtaatcccacatcattctatacattgcttcagatagatgagggtacagggggtagatctccacctggaagagctcaagtggagaacttccatccttaggagcaccttgcttggcatccacacgaagcatgttaatttttccaggaggtgtgttccaggcagacaataaggtgtcacatttcgcattaaccatgcaattccgcacaacaaagtatttagttgtaaacagggcaatgcctatatctttgtaatcccgatcaaaatcatacaccatatcattgatctcagcttctgcaaaagtgtttcctctgcgag

SEQ ID NO: 63405 - DNA, 449 bp, Zea mays
  Clone ID: MRT4577_157824C.1
ccgtgcgtaagctcggaattcggctcgagaggacacactgaatttttttgttggcggccgcaccgggagcagggctaggcctaatggaaatatatgcgagcaatccaacacgcccgcggacattcaacgccctgctgcccagaaggagcggaccctttgccggaaacgagcacacgccacacaacaacagcccgaaccgagagatccaatggcggaagcggaggaacagcgggggcttatggcaacggggcgtacgccgactaacatggcggggatcaagtactagcgaaagcgcaacgaggtattaatcctgccaataaacgacagaataagtgtatcggtcgaccctgaccatctatggagcaccaccactgttgcgagaagtccctgattcctttacgaccgcatgtggctaaaggaggaggagatattgaatatgaggaggaagg

SEQ ID NO: 63406 - DNA, 450 bp, Zea mays
  Clone ID: MRT4577_157825C.1
gttccgctttacatcaaggtacagtaacgcttagacaaatgaccctccctttaccaaaaaatatgaaaagatcggcggagatatatttctatgcggcttttcgttgtacttgtgttcttcttacctgattgcttgaagaactgacatctatctaatggttatacgcataggcatgttctgagccctgttgagtgtaacaatctgcaagttgaggggaagcagattacagtctgcctatataatctagaatggttgttcaacttgcagattggaacatgcctccatctgactttgtggaccctaattgcatttagcttcaaatttcccttctcatacctgatgaatacttatcctcatgcttctgaaaattccaaatttgcttagtgagcctcatgtgccttttgaatctatcgacatggcaaatggtattttccagattcatgttcaatt

SEQ ID NO: 63407 - DNA, 536 bp, Zea mays
  Clone ID: MRT4577_157826C.1
ggccgggatactgcttccaacgcagccgccgcctgctctatcttttcctctccgccagcgagctctatctccctggacatacgacatctgcccccgacttctgcacaccggtgactattattgggattggtagtgctgccatctataataactctggatggcgcagtactcagctgaagtatgtccctgccctcgtgcacaaaaagaaccatcttcgtaacatggctgtcattggtcatgcgcaccatggcctgtctacgcttacagattcccttgtgccacctgctgtgattatcgcccaggaatttgctcgagatgttcacatgtatgatactcctgcacatgaatcaaagcgcgtgcatgacaaacaaatcgactgttatatctctttactatgagatgactgacgagtcactgaagaactacaagggcgacagagatgataaccactacttgaacaaccttattgactcgcctgtacacgttgatttttcttcggaagacagagctgctcttcgcatcaccgatgctgctct

SEQ ID NO: 63408 - DNA, 1140 bp, Zea mays
  Clone ID: MRT4577_157827C.1
cattgggtacctcgaggccggccggaactgacacctatggaggtcgtggtgacgacgcgggattccggaatcctggcacggttcctcatcaagcccgcggcattccacccgtggcgcgaccgcgccaccacgcagcccacgcaccaacgccgccctaataaatcccctgcgctccgcgcccgccggctcgcaaccctaaccttcctcccctgctccgccgccgctgccacggtcgcctctactgccatggtgagcgccgaggtcggcatcgattacgtgctgtggacggaggacgaggtgtccacccgcgtgggcgaggtcgccgccgagctcgcggccgacctgcgcgcgttgccggagcccgccgtcatcgtcggcgtcgccacgggcgcgttcctcttcctcgctgacctcgtccggcgcgtcgacgtgcggctcgtggtcgacctcgtgcgcgtcgagtcctatggggcgggcacagagtccagcggcaagccacgtatcacggccgacctcaaagtcgacgtggccgggaagcatgtggtcgtggttgaagatattgttgacacagggaatactctgtcctatctcattgctcatttggagaagaaaggtgcatcatctatatcggtttgcacttttcttgacaaaccagcaagaaggaaagtcaatgttcatctagtgggggatggaaaattttaccgtggatttgagtgcccagactactttgttgttggctatggtttagattacgcggagctctaccgtaacctgccttatgttggagttctgaagcccgagatgtacacaaaggattcaagcaattagacctgaggctgtacctgcaccttgtgcaagagatcaatacgaagatctcagttacaaatgatacagagattccagttttgatcagcaactttgtcaaagcagaacttcttaatgcaatgatacgagagggggggggggcaaagaaaaaaaagaaagatctagtttacctttttcttctgtaagttcaggaaaacttcagtttttccaggtttcagtagcataacagcaagatgtacaactttgtcacacaaacagcaacccagaagggaaagaagtggttatatggcatgttacattttcagtttacaggct

SEQ ID NO: 63409 - DNA, 2364 bp, Zea mays
  Clone ID: MRT4577_157828C.1
tgggtacctcgaggccggccgggagcagcgtcgtagagccgtggtttcccacaaaaaaacggcgccacggtagcgagtttctagaaccttcccacgccctgcgcccctttgctgtctcatacctgtcttaaaccctagctagtttctaggaccttcccacgccctgcgcccctttgctgtctcaaacctgccttaaacccttgttagtttctagaaccttccagacttccagttcccgacctcggcgccatggacctggacccagaggggatcttccgcgacgacagcgatgaagacgaagacagtgtccaggagagggaggcgaacaaggagatggttgtctaccttgtcgacgcctcgcccaaaatgttcacccctgccaccacccaggacaatggaaagcaggagacacatctccataccattgttaactgcatcacagagcctctgaagacacaaattattggtagatcttatgatgaagtcgcaatatgtttctttaacactaaagagaagaagaatttacaggactcagccggtgtttatgtttataatgtcggagacagagagcaacttgatagacctactgcaaaactcatcaaggatttttctttgatagaagattcttttatgagcaccattggaagtcgatatggaataacagctggatctcgggagaataccctgtataatgctctttgggttgctcaggcgctgttgcgcaagggatctgtgaagaccgtgagtaaacgaattcttatattcaccaatgaagatgatccttttggtactattacaggagcagtgaaaactgatatgattaggacaacacttcaacgtgcaaaggatgcacaagatcttggcctgtctattgaacttcttccactgagcccgcctgatgaccagttcaacatgtccctgttttatgcagatttgattggtctggatggagatgagatgaccgaatatttgccatctgctggtgataagctagaggatatgactaatcaactgagaaaacggataatgaagaagcgcagagtcaaaactctttcatttgcgattaccaatgatgtgtgcatagaagtcaatacatatgcgctggtccgtcctactactacagggacaatcacatggcttgattcactaagtaacctcccattaaaggttgagaggtctttcatatgcaatgatactggggctctacttcaggatgcacagacacgtttccagatgtacaatgacacaattgtcaaattttctgtacgtgaactctctgaggttaaaagggttgcaagccatcatcttcgccttataggtttcaagccattggattgcttgaaagattaccataacttaagaccatcgacatttatttatccgagtgatgagcgtatatttggaagcacctgtgttttcgttgctttacatagctcaatgttacgtcttggaaggtttgcacttgcattttatgggaatccaactcgaccacaactcatagcccttgttgctcaagaagaggttacttcgtctggtcgtcagtttgaaccgcctggcatgcacatgatctatcttccatactccgatgatattagatatcctgaggaagttcatgtgacttctgatgatgcaccgcgtgcaacagatgaacaaatcaagaaagcttcgaatatattcaaacgtattgatctgataaatttctctgcatgccaatttgctaacccagctttgcaaagacactatgggatcttggaggccttagctttaggcgaagatgagatgcctgatataaaggatgagaccctgcctgacgaagaaggcttgtctaagccaggggtagccaatgctattgaggaattcaagacttcagtctatggtgaaaattatgaccaagaggaggcagaagcggcagcagggaaagcttcccgtggtaatgcttcaaaaaagcggaaggaggtcactgatgcagctgcgcagataagtgctgcttatgattgggcagaacttgcagacaatggaaaactgaaggaaatgaccacggtggaattgagatcctacctgaccgcgcatgatctcccggtttctggtaagaaagatgtacttatcagcaggatcttgactcacctgggtaagtgaagccgggtatccgaactgttagtttcctgagacccgactgacatctgtagtgctgtctcacggatccttgtggaccgtaatcctcccccgtgcaggctacgtgccgatcttttgtatagcgacaggacagcaccagttgccaatgtaactttgtgttaagtttcgtcttgtggtatcatctgcttgtcattgtcaacatgaaacataatgtaattcggatattaaagc

SEQ ID NO: 63410 - DNA, 512 bp, Zea mays
  unsure (1)..(512): unsure at all n locations
  Clone ID: MRT4577_157829C.1
tcgcccaatctctctgtcggnaaaccgatcctcttccaccgcacgccaccggccaccgcgtcccttccaccggccaccgcgccccctcgctccggcccctccaccggccaccgggcggcccgccccctcgccccggcccctccaccggccgccgcgcgcccgcgcagctccggcggcgcgcgcccccctcggcccggcagcgccaccaccgcgcctcggccccgccaccgtcctcggactgtagttcgagataagctagcaatttttttaggcacagcacagaagcagggttgcgccacctgtctgagtgctatatgttggtgcttaggcacacacacacaggtcgccttgggatgatgtaagcttttcgtgggcctcacaggctggaggcctttactatcccgcacccagcatctattgtgggccaccagactttctgaagctaccacttctaggtccctaatggaggccgttgcaatggcgcgtttatcgcacaggtctctacttccttt

SEQ ID NO: 63411 - DNA, 1175 bp, Zea mays
  Clone ID: MRT4577_157830C.1
gcgcccacgcgtccgataacttaagaccatcgacatttatttatccgagtgatgagcgtatatttggaagcacctgtgttttcgttgctttacatagctcaatgttacgtcttggaaggaagaggttacttcgtctggtcgtcagtttgaaccgcctggcatgcacatgatctatcttccatactccgatgatattagatatcctgaggaagttcatgtgacttctgatgatgcaccgcgtgcaacagatgaacaaatcaagaaagcttcgaatatattcaaacgtattgatctgataaatttctctgcatgccaatttgctagcccagctttgcaaagacactatgggatcttggaggccttagctttaggcgaagatgagatgcctgatataaaggatgagaccccgcctgacgaagaaggcttgtctaagccaggggtagccaatgctattgaggaattcaagacttcagtctatggtgaaaattatgaccaagaggaggcagaagcggcagcagggaaagcttcccgtggtaatgcttcaaaaaagcggaaggaggtcactgatgcagctgcttgactctatctgcgccgatcaataggtggttttcttttgtcctcgccgtttgtgtttgtctcaataacagcaggaccgtttcgagcgctcggctatttgctctgcaagcgctgtgatgcctgtatgtactctgaaatccggccaacgtttctgttcttttcgacatcatcagcccaagcacgtcctagaggcggtggcagcgttggtggcggctgctatgcgatgggggcaccacctccgttgatgtattgtctggtgcgggactgcgagtgacctctgaggcgggggcggagaataactggatctacctaacgtcggaatggagacctgcaggtccatttgaaattaaacagaaggttggtaagagtgtgatggtgctcattttgcgttttagaggatccatacttgcatgtagccaaagaaactattttagtaccttttttccttgtacttttttttttgtcttattgctttgcctggagctacttgaaatgctccacagttatgtcctctttttaactgagatgtcgttggcctgaacaaaggatgcttgacgcttcgaagtcacacgcaatgataaattcagtttgcagcaaaa

SEQ ID NO: 63412 - DNA, 1495 bp, Zea mays
  Clone ID: MRT4577_157831C.1
cttttgttgtgcatttatcagatagttgacttacccttatgctctgatgcagcgtatatttggaagcacctgtgttttcgttgctttacatagctcaatgttacgtcttggaaggttaggcactattattgtcacatcagcctttttcacaaatgtataaggaaaatatcctgaatcaggaaaactaaatactctggatgtggataaagctgtcctgaatcatcttagtgcattgtaaattgttattatgcttttatatgacatttttgcagtagctttgaatcatgcaatagcaatacacagagtaaaacatatcacatcaccaccctttgtctcgctcgaagtcaaggaactcttaggtgggcaaggtaaggtagccaaactttatgctagaccagtagagggcttgaggcaagagagccaaacatggcaaggtgatccataactaaataaacttacttaaacaatcatctatgtaaaatatagcatgtgtatggtttcaggtttgcacttgcattttatgggaatccaactcgaccacaactcatagcccttgttgctcaagaagaggttacttcgtctggtcgtcagtttgaaccgcctggcatgcacatgatctatcttccatactccgatgatattagatatcctgaagaagttcatgtgacttctgatgatgcaccgcgtgcaacagatgaacaaatcaagaaagcttcgaatatattcaaacgtattgatctgataaatttctctgcatgccaatttgctaacccagctttgcaaagacactatgggatcttggaggccttagctttaggcgaagatgagatgcctgatataaaggatgagaccctgcctgacgaagaaggcttgtctaagccaggggtagccaatgctattgaggaattcaagacttcagtctatggtgaaaattatgaccaagaggaggcagaagcggcagcagggaaagcttcccgtggtaatgcttcaaaaaagcggaaggaggtcactgatgcagctgcgcagataagtgctgcttatgactgggcagaacttgcagacaatggaaaactgaaggaaatgaccacggtggaattgagatcctacctgaccgcgcatgatctcccggtttctggtaagaaagaggtacttatcagcaggatcttgactcacctgggtaagtgaagccgggtatccgaactgttagtttcctgagacccgactgacatctgtagtgctgtctcgcggatccttgtggaccgtaatcctcccccgtgcaggctacgtgccgattttttgtatagcgacaggacagcaccagttgccaatgtaacctgtgttaagtttcgtcttgtggtatcatctgcttgtcattgtcaacatgaaacataatgtaattctggatacttagacccacaatatggagcataactgcataaggtatgttaaagcataggccctctttagcatggctacttgctgtttcagatttcac

SEQ ID NO: 63413 - DNA, 112 bp, Zea mays
  Clone ID: MRT4577_157832C.1
acacactcacgtcacaacactacaacagcttgcagtagcctacgcgaaggaactcctaactcctataattaagatggagaaaatgtgatgccctggcgtctggttgtctact

SEQ ID NO: 63414 - DNA, 556 bp, Zea mays
  unsure (1)..(556): unsure at all n locations
  Clone ID: MRT4577_157833C.1
caaaaaggggagtagtctttttttttttgtcgccattgtgacttcacctacctgtggataagtcaggattcctgctaggatgtacagtacgcgtgattctttttgtaccaggtagcaaggcatcaaagattagatgctaggtgagcttataggcttctggtttttattgatttgtttgttggttggatatttgtattcaggttttccttgccattttttctacttgtagccgttttttgggcttgtatactaggtggtaagggcagaagaccctgccctgtaagcatagttacacaaggtcttgctgtaggtatggaagctgtacatgtgttgtaacggattataaaagggggaaagtagtgcgtagtgatggctttgtggttggtgtgttgcttacctttgatcaatgatcatgtattggttcgtcatatattgtttattgtactgaaccccattccattgtagataacaaccacgctcaagacttgttttgggatgtcaaatgagtaatctgttccggtaaagacaaaaaaaaacatcaccccaacacgccnnn

SEQ ID NO: 63415 - DNA, 496 bp, Zea mays
  Clone ID: MRT4577_157834C.1
attcggctcgagcctgggtcctcccctcctttgcgccgcaaaaaactccggcgggaggatgtgtgagctagagagagagagtgcgagcgagcgagggcggggcttatcatttacctgctaggcctgtccctcttcgaggccggagagcttgcacgctgctcgcttgctgctgcaggtaaaccgactgtcctcccccatgatgactcgcgtcctgttcaggacacctgccccatcgcaacatgtccctccacgaacccgaagcccgccatcatcaccgtgccttacacgaatcccaccatcaccatcccttccttgaaccctctgcccacacccatgacagtctcgtcaccaaacatcccttctgcttccaccatgctgccgccggatccggtcatatattcgctgccaacgccgtcaacatactgcccaccagctgagccggtcaccaatcctgctggaaccacgccttccacgtacacttcgtggacaccaacac

SEQ ID NO: 63416 - DNA, 1028 bp, Zea mays
  Clone ID: MRT4577_157835C.1
gatcatcttcaagtcccccacatcgctgggttgaggagcagcgggcggtggatccatgttggctggggcgccattggaggcgggtgccatctctgtcccggacatctccgataccagataggtgcatggatttgtgcaagataatagaacagggcaaaaagtagctatgttaattggaaaatgggatgaagctatgtattatgtgcttggggatccaagtgttaaacccaagggatatgacccaatgtcagaagcagttcttttatgggagagggacaagtctcttaatcagacacgttacaacctttctccttttgcaatttctctaaatgaattgacaccacatttgttgaacaagttggctcctactgattctcgtttgagaccagaccaaaggcatctggaaaatggtgaatatgagatggcaaattcagagaaacttaggcttgaacaactgcaacggcaggcacgacaactgcaagaaaaaggatggagaccaaggtggtttaagaaggatgatggcgacagttaccgctatatgggtggatactgggaagcgagggagacggggaactgggacggtattccggacatctttcgccagaatagtttgtctccaggactgcactaactacccttcttccctatgttatacttgtgtatctccaccaaacatttaacgaagttatggtggcaacaaggcagagccaaagcatagcgtttcttcgtgggcatggtcaacctcgtgtcggctggggttggacaagtggttggaaacgtaggtttcatttttgaatttcaggactaattttgtcttggaatgcggttagtttagatttgttttttatgccttggcggctaatccacggatggtaggctttgccgcgcgctctagtgtcttgggccatgtatggagtattatctatggacatcgggtgatttcaatcgtcgtcacaatacttcttgactgttacaatcgaatttacacaacataagatgtgatatctggctcaatttggattgaatct

SEQ ID NO: 63417 - DNA, 377 bp, Zea mays
  Clone ID: MRT4577_157836C.1
acctttagagtggccgccctcttctaacatttttttttttttttcaacaagaaaacctgaaattgggtcggggaactttttaacacacactttatatataaggtatcgcgatattatatgtatccgctgcatcgtacgcactttttatcaccatctatgcctatatcaattctctgcttaaggcatgcactgggaaattaaatacggctgttaatgcgcctctcagctggtggagccctgcatcctggacgcaaacctgtccgcggcccaccggggtggtgcctccgaacacccaaacaagctcggcgaaggtctgcatcgccacctgccacgcctgctcttcggggacgaggtacacgacggcggggcccgcggcc

SEQ ID NO: 63418 - DNA, 658 bp, Zea mays
  Clone ID: MRT4577_157837C.1
aacccttcgctgcgccgccgcctccgaatcgtctcttcgtccccacgagcaaccgatattccgccggagctgacatgttggttcatcaagacctcctatctgacgactagctcctcgccggattgcttcacctaccacgatctcgagaacggcgtcctgcgccatggccagggaaagtggctcacccaaggacctgttgatgtacacattggagccaatccatccgccgagggcggtgaggatgatagaggtgatgacacagccgggtaagtgattgatatctgatgacacagttccgctctacagtgagcgaatcctccttttgacaagaaatcatttgtttcttacataacaagatacatcaagaatctcactgctgtgttggagccacagaaagcgtatgagatcaaaaaggctgtctagggtgcaaccaagtttctccttaacaagctgaaggaccttccattttttgttggcgagagcatgaaggacgaagcgtccgcggaattcgcctattacaaggatggagccactaatccgacattcctctatttctctcatgtgcttaaggagatcaagagctagattagttacacatgacgcctactatatatgctctatagacatagccacaactatagctgccctgcctgaactg

SEQ ID NO: 63419 - DNA, 630 bp, Zea mays
  Clone ID: MRT4577_157838C.1
tagatgcgctggagacaataaagacaagctctactccaaggaaaactgttgaagctccaaagacgcagtctgagacaagagtaaccgaagctgaagctgcgaagagttaggttgagaccgaagctaggccttcagagcctgcaaaggagaaactcttggaaaccggggagaagaaaatagaaaaagatgctgcagaacagattctgcctgaaaaaactgccactcctactcccgaggcgtcctctgaagttcttgattatatcatacgacacgcttcgggaaaaagattaactgaagaagtgatttttgaagctaaacactatgcccgagaactgaaatatccaaagggtgccttagtgttcaatgggacagaggaagatgatttcttatactgcctcccagacaacaaagaattatctgtctgccgggagatggcgagaagtatagggtttccgaagcttgaagctggcctttgtgccatgacaaaggacgatcttgcagatagtctcgcatataacagtctgaaggtacaaaaatttgcacattttggaagtttttgaactttgaattatttttctgctcttatactaattcttttcatatagggtttaatactgagcacgccttaag

SEQ ID NO: 63420 - DNA, 493 bp, Zea mays
  Clone ID: MRT4577_157839C.1
acaacatgtacactaaaacgtcttcttttttaccccggctgcaatacacaatgcttgattcttggcgctcaaaaacacccgtctcatcaaattatccaaaccctaggaacaggggggtgacacattctttttttgcagaaactcgcagacttgaagcccagcttgggcttcttctactgggaaactagagagaatccagtactcagaagcctcccgacgtcccatccctacaagctaaaggcccggaagtttttgatcttcccgctgcaaaaaccctgtgagtgacagagtgagaccccgcctgggactgccattgtcggcgtctacaaggctctaagccatgccggcggtgtcgggggccaacgaccagcagtacctggtagtggcggcggccatccctacaagctaaaggccccgcagcttttcatcttcccgctgcaaaaaccatgtgagtgacacagtgagaccccgcctgcgactgccattgtcggcg

SEQ ID NO: 63421 - DNA, 448 bp, Zea mays
  Clone ID: MRT4577_15783C.1
gggcttaagcccggcggccaaggttaaacctcaattcaaaaggcttttttttttttgcctccccccgcgcatcaaagggatacacgaatcatcctccccaccaaaggggcttgaacaacctagaaaaaaaaaaaaaaggaattatccaagcgaggccaaaattagggggagggggggtaaaatagtgattggaccatctgccccgccaacaaccgggctaaggctaggaggccaaaactaccacccccaattttctgtgaaattctggcccaaaggccaagctcgcatggcaactcatgcaggcccaaacgcagaatcccctgggggattgctgcaaggagagatcttacggagcatatccggcatgcacagtgcggtacccgaaccgccccccccgcaaggaatgggcggccatgcaaccagccccctcccggaaaaacgtcccaag

SEQ ID NO: 63422 - DNA, 364 bp, Zea mays
  Clone ID: MRT4577_157840C.1
gattttaaagaccctctccgaggcaagaggagagatttttattgctttaactggtagtgacattcttgcaagagcgaagaatggaactggcaagacagccaaatcctggatcaactgcactggggccgatcgatcaagaaaaaaatgctcttcaagttgttttattggctcccacaaggttatcggctctacaaacataacaagtccgtacggagcttggtaaacatttgttgatccaagttaaagtcaccactggtgggaccagcttgaaagatgatattggtcatctgaaacaacccgtgcactcaatagacggaacacctgaacgtattttggatctttcaaagaacggtgtacgcatttt

SEQ ID NO: 63423 - DNA, 313 bp, Zea mays
  Clone ID: MRT4577_157841C.1
atacattcattctttatcaacctcacatcctcctctttctctcaatgctactcaccttttttctcctactacatcacttagcacccacccccccactacttcaaccacaccacaacctccatctcccccaccccctccaaataatactcacttttattccctcaaatactactatctcattttcaccaacctctattatcttcattaccctgttcttaaattctccattaatacatcttacttttataaaaccaattattttctgatcaaagcatcatacttattcttaatgaaattacaaactcacttcttc

SEQ ID NO: 63424 - DNA, 418 bp, Zea mays
  unsure (1)..(418): unsure at all n locations
  Clone ID: MRT4577_157842C.1
tgggtcctctggtacggccgcccttgggtgtgtttttttttggatacaaccggttggaatgggccgcggcagacatggcgtgtgtgggttgataggcgggctctggtggcagagcggacaccaagcgagacgcgatgccaactctttatttcatgcaggcntaggagttctagggcacaggggggcccgacagacttccgggctccggcgacggacggtttttcagggcttgctgccgtgcacggggtcgacggggacggagccggcggcgggggacccgggcgtgccgccgaagccgctgaaggccggggagccgccgttgtagaggggcatgctgccgatgctggcggtgctgccgggcaagaacgacccgtcggggaggctgctgccggtgtccggcatgctgaacgctggaatg

SEQ ID NO: 63425 - DNA, 642 bp, Zea mays
  Clone ID: MRT4577_157843C.1
ccgggctttgcacgataaattgccagctatgtctgaaccttctcttcttctgacagaaatgatgcgagctgttctttatacatctcttcctgtacttgttcaaggaaggaactggatgctggtatatagcacctggaggcatggaatatctttgtctactctgtatcgaagaagcaggctttgtgctggctactcacttttgatagttggggatcgaagaggggcagtttttggtggcttggtcgaggccccactgcagcctatcgtaaaaaggaagtatcagggaactaatgactgctttgtgttcaccaacgtagatggttgtcctgttatatgccatccaacagtatgactggttctagctccacctccgagacttttaacaatccatgcttatcccatacccaggaattcaaaatcaaagatgtcgagctgtggggtttcgtcaatgcttccaagtatgaagagatgctcatgatctgccgcaccgaaaagcaaggaatttggaacctgtgaccgtttggagttcactgagctgttgattgttggtgtcaaccggtcctctggtgtggttactgttgtacagttttgtagtaaacgtttgtatagcattagcatgtagagagtttccatatggaatcg

SEQ ID NO: 63426 - DNA, 481 bp, Zea mays
  unsure (1)..(481): unsure at all n locations
  Clone ID: MRT4577_157844C.1
tatattacctncaacnttanaccattttttggggcgcattgaaaagcgactgcggagaactacattaccgctgttcccgttccatcgttacacacacatagcagggatgtacaaggaaaacacacactttttttttttagactgggaaaacaagtggggggcttacaataaggggctttgctttgaatcaacaaaaaaaaccttgcacactttctttttttttttcaccatattggtggtctattggcttccagctgaattaaccgagagggggctctggactaccgattccatggggggcctctttttccttttttcctccaagcacgagacggccagcctgagcatccccttcacctgcgagcaggcgaacttaccagccagcctgaagtccacgaactccgctacccagaacgggttattcttggccagcctgtacgagaccattctgacgaacttttttagcaccgcatgcgcatgc

SEQ ID NO: 63427 - DNA, 1613 bp, Zea mays
  Clone ID: MRT4577_157845C.1
ttatatttttttccaggttaaaaacttccatctgcaacgtaggcagggcattcttagtttctatgaaatatatacatttgagtgttagtgactggtattttctctgtaaatggcatttggtattctacaaagcaaaactctacatgttctcaacttctgattccatatggaaactctctacatgctatacaaacgtttactacaaaactgtacaacagtacaagccacatcagaggatcggttgacaccaacaagcaacagctcagtgaactccaaacggtcacaggttccaaattccttgcttttcggtgcggcagatcatgagcatctcttcaaacttggaagcattgacgaaaccccacagctcgacatctttgattttgaattcctgggtatgggataagcatgggttgttaaaagtctcggaggtggagctagaaccagtcataaggtctccatcgagataaagtgcgaagtgaccaccacctcccattgccatataatcggtagagcaaaatgtaaaatagttattagcacctgttggatggcatataacaggacaaccatctacgttggtgaacacaaagcagtcattagttccctgatacttcctttttacgataggttgcagtggggcctcgaccaagccaccaaaaactgcccctcttcgatccccaactatcaaaagtgagtagccagcacaaagcctgcttcttcgatacagagtagacaaagatattccatgcctccaggtgctatataccagcatccagttccttccttgaacaagtacaggaagagatgtataaagaacagctcgcatcatttctgtcagaagaagagaaggttcagacatagctggcaatttatcgtgcaaagttgattcttttgaacccttcacttcaaatctaggtgcaactgattcggtttggcctatgatttcaccatcaatgctgtgggtctgtttctgtctcaaattaccaagtcctgctttgctaataatcctaccaagggaatgcttccctctactaaacaggcctttcctcccactgcacgccttcccaacaggtgttaaagttgggtattccacatctagattatgctcaggtatggtctccattgaattcttgctggcagttgaggaaggcacaaaggacatcagaaatgctctgaatgaagatgtgtcaggaccatcagaattttggtcagaatcatcgtcaacgaatagtgtgtcttctccttcagtggcctccgggaggtgggtggggtggtgtggctggcgctcgcgctcggagacggggttcaggatgacagtggcgaggtcgttcaccaggtgggccgccttcccgcccagcgccggcagataccccatcccggcttgagaccgcgccgccctcgcgctggtgaaaagaggttgagatcaggaagcaggcaaggagtccgatcacatgccctagctccacctcctgctgctgccggtgtcgagagtcgagagcgtaccagtgcggtggttggttgggtaaagggacggtggagagagaagtggaagcgcagagttcgctgcgcccgtctgattcgatatagaaactctacatgctatacaaacgtttact

SEQ ID NO: 63428 - DNA, 637 bp, Zea mays
  unsure (1)..(637): unsure at all n locations
  Clone ID: MRT4577_157846C.1
cattgggtacctcgaggccggccggngagtcccatactgcccgtcctgttgccttgccgagccggggtgcaggccctacagggtccgggttccggcatccgtcaggagacctcatgagatgttgtagtgctccctcagcgcccaggagaccctccagggataccaccgagcaaccaagcagcaaggtacccgggagtcactcataatcttggctgccaagccgtctatcagagcacccgtgagcagcgacaacggcccacgagaaggcccgtgcgcgtgcgggcggcctgggtcgaacaactccgtaccggcggccgctgcttcctactcttcaccgcttctgcccgcgtgcgcgcttactcagtagctctgtgttaactgcgcgcccgccgacctacgagcgatgacgagaccttctgcgatcttctcggcggtgacgagaaccctccgcttcgatcctttcacccgcagaatggagaaacgatcaatgggtgctactctcagcaggaccgtggtgttatctgcgagctcctcatcttcctcctcatcggatctgcggctcagacatctatctgactgaagaggcctgcttgctataggaggtatatgatcacgaatatgaggaagtaatagtgga

SEQ ID NO: 63429 - DNA, 245 bp, Zea mays
  unsure (1)..(245): unsure at all n locations
  Clone ID: MRT4577_157847C.1
ggggggggggggnggggggggaggnggtgggggagggggaggggggggtggaccgttgcgacctcgagccggacgggaatacatacctaagagatagggagngnacagattaccctctcttcgtcacctcactagctaagaccagctagcaggtcgatcgctctgtcctgaaataatggacgctcactcctcctcccagcaggtgagcagagacggcgagcctggcagacctcgctgccgctgct

SEQ ID NO: 63430 - DNA, 1402 bp, Zea mays
  Clone ID: MRT4577_157848C.1
tcagaagccaaggctttaggaatcaagatgggggtgccgctgttcaaaattcgagatttggttgagcgacataatattcaggttttttcttccaattactgtttgtacggcgacttatcccacaggataatgaccagcctgcaattatttagccctgtcgtggaaatttattccattgatgaagcgtttctggaactgactccaaatcaaagtaatacaaattatggggaagaaattcggcgttgccttaaacaatgggtaggcattcccgtttctattggcattgcccccactaaggtactcgctaaagtggcaactgatgtggcaaaacaatccggggctggaacattttgtttagacaaagcagaagcggctgatactattttggcaacgatgccgatcgccgatatttggggcattggacgacggttagagaagtggtttaccactaggggcgtctcaacagccttgcaattcaaacaagccaatcctgaacttatccgcaaaaaaatgggggtcgtggggcaacggctattactagaactccagggtatttcctgtttacccctagaactaattcctaacccaaagcaagaaacctgcgtttcccgttcctttgctcaagcggtaacgacattggatgaattacaaacggcgatcgccttttttgtcagtcgggcggcggagaaactgcggcgacaacagcaaaccccagcagtgatgattatttttgcccgcaccagcttcttcattgagcaaccaatttccatctcccagacgattgccctgccgactccaacccattacaccccagaattacttaaattggctcaaaccagcctcaaacaaatctttcgaccccatcatccctacaaaaaagctggcgtgataatgaccgggttacagtcggaacgcattgtgcaaggcgatcgccaccgctgtgatgttatttggcctcaattctggagctgctttggccaccgtagtgggggtattaattgaagtgccagtgatgttaatgctggtggaaatttgcaaaaaaacagccttttggttccccagggacccggaaaaagccactttgctagacccccgttgtataaatcaagaaattaggatctaaaaacgtgtttggaaagttttattctgccccctcaatcgaccaactaaagcgaccgcaatactggggaactttcactcagtttccccccaaatttggggggccaggggggcttttaaaacaagctctaaccaactttgcctaattgccagcaatgaccgactttaaccatcctccccggattttatttctctatggttccctacgggagcgttcctacagccgtttactggccgaagaagcgggccgcatcatcaccaccatgggagcggaaaccaaatt

SEQ ID NO: 63431 - DNA, 294 bp, Zea mays
  Clone ID: MRT4577_157849C.1
tttcccctttttccccgcccgccctggcatcgggggcgtgccctgaaacctcgcaccggggggcttaacaaaccgtccgggttagttccacccaaaatgggggggctgggatcctttacggccttcaagcggcattaccctatcacacaaaatgtgggcccacctttgacaaggcacctgacaaaacacctcaacctgttccaggtccaaaaacctctgacccagtggcggatacaccctttttttatccctaaactggtccagctacatacggaaaatgtttgcaccccctat

SEQ ID NO: 63432 - DNA, 483 bp, Zea mays
  Clone ID: MRT4577_15784C.1
aataacagagggagtgagcaacctccccccctcgcgccgcctccctggcaactcaggggaaaccctagtcgcgccgccgcccgcaccctagatccatatccttgagcttcgccgccaccggagggacgccgacgaagtccgtgcgtggccaaggagggcggtggcggggcgttcttcgtctggcgaggctagtccttcagtcggcggggcgcgtgcttgacggatctggcctccggcgccgtcctctccccggctactaccgttgctcaacggatctggtttgggggccgcggcggaggcatcccgcggttgcgtgcgtggcgcgctggccgtgcgtagtcgtgcgtgggcgccctcttcttcggcgcatccacacgggccagccatggccatgcgcggtgcgtctaccgtggctaggttcttcgtcgttggtgatgcaggtggccccgttctggatccacacggggttgctgccgttttgct

SEQ ID NO: 63433 - DNA, 326 bp, Zea mays
  Clone ID: MRT4577_157850C.1
aaaaaaaaaaaaaaacaaaataaatataaatattaaaaaaaaaaataaaaaataaacaaaagggataaatataaacataaaaaaaacaaaatacaaataaaaaaaaaaataaaaatctaaatacaggcaaaacgggcttgccgttttatgggccccaaccttcccttcccttcttttggatctcatatctcttctctggggtcccctacatttacttcgtttgcccctgttttacaccgcgttgcctggtaaatccctgcttttactcagtttatcccctttccagattttcctcttttggccatttggcaatttctctatatggc

SEQ ID NO: 63434 - DNA, 777 bp, Zea mays
  unsure (1)..(777): unsure at all n locations
  Clone ID: MRT4577_157851C.1
cattgggtacctcgaggccggccgggagagaagagggactgtggtgtgccatggaggagctctccacaaggctctggcaccaagcttgctttcgctgtgcctggatgcggtagctgatcgtctcatcagcgacaacgccgccgcaggcggcggcgtgggccgaacgggttcgtcaggagggtgcagcggcggcggcggtctcgccggattctcggaagatgatggaggggaggcagacgaggaccgcctgcatccacaggagttggcggaggggcttccctgggagcttctccatcggctggcgtcccggctcccgcctgtcgtacttgagtcactccatcacgctgcacatgcccgatactgttctgctgaaactacttctggacttggagtgcaagatggagaaagacgtggggtgaaacgttcaaggtgtgaagatttcaacagcacttgggcagttgttgttcaaacttcgctggcccctgggtggtaatactggacataataatttggtcactgtggattggcagcaaaagtattgggaaaagcatttacaagagtgtttaaatgaagctgcagaacatgcttttcttccttttttttgtggnaagtattggtgagctgagtatatcagctanaatcatgaattccatctaccagagcatgggcacatctcaacaacattcaagattagcatatcaatgcagncaaatttggttgctatgtgaggagctgagaactgcagggtgttctttgcactgcagaaacttatgtctt

SEQ ID NO: 63435 - DNA, 222 bp, Zea mays
  Clone ID: MRT4577_157852C.1
tctgaattcaccactgcggcgtctagggatccactgacaactgcgtatatggcatagctgtctgggaatgtatccgtacattccccacatacaccgaactaaggtaagcctgggtgccaagaggagctactccattatgcgtggctactgcccgttcagtcggaacctgcggccactgattaatgaatgccaccccggagaggcggtgcgatggggcgcttt

SEQ ID NO: 63436 - DNA, 344 bp, Zea mays
  unsure (1)..(344): unsure at all n locations
  Clone ID: MRT4577_157853C.1
gcctccggagaacaccattttgggttttaggcgactacgagaagaatgtcagggggacctgccggaccattgttttaggacaacaatggcgncttgcaactgaccactggaaggtgcttgtgaacaatgagcaacagtccgctgatattgttcatggggtgcacggtcacttcaacaatcgccctgaggagaatggatctggtgaccaagggcacatgactgggtatccgactgaggagacccctgagctagggcccctgagccatgaccttgtcagcaagcttggagctaggctcacggaggtttggaagaatggaacctgcccctgggtcacgcccgaaggg

SEQ ID NO: 63437 - DNA, 295 bp, Zea mays
  Clone ID: MRT4577_157854C.1
gtacgtattgcacgctcgctcgcgcgtacgtgtacgtacgtacgtacgtgcgcgaataagctagctagccctaggatcggaaacatatgtatgcatatccattgcatggccggatgtacatcaggagctgctgctggtgtatgtccgccgccgccgtccaaactccaaagtgagctgagatcgatcgatcgagctcgctcgctccaggtgtgcagtacgtacgtacgtaagcgcctgtgtatgtgtaagcagacagcgtggtagtagctctagctagtagaacatacttacacac

SEQ ID NO: 63438 - DNA, 273 bp, Zea mays
  unsure (1)..(273): unsure at all n locations
  Clone ID: MRT4577_157855C.1
caccacancacacccaggcgccgcacaggtacatcgccggcggcgatgacgacgcgcttcaagaagaaccgcaagaagcgcggcaacgtgtccgccgggcacagccgcatcggcaagcaccggaagcatcccggaagtcgcggtaacaccggtagcatgcaccaccaccgcatcctcttcgacaagtactctcacggctacatcggtaaggtcggcatgcgctacatccacaagctccgctacatattctagagncccgcggtcaacatcgag

SEQ ID NO: 63439 - DNA, 270 bp, Zea mays
  unsure (1)..(270): unsure at all n locations
  Clone ID: MRT4577_157856C.1
cggacctggtcgcacgaatgaggaacgaacggncaggttgttncncagaancgacatggctttctcgcccaaaacgtcctcctcatcntcgctctcctcggcgttgcaggcagctcngtcgccgccgctgctcctgangcggatgtcgtcnaccgcaacaccgagacggaggtacgangcggccgtcgtcgtcantannaccaccactgctngagctgctgcngctgctgtcacngttcccgcngncnnnccnnagccnggcgnnggcgg

SEQ ID NO: 63440 - DNA, 539 bp, Zea mays
  Clone ID: MRT4577_157857C.1
aatcagccgtacaggtacagccacctagcctagtcaacacagccgcgacggaggacggactaacgctcatcggcggttgcggcggcggtgctctgctgcagtcgaccacacgctcatcggcggtcgcggcggcggtgctcggctgcagtgctgctgctgcctcgctagtcagcgtcgccaccacgcgcatggtcctgctgtcagccagtgaccgcggagattcgaactgagatccgaaccagtgaccgcggactgtcagccagctgcccagtgcccaccgtcccgggctcccaacgtctcggcttcatgcggccctgcagccggcagaacctccctgatggtgccatcgcctcgcctaaagattagcgcatgagctcctgagctcctccatcctcttatttttttgtggtgtagttagtgcttatgatttatatagttgtgtgtaatattttaaatgaaattggcactatatccatgtgttctgttgaacttgtgtgatttgtttgtgcttttgtattgaactatgcatgttgtgtggc

SEQ ID NO: 63441 - DNA, 359 bp, Zea mays
  Clone ID: MRT4577_157858C.1
tggccttcatcctacttaaatctaaaacgatcgggcttactgcatcgcaaggggttctgctcactacgttctccgctccgtctagataaaccaatggttgcctttgtgcgttatgatggtaaacattccacccacttgataatccccctggatggcctgcacgccattcttgctatacatgtaaagctcctgctcttcgaacgcttgacgaggttccacaatgcccacttcgacaacgcccgtctatgtctcacttctgcccatgctaaagtcccgcacacccaagtgccagactaaactctatcaaacgccatggatatgggctatgaagcacggtctgcaaaaagggccccgaagat

SEQ ID NO: 63442 - DNA, 1192 bp, Zea mays
  Clone ID: MRT4577_157859C.1
gcggcgtcccggtctcaccgcgaccgggcggtgagaggtagaacggccaccagacatcaaccgtgaaggggtggcgtcaaggcagcgctgaagcggcggcgacgtcgaggctcgagctcccgtgccgcgctccgagctaacctagatgaacatactcgaaaggatacgtggaggtggcgacagggcggctgccacggagcgccccccgcggccggagtgctgggtggagatttcggagtccgtctcacggctctgcagcttcgacgccgccggcagcggtagccgcagcatctctgtaaaagttattcaggattctagacctatacatgacaaacttgttgattctttcttgaacaaaatttttccatcaggttatccatacagtgtgaatgaaggttacttaacttataccaaattccgtgtgctacagcatttctcgagtgctatgctacatgtgctatcaacacaggtttgcgacctaccccggcgcaagcaactgctgtaagttgggtaagcatatgatgtcagagatgctaaagtccaagcagcacgcaggaaagctcatttgtagcagcatgggtgcaagaatggattctgaaccaaagagttggaggatacttgctgatgttctctacgatctcggtactgcattggaagttgtttcgccgctgtgcccacaacttttccttgaagtagcaggcttgggaaattttgcgaagggaatggccgttgttgcagcaagagcaacgaggcttccaatttactcttctttcgccaaagaaggcaatcttagtgatttatttgctaaaggggaagccatatcaacacttttcaatgtcatgggaattggagctggaattggattggcatctactgtttgttcaacaactcaagggaagttaattgcaggcccgttactttccgcagtgcatatatggggtcatccaagagatgagagcaactcctgtaaacacactcaacccacaaagaacagcaatgatcgtggctgattttatcaagctgaaaggagcttctcaaagcttaagttattgaagaattatttaagatctacaatgtctcaagaaaggttaaacgagctagcaactttatgtattgagaagaaattattagatgatgtcaatattgaagccatctgatgattttgcatctagaaatgttagacgacattttt

SEQ ID NO: 63443 - DNA, 268 bp, Zea mays
  Clone ID: MRT4577_15785C.1
gagcttattatgtcggcggccgccctgtttttttgggtgggttttttttaatgtgtggggggttttttttctcttttcaggggggaaacccgcgctgagcgggcattaatatacacggattttctcatgtaccgagaaaatccaaatcacggggccaccgccggaaaacagggggttgggcagttttcagagtaacaagagcatctcacattaaccacactaaaagctcaaaccgatgggaaaaacttattcagattgaatgggaggg

SEQ ID NO: 63444 - DNA, 624 bp, Zea mays
  unsure (1)..(624): unsure at all n locations
  Clone ID: MRT4577_157860C.1
cattgggtacctcgaggccggccggngaccaccctaaaatagtgagaagaaaaaaaaaaaaaaaaaaaaaaaaaaaaaaaaaaaaaaaaaaaaaaaaaaaaaaaaaaaaaaaaaaaaaaaaaaaaccaccaccgggtcccttttcgcctcttgcccgttgcccctcggtttcgtcgccgttacccggggatctccgcaacagcaacccggggccgccgccgaaaatctcgccaaaaaaacaggtatcggggccgccgccaaatcaactggacctgaaaaacgagggcctgcgctacctggggttggggagttcccgaggggttgttctgccagaattcggcatcctttgttgcccacatggccacttccacatctcagaatgcgttttcatccatcaaattgctgtccacaggttgtttgcatcccgataaaaaaaattgccgcgggttttctgtttcagaagggcgtcgctgccccagggcccgaaatttgggtctactttgggcttcaaactctcaatcttcagggattgagccggtccagttaccgaggagccctaaaagtggcgtacttccaaagaaatcaggtgaaagtgcactcattctgatacggcatggaaaatcg

SEQ ID NO: 63445 - DNA, 1267 bp, Zea mays
  Clone ID: MRT4577_157861C.1
ctcccgtgccgcgctccgagctaacctagatgaacatactcgaaaggatacgtggaggtggcgacagggcggctgccacggagcgccccccgcggccggagtgctgggtggagatttcggagtccgtctcacggctctgcagcttcgacgccgccggcagcggtagccgcagcatctctgtaaaagttattcaggattctagacctatacatgacaaacttgttgattctttcttgaacaaatttttcccatcaggttatccatacagtgtgaatgaaggttacttaatttataccaaattccgtgtgctacagcatttctcgagtgctatgctacatgtgctatcaacacagtccttgctgtttgctgcaggtttgcgacctaccccggcgcaagcaactgctgtaagttgggtaagcatatgatgacagagatgctaaagtccaagcagcacgcaggaaagctcatttgtagcagcatgggtgcaagaatggattctgaaccaaagagttggaggatacttgctgatgttctctacgatcttggtactgcattggaagttgtttcgccgctgtgcacacaacttttccttgaagtagcaggcttgggaaattttgcgaagggaatggccgttgttgcagcaagagcaacgaggcttccaatttactcttctttcgccaaagaaggcaatcttagtgatttatttgctaaaggggaagccatatcaacacttttcaatgtcatgggaattggagctggaattggattggcatctactgtttgttcaacaactcaagggaagttaattgcaggcccgttactttccgcagtgcatatatatggggtcatccaagagatgagagcaactcctgtaaacacactcaacccacaaagaacagcaatgatcgtggctgattttatcaaggtttggtatctctgatctattaacgcaacctttttatccagtccagctacggcagtaacacttgtctattatttataccaataaatgtggcatcagctgaaaggagcttctcaaagcttaagttattgaagaattatttaaggtctacaatgtctcaagaaaggttaaacgggctagcaattttatgtattgagaagaaattattagatgatgtcaatattgaagccatctgatgattttgcatctagaaatgttagacgacatttttaagttgatctctacaatatatttgaggtaataatcttacttctattttataaaaaaaaaaaaaaaaaagcggcc

SEQ ID NO: 63446 - DNA, 1958 bp, Zea mays
  Clone ID: MRT4577_157862C.1
ttttttttttttttttgacccattgggtacctcgaggccggccgggccttcgacccttccgccgagctcggcctcgggcggcgtcccggtctcaccgcgaccgggcggtgagaggtagaacggccaccagacatcaaccgtgaaggggtggcgtcaaggcagcgctgaagcggcggcgacgtcgaggctcgagctcccgtgccgcgctccgagctaacctagatgaacatactcgaaaggatacgtggaggtggcgacagggcggctgccacggagcgccccccgcggccggagtgctgggtggagatttcggagtccgtctcacggctctgcagcttcgacgccgccggcagcggtagccgcagcatctctgtaaaagttattcaggattctagacctatacatgacaaacttgttgattctttcttgaacaaatttttcccatcaggttatccatacagtgtgaatgaaggttacttaacttataccaaattccgtgtgctacagcatttctcgagtgctatgctacatgtgctatcaacacagtccttgctgtttgctgcaggtttgcgacctaccccggcgcaagcaactgctgtaagttggattctaaaagatggaatgcagcacgcaggaaagctcatttgtagcagcatgggtgcaagaatggattctgaaccaaagagttggaggatacttgctgatgttctctacgatcttggtactgcattggaagttgtttcgccgctgtgtccacaacttttccttgaagtagcaggcttgggaaattttgcgaagggaatggccgttgttgcagcaagagcaacgaggcttccaatttactcttctttcgccaaagaaggcaatcttagtgatttatttgctaaaggggaagccatatcaacacttttcaatgtcatgggaattggagctggaattggattggcatctactgtttgttcaacaactcaaggcaagttaattgcaggcccgttactttccgcagtgcatatatatggggtcatccaagagatgagagcaactcctgtaaacacactcaacccacaaagaacagcaatgatcgtggctgattttatcaagagtggaaaggtttctagccccgccgagctaaggtacaaggaagacctcctgtttcccaaccgagttatagaagaagccggcagtgtgaaaatcggtcagccacttcgcaaagtgttcagtccccggcttgttgagcagctgagggcgactttcccaggcgagaaatttctgctcagccagaaaagcaacaggacgtacatggttctggagcgaagcgcgagcggagaggacgcgctgagggggtggctggtcgccgcgttcgcttcggagatggagaggtcaggcgccggctcacgcgatgacgcggttctgagcgaggcctacgagaagatggagcgggtcttccccaccttcgtgtcagaagttaggagtagggggtggtacaccgatcagtttttggacgggaactgtagtcgagtctcgtttgccaagtttcggtagtcgcagagactgtatatggtctatgttttttggaggggagatgcggaaccatgaactcatgcatgcagggcagtgtagtcgaactcttaggctatccgcactcatactactttaaatttgtactctaaaaggaatattctatcctcgtcagcaagattatctactctataccacaatcctcggccgtctggtatctctgatctattaacgcaacctttttatccagtccagctacgacagtaacatttgtctattatttactataccaataaacgtggcatcagctgaaaggagcttctcaaagcttaagttattgaagaattatttaagatctacaatgtctcaagaaaggttaaacgagctagcaactttatgtattgagaagaaattattagatgatgtcaatattgaagcca

SEQ ID NO: 63447 - DNA, 249 bp, Zea mays
  Clone ID: MRT4577_157863C.1
tggggggttgatttagcaagatcgacgagacatcagaaaacggcaagttacaatacatgatatgacgaagtttacagcaagcagacgcatgagtactggaaacatatggatcccagagatctcttcagggacagtcagtcaaaactgatacgagaatgtaaataaatccagggatggccgaatattctatttgcggaacttgtatgttgctttgctattaaaagcttttgacattttgcgcgcgaaatt

SEQ ID NO: 63448 - DNA, 452 bp, Zea mays
  Clone ID: MRT4577_157864C.1
ggaaaccaaaacggaaaatccctttgggttttgggaaaaccgggccggggagggaaggacccaagaaagacccccaaccccgaaaagggggaaacccaaacttggggaaaaagaaaaaggggcccaaaatggcttaaaaggggagaaggggcccggggaaattggaaaaaaaaaacacccctggggggattccccccccccagggggggaaaaggggaaaaccttccaaaaggggcatcttcccagggggggggggcatccaggagcggcccttaaccctggggggggcctaaatatttttactgggaaaaaacacctttttgggaaaattaaggcttccttgggaaaaaattttttggtttttgaaaaacccaaaaaatgggcccttccttccagttactttaaccaaattaaaaggggggatccccaacaaacttcccattaaatttttt

SEQ ID NO: 63449 - DNA, 502 bp, Zea mays
  Clone ID: MRT4577_157865C.1
caatgctcgtcactgctaatccaagtaagaatcttttcctcttcttccattggttccagctgaatcatcctggtgtgtttctgagcgatcttatggcaattgatcgcttcattacaggctctgggagctgtgtctttgcatcatcattgccatcgtcgtcaaggtgggaatctgatacctgcattgtgataactaacacggaacctttgtgtctcttgcaattgtgaatgtattcatatgtgaaactcatgttctgtatttgcagctctactgttggatatgatcccgcgtccacggctactccatcgtcaccgtcgtctggttccgactcgggagcacccgtgctgaatgccagtggggcaggttcttctgaatcatcagattttggctttgacatcccaggagctgtcaatttgggcagcggttggaggtcagtctcaccacccaactggccctgggcagccctggtctggattctagtagcattgtgtgtgcacaaaga

SEQ ID NO: 63450 - DNA, 662 bp, Zea mays
  Clone ID: MRT4577_157866C.1
aattcggcacgaggggcacgcaggctagcagcacagcagcagccagagccatcccctctcctcgctacgcttcgcttcctcggcgccgattcctcctcctcctcctccaccctcgtccgtccccttccggcgcacgagctcgcccgagatggtaaggcccccgctcccatccgcttcccctccctccccctccgcgcactctggttcctccccggatcggcgagcgcgtgctgattccgggccttctgttctcgcggagcggtagcgtagcgcttcggatctagttggattcagggggtgaggaggatcgccgctgctcggcttgctcgtgggctgattcgtggtttcgtcgggagggagttctgatcgggatcatggggttgttcatggttccgtgacgcttgggagccagaaacttgcgtgggattccgcgatctgtggcttggatttctggctcttcgtctagcgctagctgcagaccgtggcgtggtgcgcggccgcttggatccgttgctgtttgcgccgtgcggtgtaaaatcgaactgtttagatctaagtcccgctagatgccgtggcggtggaatctcggttgatctgtgtgtctgagcgcctgtgtagctcttggggctggacatacatctgctgatttggctctcgacggc

SEQ ID NO: 63451 - DNA, 726 bp, Zea mays
  unsure (1)..(726): unsure at all n locations
  Clone ID: MRT4577_157867C.1
ccggccgggccgggattgatcgctatcgccgtgcgccctcctcacgtctgtcctcttctctctccacgatccaatcgataatccatccgatcctttacatgctgatttatcaggatctcctatctgggaacgagctcctgactgattcaatcacctacaagcatctcgacaacgaagccctgtgtgatggcaagaaaaatcggtcgcccgacgccctagttgatggcacattgtaagcaaatccatcctgccacggtgtcgatgacatacatggtggatgacacttactgtcaagagtggatagatatgggtgacactgtacgctgacaggatccttctccttttgacacgagatcatactgcgtatgacatcagaaagtacgtcaagaatctcactgctgtggtgcagcctatagaagcgcttgagctcacaaagggggactaggatgctgccctgctcctccgtaccaacttgaatgacctccaagtatttgttgatgaatccgtcaatgatgatgagcaagctgcacactactaatacatggctgttgacagtaagcctagattcctccatgtctctcatgaccataaagagatcaagagtaacattagcctataaataattaacccatgtagatgcaccatgtatgtactagtattctgtccanaactatagttgtcctgnctgaattgaactcaaaagggtttgtttgagaaaaattgtcc

SEQ ID NO: 63452 - DNA, 693 bp, Zea mays
  Clone ID: MRT4577_157868C.1
ggccgcgtgggcggccgcgtgggcgggtgtccagcacaagagagagaagaggagtggaggaggtgggagcagcaagaatggcgtgctccaccaatctctgcttctcggcgttgattcctcctcttccagcctcttcttcttctggctcctcccccttcctcacgatgaagcgtgtgtcctctgttccgtcgttgtccaggtggacaatccgatacaagcaattgggacatgcattatatcagagaagccacgttctggcctttgctagtgcagatgcatcacaaggcaaaagaagctcaggtgagaatgttgtgatggttgatccactggaagctaagcgtctagctgctaaacaaatgcaagaaattagggccaaagaaaagctgaaggtgcattgctgctgtattggagtgtatcattccttagattaaatcaatcttatatgctaaaggaagaaaacttcatgataaggaaaggaggaaaacatctatcttttttttttgtttggaccaatagttggtgatgaatcattgtttcagataactggagacagaactaggcttttacctgttcatgttgtcctgcgagttctccaattctaatttatttatttactaggtaaatacccgtgcgttgctacggattgaacatattatgataagatatattgaaattaaaaaaattctaattttc

SEQ ID NO: 63453 - DNA, 831 bp, Zea mays
  Clone ID: MRT4577_157869C.1
attgggtacctcgaggccggccgggagaggtggaggaaacggtgtccagcaaaagagagagaagaggaggggaggaggtggaagtagcaagaatggcgtgctccaccaatctctgcttctcggcgtcgattcctcctcttccagcctcttcttcttcttctgtctcctcccccttcctcacggtggagcgtgtgtcctatgttccgtccttgtccaggtggacaatccgatacaagcaattggggcatgcatatcagagaagccacgttctggcctttgctagtgcagatggtaaaagaagctcaggtgagaatgttgtgatggttgatccactggaagctaagcgtctagctgctaaacaaatgcaagaaattagggccaaagaaaagctgaagaggcgcagtcaagcagaagctatcaatggggcattggcaatgataggactgactgctggattgatagtggaagctcagacaggaaaaggcatcttagggcagctagctggatatctgacggctatttctagtttatttggacaataatagtgggccatctttggagatttattttttcacgttccttggccaggagagctcttatctgttgcatccacccaatttttgtgggggagttaatccgagcccagacttgtatgtttatcaagcacgcatgggctgaacattaattatacatgtaacggggtcgttctatgtagcccaaccatttctgatgatagaacctgctaaagagcagttcttcatcatacttaaatgtgaaatgataagtctttgagaactctcctttttgcccaaaaaaaaaaaaaaagcggcc

SEQ ID NO: 63454 - DNA, 341 bp, Zea mays
  unsure (1)..(341): unsure at all n locations
  Clone ID: MRT4577_15786C.1
cnctagcncacgacgacagcccacnncggcggagcngccaaacgggcgggggagccagcagncagcactagcagaagcaagagcgagccnngaccacgagccaagcaagagcgcagcaacggcggcnnggaaagacnacgagacagcngcancaaangcccgccacagcagcaacgcaaaccagaagaagaacaccagagcncaagcacaaaaagccaaggancaaaagncnanccagcaggcgnagnaagcgcccagccgggagancaaancaaccannaaacaagcaccannncagacngcncaaccgccggcnggaaagcccaaaggngccaaaagag

SEQ ID NO: 63455 - DNA, 403 bp, Zea mays
  unsure (1)..(403): unsure at all n locations
  Clone ID: MRT4577_157870C.1
accgtccgtattcccgggcgccgcccttttttttttttttttttaacaaacttaaaatttttatttttcacacanacccaaaaaagggggccctcccaagttttttaataacaaaaacacccacgcccgacgaacataactgatacatcctaccgaataaaggaccagaaacaaaaaaaaagagaatggtaacacagggctccaaaaaaagctcgctatcacaagtaacaatgcgaggacgatcttcccgaataagcaggcaaacaaaaatgcgtaaaacaacgaacaaaggggcgcaaaacctcatcaattccaaaatcaggggccaccattaaaatccatttttttagggcatgcccccactgacaaaacaaaaaaactttagagaaaaagctaaacacaa

SEQ ID NO: 63456 - DNA, 240 bp, Zea mays
  Clone ID: MRT4577_157871C.1
ttggcaccacagggtctaggatgtctggcaactgcggatcaagctgcggttgcggttaaggctgcaggtgcggaaggaagtaccctgacctggaggagacaagcaccgccgggcaggcaaccgtcgtcttcggggtggccccggaaaaaaaggccgcgcccgagttcgtcaaggccgcggcgaattccggcaaggccgccaacggttgaagttgcggtggaaactgaaggtgcaaccctt

SEQ ID NO: 63457 - DNA, 239 bp, Zea mays
  Clone ID: MRT4577_157872C.1
ctttgaccataccattgaaatcaacgttccaatgtcccgcttcctaccatttaaggggacgggagattttaagctagcacagtctgatctatatacctatgatgatcgctctgttacacttaattcaaccctaacaaatccataaaatacttcaatagaacattttcctgatttcaacaatgactggagctatcttggtctctaacaatccatacctatcattgttgagcttgacactc

SEQ ID NO: 63458 - DNA, 275 bp, Zea mays
  Clone ID: MRT4577_157873C.1
gacactatagaagagctatgacgtcgattgcccccgtccgtaagctcggaattcggctcgggcgcaaaacgcctgtatttcccgggcccccactgaagccagacttcacggactggagcgagtgctccacaacactgactgcgaggcagatagagcgacttttggtatagtcagccgcgaagataagaacctgatgctcaacccggccattgtacatgcgccctgtgccaacccgaccaccactgagatcctgatctacatgctcggcgggcttg

SEQ ID NO: 63459 - DNA, 345 bp, Zea mays
  Clone ID: MRT4577_157874C.1
gattagccaactattttgatcactttcctgtttaagcatactttatttgcattcttatgtacgttttatacataatagtctctgcttttttcattgtatcgggtggatttaatcagctgacagtccgattcaatacttctcatttgccctaccgttatgctcattatttcgttcattactcactttcttttttgacattaacattgtcttgctctcgtgtttggttgcgttttgacaagttaacatttgttttggcacacaaactctacacaaactttattatgttcactttaaaactcactcggtcatttttattttaaaaaaaagagtttatgttcaacgttt

SEQ ID NO: 63460 - DNA, 352 bp, Zea mays
  Clone ID: MRT4577_157875C.1
gcgaggggcgcgccacggggcgagccgtgcgaagagcgaggggccggaccccgcggccgcggcggcggggcgaagcgccgggggggcggcaccaccgcggggcgagcaggggccggaggcggcggagcgccaacggagagacgcggggcgccccgggtgccacgcggaccggacgaagcgcgccaagggcagggcaggaagcggacccgggacgggccccgggcgcccgcacgccgccgaccgcggcgaagaagtgcacccgaacgaccgccggaagagaagcccggagggggaggggggggggtggtggaggaagcggcggaagacaagggatgccatgaaaaagctacag

SEQ ID NO: 63461 - DNA, 512 bp, Zea mays
  Clone ID: MRT4577_157876C.1
taagctttttttttttttttttttttttttttggtttttttttttttttttttttttttttttttttttttttttttttttttttaacccccccgggcggcccctcaaaaggcgaatcccaacacactgggggcccgtactaggggaacccaccccgggaccaaactgggggaaaaaaagggcaaaaccgccccccggggaaaaatggtatcccctcaaaattccacaaaaaaaacgacccggaaacaaaaagggaaaaccccggggggcccaaagagggagccaacccacaataatgggggggcccccaccgccccctttccaagaagaaaacccggcgcgccaactggaaaaaagaaaccgccaacccccggggaaaggcgggttgcgaaatgggcgcccttccccttccccggtcaatgacccggtgggctcgggcgttcgggtggggggagcgggttcaccccacccaaaggggggaaaacgggtaaccacaaaaacaggggaaaacc

SEQ ID NO: 63462 - DNA, 563 bp, Zea mays
  unsure (1)..(563): unsure at all n locations
  Clone ID: MRT4577_157877C.1
ttnntttttnntttttttttttttttttnttttttttttttttttttttttttttttttttttttttttttttttttttttttttttttttttttttttttttttaaaaggccaaaaccccaaaaattgggtttcccccgggggggaaaaaattttaaccccgggttttttggccaaaaaaaaaaaaggttggaaaaagggaaaaaaaaagttggtttttaaaaaaagggcccccggcccccaaaatggccgggggggtttttaagttaagggggacggactccctttggggaaaccggggggctgggaaaaacaattgtggccctggggggtgggggggcacccatggggcccctgggggggggggcaaaaaccatggggaacctggggggtggggctccggttggggctgccccctttgcccaaggggttccgggggcaaaaaaaggggccccaacccctttggttaatttccctgccccaaggggggttttaagggcccgggccatggggggccccattttccttggggggggggctaacctggcccctggggggggggc

SEQ ID NO: 63463 - DNA, 283 bp, Zea mays
  Clone ID: MRT4577_157878C.1
acgcaagtccaaccacagctacagatggatggtgcaccactgcgccaagtatcctcgaagccacgggttatactcgacaactgggtcgacaccgtcgagccggggcccgccaaggtcctgcgccagccggagccatggcgaccgtcggtgcacaccatcggacctctcgtgcacgccgagaacagtggctgcagcaaagactactcgccttgcccgagcgtggagtgtcaggaccggcagtccgccaaatcggtcatactcaatgccttcggctacagctgca

SEQ ID NO: 63464 - DNA, 267 bp, Zea mays
  Clone ID: MRT4577_157879C.1
cgtgggcggagcctcccgctgtgcggggggacacaaagataatgatccgaaagctgccgttccagcgcctggtgcgtgagatcgcccaggacttcaagaccgaccttcgtttccagagctccgccgtcgccgctctttttttggcgtccgaggcctaccttgtggggggtggggggggacacctatctctgcgccattcacgcctagcgcgttaccattatgcccaaggacatgtcatttgcccgccggatccgtgtggtgagggcc

SEQ ID NO: 63465 - DNA, 109 bp, Zea mays
  Clone ID: MRT4577_15787C.1
cccactcgtgctcctatgtcctcgtcagccccttcgccgttctactagcactccttcatgtcctttgtcttatccgtacttttgttaacttatgtatacagaggttttg

SEQ ID NO: 63466 - DNA, 655 bp, Zea mays
  unsure (1)..(655): unsure at all n locations
  Clone ID: MRT4577_157880C.1
ccggccggaatggcgagcactctgcagagcctgggcttcttcgtcgtacgccggcgtccctgctagtgcctgccgttgaactctccggccaccattgatccgacctcccctaagccatcgatgataccggcccacgctctgcgcggcgctcaggtgttacggctgccctcaaatccgtcatcggaccattggcactagggcaagcaaaagcacggacaggtgctcggcgtgctgcaacggcttccgatttgcccggctagatggaagacggctggggagcatcttccttggggaacaccgcgcgtcatgggtgccttgccgaagttcagggacggcgtgattgctcatcgtcgttcatgctccaccgtggcgccacccatctccgtgggcagtgggctgcatcgtccaatcgaccgcgcgaggacacgtgtcatctgaaaagcaagttggtacctgaaatctcaagtgccaggtcaagagtaggtaccgcaggatgaggcgcttggaggatgctgcgatgagttcgtgagagatctaggccgtcgtctcccagtcaactttgggttgctggaccgttgtctccttataatgtaattacttaattattttgtatagaactcctgttatgcaaaaaaaaaaaaaaaaatttgcggnc

SEQ ID NO: 63467 - DNA, 518 bp, Zea mays
  unsure (1)..(518): unsure at all n locations
  Clone ID: MRT4577_157881C.1
gattcgagctgtgtctgtgtggcttggtgcaaaggaacgcctcggacttgttaaagaacgcttggacatgggtacgggcgggcacagatgttttataggagtgttttgcgtatacatataatatatgcggtgtaagagatctcgcgagcttgagctttgaccaccaatcgatcgatctcgacctgaccgcctgacttttttatataataacaaaagggcatcgtcgatcgctcccttctatactataaagaccgtcctacatcgccctctcacctcattttccttaagcttcattttgggatcgacatgggttgcacaagggcctcttcaactcttctcatggtcgtcggggccatctccgtgctcgcactagaccattccgttgctaatgctcgccaggtgaggaggccgtccatgtcgaccggagagcaccatncgtctangaacaaggaagcactgcaagcgacgacgacaaaggagcacggcgcggtgcacaccgggggcggcgctggaaccgt

SEQ ID NO: 63468 - DNA, 672 bp, Zea mays
  Clone ID: MRT4577_157882C.1
ggccgcaaattttttttttttttttttgctacataacaggagttctatacaaaataattaagtaattacattataaggagacaacggtccagcaacccaaagttgactgggagacgacggcctagatctctcacgaactcatcgcagcatcctccaagcgcctcatcctgcggtacctactcttgaccggtcgattggacgatgcagcccactgcccacggagatgggtggcgccacggtggagcatgaacgacgatgagcaatcacgccgtccctgaacttcggcaaggcacccatgacgcgcggtgttccccaaggaagatgctccccagccgtcttccatctagccgggcaaatcggaagccgttgcagcacgccgagcacctgtccgtgcttttgcttgccctagtgccaatggtccgatgacggatttgagggcagccgtaacacctgagcgccgcgcagagcgtggaccggtactgcagaagcgacgcgccataaggtggggcgagtacagaggtggcgttcactgtttttctcttactcatcgatggcttaggggaggtcggatcaatggtggccggagagttcaacggcaggcactagcagggacgccggcgtacgacgaagaagcccaggctctgcagagtgctcgccatggggcccggccgg

SEQ ID NO: 63469 - DNA, 1468 bp, Zea mays
  unsure (1)..(1468): unsure at all n locations
  Clone ID: MRT4577_157883C.1
gggccgcaaattttttttttttttttttggatcgaatgtcacatctttactacataacaggagttctgtacaaaataaacaaataattacattatgaggagacaacggtccagcaacccaaagttgactgggagacaacgacctagacctctcacgaactcgtcacagcatcctccatgcgccacatcctgtggtacctgttcttgacctgggacttgagattccaggtaccaggatgatcttcagattctcgtgacctcactgcggtcgattggacgatgcagcccactgcccacagagatgggtggcgccacggtggagcatgaacgacgatgagcaatcacgccgtccctgaacttcggcaaggcacccatgacgcgcggtgttccccagagaagatgctccccagccgtcttccatctagccgggcaaatcggaagccgttgcagcacgtcgagcacctgtccgtgcttttgcttgccccagtgccaatggtccgacgacggatttgagggcagccgtaacacctgagcgccgcgcagagcgtgggccggtactgcaggagcgacgcgccataaggtggggcgagtacagaggtggcgttcactgtttttctctactcatcgatggcttaggggaggtcggatcaatggtggccggatagttcaacggcaggcactagcagggacgccggcgtacgacgaagaagcccaggctctgtagagtgctcgccattttttttttttttttttttggatcgaatgtcacatctttactatataatcggagttatatacaaaataaataattacattataaggagacaacggtccagcaaaccaaagttgactgggagacgacggcctagaccactcacgaactcatcacagcatcctccacgcgcctcatcctttggtacctgctcttgacctgggacttgagtttccaggtaccaacttgctcttcagattctcgtgacctcacgtggaccctgcagcgtgatggtctggcgacagtcaagcgcaaccagcggcggtggctatgcaccggtgagaatttccgggcacacagatggacccccgcgacccacaccgccatgttccgatgagcaaactggatcagtgccccagacgcatccgcgactggaacaatggtcgagtctgcccacattgcactatcttcatgcgaagatgcaccactgttggcgacgacatcaacacccaagcgaaaactggagaagcggcctcgtatgcggcggtagagccgaggctaatgcctgcgacgttcgtggcccactccgaccgcagaccgaccgtgtggcacaggcaggaagcttaccccccggcagacgaacggcacccaagcaccaagacctggcgcagagaccccgacggggtgaacccgcgaaatccccctggcagcttgaatcttcaccccaggttcgtggtagtttgagctccncggccgg

SEQ ID NO: 63470 - DNA, 584 bp, Zea mays
  unsure (1)..(584): unsure at all n locations
  Clone ID: MRT4577_157884C.1
atgacttctccanaagccaaatctgttctgaggttgcggaagaacttctgaggaaagcaacaaggatgtcaagcaggagagttgtctcgagccacacgtgtagagcaccaatgcagaagggaggcttccaatcatacatcatctggctggttcttccggtggctctgctcctgcttctcgtaccctgcagtaagacatccctctgtgttgggacatatggatgggtatgaaatctatcctggtgcggtgcaaggcatgactttttgcgcacatgggttcttggcgtcaacctggtgtgctgtcttctgtacataacctgtggcatcctttcaacagggcattgccaaggcagctgaaaaataaataaaaaaaacaagaggtagaaatgacaaggtggaaaagagcgaggtgtgttattgttggttttagtacatcgtagtcttcttttactgttgttgtagatgtcttgctaatgttgacgctgttgtgtagttgcaattcaagcccagggctgccagttttatttcctaatgtaatgtagcaagagcgagaccctgttagacgggtgcgctgaaattctgaac

SEQ ID NO: 63471 - DNA, 710 bp, Zea mays
  unsure (1)..(710): unsure at all n locations
  Clone ID: MRT4577_157885C.1
ccggccgggaaaaaaaaataaaaaatggcgagcactctgcagagcctgggcttcttcgtcgtacgccggcgtccctgctagtgcctgccgttgaactctccggccaccattgatccgacctcccctaagccatcgatgagtagagaaaaacagtgagcgccacctctgtactcgccccaccttatggcgcgtcgctcctgcagtaccggcccacgctctgcgcggcgctcaggtgttacggctgccctcaaatccgtcgtcggaccattggcactggggcaagcaaaagcacggacaggtgctcggcgtgctgcaacggcttccgatttgcccggctagatgaaagacggctggggagcatcttctctggggaacaccgcgcgtcatgggtgccttgccgaagttcagggacggcgtgattgctcatcgtcgttcatgctccaccgtggcgccacccatctccgtgggcagtgggctgcatcgtccaatcgaccggtcaagatcaggtactgcaggatgaggcgcatggtggatgctgtgatgagttcgtgagtggtctaggccgtcgtctcccagtcaactttggtttgctggaccgttgtctccttataatgtaattatttattttgtatataactccgattatatagtaaagatgtgacattcgatccanaaaaaaaaaaaaaaaatttgcggccctcgagctccag

SEQ ID NO: 63472 - DNA, 321 bp, Zea mays
  Clone ID: MRT4577_157886C.1
agatctgtcttttcatgcgcgcgcgcgcgagctcgggattcggctcgagagcgcactgtactattacctttttttgaggagagcgctctaacagctcctcttggggacttgcaccgattcttattgcacaaggctaccaccattcaggactacaaccactatgaagaaagtgctgctattcactgcgcttgattaggacggacgatgggggcactttaggtggtctactgactccgagcatgtgatggtgggctagtccagaggcctgtaccccgggtggagtgaggactccggcattgcctaactgatcaagcatttacc

SEQ ID NO: 63473 - DNA, 430 bp, Zea mays
  Clone ID: MRT4577_157887C.1
ttttctcttttttttaaccgcaccaaaaaaaaggatcgggtgtgttccagccttcgcgtttgtgtctcgcgcgcgtccacgttctcaactccggaaacaccttgccggacttagtcggaacaattggtattagagccaggttactcgaccttggaggctgaaccatgtcggcccatggtcgacgcgacgatgcagacggaggaagacggaggagatcgctgtcgccggttttcccgcggggacggcgcggcggcagggaagtcgtcatcgagccgatcatcgagaggagctccacggcagcgacctaccccatgttgtcgaagacaaactacgccgagtggtccctcgtgatgcatgtgaacttgcaagcccaaggtctctgggaggccatggaaccggggacatacaacttcagagacgaccgcaacgc

SEQ ID NO: 63474 - DNA, 221 bp, Zea mays
  unsure (1)..(221): unsure at all n locations
  Clone ID: MRT4577_157888C.1
tcgcccaccaagccagcaccagcagcggtgcgcgatggccaccgcgccctacgcctcctccctcttcctggtttcctcccccatctccaccgcgccacgaatccgngccgggccctgccctccgtcccgcccagncatccctgnggttccggtcgaggtccgtccccggtaagtcgnggncnnncnttccaggtnnggagnanccagtccgcnttttgaac

SEQ ID NO: 63475 - DNA, 578 bp, Zea mays
  Clone ID: MRT4577_157889C.1
ctgaaacaggtatccacaagaacatcagatattacagaggttcagaatttcagcgcacccgtctaacagggtctcgctcttgctacattacattaggaaataaaactggcagccctgggcttgaattgcaactcgctcttttccaccttgtcatttctacctcttgttttttttatttatttttcagctgccttggcaatgccgggatgtcttactgcagggtacggctgttgaaaggatgccacaggttatgtacagaagacagcacaccaggttgacgccaagaacccatgtgcgcaaaaagtcatgccttgcaccgcaccaggatagatttcatacccatccatatgtcccaacacagagaagcaggagcagagccaccggaagaaccagccagatgatgtatgattggaagcctcccttctgcattggtgctctcacgtgtggctcgagacaactctcctgcttgacatccttgttgctttcctcagaagtcttccgcaacctcagaacagatttggcttctggagaagtcatttcagcaccatattcagggatgttcttttgctatcatcatg

SEQ ID NO: 63476 - DNA, 351 bp, Zea mays
  Clone ID: MRT4577_15788C.1
cccatcgcgtccgcggacgcgtgggcggacgcgtgggaaaaaattataataaaaaaaaaaaaaaaaaaaaaaataaaaaaagataaataaaaaaaaactataaaattactaaaatataaataaatgatataaaatggggggtccgctcttaagattccaagtttacgtccccgggcttgcaagtctatggttctttttttgggtctcttaattttaatcttcggcccgtggttttccaacgctgggcctgggaaacccctgtggttccccaattatatgggctggaaaaacatccccttttccccatttggctttacactaaaaaggccccccccatttgccctttccaac

SEQ ID NO: 63477 - DNA, 2881 bp, Zea mays
  Clone ID: MRT4577_157890C.1
gcgagtattcttccacaccacgtctcctccgtctgcgtctgcgtcccttcctccgcggacgccctcctaaaatccccaaaatccgatccgaccacgaaaccctaaccccatcccgcactctcccctcccctcccccaacacgcgcgcgctttcttagccgctaagcatatccctccccgccacgatctcgatggtggagatggctgtggtggagctcaggacgctgccgctcggcttccgcttccaccccaccgacgaggagctcgtcacccactaccttaagggcaagatcaccggcaggatcaactccgagtccgaggtcatccccgagatcgacgtctgcaagtgcgagccgtgggacctcccggataagtccctgatccggtccgacgatcccgagtggttcttcttcgcccccaaggaccgcaagtaccccaacggtagcaggtcgaacagggccaccgaggcgggatactggaaggctactggcaaggacaggataatcaagtccaagggcgacaagcgcaagcagcataccatcggtatgaagaagaccctcgtcttccaccgtggtcgtgcccccaagggcgagcgcacggggtggattatgcacgagtaccgcaccaccgagcctgagttcgagtccggcgagcagggtggttatgttctttatcgcctcttccgtaagcaagaggagaaaactgagcgctccagcccagaggaagtggatagaagtggctactcacctactccttctcgttcttcacctgacaacctagaggcgaatgaggaagctaatacaccattaaataaggaatctccagaatctgctctgcatgaaagcccgattgagctgccaaaatctgttgaaaccaatggtggttcaatgacaaggtggctggcggacagaaatgataacttgatggctactgcaccagatgtttcccatatacctttccacggacatgctgctggtgtagctaaggttgatccttctgttggtgcttcaggccacttagttaatccccacaatggaaatgatgattataacaaatttgtgtctgatttcactcccattctaccacttgaaaatgcattcttcactgatatacaacaaggagcttttggttttgatggcatcatgaatcctcttgatccccttgatgctttcttgaatcaaacacttgttgatcctgatgaacattcatcaacaacatcaaaagttcagtatgattctgacattccaacagaatttgagaaccattggaatatgaaggttgagcctcaagatgatcaatgctggtgggcaaacataggttttgagccagacgaaccaaatcctctgcttccttgtgacaccactgaccaagacatactttctgttgactctggtgctgattccttcaatgagcttttcaatagcatggaagagactggaattactgttaggcctcaacagttggactccactgtgcaaccaaaccatgtgttcgctagccagggcaatgcaacacggaggctgcggctacaggttgagtgtagggagatcataactaaagatgagagtgaagatgaagtatcatgtgttctaactccagactgtttgaacgattctgttgaggagtccactgcagagaaggatgtggcttctgatggggatgaggctgagtcaacagggattgttattagaagccatcaccctgctccaagatcaagctcagagagttcattcactcaacagggaactgctatgcaaaggctgcggctacagtcaggccttaacaaaggccagcgtcctagtactgatgattcatcaagctgcattatagacgaaccaggaagtcagcacaaagcagaaaaagcagagattgaagaggatgcgagtacaaacctcgctggaagtgctgatgatctacctggtaatatccatgatgatgagcaaaagaacatccctgaacatggtgctgaaatgacttctccagaagccaaatctgttctgaggttgcggaagacttctgaggaaggcaacaaggatgtcaagcaggagagttgtctcgagccacacgtgagagcaccaatgcagaagggaggcttccaatcatacatcatctggctggttcttccggtggctctgctcctgcttctctgtgttgggacatatggatgggtatgaaatctatcctggtgcggtgcaaggcatgacattttgcgcacatgggttcctggcgtcaacctggtgtgcggtcttctgtacataacctgtggcatcctttcaacagccgtaccctgcagtaagacatcccggcattgccaaggcagctgaaaaataaataaaaaaacaagtggtagaaatgacaaggtggaaaagagcgaggtgtgttattgttggttttagtacatcgtagtcttcttttgctgttgttgtagatgtcttgctaatgttgtcgctgttgtgtagttgcaattcaagcccagggctgccagttttatttcctaatgtaatgtagcaagagcgagaccctgttagacgggtgcgctgaaattctgaacctctgtaatatctgatgttcttgtggatacctgtttcagaattttcggttcctgaacccagttactgatggcttgttgatcaaaaaaaaaaaacggaaaaaaaaaaagtccctgtcaccaatagcgggcttcttaattcctgttctgtatggcttagactccgaactatggatgctataagggcactcccttcttcctgtagccgctgtctgtctacgtttgctacagtttgtggatggtgtgctgctgatgggttgtgtggccttcctagttactgttgtgtactgcttagactccaatttatgggtaatgtgaacacacttccttcttc

SEQ ID NO: 63478 - DNA, 325 bp, Zea mays
  Clone ID: MRT4577_157891C.1
catgcacgctcggtaagctcggaattcggctcgagcacaagtccagagccccgttcttgttattcagggacgcataccgcttatgaggggggatttaaaaaagactttgggggacaccaacaaatccaggatccattatatataatggtttactgcagtctgttacttctatttttatatactggacaaacaatttcttacctttcccttgaatcgatccatttctctctaggtgtaaaattccttggtattaccctgaattttccttatgcaaggaaaagtctaaatttttctatcaatcaatatgcctaattaactggggctg

SEQ ID NO: 63479 - DNA, 180 bp, Zea mays
  Clone ID: MRT4577_157892C.1
aaaaaaaaaaaaaaaaaaaaaaaaaaaaaaaagggggtatacagataaataatttgtaagactgggagtttatttgggaaaggttagttggaggagtaaaattttttctaaaaggaggtagtttaaaaatttggggatttgggagaaatattttttggtagggagaaatttttttaggtt

SEQ ID NO: 63480 - DNA, 247 bp, Zea mays
  Clone ID: MRT4577_157893C.1
acgccgtctacgcgtccagataagggattgaatactccgaatcataagcagaatggcgtctgtggcctgcgactcaatcattgaagtgtgtggtgactggtgatggtgctgtcggcaagacatgtctccttatatcatacaccaccaatgctttccctggcgaatacattccgaccgtctttgacaactactcggccagtgtcatggtcgacggccgaccgatcagccttggcctctgggatacagc

SEQ ID NO: 63481 - DNA, 623 bp, Zea mays
  Clone ID: MRT4577_157894C.1
ccgccgggggcgccgtacgataccttgcaggctgcccatggtgcgttcccctatccctccgctctggatcacgcccggtggggtcatagccctcagaccacgtggaccaccgtggcctacagtggggggaagaggacgcaaaagaacgtcgcagggacgtcgcgtcgtcgacggatggacatgtcatcccgcaaccaactccacccgccaccttacccccccggatagtttagtctacctataagattctctttaaagcaggtcgtgcggtttctcaaacaggtcccaacgacaatgctaaacgaggtatccaccacagtacacgtccccaagacctgttcattcacggttctgataaccttggtcaaggtaaaggaaattggtgtcctggtagccttaagcttgtcgcaatgctagaagaggactcttactacgcgtttcgcgaccgaggtggtaaccttcgtctcccgttccacgggtaaccctccgacgagtcacttctctatgaactagaaggggggtcggactacccgatagaaggcgacgcatacgagcaacttgcgcagcactacgaccaagggtatgctgccgaaggaactcatattatatatcgagttgttaat

SEQ ID NO: 63482 - DNA, 537 bp, Zea mays
  Clone ID: MRT4577_157895C.1
tccgacgcgtacaagctttaccatctaagggcgattttttgctatgaaatccataaaactggggagacgatctaagggtcctttacagggcccatcttatgagcttgtgaggagtatattaattaaggggacttccattaaaatcgccgccactggtaaaaccttcgagttacccaactaaattggcttgaagaacatcctactttttccctgtgggaaaatagtaaacaggcccaatcccatacgaccttcccaaccggtagccaaaactgaatagaccattggacgccccctgagagaggctcattaaattcattgggtgtggcggattcgcccattttgaccggtacaattggcagcgccatatgccctaatgatattcgctaacttcccttgcttaggcggcacgtttatcgggttctcctcccaatctttaaatactgggttccttttatgggtccgatttattgctttacgggacctagatcactaaaaagttgatttaggggattgcacacgatctgggccatacccctg

SEQ ID NO: 63483 - DNA, 606 bp, Zea mays
  unsure (1)..(606): unsure at all n locations
  Clone ID: MRT4577_157896C.1
gacacaaccagcccggggcgagcccccagcagnaggnnaccaggcgnacgnaggcaggcaccaccagaggacccgagcgaagccggggaagaagagccnccagnagagcagcncanaccacgggaccggcacgccggggaggcaccagggcgngcaggcggcgcasgcccgggggcggcgcgcggcccggccggcggggccacccaccgccncccggagggccgcgcgggcgcggcccggcgggacacggacagccgcgcgacagggaccagcccgacgggcgagcccgcgacgcggccagcacctcctccgtcgcgcgcasawnctccttggckcktgccgcyacggtaggacgaggcggsgctgancggcgacgyctggrkgsagcagtggccgcygccctccgcgtcggcgscgccccacgccctyccgtccgtgggcgtcggcgaaggggtgacgaagaacacccgcgactwgccgggggccacgkagcgctccagccayyggaccacctggtgsagcaccagccgggaggcctcctccgacbycahcyccacgawgtccbtgckcgggtcggtggcggcgccctcaggagcbggaggcggc

SEQ ID NO: 63484 - DNA, 357 bp, Zea mays
  Clone ID: MRT4577_157897C.1
taaatcttcttctagtgaccttatagactcgcttattaattatggggcggcataaaataactgacaagccttatccataaggacaggcattaacaattagttggaaaaaccatatctgctttaaatcagtataaattaatatcgcgctttagttctggacacccaactagtcatgaccaattaatgtaaagcttgtatcttgctttaagagcacacactgattttaaatacgctccaccttcttaccgatttattgtacccaaacttagcctaccggatcctacattgtttcccccaacaaatgacctgaacacaatcacggatgggcgccccattggcctctactatttttcagtc

SEQ ID NO: 63485 - DNA, 321 bp, Zea mays
  Clone ID: MRT4577_157898C.1
gagcgagacgccggggctgatgacgccgcggcgggttccccttgtcgtggtccccaggacggtgcctcagccagcactgccgtaggatcacggtcgacctcggccagtgggccttgtttggaaaagccagttctgtagctacctaaaatccttgtaaacagttgctcaaaaaaaaatccttgtaaatacgcacccccccccccttttttttacaaggctaagtactctctctatcccattaaaaatattatttttgactttcaaactttttgtttgatcatttgtcttatttaaattttttatataaatattatttatttt

SEQ ID NO: 63486 - DNA, 363 bp, Zea mays
  Clone ID: MRT4577_157899C.1
tagcaagagggatagagcaaggccccccccccctcaccaattgggttaaggaaatgtttcttttgagataagttgaatttctattgggggtccggtattaatatggttaaactaaactagtttaagacggtttaattctaatttaattttcctatttgttggtaaaaaattcaacaattggttaattttgctttacaattataggaacagccgtcattgtaagattaaaaaataacgtttttttgaacacttggattttacaaaccaattatcccttttataacttttatgacacctttagctttaaacttttaaagtctaaaagattgataagtcacacttttaaatttgtattttttctgt

SEQ ID NO: 63487 - DNA, 400 bp, Zea mays
  unsure (1)..(400): unsure at all n locations
  Clone ID: MRT4577_15789C.1
acaccaanaacattttagaggaagagacaccggggccggggggggggagagagagcnaggggggccgggcccgcngccccngcancgacngacccngaagaaggcggcagcagcaaccaaggcggcccgnagccgcgcgcacgnngcgagcaggaggaggangggnggcccgccgcgncncnggggggggggggcgacnccaggacagcggangccgaccgcncccnggccgcaaagaaaangggaccacccacgacccacaangcagcgaagcacaaggnggagaacgccggggaggagcaccggccaacnnaccccagagccaacacacngacccacngcgacnagacggcgaaccngacacngggcgagaagagaagcgagcagcngcacaagacaa

SEQ ID NO: 63488 - DNA, 505 bp, Zea mays
  Clone ID: MRT4577_157900C.1
gttcttaattttgatatcgctaatcttttattaactgccaagttgctcattttattttcgcgaaattctttattctcagtttaaagcataaaaaatctatgagatgggcccaccaatggtgggctgttgcaatcaggtggtcggattcgataaagcgagttggctaattggcaccaattgctgttggtgaaagaaggcaacaatttttgccacatcctgtgggtagaatggcaccaattgttgttgttgcaagaaggcattaatgtttcccacaacctgtgggtaaaatggcacaaattgttgttgttccaagaaagcagcaatgtttgcaacaacttgtataccgaatggcaacaactgttgctgcaataagatggcaccaaggctcccgacaagttggttgaatggttgtagctgttgtgcctgcaagtaagcaccacggttcaccccacctagatgattgaatggaagaaattgccggtgctgaatgcaagcaccaaggctc

SEQ ID NO: 63489 - DNA, 515 bp, Zea mays
  Clone ID: MRT4577_157901C.1
tgctcgataactttaattcaggcctggttcggcctcggcgacggggaaactcaacgaattaactaacctgcttgtatttattattaattaattaccttgtactatagcatacgtactactaggctatcacccaagctgacttaatttacgattgatagtcatagcgtcaaccaccgtcaaggaaaccacgcacagatgcacatccaagctagtcaaatcggtttgaattcggttcgacaaaaaaagaaccttcgaagtccagctacgtatgcattccttttgtgtgagggaatcactagtcaggctctgctgttttagtgctcgcaccatcactgtatttaccgaagaaaaaatacgtatggcgtgcgtgtcatcactgtatcggttctgttacctttgtgtttcccttccgtctaggctgttctggacaacactagaatcaatccagctgtcatcggtgacatcgtcgttgggaacggtgcttggccctagttcccagcgtgcaaacgagtgca

SEQ ID NO: 63490 - DNA, 252 bp, Zea mays
  Clone ID: MRT4577_157902C.1
ggggtttttacaccagcagcggcataaagcactccgtattctatggtcgaagaacgaactggagagcgtgtaaccctcaagccggtgcttatccatttgcaacgcccccgcgacttggcaactcctaactatccgtgcacaggggtgccttttttcgacaggtgtggcccaccgacctaccaatcctatgcataggtcccgaaaatcgatgctgggcttcccaggtgacacccatggacggaggttgatgat

SEQ ID NO: 63491 - DNA, 252 bp, Zea mays
  Clone ID: MRT4577_157904C.1
cgcaacgcatagaagaataactaatagagatcgatcgagaatggcgtgtccgaggcgtactagtcgtctagccgcgctactaagctcgctacggccatggcagcagcgatgatggccgccaccgcctcgacgcagaacacgccgcgagacttcgtgaacctgcacaaccacgcgcgagcgcggacggcgtgggcccgatagcgtgggacgccagagtggccaggtacacgcgagactacacggcgaacgcac

SEQ ID NO: 63492 - DNA, 863 bp, Zea mays
  Clone ID: MRT4577_157905C.1
cattgggtacctcgaggggggtcggggtcgtgctgcaaactgcccgctgaaaaacaaactcaccaacaaagtgacctgaaactgggagcaagcaaccgagggcgagagccatggcgaagcctcgcagcggcggcggcggcggcctcctggacttagaggggcactacgccttttacggcgcctaccacagcaaccccgtcaacgtgggcatccacgagctcttcgtgtggcccatcttcctcaccgcgctcatgctcctccacctcaccgccccctccacgcacgccgccggcatcagcgccgcggtctacgcggcctactacttcctcctcgaccgccgcgcgggcgcgctcgccgccctcctctgctacctctgctgggccgccagcggcgccctctctgcccgcctcggtttctctgttggatggaagaagcgagcgcctgctcttcttgacaatcttgtccaggctttcctgatggcaccattctttgtgctgctagagattcttcacacatttggcgggtacgaaccgtatcctggcttccacgacaaggtgagcaagttgattgaggaagcccggaaggaatgggaggacaagaaatcaaagaaatcctcatgagatatgcgtgaattaacggctccgaactgttggggtctgcctgctcgagataacctgctgattggatgaatctattgcaaggatggttaccgaatactgatgctatttatgttgtataagatgatgtgcgctatgttgtctgatgtttttatatatattataatggggacgaaaccgaggttaaaaataatttatatatgtatactggtgtgattaccttgctagggccccttgttctctatg

SEQ ID NO: 63493 - DNA, 1265 bp, Zea mays
  Clone ID: MRT4577_157906C.1
ccggccgggaccttcgacggggtcagcaattcagcattcaccccttgataaacagttttatactcacagagggcctcgacgcggccggcctgccccactgcccgctgaaaaacaaactcaccaacaaagtgacctgaaactgggagcaagcaaccgagggcgagagccatggcgaagcctcgcagcggcggcggcggcggcctcctggacttagaggggcactacgccttttacggcgcctaccacagcaaccccgtcaacgtgggcatccacgagctcttcgtgtggcccatcttcctcaccgcgctcatgctcctccacctcaccgccccctccacgcacgccgccggcatcagcgccgcggtctacgcggcctactacttcctcctcgaccgccgcgcgggcgcgctcgccgccctcctctgctacctctgctgggccgccagcggcgccctctctgcccgcctcggtttctctgttggatggaaggttgtattggtggcccagttgttctgttggattatgcaattcattggtcatggagttttcgagaagcgagcgcctgctcttcttgacaatcttgtccaggctttcctgatggcaccattctttgtgctgctagagattcttcacacatttggcgggtacgaaccgtatcctggcttccacgacaaggtgagcaagttgattgaggaagcccggaaggaatgggaggacaagaaatcaaagaaatcctcatgagatatgcgtgaattaacggctccgaactgttggggtctgcctgctcgagataacctgctgattggatgaatctattgcaaggatggttaccgaatactgatgctatttatgttgtataagatgatgtgcgctatgttgtctgatgtttttatatatattataatggtgacgaaaccgaggtaaaaaataatttatatatgtatactggtgtgattgccttgctagggcccttgtttctctaaaagagtgaggtacaaaaaaaaaaaaaaactccagtttttttcatgatttctgatattgattattttcttcgccgaaattccactgagccagcatggaggccgcggtgcgcggcgcgcggaagctccgcctgctccggcacgccgagacgtacgttatcgggtgccccaaactggtgctccgccttttgccgtcccccgtctgcttccggtccggcgacgtccgtgtcttttgttccgtgtcccttctctaagtccagctccgcttctttccgacccgccgct

SEQ ID NO: 63494 - DNA, 278 bp, Zea mays
  Clone ID: MRT4577_157907C.1
gctggtcaagatgaggattccccccagtgagatgttcttgtcagaaaccgacaaatactccaagtttgatgagaatggtctgcccacacatgacatggagggcaaagagctcagcaaagggcaagccaagaagctgaagaagctcttcgaggctcaggagaagctctacaaggaatatctgcagatggcccagaatggaagcttccagtgagggggcacaggactgactttttaaaccattgtggactagtggctgctgtctgcctcagtggacatgt

SEQ ID NO: 63495 - DNA, 283 bp, Zea mays
  Clone ID: MRT4577_157908C.1
ccgacgcgtgcttcaacgcctccgggtttattcctgactcatatagacgctccatgcggcgggcttaagaattgtttaggggcctctgttcatcatggtaaacatgctaattatgttaacactggctgattgtatgggacctcttcagagcattcctttctccaaggttcttaaaaaaagtgactaaccatatgttttcagtgtaattatgaataggtataggaaactttggcttttgaatggaaaaactttctcatgacacaacgaatggaaataaaaggtg

SEQ ID NO: 63496 - DNA, 539 bp, Zea mays
  Clone ID: MRT4577_157909C.1
agcttgctgaagtggacttccgtggcctgacatcatatataacgtgagccagatcgagtcgacaggagggagatgcatagcttgctccaaaggtagaaacgtgggcgctggcaatgcactctggctggggaccgatgcggctttcccgggcgtggtgcgcacccaatagcccgttccaccgcgtacagcacactgatgccgcgcctggctggcgacaggatacgcggcgtgatgcggcccataacgcgctgcgggggtatacgtaacctgcagcaggacggctacacttgccaggaccgtagcaccatgctgcttttgcttcattaacttcctttactgcgccgactggagcggtatccacatcagccgctcactcgggcttcccattaggtgcggcgtctacctgctgtacaagatctagaccaacataaactgcaacacgatgaatttacagaggcgggctctgcgccttcatagccaggaatgcatgcttggacctgggcagacacaataataataggctactcttattttaagct

SEQ ID NO: 63497 - DNA, 413 bp, Zea mays
  unsure (1)..(413): unsure at all n locations
  Clone ID: MRT4577_15790C.1
ccgtccgtatggagaacgaatctggnncatcacatccttctaccaacgagggctccgtgtgggcttcccgagggaacatcccgcgtnncctcctcaactgagggcgcnnccctgatacccaaagggctaaccccgtgagaaagatgatcccacgatcaatggttcgagaccccttcaacacccccgcttatgtaccgtnncgccatccaggcccgtccctgggtctctgtatgccanngtggtcgtacccacaaggtnnatcgtgctcgacttcgggaagaatcggtgtcagccacacttgtcnccccatctacgaagggaaatacgcccttccnncaacgccatccccttcgtctcgaccctggctgggccgcgaccnctcaccgactacctcatgaaagatcccctgactg

SEQ ID NO: 63498 - DNA, 305 bp, Zea mays
  Clone ID: MRT4577_157910C.1
ctatttacaaacggctgccctattatttgattttttttttttattgtttagattctggccctctaactcaaaaacatgcttttaattcttacgggaagattacaaccaaacagccctttattcaataacttccaaaaattgcaattggaaacaaactttggtaccaaatctaacatcaaagaaaggttacttcaaagatgatacacctacaagccaaactaactattcagcatccagtatcatttatttacaaactcaaaaaagctttaaagagtttttaaaaaaaaaaataataattttccaaa

SEQ ID NO: 63499 - DNA, 295 bp, Zea mays
  Clone ID: MRT4577_157911C.1
tccccggctaacacgacataaccagccccccaaaagagaggctacctggccatgtgtaaaccgcacgccaccctggtggttcatacaattgctgaatatgacgacaggaacacccggcatatgaacatcgcacgcaaagccttgagacagaatgctaatcaggtcagatctcccaaatcctgaggacagagctatcttatttaacgacaatgataatcttgctgcagaaagtcttgatctcagaaaaaaactccaaaacccaatatttggtgaggcaccaaaagccggtggattt

SEQ ID NO: 63500 - DNA, 237 bp, Zea mays
  unsure (1)..(237): unsure at all n locations
  Clone ID: MRT4577_157912C.1
gtgtggttgcgtgttgtctcggtgcgggtcctggcgctggtgcncctccttccgcggtctccgntcttgtcntcgncctgcttctcgccgccgccctcctccttctggcngtcgttcctgcccgtgtttccgtcgntcttcgccgcctttcgcctcgtgttgccggcgccnccgtccttggcctcctgctccgctcccttggnccgctgcctgtcggccntcgccccctggcgcttg

SEQ ID NO: 63501 - DNA, 326 bp, Zea mays
  Clone ID: MRT4577_157913C.1
atagaccgctgtggatcagatggcgagcgccatgttctaattgcacgccaggccgcataataagtacctacgtgccaataaatacagagacatgaagagcgtgcttcagccgacggcagaagagcaaagctacccgcatcaccaggtatgttgagtagaggaactctatggtagtgcatattgatactaggagggacttaatctgatgtacctggactaattatagtggatgatgcgcacctgggtgagtgcctcgctggcctctacggcctcgccaaggaccacgccggcccgctccgccccagcgttggggccgtcgattttga

SEQ ID NO: 63502 - DNA, 293 bp, Zea mays
  Clone ID: MRT4577_157914C.1
aacataaacaggcctttggggcttgtcacatcatggacaatttgatccactactcaatatactagtcctgacgacacatcattttggaagcatttcaatccacaacagattaaatccgatccactccataggtgctatccctattggatggaaagggatgtccaacctaatggacttgctgactgggatgggcttccggtcaactaaacaattgccaacagtctaaggcgagtggatcgatatgatacactttaataacagtaccttgcactactaggcacttgggatctctt

SEQ ID NO: 63503 - DNA, 674 bp, Zea mays
  unsure (1)..(674): unsure at all n locations
  Clone ID: MRT4577_157915C.1
actcctatagggcgattgggtctactcaagccggccgggattggacccgttcccccacacaaggccgcactgcacacccgttgacccgtacaccgtacacaaacatggcatctgcaggtttcaccacactcgcgacgcacgagacatcatccccggcggtcactacgactactatgttccgtacctctgcggtgcactgccctgcgacatctatcaattcgtcacggcgacagtacttaaacgggtgcacgaaaaagtcctcgctccacacacatcatctgcggcgcgcgtcgatactcaggtagacagtcagtctgcctagtgcacgcgacgcctcgccactgcaacaagtgtgatgcacgaagggtatggtcgccgctcccccctggacctacaaaaccactaaacaggacgtacacggcggcgtcaaactcaaggagaacatctccaggcccctaatcgggggagaaacgatccgcgctgctattactttcgtgatatctcatccccgaattatatatgtccggcatcgtatgattcttgtgttaacatataaggcgcgaatgacaccataccatccttgtataactatttcctttcgttgatggatactaanaataaatctctctttctctatgtgcatatatatgatgccatcagcgatatttaaatgc

SEQ ID NO: 63504 - DNA, 273 bp, Zea mays
  unsure (1)..(273): unsure at all n locations
  Clone ID: MRT4577_157916C.1
aacggggggaggaggagcgcggcggcgcgggccgcccggcgcccggccacgagaggccgggggcncgcgcccgccgccgccgcaccgacgcncgcccaggcgaagaaggaccngacgcgagggacccacaagggcgacggcgacaacgagagcgacggcaagcccgcaggccggaaaggcaaggggcccgnggggaagaccgngcccaagacggcagagaacccccgagcgcngngcacaggagagaaagggggnggcaagaggggcaaagcc

SEQ ID NO: 63505 - DNA, 705 bp, Zea mays
  Clone ID: MRT4577_157917C.1
caccacctccacctttccactccaccgctcctcctcctcctcctcctcgctctcgccacaacagaacagagcagagagcactgcactgtggactatccatccacgcccctactccagtccgaggacacaacgatattcttggaatttagctgcgcgtgcatggagagattgctgtcgctgctgccgatcgatcgatcactcctccgattaacctagtctgacttggcctgctgcggatttcttactgttctttcccctctcctagctgctccaggttcttgatcttcttccaagagcagagtagcttgtacgtagtagaattctgtgtgggctagacaagagaagagaattcgaacatggtgctggcgcacacgtccaaggtggtgctgggatgcgtggcgttcggcatcttctgggtgctggccgtcttccccagcgtgcccttcatgcccgtcggccgcaccgccggctccctgctgggcgccatgctcatggtgctcttccgggtcatctcccccgaggacgcgtacgcggccatcgacctccccatcatcggcctcctcttcggcaccatggtcgtctccatcttcctggagcgcgccgacatgttcaagtacctcggcaacctgcctccagtggaagagccgcggccccaaggacctgctcttccgcgtctgcatcgtctccgccatcgcctccgcgctc

SEQ ID NO: 63506 - DNA, 528 bp, Zea mays
  Clone ID: MRT4577_157918C.1
tcatccctacctgccagcgagccccagaattttcagatcgaatcgaagcaaaggctttctcgtccgcctccaagatgcagatctttgtgaagaccctcaccggcaagaccatcacccttgaggtcgagtcctctgacacgattgacaatgtcaaggcgaagatccaggacaaggagggcatccctccggaccagcagcgcctcatcttcgctggcaagcagcttgaggacggtcgcaccctcgctgactacaacatccagaaggagtccaccctccacctggtgctccgcctcaggggtggtatgcagatctttgtcaagaccctcaccggcaagaccatcaccttggaggatgagtcatccgacaccattgacaacgtgaaggcaaagatccaggacaaggagggcatccctccggaccagaagcggcctcatcttcgctggaaagccagcttgaggatggtcgcacccctcgctgactacaacatccagaaggagtccaccctccaactgggggtccgcctggggt

SEQ ID NO: 63507 - DNA, 527 bp, Zea mays
  Clone ID: MRT4577_157919C.1
attcatccatcccctctccgcgatctcactgagaaaatcctcgaccgatcggaagacaagcgcccctcacgctccttcaagatgcagatcttcgtgaagaccctcaccggcaagaccatcacccttgaggtcgagtcgtctgacacgatcgacaatgtgaaggccaagatccaggacaaggagggaatccccccggaccagcagcgcctcatctttgccggcaagcagctcgaggatggccgcaccctggctgactacaacatccagaaggagtccaccctccacctggtgctccgcctccgtggaggcatgcagatctttgtcaagaccctcactggcaagaccatcacgctggaggtggagtcctcggacaccatcgacaatgtgaaggccaagatccaggacaaggagggcatccccccggaccagcagtgcctcatctttgccgtaaagcagctggaggatggccgcaccctggctgactatagcatccctaaagagtttaccctctacctgttggtgccgct

SEQ ID NO: 63508 - DNA, 189 bp, Zea mays
  unsure (1)..(189): unsure at all n locations
  Clone ID: MRT4577_15791C.1
aacacattttcttctcctcagatacaccgcanncaggtatctagcttgaaattttttaaggacnccacaaatccacnaaccaagggaagcaaaacattaccactttccttgcagcaccaatgcacgccccttctttgacatatataacacattttaggaacatacagactaacttgcattatctcacac

SEQ ID NO: 63509 - DNA, 307 bp, Zea mays
  Clone ID: MRT4577_157920C.1
aaaaaccaaaagtttatagtcgattggtgatgaatggtgttccctgggggggggggggggtacatgcccgggcgaagtttttttttcacacaaacgggaagaagatcagatcaaaaaggggcgttgttggggtcatcattgcaggaagtagccggagatgaaaaaaaggaagcccatgaggggggtaccgtaaatgagcaggcccttttggccggaggggagggagttgccccccaacccgaactggtggttttgggcgaacccggggatctccacgcttttggttttaaaaaaagactgcccggcg

SEQ ID NO: 63510 - DNA, 515 bp, Zea mays
  Clone ID: MRT4577_157921C.1
gttcaatctcgatgcccgtcgcgctctctctctctattctttccccgcctcaccccgaggcatgccgtctcactagagcttccgcatcgacaacaacgtcgccaacaatatgcctcgacgcacctcatgaacgactgcaccacgcctgagctacccgagctgctccagggacgaacccgacacaagcaactggccacggtcctcctccagctcctggatgacgatggagcgggctcctcgtgcggaggaattcgagccaccctagctctccgtatggtgtatggaaggctcatgggcatgtgacacatagctgatgatgcctgattagtgtccgcgagacaattcgatgatgatactgatgactcatgaatactgatgctgcatgtcccgtgcccctgcatggatggatgcggtacgattgcagaactctctgctacacgtactccatgagtgtcgcaacaacgatggcagccaaaacatgatgagtgagttctacctagacgtggtgaacgagt

SEQ ID NO: 63511 - DNA, 449 bp, Zea mays
  unsure (1)..(449): unsure at all n locations
  Clone ID: MRT4577_157922C.1
tccggaaatccacgcgcacccactgacctgcatgcaacagttacaataacccatctaaaaagctctggatggatacggggggaccatgggccatgttgatcacacatctancatagaaaatttactcccacacatgcacttctccaatacgccaccgcgggcattcatggtgagtctcaagaggtggaatggtcatgcctctaatactctaagacacacacacaaaggggtccttcctgtaccattctgggcgatgttacaacaaaccctacctgctaaacagaagggcaagctcaatggtgttttagcttatacaatcgtttttcacatgtatgctgcttgtaaatctccgcgaaagcgcctgtatgaaacattgctcagtaccttgcatagcaagaagctactgctgggttacatgtctgttattttgcattagaaatactataaat

SEQ ID NO: 63512 - DNA, 582 bp, Zea mays
  Clone ID: MRT4577_157923C.1
acttatccacaccacaggcagcaagatctactcaaagaacccatcaatccagagcgacacctgagtcactaacttgtccagccgcagtaatggcggagcggcgccgctcagccgtcacgctcgaggtccagacctctgagaccatcgaatatgtgagggcgaacatgcaggagaaggagggcatccctccggaccagcagcgcctcatcttcgctggcaagcagattgaggacggtcgcaccctcgctgactacaacatccagaaggagtccaccctccacctggtgctccgcctcaggggtggtatgcagatctttgtcaagaccctcaccgccaagaccatcaccttggaggttgagtcatccgacaccattgacaacgtgaaggcaaagatccaggacaaggagggcatccctccggaccagcagcgcctcatcttcgctggcaagcagcttgaggatggtcgcaccctcgctgactacaacatccagaaggagtccaccctccacctggtgctccgcctgcgtggcggcatgcagatcttcgtcaagaccctcactggtaagaccatcacccttggag

SEQ ID NO: 63513 - DNA, 1420 bp, Zea mays
  Clone ID: MRT4577_157924C.1
gccggccgggcctgggtcattgaactgctctgggaattccctgcgaggtccaccaactcgaggaggaggaggaggaggaggaggaggagagatccccccaccgagcctcggtttccaagcgccagcagaagaagaagagacaggacacatggcggcaggtttcggcccgaggttcgccgccggcgatgctccggcgagacggtgtaacctggagcggttcctcgaggccaccacgcccgtcgttgcgtcctccagctgctcgtccaaggagaccgcgaacggttgggggcagcggcggtcagacgacgcagacggctcgtcgccgttcttcgctctgggcgacctctgggactcgttcaaggagtgcagcgcgtacggcaccgctgtgccccttgctctgaacggctgcagcgacggcgtcgttcagtactacgtcccctacctgtctgcaatccagctttacggagccctcagcaggcacatcggcccttcgaggacgggtgcagaggagagcgacagcgacgcggagcgcgagacgagctccagcacgaacacgttatcggcgcgggaggaggcgagcgagagcagcaccagcggcagcgaagcctccggcgacgagggcgagccgggaccggggagctggtgccaggagcggctcctcttcgagttcctcgagtccgagcctccctaccagcgcgagcctctggctgacaagatttgtagccttgcccagcggtttccggagctcaagactctcaggagctgcgacctgtctccggcaagctggatctccgtggcgtggtacggtggacgaactagatagatgtacccgatctaccggatcccgacggggccaacgctgcgcgacctggacgcctgcttcctcacctaccactccctgtccacgcagttcgcagcaggcgccagcagcaacggccccagaccggcgacggcagccaccgcgacggcgatgatgtggctcccgacgttcgcgatggcgtcgtacaaggtgaaggcggcggcgtggacgccgggctggcgcgaccggcaggtggccgcgtccctcgcgcaggccgccgacgcctggctcaggctcctgcgcgccgaccacccggaccaccgctttttcgccgcccggcggcctcccaggagatggtgatcatttgagtgtatagagtactctctctctctggcaagtctgaaggtagttgtcctgaaaaaagaaacggctgaggtagttagggttcactagcggaaccggagtgataaagtatgttcatcctgtagtttcaatgttttttccttttttttgtatccgccatgttctcaggaaaaaaatgtatcagaaaacgtataataggtgtagagcaatattggtgtcatcctgtccattctggaccaccgcatgtgttaattttag

SEQ ID NO: 63514 - DNA, 956 bp, Zea mays
  Clone ID: MRT4577_157925C.1
ctcttccgccaccgtcttcgtcaccggtgccgtaccctcacgggactcttcttcctcccttcccatctgacccggcctccccgactataaaacccgcgctctcctctcctctccgcaaatccaacccagccccctccgatccccaccgaagaatctccgacagatcgaagccaaggctttctcgtcctcctccccaagatgcagatctttgtgaagaccctcaccggcaagaccatcacccttgaggtcgagtcatcggacaccatcgacaacgtcaaggcgaagatccaggacaaggagggcatccccccggaccagcagcgcctcatctttgctggcaagcagctcgaggatggtcgtacccttgctgactacaacatccagaaggagtccaccctccacctggtgctccgccttcgcggtggtatgcagatcttcgtgaagaccctgacgggcaagaccatcacgcttgaggtggagtcctcggacaccatcgacaacgtcaaggccaagatccaggacaaggagggcatccccccggaccagcagcgcctcatcttcgccggcaagcagcttgaggatggccgcactctggcagactacaacatccagaaggagtccaccctccacctggtgctccgccttcgcggtggtatgcagatcttcgtgaagaccctgacgggcaagaccatcacgttggaggtggagtcctcggacaccatcgacaacgtcaaggccaagatccaggacaaggagggcatccccccggaacagcagcgtctcatcttcgccggcaagcagctcgaggatggccgtacccttgctgactacaacatccagaaggagtccaccctcccactggtgctccgccttcgcggtggtatgcagatcttcgtgaagaccctgacgggcagaccatcacgctgaaggtggagtcctcggacacatcgacacgt

SEQ ID NO: 63515 - DNA, 1782 bp, Zea mays
  unsure (1)..(1782): unsure at all n locations
  Clone ID: MRT4577_157926C.1
ctccgaaaaccgacaagacgatagcaaatcgaaggaggacacggctgctggtggccgcattcggtcgggggggggggggggggggggggnnnnancncnannagccatggcctgcctatatgacctctgcacaaaggatcaccctgcaccgcctactggtcgctctacaaccctttgacgtcccaaggataattcccagctgctagacttttagcttgacttttgatcgacgaagcgagaatcacgcactatcactagctctcgcgtttatgttgattcttgcaatagttcaatataaaccggagaaaacttcaagagcaggcctggaaaataccacggcaggcgtccccacgccacggctgagtacggaggaagaatccctctagacttctctgcaacctgcgcgaggccgaaagagcagcaacggtgcggaggcagggaagcaaagcaatcccccacctatatacgcgccccgcccagtaggagagtaggagctgcaaggagtccggtctccgaaaaccgacaagacgatagcaaatcgaaggaggacacggctgctggtggccgcattcggtcgggggaggagcacgaggagccatggcctgcctgcacgaccacagctgcgaggatcacaactgcgccgccgactggtcgctctacaaccacatcgacgtccccaaggtggtggctctcaacgaatcggtgcccgggagcgtcaagtccgtcttcaagccctgggagcagcgccttgacacctcggggggttttctggagagtaatgagggtgaccctgagctacttattttcatcccgttcacatcagatgttaagatcaagagcatttctgttgttggtggtgctgatggaacaagcccgtcaagaatgagagcgtttatcaatagagaaggtattgacttttccgatgctcaaaacatgcagccagtgcaggaatgggaattagcagagaacctgcaaggagctcttgagtaccaaacaagatattcaaggttccaaggtgtggctaacctaactctgcatttctctgacaactttggtggtgatacaactaaaatttattacattggactacgtggtgaagccactcagaacaaaagggatgtagttgcaacaattgtatatgaagtcatgcccaatccttccgatcacaaaacaaaatctgagactggaggaggtttctcgcatgtcgagtagacatcatacaagcagagctagagaagcggaagctgggtactgcgttgcctgaaagcaaatttgaacctcgcttcgtcgaccaataagataaatagataaatcccagctgctagacttttagcttgacttttgagcacataactctgtacccgtggacgctgtgactggtttgctaatgctctatcatcagagttggtctcttgtgttaaaaaaaaaaaaaaaaaaaaaaaaaaaaaaaaaaaatgcagaactagataagcggatgcttagggctgtggatcctgggagccaatgactttctttgcaaggggcaccagtgatgcaaatggaggtaactgtctcgtgtcctgggaagctgtccagcggcctctcaagtatggtggtctgggtattctcaacctggagatgtttggatgggccctacgtgccatgtggttttggttacaaaagactgacgcgtaaaggccatgggctggtctacctatccgagtgcacctgtatgcaaaagccctcgtttgatgtggctattacctcaatggtaggcagttggtgaatctgtgaagttctggt

SEQ ID NO: 63516 - DNA, 442 bp, Zea mays
  Clone ID: MRT4577_157927C.1
gggaccggggagctggtgccaggagcggctcctcttcgagttcctcgagtccgagcctccctaccagcgcgagcctctggctgacaaggcatgtcatgtcttctgacatagactcacacacacgcggacacaccaggctcggccgtcctgcttgtctgaatgtcttaatctgatgagtccccggtgcagatttgtagccttgcccagcggtttccggagctcaagactctcaggagctgcgacctgtctccggcaagctggatctccgtggcgtggtacccgatctaccggatcccgacggggccaacgctgcgcgacctggacgcctgctttcttacctaccactccctgttcacgcagttcgcagcaggcgccagcagcaactgccccagaccggcgacggcagccaccgcgactgctattatttggttcccgacgttcg

SEQ ID NO: 63517 - DNA, 625 bp, Zea mays
  unsure (1)..(625): unsure at all n locations
  Clone ID: MRT4577_157928C.1
aagcacatgattattactcgaggacaccatggagaggcctccatacgataatgctactatacgatcagtgtaccatgtaaggcattacgatgttctcaagctaatgcatgtgaaggagcctctagatatattcatgtcacatgattggcctcttggcattactgaatatggaaaccgggagaggctccttcgagagaaaccgttcttcaaagaagaggtcaacgagagaacattaggcagtgaatctgcagcaaaattactgaacaaattaaaaccaccgtactggttttcagctcatcttcattgtagatttccagctatcattcaacatggcgaggatggacctacgactaagtttcttgctcttgataagtgccttcccgggcggaattttttgcaggtaatagacattccatccaatccgggaccatatgaaattcagtatgatgaagaatggcttgcaataacacggagattcaatagtgctttccccttaactcggatgccatgtacaattcggaatgaagaacttgatattgaagatgaccggcagtgggttaggagcaagttgaatgctagaggngctaagacatttgattttgcccagactgctccaccttatgat

SEQ ID NO: 63518 - DNA, 994 bp, Zea mays
  Clone ID: MRT4577_157929C.1
ggtatctccgcggcgggtcgctctcttctcctttgcctttccccgaaattgcgtggtagagacctcgcatcgctccccacccgtcgtcacccgtgccgtagcctcacgggactcttttccctttaaatccccatcccctcccgtctcctccaccactcatccaatcctccctgccaagcgagccccagaaagtttccgatcgaatcgaagccaaggctttctcgtcctccgagatgcagatctttgtgaagaccctcaccggcaagaccatcacccttgaggtcgagtcctctgacacgatcgacaacgtcaaggcgaagatccaggacaaggagggcatccctccggaccagcagcgcctcatctttgctggcaagcagcttgaggacggtcgcaccctcgctgactacaacatccagaaggagtccaccctccacctggtgctccgcctgcgtggtggaatgcagatcttcgtcaagaccctcaccggcaagaccatcacgctcgaggttgagtcttcggacaccatagacaacgtcaaggcgaagatccaggacaaggagggcatccccccggaccagcagcgcctcatctttgctgggaagcagcttgaggacggccgcacccttgctgactacaacatccagaaggagtccaccctccacttggtgctccgcctgcgtggtgggatgcagatcttcgtcaagaccctcaccggcaagaccatcacgctcgaggtcgagtcttcggacaccatcgacaacgtgaaggcgaagatccaggacaaggagggcatccccccggaccagcagcgcctcatctttgccggcaagcagcttgaggacggccgcaccctcgctgactacaacatccagaaggagtccaccctccacctggtgctccgcctgcgtggtgggatgcagatcttcgtcaagaccctcaccggcaagaccatcacgcttgaggttgagtcttcggacaccatcgacaccgt

SEQ ID NO: 63519 - DNA, 184 bp, Zea mays
  Clone ID: MRT4577_15792C.1
aaaaagaactgttgacacatcttgctctcaacattgcacggcagaatgtccatcccgcaaaataatctaatattggccaattggtatggccctaaatttcaaccacacagagataggacaatcattaaccgaaccctaactgctttacatgacacgaaaaaaaacaagaattcacgccaaacag

SEQ ID NO: 63520 - DNA, 925 bp, Zea mays
  Clone ID: MRT4577_157930C.1
aacacaagagaccaactctgatgatagagcattagcaaaccagtcacagcgtccacgggtacagagttatgtgctcaaaagtcaagctaaaagtctagcagctgggaattatctatttatcttattgatcgacgaagcgaggttcaaatttgctttcaggcaacgcagtacccagcttccgcttctctagctctgctgtggatccatacccaacttgtatgatgtctactccacatgcgagaaacctcctccagtctcagattttgttttgtgatcagaaggattgggcatgacttcatatacaattgttgcaactacatcccttttgttctgagtggcttcaccacgtagtccaatgtaataaattttagttgtatcaccaccaaagttgtcagagaaatgcagagttaggttagccacaccttggaaccttgaatatcttgtttggtactcaagagctccttgcaggttctctgctaattcccattcctgcactggctgcatgttttgagcatctgaaaagtcaataccttctctattgataaacgctctcattcttgacgggcttgttccatcagcaccaccaacaacagaaatgctcttgatcttaacatctgatgtgaacgggatgaaaataagtagctcagggtcaccctcattactctccagaaaaccccccgaggtgtcaaggcgctgctcccagggcttgaagacggacttgacgctcccgggcaccgattcgttgagagccaccaccttggggacgtcgatgtggttgtagagcgaccagtcggcggcgcagttgtgatcctcgcagctgtggtcgtgcaggcaggccatggctcctcgtgctcctcccccgaccgaatgcggccaccagcagccgtgtcctccttcgatttgctatcgtcttgtcggttttcgg

SEQ ID NO: 63521 - DNA, 409 bp, Zea mays
  Clone ID: MRT4577_157932C.1
cccacgcgtccgctggggggccgatccacacgagggcgatcctcgcgctcgccgccgccgtgggtggacgacgaggacgacttgtccttcatggtggctttcacggcagccaactcggtttggaaaaactgcatcagctccatgaggtccttgatggtgggctcagccatggtgatggagtggtcggtggaggcggtgggcgtggaaggggatggtggagggcaagggcgggtgggtgaggatcgacgtgacgctgataccaggttgtcaagcgcctcgacgcccaacgtcgctgcaccgcggctacgcagttcgtagtcgcgctctagaccttcaccgtgagggattcctcaccggtggcttgagagaggcaagggagaagagcagttttggataattgatctttctt

SEQ ID NO: 63522 - DNA, 429 bp, Zea mays
  Clone ID: MRT4577_157933C.1
tttctctttctttttttttttttttttttttacaaaaagggttggggcaacaatcaatcaatgcaaaaggcaaagacaaacaaaaaatcaaatacaacaacacaaccaacactaaaaccaatgcattgacttcaacaaaaaaaacccaactgacaaaccaaaaaaaaacctaatgaccaaaaaagcaaaccgcaaccaaaaacaccacccatcaaaacaacaaccagtaaagggacaactaatccatcatccaaaacaaattccaaaaaaaaccctccctaaacacgaaccactaaatacatacatatgaacaggcaacaacaccaccaaatcctaaacgtaaagcaccgaaaaaacaaacagttccacatccccaacatacttatccataaaaccaccgccctaaccctacttctttccaacaaaaac

SEQ ID NO: 63523 - DNA, 1102 bp, Zea mays
  Clone ID: MRT4577_157934C.1
ccggccgggctccactgcgccggctccctccacctcgctcatgtccgctcaccggggcgggctcagcatcctttcgaagaagtaacacttctccgtgaggcctgagcccctcgccgcggtgagccaagccggcgcacgtcgccccggggctcacgctcaccaccgagccccaaccaattaataatatatatatatagctaggatcgatcgtcagtaaaatggcaggctccgccgtcctgaggagccccctgtccgtcctcctctacatcctcgccgccgtgcccgccaccgccgcggcgacgccgaccgacgccgccatcgacgaggcgtacgcgcatctcgtcaacctcaccgctaaccaggagtactgggcggagcgcgcggaggcggcgcacgcgtacaaccgcgcggcgtaccagaccgaccaaccccatcgaccagtgctggcggtgccgccgcgactgggcccgcgaccgcaagcgcctggccaggtgcgccatgggcttcggccacaggaccaccggcgggctggccggcaagttctacgtggtgattgaccccagcgacgacgccgccgacctcgtcacccccaggaagggcacgctccggcacgccgtgacccgggcccgggcgctgtggatcaccttcgcgcgcgacatggtgatcgagctctgccaggagctcatcgtgagcagcgacaagaccatcgacgggcgcggagcgcaggtgcacatcgtgggcgcgcagatcacgctgcagaacgtgcgcaacgtgatcctccacaacctgcacgttcacgacgccgcggcgcacggcggcggcgcgatccgggactcgcagcaccactggggcgtgcgcggggagagcgacggcgacggcgtctccgtgatggggtccagcgactgggcccgcgaccgcaagcgcctggccaggtgcgccatgggcttcggccacaggaccacttcggcaaggggctggtgcagcggatgccgcgctgccgtcacggcttcttccacgtggtgaacaacgactacacgcactggctcatgtacgccatcggcggcagccggaaccccaccatcatcagtcagggcaaccggtt

SEQ ID NO: 63524 - DNA, 477 bp, Zea mays
  Clone ID: MRT4577_157935C.1
ataaagcggcggctgaataccatttatatttaattagactctgggaggaagcgtctgacaggcgagctacagatacctactccagccttttcaacctataggcctactcactttgcgccctggtacctttacatactaacacatcacgtgcattgctatgcgatggcacagaaccaaaccaccacacccgaaacaaacaaaccttaatacaggggccaagccttacaaccggaaaaaaaccaatcgttcgccatttcgatgacttcaggaaaagcttctgcgaggaacagagcggagactcccttggaccgatcagaaggctgcctccgggagcgtggatgcccatgccgactcaacaggccttgcgtgtagcaaccagctttcatgctgctacccccgctcatgctgctctagtgaacaatacgactccgctgcatggtttgaaagacttaggaggcgctacccatgatcttgagg

SEQ ID NO: 63525 - DNA, 775 bp, Zea mays
  unsure (1)..(775): unsure at all n locations
  Clone ID: MRT4577_157936C.1
tcggtgccagcgacgccgccgtcaaggacaaggcgatgcaggtcaccgtggcgttcaaccacttcggaaaggggctggtgcagcggatgccgcgctgccgccatggcttcttccacgtggtgaacaacgactacacgcactggctcatgtacgccatcggcggcagccagaaccctaccatcatcagccaggggaaccggttccgcgccgtcgacgacgggaggttcaaggaggtgaccaagagggagtacacgccgtacagcgagtacaaggactgggtgtggaagtcgcaggacgacctgttcctcaatggggccttcttcaaccagtccggcggcgagaacgagcgccggttcgacaggctcgacctcatccaggccaagggcggacagtacgccgagttgctcacgaggtacgccggcgcgctcaactgccgcgtcggcaagaagtgctaggccggccgggggtggccatgtgtgtgcatgctagattattattgctttgatttgggggatcggggcgggcgatcgatgcttcgatgcaggcgcagggagaggcgtaagaatcgaattaatgcaaaaggttgtgttgtgtataaactcttgtatttggaaaataccatctgtaaatggtcgtcaacgtactatatactgcttgcctgctagcgacanaatcgtccatgtggaaaggatgatggtcgtcaactatcccttcctgattgcatggatcggcaacaacaatggcaattccatcatgttgattagattgatttcct

SEQ ID NO: 63526 - DNA, 1117 bp, Zea mays
  Clone ID: MRT4577_157937C.1
ccggccgggccactgcgccggctccctccacctcgctcatgtccgctcaccggggcgggctcagcatcctttcgaagaagtaacacttctccgtgaggcctgagcccctcgccgcggtgagccaagccggcgcacgtcgccccggggctcacgctcaccaccgagccccaaccaattaataatatatatatatatagctaggatcgatcgtcagtaaaatggcaggctccgccgtcctgaggagccccctgtccgtcctcctctacatcctcgccgccgtgcccgccaccgccgcggcgacggcgtctccgtgatggggtccagcgatatctggatcgaccacctgtccatgagcagctgcgcggacgggctggtggacgcggtggacggctccaccgccatcaccgtctccaacggccacttcacgaggcacgaccacgttatgctgttcggggccagcgacgccgcgtccaaggacagggagatgcaggtcaccgtcgccttcaaccacttcggcaaggggctggtgcagcggatgccgcgctgccgtcacggcttcttccacgtggtgaacaacgactacacgcactggctcatgtacgccatcggcggcagccggaaccccaccatcatcagccagggcaaccgcttccgcgccgtcgacgacagcaggttcaaggaggtgaccaagcgggagtacacgcagtacagcgagtacaagaactgggtgtggaagtcgcaggacgacctgttcctcaacggcgccttcttcaaccagtccggcggccagaacgagcgcaagtacgacaggctcgacctcatccaggccaagggcggccagtacgccgagtcgctcaccaggtacgccggcgcgctcaactgccgcgtcggcaggaagtgctagtgcgtgtgcagctctaggctgcagctttcatcattggcgatcgatcgtaacaacacaagagttatatacaacacaaccttgcattgtatataactcttgtgtttggaatgccgcccgtaattaatggtcaactctaacactgcttgcctttgcctgccggccagcaacgccattgtcccttgtggttcctgaatcctgagttctttgtttatc

SEQ ID NO: 63527 - DNA, 345 bp, Zea mays
  Clone ID: MRT4577_157938C.1
ttgggcccaagctaaaactggcccatttttacatataacgggccccataaaattttttgggaaaggaaaaaccttccaacaaaagattgaccgggggggggcatgcctcatggggggaaaaataacttggggggcccccccaaggaggccccgttgggcgaacttgcctattattatgggcagatttggggattttgggccggaaaagaaattaacccatttttggagaagaaaaaaacctttgttgcaaaaagggatgtgcagggctggggccttgatttacagaccccgaaggggggaaattttttttttggcctggcccaccggaaacatgggccaccgggg

SEQ ID NO: 63528 - DNA, 370 bp, Zea mays
  Clone ID: MRT4577_157939C.1
cgcacgacctttcatacggcgcacacctttttcgacaaggtcttcgagttcagggactacaccaccgacaaggtcttggaggccaacgacagcgtattgcgtaagacgggcgagactgcagacgccacccggaacaagctgggcgagtacaacgacagctccatggagaaggcgagggagaccaaagacgcggttgcgcacaatacaagcgagaccgctgtggcaaccaaaaacaagcttggtgagtacaatgacgctgcagccggtaaggctcgtgatgacctggacaccaacggcggcaaggcgagggaggccaaagacgcgaccatgcaaaaagcccatgagacgagggcgagtacacctactccag

SEQ ID NO: 63529 - DNA, 172 bp, Zea mays
  Clone ID: MRT4577_15793C.1
catccctccactccgctcgacggagtctcctacaacaaacacccacgcatagtctccgatctccaggccagcacaacattcgcagcttctcggaactcactgtacgacgttctgcactcggaatcttcaatcttggacagcggcgcgtccccaaagagttagatcagccatg

SEQ ID NO: 63530 - DNA, 349 bp, Zea mays
  Clone ID: MRT4577_157940C.1
atcgcaagggcacgactaaaaagggtttatttaacaatagatggggagtggcaacttcaaaaccaccccaggagatacataaaaattcacagttttcattcagtaaagcttccccaaagagaagctctctctagacaccaggaattcaggcactatatataatagattacccaaagttacttggcaactaagcatcttcaacatagtgaacaacggacgacctgattcctgatcactagacaggcatacactctggaagggaccattcttataatggaagaactagatctcatccattgcatgaaacaaattaatgcccgctgaactgacatcctgaaggagggatcac

SEQ ID NO: 63531 - DNA, 1761 bp, Zea mays
  Clone ID: MRT4577_157941C.1
ccggccgggtctccactgcgccggctccctccacctcgctcatgtccgctcaccggggcgggctcagcatcctttcgaagaagtaacacttctccgtgaggcctgagcccctcgccgcggtgagccaagccggcgcacgtcgccccggggctcacgctcaccaccgagccccaaccaattaataatatatatatatatagctaggatcgatcgtcagtaaaatggcaggctccgccgtcctgaggagccccctgtccgtcctcctctacatcctcgccgccgtgcccgccaccgccgcggcgacgccgaccgacgccgccatcgacgaggcgtacgcgcatctcgtcaacctcaccgctaaccaggagtactgggcggagcgcgcggaggcggcgcacgcgtacaaccgcgcggcgtaccagaccgaccccgtggccgtcgtgcagcgcttcaacgacggcgtgcacagggcgacggcgacgcagacccgttcgcggtccctggcgcacagggcgcggggcccctgcacggcgaccaaccccatcgaccagtgctggcggtgccgccgcgactgggcccgcgaccgcaagcgcctggccaggtgcgccatgggcttcggccacaggaccaccggcgggctggccggcaagttctacgtggtgattgaccccagcgacgacgccgccgacctcgtcacccccaggaagggcacgctccggcacgccgtgacccgggcccgggcgctgtggatcaccttcgcgcgcgacatggtgatcgagctctgccaggagctcatcgtgagcagcgacaagaccatcgacgggcgcggagcgcaggtgcacatcgtgggcgcgcagatcacgctgcagaacgtgcgcaacgtgatcctccacaacctgcacgtccacgacgccgcggcgcacggcggcggcgcgatccgggactcgcagcaccactggggcgtgcgcggggagagcgacggcgacggcgtctccgtgatggggtccagcgatatctggatcgaccacctgtccatgagcagctgcgcggacgggctggtggacgcggtggacggctccaccgccatcaccgtctccaacggccacttcacgaggcacgaccacgttatgctgttcggggccagcgacgccgcgtccaaggacagggagatgcaggtcaccgtcgccttcaaccacttcggcaaggggctggtgcagcggatgccgcgctgccgtcacggcttcttccacgtggtgaacaacgactacacgcactggctcatgtacgccatcggcggcagccggaaccccaccatcatcagccagggcaaccgcttccgcgccgtcgacgacagcaggttcaaggaggtgaccaagcgggagtacacgcagtacagcgagtacaagaactgggtgtggaagtcgcaggacgacctgttcctcaacggcgccttcttcaaccagtccggcggccagaacgagcgcaagtacgacaggctcgacctcatccaggccaagggcggccagtacgccgagtcgctcaccaggtacgccggcgcgctcaactgccgcgtcggcaggaagtgctagtgcgtgtgcagctctaggctgcagctttcatcattggcgatcgatcgtaacaatgcaaggttgtgttgtatataactcttgtgtttggaatgccgcccgtaattaatggtcaactctaacactgcttgcctttgcctgccggccagagaaaaaaaaaaaaaaaaaagcggcc

SEQ ID NO: 63532 - DNA, 200 bp, Zea mays
  Clone ID: MRT4577_157942C.1
ccggccgggatcgtcaacccggccacggattgtcgttgccgtctgtttgctcgtcgtcgtctgctgccgactgcgatggattccgtcgatcgcagtaagatcgacgcctatcgctgtcgccaggacaaaggagccagaagatgcgaataatgtagcttcactcaccacgcccatgagggcgaaacgttcccaccggctgc

SEQ ID NO: 63533 - DNA, 208 bp, Zea mays
  Clone ID: MRT4577_157943C.1
agctttactacgtctgatgggacgtcatcatggtcgactgcccgcgcgggtacacggctccatcgccgggcaagatgtgggcgatattcacggcgggggtgctggtgcggacacaggccggagagggcgtgatgacggacttcctggtgcacgactactagcgggaggtggagcggaagctctccagggagttcctgtgctaggagaa

SEQ ID NO: 63534 - DNA, 887 bp, Zea mays
  unsure (1)..(887): unsure at all n locations
  Clone ID: MRT4577_157944C.1
ccggccgggccgggatgcccgcggccgccatggcaaccgagaccgaatccttctattccgcccagtcatcgccagagccggaggtggctcccatggcgcctaacgtggaaccagcatcccagccggcgaaaccagcagcacctcagccagtagaaccagcatccctgccggcggaaccagcagcccggccggcggatagattggaaatcctgattgagcgagggctcggccaacgtagagagggcgagagcagcatgatgaccatcttccgtgtccccgcccatgtccgggacgccagcaaggagctgtacgagccacggctggtgtcgatcggcccctactaccgcgaccgggcggcgctacgcacgatggagcagcacaagtggaggtacatgcgcgagctgatgaggcggccgcactcgctacccccgctggacagttacgtcagagcagtccgcaacgtcgagcaggaggcgcggtgctgctacagtgagaggaccgacatcttcggctccaccgcccagagcgaaccatctggcggcggggagatcgaagaagcgcactcccccggcttcgcggagatgctcatgcttgacggctgtttcatcctcgagttcttcctgaagtggcataaatctgagaaggacaagctctgcgacgtcgcctggggacttactctgctgcactccgacctgctgctgctggagaacagatccccttcttcgtcctagaggcgctcttgcacgtggtatatcctaacggcgacgaggttgcatctcttcatgctgatcattccctatttnaagttctcctactacaaactgtcgacgcccgagggactgnnanccgatcgagatccagnncgcacacctgctgcatctcttcta

SEQ ID NO: 63535 - DNA, 1114 bp, Zea mays
  Clone ID: MRT4577_157945C.1
actcctaagggcgaatgggaccctcgaggccggccgggctttatagtaaagggagaaaatgagtaatccccctttaccctcaaaagaagggaagaaaaactaggctgttcagggcacatggataaaattcgcttctcttctctttcttcgttgcagcattgcatcctacaaaggtagcatcgtaaattctattcaaggatgctaatgtgctatcacctttaattcatcctctgaccaaaggctacatggtcctctaccgcaactatttctgcaaacatcgagctgatctcggagcccggagctgcaatctgacaacagtgcgtgtcgcaacaggagatcgggtcaccggaatcgatagaaaggacgattagactatggtgccccgaattaccaatcgagttacacgccacagatcgcggcttgggatttgggacgtccccaaatcagaaccccggacttagctgcataggcagagagaaaaggagagtgatagtggggcctggcggaggagaggaggattacgcaatagtcacgggagcggacgacggggaagaggtcgagcatgcgccagaactccttctcgtccatggtaggcacaggcgcgacgtctcctctggctgtctgctgctcgcctgcgacgggtgaacgggtcagggacagcgttcagggctcgggagcacgccgatgtggatgtggactcgtttgagagaagatggattggatgagttcacgaacgcttagcttcgattctcaccacatgggccggatggctcggagacaagcgggcccagtacatttaaggccgagcagaatactagtgggctgaccacaagtgcttctactaacaccagtgggatatacacgtgcgcatgctattacgcggtcttactaatcatgtgctcgtggtaagggatgtaactggttaaataacgtagtcgtcccagatccccgattcagacttcgaaccctcccgacaacagtaggggcgcgagaagttgtagaaccccgcttccttcccagtaatccaacacacagaagaacaagagacacagtgaatgaaacctctttttgtatatctttattatgatgggtatagatacatatggttgaaatg

SEQ ID NO: 63536 - DNA, 329 bp, Zea mays
  Clone ID: MRT4577_157946C.1
acaagtgcggggcacatcgccgtttgcagtctgcgtgttctctcgaccgacagttttacacacatgtcggtggctcaagctcagctcaaccatatcgcgccggccaggtccatcctagcacgcccaaaaattgaccagacatgggggagaagaagaggatgcattacaagtagtagataatcacgcttggatgtgatgtctctcatcttggaaagccagtggcaatgcctgcttcggcatttgatgctgtgcgtggcttgaggacagcacaccccgaccttttcaaaagctgatgccggcatctgccctggtcgtgctctgctgtctac

SEQ ID NO: 63537 - DNA, 275 bp, Zea mays
  Clone ID: MRT4577_157947C.1
cgtccttttttttttttttatgtacttatgtactcatgacactcgttttggttttttgttttttttaaaacaggcttttcacctggtaggggttgttaaaagacaaactggaaccgtatttgggacagggtgggcctgttcccccgttgttttaaaaaaaagattatggggtcctttgtcacaccccttattttatggccagcccttttgggtaagacaagaccgcaggattccaccttccatttttagcaaaaaaatttccccccccttgggaa

SEQ ID NO: 63538 - DNA, 345 bp, Zea mays
  Clone ID: MRT4577_157948C.1
aagagacaaacggcttgggacatagagacatgttcagacattaaggtgattaaaactacctccagtagttttatatcaccatatctatattcaaacctacagcaacattgcagtctacaataagaaaaaacaaactcaacacgatctaagagacaaacggcttggtacataaagacatgttcagaagttaaggtgattaaaactacctccagtagttttatatcaccatatctatattcaaacctacagcaacattgcagtctacaataagaaaaaacaaactcaacacgatctaagagacaaacggcttttgagttcgataccctatctctatcctaaaaactg

SEQ ID NO: 63539 - DNA, 268 bp, Zea mays
  Clone ID: MRT4577_157949C.1
gtgagcttgtcgtcctcatcatcgctcgtacgtcgctcgagattggcagtctagaaatgccacaggatgacatatgggttgtcacagctatcctatctgggctcattgaataatgtgcgaagatataagtgacatctctgttgggctgctatcttcgcctccagcatgaatgaggctgtctcattacgatgaggcgatcttggactttctgtttcacatatcttcatgcctgcgcctggatgctgtaccatgcttggacctatgaata

SEQ ID NO: 63540 - DNA, 1119 bp, Zea mays
  Clone ID: MRT4577_15794C.1
gaacgacaatctgttgactgggttcattcctcctgatcttggaaaattacagaattgtttgaattgaaccttgcaaacaacaaccttataggacctatccctgagaatttaagttcatgtgcaaatctcattagtttcaatgcttatggcaataaattgaatggaaccattccacgttcatttcacaagcttgagagtctgacttatctgaatctgtcatcaaatcatctcagtggagcacttccaattgaggttgcaagaatgagaaatttggacactctggacttatcctgtaacatgatcactggttcaattccctcggctattgggaaactagagcatcttttgaggctcaacttaagcaaaaataatgtggctggacacattcctgctgaatttgggaacttaaggagcatcatggagattgatttgtcttacaaccacctcagtggcctgattcctcaagaggttgggatgctacaaaatttgatactgttaaaattagaaagcaataatattactggagatgtctcttcacttatttactgcttgagtctcaatatcttaaatgtatcatacaaccatctttatggtactgtacctacagacaacaacttctcacgattttcacccgacagcttcttgggtaaccctggactttgtggctattggcttcactctgcttcatgcacacaattatccaatgcagagcaaatgaagagatcctctagcgcaaaggcctcaatgtttgcagctattggtgttggtgccgtattgcttgttattatgctcgttatcctagtagttatttgctggccacataactctccagtgctcaaagatgtctctgtaaacaaaccagataaccttgcttcagcatcaaacaacattcatcccaagcttgtgatcctccacatgaacatggccctctatgtatatgatgatataatgaggatgactgaaaatttgagcgaaaaatacattattggttatggagcctcaagtacagtctacagatgcgacctgaagaactgcagccaattgcgattaaaaagctgtatgctactaccctagagcttgaaggaattcgagactgaactgagactgttgaagcatcaa

SEQ ID NO: 63541 - DNA, 405 bp, Zea mays
  Clone ID: MRT4577_157950C.1
cttaagaagtaaaggtgaccccttccgccgatcctaaagcggataggaatgaataaggctgcctggtaatgggtgatagactcggtcctgtcttgattcatcatgaccattttaaacgcaagcagtattaatgaatcttaactctccaaagtccatacagatgaatagtgagaatagacgtaaaacactacaggggccacgtaaaatgaccgcaggagatcagcatgcgtacccgacaaactcagcacagtaaaccccttcctatatgaggccgaaccaggagacaacatatgcaacatactggtcaaaggccgctatgattagctataatttttccacgggacgttgacggatatgcatttcgagtaaatgtaaactggtagcaaattagttgactcatatacg

SEQ ID NO: 63542 - DNA, 314 bp, Zea mays
  Clone ID: MRT4577_157951C.1
aaaccaaacacttaccgggccatggtttaagaaaagcccggagacaattgaggttttggacctttcttccaacaattcacattaaagggttggggtttcggttcccgaaattctggggggccaatggcgcttttcccggcgggccctgggttttttattttatggggttaaatgggtttgagcccggcccagggttccatggggacttttcttggttttgaacaagggcacccgttgctttttaggggaccaagggaatttttcattttggtggacaagccttttaaccaggaacaagttttaccagggttggt

SEQ ID NO: 63543 - DNA, 537 bp, Zea mays
  Clone ID: MRT4577_157952C.1
aggaatggcaaagagggtcgtctcgtccgagttgatggaggcatgtagaacaaagaaggtggctgactggcccccgagggacccatcctctgactgaataactgggggttctcccgtagaggagctaccaggaacatatgctccaagcgccgcaagggcatgatatcgaagcgcgagcatgccagattggctgcctcctctatcgacagcatcgtgaacggtggtgacgccgtcatggaaccgggtgttgctgtatgcaacacggaaccagctgttgcccaagtacaattgcaaacgatgagcgggcagcagcccgctgatgtgtgccggacccagcgagggggctgagcagatatccaaagggggtgaatgaattgcaaaacggtgtgagggcctgtcagaatatggttggacttacatgattcaactgccgctgtggtaactatgtactgagtacttaccctctactccgacaatgatgactgcaagtaagactacttgactgctgtcaggaacaacattgccaaggttaatccg

SEQ ID NO: 63544 - DNA, 1156 bp, Zea mays
  unsure (1)..(1156): unsure at all n locations
  Clone ID: MRT4577_157953C.1
cctgccgggaaccctagctatttctttcattctctccagccgaaacatctggccggtggcgtttctctttgccgcacagccgccctatggcatgctgttgtccttcgctccctcgtttgtttttggttctagcatctacagtcgaccatcttttctcggttggtactttagcatgatctttgccttggtgttgcacctactctctgtttctattttcttccttcttcaacaattttctaccaagtgttctctgtacacgtcgcttgcaatggaggtgcgctgcatacatgatgctccttttctctcttttttttcttttttcttttgttggtactttacgcatgaccatctttgccttggtggtgcacctactgttgggatcataactagtggcattgtcatcatcctggtcatgaaattcgtcaccagatggatcgaggtgacacgagaatggcagatggagcgcgcgcggctgcaggccttggagatgcaggcggcggcggcggcggctggcgcgccaatgatccagcagccggcggcgaatggctcggcggcgccgccttacgctattgctgccaaccacgtcgtggagatgggcgccgtgaaccggttcctggacgacatactgcgggagaagcccgcgcggttcacgccggagaacctccgcgagttcactcgcaactacgcggagcggctcgggtccggcggattcggcgtggtgtaccgcggcgcgttcccgaacggggtgcaggtggccgtcaagatcctcaacagcacgctggaccggcgcgccgaggagcagttcatggcggaggtgggcaccgcggggcgcacctaccacatcaacctcgtccgcctctacggcttctgcttcgacgccacgaccaaggcgctggtgtacgaatacctcgagaagggctcgctggaccgcgtgctcttcgacctcgagggcgacgcgctcggcttcgacgcgctgtccggcatcgtggccggcacggcgcgcggggtgcggtacctgcacgaggagtgccagcaccggatcatccactacgacatcaagcccggcacgtgctgctcaccgcggactacccccccaagggtggncgacttcggnctcgncaggctctgcaaccgcgacagcacccacctcacgatg

SEQ ID NO: 63545 - DNA, 980 bp, Zea mays
  Clone ID: MRT4577_157954C.1
ctcaatgaatttcatgctgcaaaccaaagctatactggttggttagtgtttcaggttttctgtacattttttctagctttcgatcagatgtacccattctattaaggacaaacactgcaatcatgctaaacttcttgcctgagaatttgaaaatgatttgtttgcttctccttttgattcggtgctactttttgtcatctaggtgataaaaagctgttgactccgcaacctcggctaaggacaggatttttctcagttatggactctcagatgatacctgttgggtgcattcctgaagcatgcacttctgttggtgcagctaaatatgggaggccaattggtttagatgaaagccttaaggtggatttgattgtgattgggtcagtggcagttgatccaagttcaggagcacggttagggaagggagagggatttgcagagctggaatatggaatgcttcgctatatgggagctatagatgattcaaccatgatagtaactactgtgcatgacaagcagttagttgatgacattccagtggagaagctgctagttcatgatgtgccagttgacattatctgcacccctactcaggtcatcttcacgaagactacgatcccaaagccacaagggatttactgggaaaagttatctccagaaaaattgggccaaatccgaattctaagagagctgaagcaacgtatagagcaagagacaggaactatgcttccttgtggaccttcggagaagctaccgccaacagctcagagaaagcagaggtggcagcggcgacgatgagacttttgtatgcttctcttaactgtttcttttactcaataaagagctatgtgcacccttttctttcttagggcaaatcaaggtcacaattcaaaactgctagcattagactatagaaacattaccagatgtaatagaaatgccaaaaaaaactttgtttgcacttaagaggcaatgaggat

SEQ ID NO: 63546 - DNA, 472 bp, Zea mays
  Clone ID: MRT4577_157955C.1
cgcgggtcgacccaagcctctatatcaagtctctcaatttcgttattccagcctcatgctgaatgcccgatcgcctacgcatcccttgcttctgccggaggtactgcaccacctcggttgctatcttccccgtcctacgcttctccttagtctaggagtttgccgcacatggcaccgtgccttgcagccatatctgtggtcgactctgcagctcgagaatcagccttgcaacttcacacctcgccaggcgactcccacggtgcttctcaggaataagcaccatatcaggcacctccatgagatcggctccaactctctgctaaagttcctagccttctcaaccgcaagcttgccgatgcaactgactagcatccatgtgtccatgctcagccctgaaatcctgattgtcgctcagcagagtgtggagacccttgttacgttcagctggcgcgccaaaccggcaccaaaagga

SEQ ID NO: 63547 - DNA, 1093 bp, Zea mays
  unsure (1)..(1093): unsure at all n locations
  Clone ID: MRT4577_157956C.1
gccgtccgctgacacacctcagaagcaagttcggttcttaacactgtcaggtgataaaaagctgttgactccgcaacctcggctaaggacaggatttttctcagttatggactctcaaatgatacctgttgggtgcatccctgaagcatgcacttctgttggtgcagctaaatatgggaggccaattggtttagatgagagccttaaggtggatttgattgtgattgggtcagtggcagttgatccaagttcaggagcacggttagggaagggagagggatttgcagagcttgaatatggaatgcttcgctatatgggagctatagatgattcaaccatgatagtaactactggttgccatgggctgagccagcccacaggtgatgacagcagcaacggcggcttctgctgccatgcctgccttgtgccttgtggacacgccaggaggcaccgtagggctcttggaaccggacaaccaacacacggcgcgcccaccgactactgtgcatgacaagcagttagttgatgacacccaggccgtcgggtcgcgacatacgtgcccgaacacacaacaacaggttttagtgcatgacaagcagttagttgatgacattccagtggagaagctgctagttcatgatgtgccagttgacattatctgcacccctactcaggtcatcttcacgaagactacaatcccaaagccacaagggatttactgggaaaagttatctccagaaaaattgggccaaatccgaattctaagagagcttaagcaacgtatagagcaagagacaggaactatgcttccttgtggaccttcggagaagctaccgccaacagcacagagaaagcagaggtggcggcggcgacgacgagacttttgtatgcttctcttaactgtttcttttactcaataaagagctatgtgcacccttttctttcttagggcaaatcaaggtcacggttcaaaactgctagcattagactatagaaacattttgataccagatgtaatagaaatgccaaaaaaactttgtttgcacttaagaggcaatgaggatagatagtatagctttttccacacccaana

SEQ ID NO: 63548 - DNA, 270 bp, Zea mays
  Clone ID: MRT4577_157957C.1
agataacatttatgaatgtcaccgcctcgactcgggataccgccgacgctccatctgcctttgctcccccacccgcaggcagcaagcgacagcgacggagagggatggccaaggacaggccgctggcgaagcagaagcaggagcagtaatcaaacggaagaggcggacacgcgctgtcatcacaagctcgacagagacctcgacccggaggcctccttggacaaggaccaactgctggacgagatgcactggatacgccaggaggtgggg

SEQ ID NO: 63549 - DNA, 1782 bp, Zea mays
  Clone ID: MRT4577_157958C.1
ggccgggaaagtattcggctcgaggtccaaaacagtggtggagctcaatcaatccaaagtgcgggcgaaaccgaaagcgagaggggggagactgggagagagagggacgagcggcgcggtctgctggtccgtcggcggcgaccgcgacgcctcgctgcagcggccgacgcatccgccgcgggcgtggagctcgccctctcctggctcgcaggagctcgcgagttgtttcgggtgcgagtgctagctgtcgaaggcaacgaggaaaagactgccatggggatttcagctaagtggatcaaatcacttgttgggataaaaaagcacgaaaaagggcgaaatgctgaatgcagcgatgcgaggagctctgctgtccagttgctacgcaaacgggaacattctgttgatacagaaagtgttcctgcggctgaagaactcagagtacaggccgaaccattggcaggtgacacaaatacagaaacaatatcaaattctgcctcctcaccgagcacatctcttcaagcttctcagaccgaacttggtacaaaggagcatcaggctgctgtagttatccaatctgcctttcgagcattcttggctaggcgggccttgcgggcgttaaaaggactagttagactccaggcacttgttcggggtcatgctgtaagaaaacaagcagcagaaacacttcagtgcatgcaagcgctagtaagagctcaagctcgtgtcagagcgagacgagtccgtgtttctttggaaagccaagggactcaaaagaaacctcctgaagaaaatgttcatgaggatcatgttcgagatattgaggaagactggtgtggcagtataggctcggtagaagaaatgaaagctaagacattaaaaaggcaagaggctgctgctaagcgggaaagggcgatggcatatgctttaacccatcagtggcaggcaagttcaaggaaacagaaagcagcaagcctccaaggccaaggactcgccggggacgagaaccagtggggacgaaactggctcgagaggtggatggccgcgcgcccgtgggagaacaggttacttgacagcaacgccagggacagtgtcactgccggcgacgacgacgacaaaccagcggaggaaggcaaggcaaaagctccggacctgagcaaaccaaaaggaaaagctcccgttttggcctctcagtctaacgggtcgcggcaggagaaagctgcagaccacgagaagtcgcattctgatgtcagcggctgtggctcttccgtcggggcggtctgcggaccgtgcagccaacggtttctctagagtcgtccaaggtggaagtgaaggtgaaggcaccgcaggaggtcgcagatgaagcgagctctggaccgtcgaatccggcttcccggtccgcaagcaatccgaaagaaaggccggcgcgaaccgatgcgccagcgaggaagcggttatcgcttcctaacaacgcaacagcagccagtcggggagtagggaagcgccctaccaacagtagtcggagtcggacgaacgtggcctcgagaccgaagaatggcagaggcgcctccagcccaggcctcgagtagtgtcgtagggtggttgtgttgtgctggtgtacattgtttacgttgctgtgtattctaccattgtgttatgtattttttgtgcgtgtgtgtgtctgtgttctgttcaaattgcgtcctttcgaactgctcagtctgtggacgtttggaaaagcatgtttctggattctgtgattcggtattcaaagcggcccccccc

SEQ ID NO: 63550 - DNA, 2170 bp, Zea mays
  Clone ID: MRT4577_157959C.1
caggccaataaagtaaaccgatgagaaaacagcaacggacgcgtggggccgcggtccattccgtctgaagaccctcctcctacctaattatttttctctgtcgtgacgtgaaatgccagcgcgcagcttcttgatccgttccggctgatcccgtggaccggacttggggttgggggaggccctctgtctccatggatgaggcagcagggctgctgttgcaagaagagggtggaggtggggaccaagaagctctcctccttccacttccacaggatgttggcctttacacaggtgatggatctgttgatgtcaaagggcgccctgcgttaaagggcactacaggcaattggaaagcatgctttttcatcctagggaatgaatgttgtgaaaggctggcctactacggaattgcaaaaaacctagttacttatttgaaagtgaagcttcatctaggcaacctcgaggctgcaagacatgttaccacttggcaagggacatgctatctcactccccttgttggaggcatcttagcagactctcgttgggggaaatactggactattgctgttttctcatcggtttactttattggcctggctattttaacgctttctgcatcagtcccagcgttgcaaccaccttcatgtttaaggacagtttgtccagaagcaagcttacttcagtatggcatattttttggtggcctctatatgattgccctagggactggaggtatcaaaccttgtgtctcctcctttggagctgatcaatttgatgacactgaccaagcagagagagctaagaagggttcattcttcaattggttctacttctgtataaatataggttcattcatatcaggcactatgatagtgtggatacaagataacactggttggggaataggctttgcgattcctactatattcatggcattagctatttcattcttcttctcagcttcaaataagtacagattccaaaaacctggtgggagtccactcacaagagtgtgccaggtggttatagcagcatttcgtaagtggcacattgaagtgccacatgatacatctctcctatatgaagttgatggccaaacttcagcaattgaaggaagccggaagctggagcacacaaatgagctcgagttccttgatagagctgctgttatctcatctgctgatctgaagagtgaatcctttaccgacccatggaagctttgcacagttacccaggtggaagaattgaagatcctaataagaatgtttcccatttgggctactactatcatattcagtgctgtttatgcccaaaactcttccatgttcatagagcagggcatggttcttgacaagcgcattgggtctttcaacattcctcctgcatctctctccacttttgatgtaatcagcgtcatcatgtgggtcccactctatgaccgcatcctggtgccactagctagaaaattcactggaagggagaagggtttttctgagctacagcggatgggaattggattagtcctgtccattctcgcgatggtatctgcagctctagttgagttgaagcgtttagagattgccaggtctgaaggtctcattcatgagaaggctgctgttccaatgagcattctttggcaaataccacaatatttcttggtgggcgctgctgaggtgtttacttgtattggtcaagttgagttcttttacgatcaggccccagatgccatgaggagtttatgtagtgcacttgcacttattacagtctcactgggaaactatataagctccatcatactgacattggtgtcgtacattacaactcagggaggagatcctggatggatccctgacaatctgaatgaaggccatctcgaccggttcttttggttaattgcagggataagctttgtaaatttgatagtttatatgggttgtgctgtcagatacagatataagaaagcctcttgattatatttatgtgaactcttgtaatgtgatttcccattcccgatatcatacttatcaaatacaatgcactgtacagatttctggaatcctgcgattcatctgcctcgagcactagttcctcgtgccccccctcccgctataaaaaggtcactcatggattcgtgcatcaggcgggccgagggggcgctttttataatatc

SEQ ID NO: 63551 - DNA, 477 bp, Zea mays
  Clone ID: MRT4577_15795C.1
gtaatattcatacacatgctgtcagtatggcacgcttgaagtcaaaggacgacaataagagacattcatatacagtataagatagaaatagtggcgagacgagttctaggagcgttacccaagactacacattatccacagtggctattgcttagagtagatcatcgtctttgatagtacgggaacaccacaaacttcaatcatagatcggccggagtgtcgtacatacacgcgatgcttagtacaagatacgcctagcaccttgactcaaacaagaatgcacgtaagaagtacatgccgatcgtgccagctgggctagtaatggaaaaggcacgacaaccatcgccctttcgaacaatctgaacagcctgattaacgaaacggtcccgctgtacacgggggtattaatcctggtggctgtctactgttatcgcacacctgtgaccgtctacactctaccaccatccctagccaaca

SEQ ID NO: 63552 - DNA, 539 bp, Zea mays
  Clone ID: MRT4577_157960C.1
gacgcacattggagcgcgcatgcgacggttgatggactggaaggtatgcggttactacgccaactacgtgggaaaccgggaagggttgcgggccttggcgcaagttccatacggggcgtgaagctgggcggtggaagtgcgggcgaaccatgcatccgtacagctctacaacgcgaactggctgaaccacacccgagaggaagaggcggtagtgtgtactaccagaactccggattaacactggacaccatgacgtacacggatgtaacgaaccactcccgagtaaacgtgttacaccactgttgtcttgacagagagtacaaggcatgcacatgaccattcaaaggtctcgcttgctagaaggtgctgtgtgttggtttgatgttcaatgttggtctttggtgtttgatacgtacctacgcaactactgacggttatgaacaggctgctcctgcagcaacagcatcaggggattttcttaaagcactaaaactatgtattaaataagcatggaacagtaactgctcaaaactgctagc

SEQ ID NO: 63553 - DNA, 290 bp, Zea mays
  Clone ID: MRT4577_157961C.1
cctgcgcgcgccctttctgttcgtccgcctttcccttctgcgcgctgcagtcagccctcatggccgccgcacaatgccagtgccagaccttcaccacgggccgggcgtgcatggcagatcttccatttaggtagagtagtggacaaccaagcccaaggccaaagccattgcttgctcagcctctctgcactgcagggcgagggtcacacacacacagggtgtggtggatgatgaggcaacggcaaactggcagcagcaagtactactagcgcttgctaaaggccaggagc

SEQ ID NO: 63554 - DNA, 247 bp, Zea mays
  Clone ID: MRT4577_157962C.1
cgaagagtccaagtcacatggtagaagtcataaccacaaggacaaaagagattcttgtgaccggaggaacagaagaaatcctgagagtgacgacagaagctctcttgagtgcgctgacaacggttctcgtgagtgtgccgactgaagatgatcaatggagcgcaaaaacagcagttatggcatggtatccaatatccattgcttctgatagaagctcaggtgggccatcagagaagctgttgtataa

SEQ ID NO: 63555 - DNA, 338 bp, Zea mays
  Clone ID: MRT4577_157963C.1
tcgggcagcccgcagacggagggtaggacgccaccgacttcagcgtgctgctgcatggggtgaaacacagctggcgcactcgcattgcggtggacaacgggttcatcgggtccaaggaccacctcgcgctccagctggtcgtggaggtcaccgtgcatgtgcacgtcatcgcgctcggagttcgggcagacgacgctatccgtggactgctggatcaccggcgatcggctgagcaacgacgtgcacattgcgtcgcacagttgcaggagcagcttctcggaacgacgacggtccagagcgcctgtggtctggaactctggatcgtgggggaatggcaa

SEQ ID NO: 63556 - DNA, 478 bp, Zea mays
  Clone ID: MRT4577_157964C.1
ggggaaaaatcgggaccccgatggaacaaaggggggtatatttaggaatatattatttcaaaaacaccctaggggggaaacgctaaccacaagcctgatcaaaacacaaagaatggggatcaacagtacaaaagggggacgtagcaatttaaaaggggcggggactcccactaggggccatttgcaaaaccgttgcagcacttggttttaccgccgcctgtttccttggccgggttttgggaaaaaaaactccgggacatggaggccaccttggggagggaaaaagggcccggctgcaggaaaatcgtgtcgctgctcgtctcaaaatcttttgcgccggatcgggggtccatcaacttcagcggctcaacgaatttttcaggcaagggctcatgttttgactgaagcttttcggggacaccaaaaactgaacctatgtttgataaactgaaggggagctggccattgtttatcctca

SEQ ID NO: 63557 - DNA, 458 bp, Zea mays
  Clone ID: MRT4577_157965C.1
acactcaaaggtggattgataaccaaacagccaaagggcatgaccgcctctccgacgatcctgagtgtctctattctctctttagtgtgctcacacgttacacacacatacatgggacgacatacgtgcatccatgcgtaccaatgcacagtgcgaagccgctatcgcagccacacaacgagtaggagtatttatattgtaggtagatatcaatagccagcgagcacaatgcacgccatatgatcatgacgcgcagcattgattgatatgatcacgacgaccatcgattatcccgccggcggagacggcggcaaggggggtcgatcgatcaggcgaacatagccaacccgtggtgctaagaatatacagtgacctctgcaacaaacagcggaagcgctgacggtgtaagggatgctaacccctgactagacacgagataccggcctttttaacaccat

SEQ ID NO: 63558 - DNA, 794 bp, Zea mays
  Clone ID: MRT4577_157966C.1
gaattataaactgcacatatatatataggactaatctgatagccgttgagcacactacatatttcttctgtcaccagaaacagaactagtggagaagtgctcttcgctaagcatactctacatgataaccatacaacgggacagaggaggacagagagacgtggcagctagcactgcagctctagaagaagctgctgaactggttggtcagcgagtccttgaggttggagaagagcccgaacagggagtactgccggagcttggacacctcgtaccacgagttgagcacggcctcgtgcctgtccgtgccggagaacgcgagctggatcccggggctgcactccacctgcccgcccttgcccctgcagctcgccgtcctgaccgcgcagctgccgtccacgcacgcgaagtcggagcgcccggagcacgacgagcacccgccggccttccagaacaggttctggagcgtgcccttctggaactccaggacctgaagcgcgacgcaagacgggtcgtcggaggctcggttagccaagtcaattttttatccctttttgattgaggagctgcgtgtgggcgtacgtaccagggtgaagccggtcaccgtgtacgagatgttgccgacgaacacagggggtgacctcgctgcgtatttcttcccggcgaaagccaccatgtacacaccagaagaagactggaacagggcgaaaagggttgtgcattagtcactagatgtgatttcaattgtacaccttcgatcatctaagaagagcaatcgaccgcatgcagttcac

SEQ ID NO: 63559 - DNA, 158 bp, Zea mays
  unsure (1)..(158): unsure at all n locations
  Clone ID: MRT4577_157967C.1
ggtnctagatcgtnganctcgccgnctntntagtgangctcgtgcgngnccggngaatgtnatgtgccggagccggtgacctgcagttcgtaccagnttgtgccctattngtgattgcgtattaggatgctntgggcgnaatgcatgtgtncatatct

SEQ ID NO: 63560 - DNA, 2424 bp, Zea mays
  Clone ID: MRT4577_157968C.1
tcagacggggctcgagaaaaggtaagggtattccttcctcagagagtcctcactttcccaggtggcttcctcttccccatctctgctccactgaaccttacagagcttcacttctgaattgcgggttcttctgactgctgagtcgagaatcttcactggcttttcccggtactggagatctttttgaatctgaattgcttctgcctcgatacgggtttctggtacttttagacatttgcggagccttccaatgatgggatagggacctacaaaacgcggggctagcttcccttttacttggaacctcctgacaccacgcattggagaaaccttgaggtagacgaagtctccttcctcaaatcggagttccctccgcctgttgtctacataactcttctgccgactctgagcttcaagtaaccttctgcggattagtgcaactttctcttccgcctctttgacaaaggcaggtccttctagtgcttttcccccacgttggaccacatgagaggggtatgctcttaacagatcttcaaggactttgttgactctttctgtctgcccatctgtctgagggtgataagcggtactgaaatctagcttggtgcccatagctttctgaaggcttgtccagaacttggatgtgaactgggttcccctgtctgacactatcttccttgggatgccatggagtctgactatctccttgagataaatccgggcaagggtggctcttccaaaggtagttttcactgggatgaaatgggctaccttggtgagacgatctattattacccagatggaatcattccctttttgcgtccggggcagtccggttatgaagtccatgcctatttcttcccacttccattcaggtatcgggaggggttgtaataggcctgcaggtttttggtgttcggccttcgttcgctggcagatgtcacattgggccacatactgagctatttctttcttcatccctttccaccagtatctggttttgaggtctaggtacatcttggtagttcctgggtggatggagtaggccgagttgtgagcttccttgagtaggacttctcgggcttccccttttggtacacacagacggtatttgaaccaaaggactccttggtcatctgtcctgaggtccgggagttgttcattgcgggctttctccacaagtcttgctgtctctgagtctagacattgagctttgcatatgaggtcttctagcattggtttgacttcgagaatgtcactgtttcccagacatgtgtttagttgagctaattctttcttccaatcttctaaaaagttggtccccttgatgccgaatggttttcgattgagggcgtctgctaccacgttggccttcccggggtgataatgaatttccaggtcataatccttgatcagctctaaccatcttcgctgacggaggttgagatctggttgagtgagtatatacttcagactcttgtgatcggtgaaaatgtggcacttgtttccgattaggtagtgcctccatatcttcaaggcatgcactatggctgccaattccaaatcatgggtggggtaattctgttcgtgcggcttgagtaggcgcaatgcgtaagcaatgactttctcgttttgcatcagtacacaccctaagccttgcctcgaggcatcacagaagatgacaaaatcttgatgaatatctagtagtgacagaacaggtgctgttgtgagtttctcctttatgatctggaaactcccttcacattttggagtccacacaaatttatggtctttcttgagaagttctgacattggtcttgctatgctggagaatcctttgatgaagcggcggtaataccttgccattcccaggaaactttgaacttcactgacgttggtcggctgcctccattttgatactacttccaccttggaagggtccacttctattccttctgcggttaagatatgcccaaggaaggctatcttttccaaccagaattcacatttattgagtttagcataaagttggtgtgctctgagttttccgaggacgatccgaaggtgacgcttatggtcttcgcggtccttggagtagataaggatgtcgtcaatgaagaccacgacaaacttatctagctcttccataaacactttgttcatgaggttcatgaaaaaggcgggtgcgttggtcagtctgaacggcatcactgtgaattcatattgcccgtaccgggtgacaaatgcagtcttctggatgtctgcttccttgatcctcaattggtggtaaccagaccttaggtctatcttggagaagtacttggctccttgaagctgatcgaagaggtcgtcaatccgaggatgtggatacttgttcttgatggtgacttcatttaacgatcggtaatcaatacacattctcat

SEQ ID NO: 63561 - DNA, 5184 bp, Zea mays
  Clone ID: MRT4577_157969C.1
ctaggtggcttcctcttctccttctctgctccactgaactttacagagcttcacttctgaggtgcgggtctttctgactgctgaatcaagaatcttcactggtttctcacgatattgaagatctttctgaatctgcactgtttcttcttcgaggtgactttctggtgcttgcaggcacttgcggagctgggataagtggaacacattgtggatgtcggacatggattctggtagttccaggcggtatgcggcgggtcctaccttgccaatgatgggatagggacctacaaaacgtggggctagcttccctttgacttggaaccttctgaccccacgcattggagaaaccttaaggtagacgaagtctccttcctcaaatcggagttccctccgcctgttatctgcgtaactcttctgtcgactctgagcttcaagcaaccttctgcggatcagtgcaactttctcctctgcctccttgacaaaagcaggtccttctagtgctttttcccccacgttggaccacatgagaggggtctggcattttcgtccgtacagagcttcgaatggtgacatcttgatgctggactgatagctattgttgtaggagaactctgcgtaaggtagactggactcccaacttctatcaaaagctaaaacacatgctcttaacagatcttcaaggactttgttgaccctttctgtctgcccatctatctgagggtggtacgcggtgctgaaatctagcttggtgcccatagctttctgaaggcttgtccagaatttggatgtgaactgggttcctctgtctgatactatcttccttgggatgccatggagtctgactatctccttgaggtagatccgggcaagggtggctcctccaaaggtagttttcactggaatgaaatgggctaccttggtgaggcgatctattattacccagatggagtcattccctttctgcgtccggggtagtccggtcacgaagtccatgcctatttcttcccacttccattcaggtatcgggaggggttgcagtaggccagcaggtttttggtgttcggccttcgtccgttggcagatgtcacatcgggccacatactgagctatttctttcttcatccccttccaccagtatctggtcttgaggtccaggtacatcttggtagttccggggtggatggagtaggccgagtcgtgagcttccttgagtaggacttctcgggcctccccttttggtacacacagacggtgtttgaaccaaaggactccttggtcatctgtcctgagatccgggagttgttccttgcgggctttctccacaagccttgccgtctctgggtctagatgttgagctttgcagatgatgtcttctagcattggcttgacttcgagactgtcgttgtttcccagacaggcatttagttgtgccgattcttccttccagtcttctagaaagttagtcccttttattccgaatggctttcgactgagagcgtcggctaccacattggccttcccggggtgatagtggatttctaggtcataatccttgatcagttctaaccatcttcgctgaaggaggttgagatcaggttgagtgaatatgtacctcagactcttgtgatcggtgaaaatatggcatttgtttccgattaggtaatgcctccatatctttaaggcatgcactatggctgccaattccagatcatgggtggggtaattctgctcatgcggcttgagtaggcgtgatgcgtaagcaatgactctctcgttctgcattagtacacaccctaagccttgcctcgaagcatcacagaagacaacaaaatcttgatgaatatctggcagtgatagaacgggtgccgttgtgagtttcttttttatgatttggaaactttcttcacattttggggtccacacaaatttgtgatctttcttgagaagttctatcattggtcttgctatgctggagaatcctttgatgaagcggcggtaataccctgccattcctaggaagcttcgaacttcactgacgttggttggttgcctccattttgacactgcttctactttggaggggtccacttctattccttctgcggttaagatatgcccaaggaaggctatcttttccaaccagaattcacatttactgagtttggcatacagctggtgtgctctgagtttcccaaggacgatccgaaggtgacgcttatggtcttcgcggttcttggagtaaataaggatgtcgtcgatgaagactacgacaaacttatctagctcttccataaacactttattcatgaggttcatgaaaaaggcgggtgcgtttgtcagtccgaacggcattactgtgaattcatattgcccgtaccgagtgacaaatgcagtcttttggatgtccgcttccttgatcctcaattgatggtatccagacctcaggtctatcttggagaagtacttggctccttgaagctgatcgaagaggtcgtcgatccgagggagtgggtatttgttcttgatagtcaccgcattgagagggcggtagtcaacacacatcctcaaactctcatcctttttctttacaaataaagctggacatccccatggtgaagtacttggacgaataaaccccttgtctaacaattcttgcaattgcttcttcaattctgccaattccgcgggaggcatcctatagggtctcttggagataggagcagtcccgggttgcaattcgatggcgaactcaatatctcggtcaggtggcatccctggcaactcatctgggaaaacatctgggtagtcacagaccactgggatcttttccaccggggattctatcataacaaaggcacaagatcgggtacaaccctggtcgggtaaatacaaaacagtctcgccataagcaggggaatggatttcaatggctctggctgcaatgtccaagactgcctgatgcctggtcaaccagtcagttcccaaaataatatccacgctatccaatcctaaaatgagaagggtggttctaatcaccagactaccaaattttataggcacttgcctgttgatttgataagtggcaactctgcctccgggtgttgaaattgtaatgcccccatcggtatggtgaaagggaaactggcatttggcactaaacttggcactgataaaactatgtgaagcaccggaatcaaacagaacaatagcgggaaaatttaaaactgtaaagataccagtcatgacgggtgctccctctggaatatcagccatggtggtgaagttcagcctgccctgcctcacttgcaccttctgcctcttgccttggttctgattgacattctgcccctgcctctgctggttcctggggcaattcttggcataatgcccagtgttgccacacgtgaagcatcttttgtcatttgcctggcggtactgctgctgctgctgattgcccctctgagctggaaattgggtgcggttgggtgcctgctgctgttgctgctgcggtcggatcacccatcgcccttgctgctgctgcggtcccctgccctgggtgtcggacacaatcctgaagcgctgtggctgagctgagggtcctgccacaggggtcttcctcttcttctctgcctgtctagctgtaatgcagtcctcctgggagatagccatgttgaccaactcattgtaactgttggccctgacggtgttgagacgatcacggagcttagtgatgagccccctcctgaacctatccctcttcttctcatctgtatctgcatgatatcccgcatactggcacaaatcattaaaagcctgggcatactgcaacactgtcctgtttccctgagtgagtgccaaaaactcattgagcttcctgtccatgatcccggctggtatatggtgtcctctaaaagctgccttgaactccctccactccacctctcggtcctctggctgcatagcaagaaaatgatcccaccaagtccttgcaggtccgcgaagttgctgggtggcgaacctgactttggtgacctctgagcaaactccatgtagcagtgggaatttggattccaccactcgcagccacacatctgcgtcgagtgggtcctccgccctcgtgaacaatggaggctgggtgctaaggaattcctggtatgtagccgccgcggggtgacgctgatggtctccaccaccataatgctgaggtggtggctgacgttgagccagctgcctcaggatctcattctgctgagccatgagctcctgcagagtgggaggtggtggcggcggtggaggaacgcgctcgttctggccacgacgctgcctcccggccatctgaaaaaccatatacatacttaacaccacatcagcagtgtccacactggaggcaggctcatctcctccctcgatgtcgacatcctcgttggcctcctggtcttggatctcctggtgatgcatgtccaggtgctcgttagcctcagcgagctgctgctgagtgttaatgagctgatcctctagaacctcgatggtgttctccctggtgcccactagctcctccaactcctgaatatcagtggatagctgctccacctgcaagtccttctccaccatttcttgagacaagtcaaccacgagttcctctctgttatccaacgtaatctttgttgcctccagcagcgccatcagatgggacattgcctcaccgcgcatcacctgcagatggtacagggcattcatgcaccgtacagtcaagtgcgcggtctgtcctgggtagatggcccagatatccttggcatgctccacccgatccttccacattgggtcgtcctccctctcagcggggaacaagccaatggggtgggtagccagctccaaaggatggaatccgcagaaggtagtcagtccatgcagagcgatcgcctcgatcgtgtcctctgctcggtatccgaaagactcggagtccaaagagcgccagcctggctgcaggggatgaggctccaaagtcatccacactctacagcgaggcactcggtgcttctcgaactgctgcaccgcgtactgagggggtgtcgtgtatccagccccctgaagtacctcccacaaaatgcggggaaagccctctcgtgcaagtccgtcagtgtgggtcagtgcatttccgtcattagaggatccgtgggaagtcat

SEQ ID NO: 63562 - DNA, 304 bp, Zea mays
  Clone ID: MRT4577_15796C.1
ggcttaagctcatggatgggtggcgtctaaagaggtagcattgcaacaaacgtctcagggacagacaactatggaaccatgcagaaatttatgataaatacagggccaaccaaccataacttcgacaatctgggtgactctagctgctctaatgatgtgccggaaaaaccgaaaaaactggacctaagcacctgcattccctccagcaagcatgctagggcacagttgggagaaggggcaaacgggcaacgccgtgattgggattgacccccccaggctgacataactggtgcctgtgggcaca

SEQ ID NO: 63563 - DNA, 125 bp, Zea mays
  Clone ID: MRT4577_157971C.1
attatggggcgggtagtaactgagggggaacaattaccattaccattcgcgttacatttcttgaaccaaaaaggaccttacatgaacaataattaatatactcatgtttgtaattacatttaaaa

SEQ ID NO: 63564 - DNA, 3798 bp, Zea mays
  Clone ID: MRT4577_157972C.1
atgggggacttcctgagactcaaacctcccacgttcgctggatcaagcaaccccctcgatgcagacgattggatgcgaacgatcaaaaggaagctggaagccattggttgcccagaaaatcagcgtgttcaactggatgcccaccaactctctgggatggccttagcctggtgggacaccttcaacgtcaccatcagagatgctacctgggcggaatttgaagcagctttccgggagcaccatgtgccccaaggattggtacagcttaaggaggacgagttccgagaattgactcaagacggaagatctgtcagcgaatatgtgcacaagttcacggagttagcccgctacgcgccagatgatgtcaatactaagagcaagaagatggcccgtttcctcaagggactcaggccagaactcaagacaattctggccagccaagacttcctcaacttctctcacctttccaacaaggccatgcaagttgaaagagctaaagaggaagaaaaaggacacctcaaacggaagttccaggttctccgggcacaacagcaggaccggcaccagaagactcgatcatttgggtttccacccaaggggcccaacttcagtaggccagctggacccactctgtcacgattcagccagcagagtcagagctcttttcattctccctcggtggcaagcaaccaacctccggcaaatgcatgttggcactgcagtgatccaagtcacttcaagaacaactgcccgcagctgaagccacagggacccgcctactccaactcggtgaatggcccgaagaatacctcggcacccgcccccaaggcgccctccgccgtcagccagcagaacaagactccgtaccaaggaagggcacgtgtaaatcacgtcgatgcccaggaagctcagcaggctccgggagtcgtactcggtgagttccttgttgaatttactcccgctaccgtacttttcgattctggagcatcccactctttcatagccactagctttgtggaaaaatatggcattccctctactcccctagagattcctttggtcacccgaaccccagggtccgacctcttatgccagctgaaatgttcccaagtcagaatccttttaagtggggtagtattcctggcagacttaaccgtcttgccatccaagggaattgatgtaatcctagggatggattggctaactaaacacaaaggcatcatcagttgcgcagacaagacagtcctcctcaccgaccagcagggaaagtcagtctcttgccaggcacagccacccgccagtgacccaatgatgttcagtataacaacggaaaatatatcagtagtagaagaattcatggatgtgtttctcgaagaattgccaggaatgccaccagaaagagaagtggagttctacatagatctaattcctggaactgcacccatcgcaaagagaccataccgcatggctccaactgagttagcagaactgaagcttcaaatctcagatcttcagcaaaaagggtacattcatcccagctcatcaccttggggagcaccagtcctgtttgtctccaagaaggatggaagcatgagaatgtgtattgattaccgatcgttaaatgaagttaccatcaagaacaagtacccacttcctcggattgacgacctcttcgatcagcttcaaggagccaagtacttctccaagattgacctaaggtctggttatcaccaattgaggatcaaggaagcaggcatccaaaagactgcatttgtcacccggtacgggcaatatgaattcacggtaatgccgttcggactgacaaacgcacccgcctttttcatgaacctcatgaataaagtgtttatggaagagctagataagtttgtcgtagtcttcatcgacgacatccttatttactccaagaaccgcgaagaccataagcgtcaccttcggatcgtccttggaaaactcagagcacaccaactttatgccaaactcagtaaatgtgaattcaggttggaaaagatagccttccttgggcatatcttaaccgcagaaggaatagaagtggacccctccaaagtagaagcagtgtcaaaatggaggcaaccaaccaacgtcagtgaagttcgaagcttcctaggaatggcagggtattaccgccgcttcatcaaaggattcaccagcatagcaagaccaatgacagagcttctcaagaaagaccataaatttgtgtggaccctaaaatgtgaagaaagtttccaaatcataaaagagaaactcacaacggcacccgttctatcactgccagatattcatcaagattttgtcgtcttctgtgatgcctcgaggcaaggcttagggtgtgtgctaatgcagaacgagaaagtcattgcttacgcatcacgcctactcaagccgcacgagcagaattaccccacccatgatctagaattggcagccatagtgcatgccttaaagatatggaggcattacctaatcggaaacaaatgccatattttcaccgatcacaagagtctgagtctcgaagtcaagccaatgctagaagacctcatctgcaaggctcaacatctagacccagagacggcaaggcttgtggagaaagcccgcaaggaacaactcccggacctcaggacagatgaccaaggagccctttggttcaaacaccgtctgtgtgtaccaaaaggggagacccgagaagtcctactcaaggaggctcacgactcggcctactccatccaccccggaactaccaagatgtacctagacctcaagaccagatactggtggaaggggatgaagagagaaatagctcagtatgtggcccgatgtgacatctgccaacgaacgaagaccgaacaccaaaaacctgctggcctattacaacccctcccgatacctgaatggaagtgggaagaaataggcatggacttcgtaaccggactaccccggacgcagaaagggaatgactccatctgggtaataatagatcgcctcaccaagacagatgggcagacagagagagtcaacaaagtccttgaagatctcttaagagcatgtgtgttagcttttgatagaagttgggagtccagtctaccctacgcagagttctcctacaacaatagctatcagtccagcatcaagatgtcaccattcgaagcactgtatggacgaaaatgccagacccctctcatgtggtccaacgtgggggaaaaagcactagaaggacctgcctttgtcaaggaggcagaggagaaagttgcactgatccgcagaaggttgcttgaagctcagagtcgacagaagagttacgcagacaacaggcggagggaactccgatttgaggaaggagacttcgtctaccttaaggtttctccaatgcgtggtgtcaggaggttccaagtcaaagggaagctagccccacgttttgtaggtccctatcccatcattggcaaggtaggacccgccgcataccgcctggaactaccagaatccatgtccgacatccacaatgtattccatgtgtcccagctccgcaaatgcctgcaagcaccagaaagtcacctcgaggaagagacaatgcagattcagaaagaccttcaatatcgtgagaaaccagtgaagattcttgattcggcagtcagaaagacccgcacctcagaagtaaagctctgtaaagttcagtggagcagagaaggagaagaggaagccacctgggagattgaggacttcttgaggagggaatacccttaccttttcccaaatccagtctaa

SEQ ID NO: 63565 - DNA, 1264 bp, Zea mays
  Clone ID: MRT4577_157973C.1
aattcggcacgagggaactagtctcgagttttttttttttttttttttttttttttttttttttatacatttgaattaaattatgccaatttgataaatgaagagttaaaaataaataatcaataatttcaaacactaaggtaatagcacgtacaaataatattcaatatatttcatgcagggtcatctcctctacggttaagactacaaatgttggggagatttggtactgatttccttgcaggtcatctctacaaggctcgcttgcgtttctgaaacacgaacagctctttcgatagtagtagcttatacgaggtgcgcccttcagagtcaatcacacgatctggtgttttgatctttacatgaacaactctttcgatagtaattgctggacgaggtactgcccttctggttcctccaggtagatcttgtcgttcagataattctgtagattgttgacagcctcagcctgcatcttgttgccttgttccttcaaagccggtaaaaagtaccgtgaaatcacatataggattttcatgaactgcgatccatatttcttgtgaagtgcaaaaccagccatcttgaggaaggcgtgaagggcacaagcagtggctgtagtagctggaagagaattgaggaacatggcaagccatttccatccctcagctaagccatgaggatggcgtacacccttgatttctgtttgaatcattgccgcatacagtttgacatatgcaacgacatatgttagataactttcagtgctctcgaattgtccattttcttcctggtaacctatcagtctgtaataatctctatttcgtgcttctgcatttaaagcatgcaaatgctttggaaccgtgtatatgcaaactctgttgaactcagctaaaagatagtccattgcatctggtacctgatttgtgactaatagcatgacatatccacacgcaaaggccaaatttccgaaggttttgtcctttgtatttctactcttgacaatagaaataatcttgtttgcaaatagacaacaagagattggacggggacaatcctgtccatctaaagctttaataagctcactagcccttgctctgacactatcagtagttggcataacccggccggtggatagggcaatttgtcggtcatatttgatgaattccttgctgtgatgaatgttttctggcagttgattctgtaccaatgcccgcatccgtgactatgcttatagtgcatattcatcgccaaaatctttgatgcc

SEQ ID NO: 63566 - DNA, 480 bp, Zea mays
  Clone ID: MRT4577_157974C.1
aaaaccctcccttttttgttttttttttttttttttttggggtgttttttggggttttccgggtgttttcaaacaaaaccccaaacataaatgaaccggaaaaagaagttttaggggtcaagacccccagctccgggtaccgactttgggggggggggggggcccccccctttttagggtgggaaaccacccggggccatgagaggttcttctggcccggcctggaaaacccccctttttattggggaacccccaaattcccctttcatttggttaaaagccccctccaggggcttttttaaatggttggccggccggctggccaactggaaaaattcccctctagaacgggccccccctggggggggggtagggctccccttccactgagcccaaaccgggagggactgtgattggaagggagaaccccctgttttaaattattttttcggcctttttaaccccccttttttttttttt

SEQ ID NO: 63567 - DNA, 1099 bp, Zea mays
  Clone ID: MRT4577_157975C.1
catccgtccgtccgtccgtccgtcgtccgccgtccaccgccagcgcgcgctagccagcaaaggagcgtgataatagaggatttagcaccctccccagagattaatggggaaaaggagaaagaaactgaagttgcagagaagagatggaaagtacttgtgtggaagactgctgtttatcttatcactctcggtatgctcattgcacttctaatgggactgaacatgtcctggactgcaatcactgcagctcttgttcttctggcactcgattttacggacgcacaagcttgtcttgagaaggtgtcatattcactgctgatctttttctgcgggatgtttatcactgttgatggcttcaacaaaacgggcataccgaacacactatgggagttagtggaaccatattcacgaatcgatagtgcgaaaggtgttgcacttcttgccgtggtgattcttatcctttcaaacgtggcctctaatgttcctacagtcctattgctcggtacaagagtggctgcatcagcggcttcgatttctcatggttcagagaggaaagcctggctcatccttgcatgggtcagcaccgtggctgggaacctcaccctcctaggctctgcggcgaatctgattgtctgcgagcaggccaggcgggcccagttcttcggctacaacctcaccttctggagccacctccgattcggggtcccgtcgaccatcatcgtcacggcgattggtttgctcatcgtcatcagttactgaaacagctgaaggcagaagagcgtagtgtaagagaagcagaatggataaaaatccttccaataagaagtacatgtaaattaggcttgccctataactcaagtgtgtatcggtacgttatgtctccgtctgtgctcttgctcgtgagcaagcagcacatggctgaccgtgtagcttgcatttccattgcataataggcttatgaagaatgctttggtaatatgattttacagtctgacaaggattgtgaagcagaggcagtgtaccatcaagataatacttctggaagcatataaaaaaatttcgtatatttggatttcaaatccagtctgcttcagactgg

SEQ ID NO: 63568 - DNA, 958 bp, Zea mays
  Clone ID: MRT4577_157976C.1
gcggagacttcggaatggcggcggcggctcgtgccgggttccggcggctcttctccgtctcggccttcgctgcaccgcctcctcctgccgcgcgccccgcggcggacccttgcaacaacctcttcgtctcaggcaactaacctcgcctccatttcccccctttttgcatgttttgcaagagaaaaccctcgccttgattcttatgctgcgcgctttattagttgcttgttgtgctagcatgcggtggatgtttgcggtaggattatgaatgggggaaattgtttacttttgtctgagatctgttagccagtagttacttccaactttgatatacctgatgaactaaactgatactagtcgtagtcgaatagtgttatcttgcgaactgaatcgatttgctctatctgaacccactctgaacgagagaagtactgcacaggcgcatacaaacttattgtcgaatgtcgatgtcaactacttgaccttttataagcacacgtatatgttaaacttgaaactgagtctttttgtatttagacctagagaactcctggtcatttttcaaaatggctgttaagaaaaccttgaatttttttgtccattatatcctattgttatttgatttctgaaactggtgtataataaataatcagagccataccatgctcgatgtaatgaagtgttcatgggcttgttgattcatttatgcaaattttgttattccattaatattctactacttgacaacattgcctgacttgtgtgaatatggacgttacatgtttgcaatttgttcctcaggtttttatgttaattcattctcttctggaacatcgtgcgcctgaaatattttgatttttccttgttgtgctacaccattcacatctttcgatttaaccttatttgtttttatcataacgctcgatggtattttgctttttataaaatacatatgagc

SEQ ID NO: 63569 - DNA, 249 bp, Zea mays
  Clone ID: MRT4577_157977C.1
cttgagccggtaaggcttgacttttcgagctgagagatgtttatttttggctgagtgatatagttcaggaggcaaaagagctgaaccatatgcattatgctgccatgcccatactctaactggttccgcactggagcagcattgaaacagtcatgacagggctgtaatacaagatctggagtatgtatctcacaactgtatatcaaataactgcatagaacatgcaacagacattttagttgaggagat

SEQ ID NO: 63570 - DNA, 579 bp, Zea mays
  Clone ID: MRT4577_157978C.1
tgggaccctcgaggccggccgggccggggtcattggaagacttcacggttacttgcctctctagaaggacgagacgggatgatcccttgcagatagacgctaccgtcactacatgcagatctgcgatgaccatgggaacgcaacacacggactggtcctcagcgaacttatctgccacggcatccggcgtagtgatccgcaaggtgaaccgggacaacctcagccaacaaagggaagcagcaacagaggcttgcggtcccggctgcgaccgcggaggagctggacatcatcgaccacctccacctcatcggggcctagacccagatctcgatccgggagatgtacggcaagcacgggcgcaacgatctggtgttcctccgcatcggcgtcgtgtccaccctgttcgtgtcctcgcaccagcgacgccgaggccggcctgcgcatccaggactatgtcttcgcggaggcggcgcgcgccatggccgacgagatcatccgatacgagctctcggacgtcgcgaacgcgtgctacggcgagtactgagaggaaggtaggaaactcctcaccacgcacatgat

SEQ ID NO: 63571 - DNA, 1815 bp, Zea mays
  Clone ID: MRT4577_157979C.1
ccagtggtgagtggtgtggagggcaaggatcaacaactcatttaggacgcaggcgactttcctcatttcactgggttggctgactccattatgatcatgaatggaattaatgctcccaaagttatagaatgttttggctcggatggtaacccacgcgttcgacttgcaaaatctggaaatgatgacctgcgacaggatgctgtgatggagcaattttttagtttggtaaatacattcttgcaaaatcaccgagatacttctaaaaggagattgaaaatccgtacatataaggttgttcctttcaccccaagtgctggtgttgttgaatgggtaaacggtactgttccactaggcgattatctaattgggagtactacaagtggtggagcacatggacgatatggaattggggactggacatatcttcaatgcagagagtacctgatgagtgaaaaggacaaaaggagggcatttcttaaaatctgcagcaactttaggcctgtgatgcaccacttctttcttgaaagattcttgctgcctgctgattggttccaaagtagacttgcttacacaaggagtgtagcagcaagctcgatggtaggatatatagtcggtcttggggatcgccattccatgaatattctcatcgaccaagacacagctgaggttgtacacattgatcttggtgttgcatttgaacagggtctcatgcttaaaacacctgaacgggttccatttcggttgacaagggatattatagatggcatgggtgttactggtgttgaaggtgtgttcagaagatgttgtgagaaaactctctgtgtcatgagggcgaataaagaagcattgctcactattattgaagtcttcgttcatgatcctctatataaatgggcactctcaccactgaaagccttacagcgtcaaaaggaaacagttgatactgattcatgtttggatgactcccaagaaccttacgatggcaacaaggatgcagctcgagctatacttcgtgttaaacagaagttggatggatatgaagatggcgagatgagaagtgtgcagggccaggtccaacaactcatacaggacgcggtggatgttgatcggttgtgccaaatgtttccaggttggggaccttggttgtaagctccattgaaagggatgtaaattttgatcgaaggcaagagcaacttttttcactgcttatgaggttttattctttggtgtgtttttttccctcaccaccctgtcatcattcctacaaagtacagcaaacggcttttggtaccctgtaaattgatgggaaggcaaggacgacatttgagtgcaggtgggttgtaccactcctgttttagagcatgtccagactagaggatgggtgattgcatagtgaggccacagttttctttttttgttgagcttcattaataccccctctgtctaaaagtcctcatcgtttaagcgtcccgcaccaagaccaaggatgcccctccgcattgcagccgctgtgaagttaattatctggcgccgttttgtattttcaaaacacgcatatgtaatgtcgcaaaaattcagctgcttcgatggttggccggccagaggggcggtatccatacatcacaccatcgtgcagcgtacattcagctgcttcgacggttgcataccgtagtttttgttcaggatttactttgtaaagaagtgaggctgttttgtcatgtatgtaaagggcttgtttcgatgtagcatgaaatacgaagaattatgatgcatttgaatataccgtgctcccctgagcaaaaaacaattccccag

SEQ ID NO: 63572 - DNA, 435 bp, Zea mays
  unsure (1)..(435): unsure at all n locations
  Clone ID: MRT4577_15797C.1
ggggaaaaaccccccctttgggaacccccggaccttcggaaacagggggacccccgccaaaaaaaaggggaaaaggcctcaaaacccccccaagggttcgggaaaaaaacaagctttgggaacccccccaaggaaggggggagcccaaaacccttttccaaaaaaggccggccccaaaaaacccccccaaaaaaaatggggacaggggcccccccccccaggaacctgggccaaaataggccccaaaccaaaaaaaaaacaacctttccccttggcatggggggccccggaaaggcgaaacccaaaanaaaaggggcccccacccttttgggaagaatcccagggccccaaaacctaaagggggaaccttaaccccggggggcccccccgggaaaaaaattcaaaaccccccccttgggaatttccggggggggg

SEQ ID NO: 63573 - DNA, 294 bp, Zea mays
  unsure (1)..(294): unsure at all n locations
  Clone ID: MRT4577_157980C.1
cccaactctaacaccaagctcactactccacgccacgtggccaagaagaatttttgaagatatacaaacccaccccancnncccatcaccacagtgacaacaagtcggctggacggaacgcacctggagcaaagcaagatgtcttctgcaacggatgacacctacaaggcccaagcagcaccgccgccgagaggggagccactagagcaagcctgtgttcacacctaccaactctccaacaacctgaccgcaagctgaattgagattccatgcacaaacaagattaacaaaacc

SEQ ID NO: 63574 - DNA, 281 bp, Zea mays
  Clone ID: MRT4577_157981C.1
aatgttcacgaggccgtccacctgcaccgggggcgaattttccacggaggcctcaatcatctctggcaccggccttgggcgcctccagctcgctgctagtggaagcctagacatgcccactaacagggggacccacaataacgacgatgtcccgcttttgtggagctgcgatactaacgtctgcagagaccctatgagcaccgaccagactgagactatcaccaccaaccgtgcggaggccgaccaaatgggaacggacgcggacacagaaacaacttggc

SEQ ID NO: 63575 - DNA, 298 bp, Zea mays
  Clone ID: MRT4577_157982C.1
cagcgtgaggtgacccatctggcccgccgcgatgctggcaacacggcggctgctcggctggtcgcttcccgcgctgggatctgtacgtttcagcggcgacacgacagcacccaagaaaacctcatttggctcgctgaaggatgaagaccggattttcaccaacctgtacggccgccatgactggaggctgaaaggttccctgagtcgaggtgactggtacaagacaaaggagatcctgctgaaggggcccgactggatcctgggcgagatcaagacatcgggtttgaggggccgtgga

SEQ ID NO: 63576 - DNA, 313 bp, Zea mays
  unsure (1)..(313): unsure at all n locations
  Clone ID: MRT4577_157983C.1
ccatttcaacttggcttacaagacgccacatcacctatcatagaagaacttacaaactttcatgaccacaccctaataattgtattcctcatcagctccctagtactttatattatttcactaatactaacaacaaaactaacacacacaagcacaatagacgcccaagaagtagaaacaatttgaacaattctcccagctgtcattcttattctaattgcccttccctccctacgaattctatacataatagacgtcataataacccagttctaacagtagaagctgtcgggcgccagtgatnctggagcta

SEQ ID NO: 63577 - DNA, 246 bp, Zea mays
  unsure (1)..(246): unsure at all n locations
  Clone ID: MRT4577_157984C.1
cccgtccgtgagatagtgctaacaaagatctcgcgtaacattccaaacgcttggggttcggggtttccattgccgccgccgccagnaattttaccttccaagtcattatcaataaccacccttggcagattggcaaccgcccttatgactggaacgtatatctcttctttcaccatatcttaaaaantnnaagggctttccctcgctcgccgaaggccaagaagttgaatttttccttttggaagg

SEQ ID NO: 63578 - DNA, 1068 bp, Zea mays
  unsure (1)..(1068): unsure at all n locations
  Clone ID: MRT4577_157985C.1
cattggactgaaataaggactagagcgncaatgacattcaccaatcaccgacagtccaacaccagctcaaagactacactgacaactttgcactgtcagaaagcttttgcatcataaagtactgtcagtactcattagtactactgcaatagtcagctttgctttcgcatcatatgaagctgcataactgaaccagcagaatcagaatgccccagtacacattagacataggggagctacagcctacgaagctttgtggttaacacttggttcattagccatctaatatataggggaacttgaacccacgcaacttgtccctttcccaccaaaatagagcatccctgtttcatcagcacacgtaacctagatcatgcccgaccatccaaattaccattcaaggagctccgagtcattttagacaccacagctatgctgctccttgttcgcggcattagctttgtcgctgtcgccaacattgttagtggagccgtagtgagtgtgcttcttggatgaacccttgcactgtccaactgggtatttgcgggcgttgatctccatcttgcgcagggcagccttgccgaggtcgacgccgcacatgtccgacaggcgcaccagatagaggagcacgtcggcgagctcctcgcccaagtgctccttctcggcatcgtcccagcctggcagccccttgggcacctcccctttccattggaatatctcagacagctcccccacctcccctaccagggcgagaaggaggttcctgggggagtggaactgctcccagtcccgctccgtcgcgaagtcagccatccgcttccgcagcgtctccaggctcacagctgccgccgccgccgccgtcgtcctcacctcgccatcgcgaacattgccgcccttctcctccctctccatgctcacctcctcctccgcaacgttcatctccgccctagacttgagatttaattttgttttctaattcctcctcggccgtgggggacctagtagccctagttattatcgaggaaggaataggtcaatacggcgagcccggccggcctcgaggtaccc

SEQ ID NO: 63579 - DNA, 419 bp, Zea mays
  Clone ID: MRT4577_157986C.1
taaaaaaaaaaaaaaaaaaagaaaaaaaaaaaaaaaaaaaaaaaaaaaaaaaaaaaaaaaaaaaaaaaaaaaaaaaaaaaaaaaaaaaccctgggccggaacccccctaggggcaatttttgcagttttccctcacacggggggccgttcgggcttccttttagggggcccatttggccctttgggggggcgttttacatttaattggccggggttttacaacctcgggacgggaaaaacctgggggttccccaactaaatcgcttgggggcaaatccccttttccccagctggggtattaccaaaaaggcccgacccaatcgcctttccaaacagttgcccaccctgattggcaaatggaccccccttgtggcgggccattaagcccggggggtggggggtttccccccggggggccc

SEQ ID NO: 63580 - DNA, 174 bp, Zea mays
  unsure (1)..(174): unsure at all n locations
  Clone ID: MRT4577_157987C.1
ctcgagccgctcgagccgtttcggctcgagcgctgcggactcttcgtccatcaaggttttctcactcagatcccgccangtcacttgatcctcttctccgtaccaccgatggtgtacgcggattcctggtacgagttcgtgtgagctgtccgtgcagctcttccgtggagaccc

SEQ ID NO: 63581 - DNA, 2289 bp, Zea mays
  Clone ID: MRT4577_157988C.1
atggatccaaaaggaaagaatacgaaatgggatcgccaaatccctaagccacagagacaaaactctcctccttggggaagacactggaaccttagctggcgtttgagaccccctcatatgaaggttgagtccaaacaggatatgcaggctgcaacattcggcgagagcgcggatccagctaaagccaaatctaggcttcatactatttgggtggttgctgaaaatgttcctgaagagctgttaaattaccaggctatttgtgagattggctcaactattggggctattgaggaaattgatttgaattctcttgaatccaaagatatggtcagatttaaagttcatgtcaaaagcattgatatgattcctgaagtcatagaagtgagagttaaaccttatctgtatgacatattctttaaagtagagaatattgatgcagaagggtggaatgatgactctgttagtttgggaaaaagggcttctgttgatgtccagagatctggaaaatttgtgatggagaaaaaagtgataaaagaatctggtgaaaaagaaggatttgaaggagatgtggaatttaatgaaagtgaagatgaccttctcagttcacaagaacttgatgtgttagttaaagacatgggagttgatatgaaaggaacaaaaaaaaataaaggaaagggagctgatcctatggaaggaattaggaaaagtacaagattggaggcaaatgaagatatcaagataactgacaaagctatctctagggcggtagctaaagacgctttcctgaacaaaggtatgtcatctaatcctttctctgttttgagtactagtgataatattttggttgagatggtcgatttgcttaatgttagtctaggaaagaatgatgaggatgtttgtttgaatcttaatgacattaaaatggttgagacagaaagatttattgcttgtagctctaatattgttcctgaagttaatttgaacataactgagactgaaaaagaaattgagatctctgattctatagataaaatggttcagggtttgttagatagtgaatctgagaaagaaaaaatgttggtttataataaaaaagaggatctaagaagagagaaaaaattttctctaagaaataaaaagaaaaataattctccaaagggtctggtgaaaccgggaaagtttgagtttctaaaggaacttattacaaaacataaagtagactttattggtcttcaagagaccaaaagaaaggaatttgatcaaagttttgtcaacatttatggcgcggctcaagctgaaaatagaagtagatttctcagtgagttctcttctgtctgctcaaattgtaaaggcccgaccatttttggtggtgatttcaatatcattagaactaatgaagaaaagaataaacctgggattctttgtagatggagtgctctctttaattcgattattgaaatgcatggtctcattgatcttgatctttctgataggctctatacttggtcaaacaataggaacaatcctacctttgaaaaacttgacaggtttttggtgattagtgaaaatcaatttggttttgttaaaggaaaatatattttagattgtgttgttgctcttcatgaaattattcatgaagtaaaaaagaaaaagcaaaatgagattattctcaaaattgactttgagaaggcttatgataaagtcaattggcaattcttatatagcatgctccaacaaaaaggttttggagacaaatggggtgattgggtgatgaaggctgtgaaaggagggaaggttgccattagaactaatggcatgattggcccttattttcctacacataaaggggtcagacagggtgaccccttttcccctcttctcttcaacatagcagctgatggtcttgcgtgtcttattgaaaaagcacaagaaaaaaaactgattgctggtttaattcctcatattataagtaatggttgcgcatatcttcaatatgtggatgatacaattcttttgcttcaggacaatcttgaatttgcaaggaacttaaaatttatcctggttctgtttgaaaagatatctggtctgaaaatcaattttcataaaagtgaggtttattgttttggtaatgctaataacaataaagatgcttatgctgagatttttacttgccctattaaaattcttctcatctgctaccttggtgttcctattgaccataaaacattgagcatttctcagtgggctaagactgaagagaaatttgaaaaaaatttaggagtttggtaa

SEQ ID NO: 63582 - DNA, 341 bp, Zea mays
  Clone ID: MRT4577_157989C.1
aaaaacaaaaggttagcccccttttactcaatcacccaacacatgggagcacaggaatactttaacatatggcttacatacatatacagggggattgagctgctaaggctcgggaaacaaaaccctgttttatttaaaaaaactatccccccaacctgttcgcctatttacggggacccttgggtacagggacaaaccggtcctggacggggtccttaaaccacccggacaagggggtttttttgactcgggccaaaaaaagggggggccttttgtactccaacttttaaatggccataccgtttaacaaaaactccaccctgaaaaccactccccctttt

SEQ ID NO: 63583 - DNA, 254 bp, Zea mays
  Clone ID: MRT4577_15798C.1
agttgtatgggtttgttcttttttctataatgatacacaactgtcttttcgattctaggtacgtctatccagtcatagaaaagctcaccgaacagatattgaaatatatggagattgctaacataatcgataaataaaacaagtataaaaataaaagatttatatgcatcatatcagcaatcacatgttacgggtaagagagagtaattctatgcagataacatccatggatgctgctacaagggggggaacaa

SEQ ID NO: 63584 - DNA, 357 bp, Zea mays
  unsure (1)..(357): unsure at all n locations
  Clone ID: MRT4577_157990C.1
ncatgagacgcagcatagttcacttagcctactctatctactcgagagatgacgagacggaaagctagctagctaggatgaagagagccagccaaaaatgaggacgccgagtgccgcggctgctgcttctccagttgtggttagctccgacgacggtgacggtccgcctcctgcaggtgaatacctccaccgcggtgtggactgaacatcatcgcgagggaaattggtcatccagcgagaggcatcctctgtggtgaaacctgtgtcttcctaccatgctatacggcagccatgtgttgccaatgcattggccacatctgcatgatgcgatatctggactagcgctatttgctgtgc

SEQ ID NO: 63585 - DNA, 439 bp, Zea mays
  Clone ID: MRT4577_157991C.1
agcccccaacattgcaagggggttagaaaaacttttataacacttcaaaatctgataggcacttgctttccattgaaaacgctctacaagggtcctctctgaaaggcacttgctatccattgaaaggggtctaaaagggtcctcttttgggggcccctgttttcttgggtttgggagccccaacctagttgggggggcgggacagtttcccaaaaacatggggcatagcgacaacagctttgaacccaatgctcatgaacaaaaaaaggtttggggacattttggggcccgcagcctcattggggtaaaactggagcattgagctgggaccacctttgccagcaaaagaaacgcttgggggcctacccctgcgcagggttggagctacccgcgcactccctttagcaggggcggggccattcgccaccattttttttta

SEQ ID NO: 63586 - DNA, 724 bp, Zea mays
  unsure (1)..(724): unsure at all n locations
  Clone ID: MRT4577_157992C.1
gcaaagcaaaacctaagtatgtgacaagttccccaagatcaggttcattactaacatgtacctacctagctaatactcccgctcttctttctgatctccatgccctcaatgatgagccctatcttggcataggtatcggttttctcccagacactcacttttacctctctatcaacatacttattgtaaaactcaccaagccagagctccatccaaccttctgaacgggtaaccgggtaagccacgcgatctacacgcacggcatcttcgtctacaaaggaaacaacgccatcagtggtgtgtactccatccactgctacgtaggactccccccatctgaggccatcatgctcatctgccagcttgtagacaaggaatatatcatagctagtgtcggtggagaggaactcgaaagggacccatccctcaatctcgagccaccagactgctatgagctccatcgataatgcgaacctggactcaggaatagaattcaacctccagtatctgtcatcctgtccccaaagtatactcaacgatctagctggtaagatgcagctgttggtccccataggactctccaggaagaaacccttccttagagtttgagaaaacttatgctgattcacctctgatttgcaccaacgttctagttcgtcattacactgaatgtgtagatgttccagatgataaagcttangcaaagatttaaggctcttgcatt

SEQ ID NO: 63587 - DNA, 266 bp, Zea mays
  Clone ID: MRT4577_157993C.1
cttgcagcaacaatggcagccatggctgcgcttcagagctcaatggacggtctctccctatcctccaactctttcttaggccaacgcctttctcccatcaccctcccctctcttctaccgggtaagtcaacagagaagcaatgtcctattgtaatgaggcttaaacgatgggaacggaaggagtgtaaaccaaacagccttcctatcttgcacaaaatgcatgttaaacttggagatacggggcaagtcatatctggacgtgaaag

SEQ ID NO: 63588 - DNA, 537 bp, Zea mays
  unsure (1)..(537): unsure at all n locations
  Clone ID: MRT4577_157994C.1
gtggcggccgcttcgaggcnncggccgggcctccgaccaacaaatcatatcaaaatggaaaacgatcgtggagacctcgtcgacatctacgtcccaagaaagtgtgctgccactggtcgtctaattgaggccaaggatcatgcttcagtccaaatcgctgtcggtgatgttgacgccgaaggaaagatcattccaggttcaaacaccacctttgccctctctggttacgtccgtaacgctggtgaggctgatgattctttgaacagattggccacaaaggagggactcctccgtaacgtctggacttatgccaagtaaacttgtcaatgcaagcctcaatttgaattaagtctttggtctcgtttcggttctccttctttgcatctttcttattcttccaaggtcaattcgaggggttttctgttttcttcgaatttagaatcgtatatgatctttcatcccatcattgtactcgtagatttttactacaacactcaacaccccaaaaatctagaatcaagataatgattctcgtcg

SEQ ID NO: 63589 - DNA, 393 bp, Zea mays
  Clone ID: MRT4577_157995C.1
gggggaggatttcccctacccattcataaacatgttgcttttgggggggggtaagaacataagtccacaataaaaaaaaatcctggagtttttggcaagatgattttttttgggtggaaaaatgtcaggattcatttggtttaaacttcaaaacaaaaagacatggggggtaatggtccacagtataaaattgggttaaggctcaccaaaaaaaaacctaccacaagttggggggggtcctttattcacaactttcaaatgcatattggttgggagaacctggttaaataaggggaacactaattttttttttccggggggggggaccacgactttgggaagttcccatttcctgcgttttcctttttttttaaaagggttgggtttttggga

SEQ ID NO: 63590 - DNA, 1286 bp, Zea mays
  Clone ID: MRT4577_157996C.1
ccggccgggatcgtgctcgttgagtttccaaagtctcagccaccccagtatactcctccggatccgtgttccatcacggctacaaaaatactccgcctgcatctccaaagcacacggctccctctggtttcccgcctcctcttcacctccttcgcgtcccgacgctccctcatggccgccgctgccgcagcagcagcagcagtttcctccccgattgctccacgcgctgtggccgccgcggcctcccgccgggggttcgtcacgtttggtggaggcgccgcccgctcctcgcccacgctgcggtccggccgcgggttctctggtgtgcaaacccatgttgccgctgttgaacaagcagttgtaaaagatgctacgaagctggaagctccagttgttgttgttacaggtgcctctagagggattggaaaggcaactgctctagcccttggaaaagcaggatgcaaggttctggtaaattatgctcggtcttcgaaagaggctgaagaggtctccaaagagattgaagcatctggtggtgaggctatcacctttggaggagatgtttcaaaagaagctgatgtagagtctatgatgaaagcagctctagataaatggggaacgatagatgtgctggtaaataatgcaggaattacacgagacacattattgatgaggatgaagaaatctcagtggcaagatgtaattgatctgaatcttacaggcgtctgcctgtgtacacaggctgcaacaaaagtaatgatgaagaagaaaaaggggaaaattatcaacattgcatccgtcgttggccttactggcaatgttggccaagctaattatagtgcagccaaggctggggtgattggtttcacgaaaacagttgccagggagtatgcaagcagaaatatcaatgtgaatgctattgcaccagggtttattgcatctgatatgactgccgaacttggagaagagcttgagaagaaaatcttgtcaaccattccattagggagatatggccaaccagaggaagttgcagggttagtcgagttcctggcccttagccctgcagctagctatatgaccggacaggtgcttacaattgacggagggatggtaatgtaaggttcgagttggcttgatgcacttctacttttgcttaacatttaggcgacgttggttcacgaaatgtaacataaatgataatgataatgattcatattcgagtaccaatagtaataaatttgaataggtcgatatcagtttttaaaaaaaaaaaaaaaaaagcggcc

SEQ ID NO: 63591 - DNA, 1420 bp, Zea mays
  Clone ID: MRT4577_157997C.1
gtcccgtccccttcctcgcctcgtgcgctccgcccgtcgcgccgtcatcgcggagcttccaaagcccccgtcccccaataggctcctccccatccgtgctctgctccgtcacggctcaaatactccgcctgcatctccaaagcacactgctccctctggcttcccgcctcctcttcggctccttcgcgtcccgacgccccctcatggccaccgccgccgccaccgcagcagcagcagcagtctcctccccggctgcgcgtggagcagccggggccgccgccgcctcccgccgggggttcgtcacgtttggtggaggcgccgcccgcttctctcccacgctgcggtccggccgtgggttctctggtgtgcaaacccatgttgccgctgttgaacaagcagttgtaaaagatgctaccaagctggaagctccagttgttgttgttacaggtgcatctagagggattggtaaggcaactgctctagcccttggaaaagcaggatgcaaggttctggtaaactatgcccggtcctcgaaagaggctgaagaggtctccaaagagattgaagcatctggtggtgaggctatcaccttcggaggagatgtttcaaaagaagctgatgtagagtctatgatgaaagcagctctagataaatggggaacaatagatgtgctggtaaataatgcagggattacacgagacacattgttgatgaggatgaagaaatctcagtggcaagacgtaattgatctgaatcttactggtgtcttcctttgtacacaggctgcaacaaaagtaatgatgaaaaagagaaagggaaaaattatcaacattgcatctgtagttggtcttactggcaatgttggccaagctaattatagcgcagccaaggctggagtgattggtttcacaaaaacagttgccagggagtatgcaagcagaaatatcaatgtgaatgctattgcaccagggttcattgcatctgatatgactgccgaacttggagaagagcttgagaagaaaatcttgtcaaccattccgttagggagatatggccaaccagaggaagttgcagggttggtcgagttcctggcccttaaccccgcagctagctatatgactggacaggtgcttacaattgacggagggatggtaatgtaagatttgagttagcttgatgcacttctacttttgctgagcatttaatgttgaacacccttgttgtgcacgggcgattttggacaacaaattagtgttgtctctttctttgtaatactctctggtaataaatctagcatgtggaatggaagttgaaatctgggttttcgtgtaaaaaaaaaaaaaaaaaaaaaaaaaaaaaaaaaaaaaaaaaaaaaaaaaaaaaaaaaaaaaaaaaaaaaaaaaaaggggcgggccgtttt

SEQ ID NO: 63592 - DNA, 241 bp, Zea mays
  unsure (1)..(241): unsure at all n locations
  Clone ID: MRT4577_157998C.1
gcgggtacgcagtgcctatgctctagaggtattagcagccctccgtgtccctgaaacacgatgaaatgtgatgctgcctacctggtcgctattctcgctgtgaacgccagtccctacgatgtcgattagactgacattctggagtcagttggctgtgaagttgacagnnnaaagataaaactcctgctggccctactgaacgcgaaagacatcaccacactcattgtcatggaccaagaga

SEQ ID NO: 63593 - DNA, 820 bp, Zea mays
  Clone ID: MRT4577_157999C.1
gccggggccggccgggatgattagaagtcgcccggccgcccgcgcgctgccgagatccatcagctcttatcctcaacatccttccagcttcctggagcagtgccgcctttcatataaacgtacacccgctagctagctagcttcttcatttggcctgcaggcggccagcctgcgccagagccagacagagatctctgttccggcagagcttgaccctcctgttacgtgctgcagcttatatgggttcttgggtgcgcaccatcacaacgcccttcaggaaagcctgcaccatcttcggcccacacaaggacggcggcggcaagaagcagacgcagcagcggccaaactcagcagcggtggtgcagcacgtcgacgccgagagggccaagctccacggggaggtgatggcgtgcgcctacgacgacgtgcaggtcatgtggtccatgctcgaccaggcaaggatccgggatctcagtgccagctcgtgacctagcttcgtgcatctagcttcgcctagagccgcgaaaatggactagtacatagcaaaatatcctctctctctctctctctctctctctctctcctcctcaccaattaaacgttcccaaacctgcactcgctcgcttttcttgtacacgtagctgcttagatttagcttttctcttttatttggaggttttgcagctcagtcaagtgtttgaatccccacaggcactctcttctcttctctttgagcgaggggcttgattggagagatgtacattattgccacctatttggatcttgatttgttgcaaaaaaaaaaaaaaaaaggccccta

SEQ ID NO: 63594 - DNA, 434 bp, Zea mays
  Clone ID: MRT4577_15799C.1
gggaccgcgagcacaggccgctccgtgggcgcttcggatcctcgcgggaccccacgctctgccagcctgcccagcccgctgcagccgccagcgcgccccgtcggcagctctccatctgcacgtctctccgtgaaccccgtgagcggtgtgcagccaccatgttcagctggctgaagcggggcggggcacggggccagcagcccgaggccatccgcacggtgacctcggccctcaaggagctgtaccgcacgaagctgctgccgctggaggagcactaccgctttggggccttccactcgccggccctggaggacgcagacttcgacggcaagcccatggtgctggtggccggccagtacagcacgggcaagaccagcttcatccagtacctgctggagcaggaggtgcccggctcccgcgtggggcctgagccc

SEQ ID NO: 63595 - DNA, 1832 bp, Zea mays
  Clone ID: MRT4577_1579C.1
gcgtgagcagtgtccgcagcagcggtggtggcgagacgagaggccgctaaaacccaagcgcggcccgagccgaacctgaacctgaggtggagagatcgcacgcgccctctgccgcttgttcgttcctcgcgcttgccaccaggcaccaccacacacatcccaatctcgcgagggcaagcagcagggtcctgcggcggcggcggcggcggcggcagcgcttccggctcccctttcccattggcctccacgatggcgctccgcctcaacgacgtcgcgctctgcctctccccgccgctcgccgcccgccgccgccgcagccgcagccgcagcagcggcaggttcgtcgccgtcgcctccatgacgtccgccgtctccaccaaggttgagaataagaagccatttgctcctccaagggaggtacatgtccaggttacacattcaatgccacctcacaagattgaaattttcaagtcgcttgatgattgggctagagataatatcttgacacatctcaagccagtcgagaagtgttggcagccacaggatttcctccctgacccagcatctgaaggatttcatgatgaagttaaggagctcagagaacgtgccaaggaaatccctgatgattattttgtttgtttggtgggagacatgattaccgaggaagctctaccaacataccagactatgcttaacaccctcgatggtgtcagagatgagacaggtgcaagccccactgcctgggctgtttggacgagggcatggactgctgaggagaacaggcatggtgatctgctcaacaagtatatgtacctcactgggagggtggatatgaggcagattgagaagacaattcagtatcttattggctctggaatggatcctaggactgagaataatccttatcttggtttcatctacacctccttccaagagcgggcgaccttcatctcacacgggaacactgctcgtcacgccaaggactttggcgacttaaagcttgcacaaatctgcggcatcattgcctcggatgagaagcgacatgaaactgcgtacaccaagatcgtggagaagctgtttgagatcgaccctgatggtaccgtggtcgctctggctgacatgatgaggaagaagatctcaatgcctgcccacctgatgtttgacgggcaggacgacaagctgttcgagcacttctccatggtcgcgcagaggcttggcgtttacactgccagggactacgccgacatcctcgagttcctcgtcgacaggtggaaggtggtgaacctgactggtctgtcgggtgaagggaacaaggcgcaggactacctttgcacccttgcttcaaggatcaggaggctggaggagagggcccagagcagagccaagaaagccggcacgctgcctttcagctgggtatacggtagggacgtccaactgtgagatcggaaacctgctgcggactgcttagacaagacctgctgtgtctgcgttacataggtctccaggttttgatcaaatggtcccgtgtcgtcttatagagcgataggagaacgtgttggtctgtggtgtagctttgtttttattttgtatttttctgctttgatgtacaacctgtggccgcatgaactggggcgtggagatgggagcgaccatgccgtactttgtctgtcgctggcggtgtgtttcggtatgttatttcagtcgttcagatctgttaaaaaaaaaaaaaaaaaaaaaaaggggccgcagaacttggcggtgtgtttcggtatgttatttgagttgctcagctctgttaaaaattttgtgccccatgcagttcagttctgttc

SEQ ID NO: 63596 - DNA, 650 bp, Zea mays
  unsure (1)..(650): unsure at all n locations
  Clone ID: MRT4577_157C.1
ggccgggctcccttcctcttcctgtttccgcgcgcgagatcgccgccccgggtgggctttctagatcccgatggcctcgcgccgccgcaccctgctcaaggtcatcatcctcggcgacagcggggttgggaagacgtctttgatgaaccaatatgtgaacaagaagttcagcaaccagtacaaggctacgattgngggcggatttccctcacccaagaagggcagttcgaaggacagggctctttcacctccggcaaaaaatggggacactggctgggccaaggaaaaggtttcaaaagccttgggggtggcttttcaaccccgggaaaacaaaaaatttggttggggccccccaaaaaccccaagggagggggggaaattcttccctaaaaaaaacaacccccggtggaaaaaaaaaattctccccaacaaaaagggggggggggcaaaaaaaatttttttttttttggggggggggggccccccaaaaacgggggggaaaaaatcctcctctttttttgggggggggggaggaacaaaaaaaatatttttttttttagggggggggagaacaaccccccccgcgtgtggggtgggaattggaaaaaaaaaaaaaaaacaaaaggggggggggccgcccccccccccac

SEQ ID NO: 63597 - DNA, 874 bp, Zea mays
  Clone ID: MRT4577_158000C.1
ccggccgggttcgccatgtatttatactactcgcgtgacgcccacacaacgcccatgtttagaagtcgcccggccgcccgcgcgctgcggactgctaggagatccatccgctcttatcctcaacatccttccagcttcctggagcagtgccgccttcatataaacgtacacacgctagctagctagctaggccgccgccgccgccgctacatactacagatcagcttcttgatttggcctgcagagatctctgttcccgcagagcttgcccctcctgttacgtgctgcagcttatatatatgggttcttgggtgcgcaccatcacaacgcccttcaggaaagcctgcaccatcttcggcccacacaaggacggcggcggcggcggcaagaagcagacgcagcagcggccaaactcagcagcggtggtgcagcacgtcgacgccgagagggccaagctccacggggaggtgatggcgtgcgcctacgacgacgtgcaggtcatgtggtccatgctcgaccaggcaaggatccgggatctcagtgccagctcgtgacctagcttcgtgcatctagcttcgcctacagccgcgaaaatggactagtacatagcaaaatatcctctctcctcctcaccaattaatttaaacgttcccaaacctgcactcgctcgcttttcttgggccttggcttcaatttcaatgtcgtcgtccaaactatggatgctagctagctatttgcggcccatatcaatcgagcccggaactaaattaagtgcccgttttgtacgtagctgcttagatttagcttttctcttttatttggaggttttgcagctcagtcaagtgtttgaatccccacaggcactctcttctct

SEQ ID NO: 63598 - DNA, 552 bp, Zea mays
  Clone ID: MRT4577_158001C.1
aggagcgcccggccgcccgcgcgctgcggagatccatcagctacctcaacacccttccagcttcctggagcagtgccgccttcatataaacgtacactgcacccgctagctagctaggccgccaccgctacatactacagatcagcttcttgatttggcctgcaggcggccagcctgcgccagacagagatctctgttccggcagagcttgaccctcccccccggcccctcctgttacgtgctgcagcttatatgggttcttgggtgcgcaccatcacaacgcccttcaggaaagcctgcaccatcttcggcccacacaaggacggcggcggcaagaagcatacgcagcagcggccaaactcagcagcggtggtgcagcacgtcgacgccgagagggccaagctccacggggaggtgatggcgtgcgcctacgacgacgtgcaggtcatgtggtccatgctcgaccaggcaaggatccgggatctcagtgccagcctcgtgacctagcttcgcgcatctagcttcgcctagagccgccaaaatggactagta

SEQ ID NO: 63599 - DNA, 779 bp, Zea mays
  Clone ID: MRT4577_158002C.1
gccggccggtccgggattttggcctgcaggcggccagcctgcgccagagccagacagagatctctgttccggcagagcttgaccctcctgttacgtgctgcagcttatatatatgggttcttgggtgcgcaccatcacaacgcccttcaggaaagcctgcaccatcttcggcccacacaaggacggcggcggcaagaagcagacgcagcagcggccaaactcagcagcggtggtgcagcacgtcgacgccgagagggccaagctccacggggaggtgatggcatgcgcctacgacgacgtgcaggtcatgtggtccatgctcgaccaggcaaggatccgggatctcagtgccagctcgtgacctagcttcgtgcatctagcttcgcctagagcagcgaaaatggactagtacatagcaaaatatcctctctcctcctcaccaattaaacgttcccaaacctgcactcgctcgcttttcttgggccttggcttcaatttcaatgtcgtcgtccaaactatggatgctagctatctgcggcccatcaatcgagccccgaactaaattaagtgcccgttttgtacgtagctgcttagatttagcttttctcttttatttggaggttttgcagctcagtcaagtgtttgaatccccacaagcactctctctcttctctttgagctagggggcttgattggagagatgtacattattgccacctattggaaatcttgattgttgcaatcctttccttgtcaaaaaaaaaaaaaaaaggccccta

SEQ ID NO: 63600 - DNA, 421 bp, Zea mays
  Clone ID: MRT4577_158003C.1
gccggcctggccgggactgccttcatcagtccttaccgggctgatcgtgactctgctcgtgctcttcacgaagctgcaggtattccattcattgaagtgtttgtggatgctcccttagaagttgttgaatcaagagatcccaagggtctttacaaaaaggctaaggctggtgaaattaaagaattcactggtatctctgctccatatgaagcccctcttaaacctgaggttcatattcacactgaccaagtgactattgaacaaggtgtagaattaattatagattatcttttaaagaatcaattgcttgactctgaaaaaattgttaaaaaatattaattttaatttttcttttataaaataaaaaaaaatggtaaatacacctattgaagactaaaaaaaaaaaaaaaaaaggccccta

SEQ ID NO: 63601 - DNA, 460 bp, Zea mays
  unsure (1)..(460): unsure at all n locations
  Clone ID: MRT4577_158004C.1
aagcccgagaacgtgctcctccgcgccgacggccacgtcacgctcaccgacttcgacctctcccgccttgcgcacccgcacctnccctcgctcctcggcttcaccgagacggacgaccttctcgcgtgggccgtcccctactgctccggcggcgacctcaacgagctccgctactcgctccccgaccgcatcttctcccccgcggccatccgcttctacattgccgagatcgtctccgcggtcgccgagctccacgccgcgggcgtcgtgtaccgtgacctcaaggtcttcgacaagcgctccgccgcccgcagcaggaagcctgacgccgacccgcgcgcggtgggagatcagcgtgctctcccgccttgcgcacccgcacctnctncaccccagcaggtcgtccgcggagtcgtcgtcgcccccgcggtcagcgtcgtcccgcggccaccacaacccg

SEQ ID NO: 63602 - DNA, 250 bp, Zea mays
  Clone ID: MRT4577_158005C.1
aggtacaaatttttcggggggagggagcatatgtatacttctcttttatataaacacagtatggcacggttcaactttaataaatcaaattatgtttggcaactaaaaaaactgatttacggctaaccacctaataatgctaacaacattcaaagaagctggggacaccaaacacaagagtccaacatacgtgtggctgcacatcaaaacacggagtaaagatacgattgctttgccaggcagacaaact

SEQ ID NO: 63603 - DNA, 1749 bp, Zea mays
  Clone ID: MRT4577_158006C.1
ggccgaaccgctcctccgcgctattcttagccccagagctcgcgccacaccacaacacgtacctcccgcgcgcggggcgtgcaagcacacggctgccccggcccgcgcgcccgtgccggccggccagcagacatggacatcgacctcgaccgggcgcgcgcgctgcgtatcctcggccgcggcgccatgggcaccgtgttcctcgtcgcggaggggccctcggccttgcgccccagccgctacgccctcaaggtcttcgacaagcgctccgccgcccgcagcaggaagcctgacgccgaccgccgcgcgcggtgggagatcagcgtgctctcccgccttgcgcacccgcacctcccctcgctcctcggcttcaccgagacggacgaccttctcgcgtgggccgtcccctactgctccggcggcgacctcaacgagctccgctactcgctccccgaccgcatcttctcccccgcggccatccgcttctacattgccgagatcgtctccgcggtcgccgagctccacgccgcgggcgtcgtgtaccgcgacctcaagcccgagaacgtgctcctccgcgccgacggccacgtcacgctcaccgacttcgacctgtcccgcctcctccaccccagcaggtcgtccgcggagtcgtcgtcgcccccgcggccagcgtcgtcccgcggccaccacaaccgccggtcgcgcgtccccgcgcggagcgactcggttctcagccagcaggtcaagtcgtactccaactccaacaactccaggccccctcaccagccctggtccgcggcgtcgtcgccgcggcagcagctccagagcctggtccgctacatcatggggagcggcgacggggccggggtgggcaggaagagcaagtcggcgcgggtgtcgccgctgagccggaagcccgcgagcttcggcggcagctcctccgccgccgcgtggggcaagtcctactccttcgtcggcacggaggagtacgtggcgccagagatggtgcgcggcgagggccacggcttcgccgtcgactggtgggccgtcggcgtgctcgcctacgagatggcgttcgggcggacgccgttcaagggccagaaccgcaaggagacgttccggaacgtgctgcagcaggagctcgagttcccgggggacacccggtggcggacgccggagctcgcggatctcatctcgggcctgctggagcgggacccgaggaggaggctcgggtacgccggcggcgccgacgaggtccgggcccacccgttcttcgccggcgtcgcgtgggacatgctcacggaggtgtccaggccgccttacatcccgccgccggccgacgaggacctcgcggacgtcgaagggttcgacgtgaggggccacttcaaggaccttcaccagccgccgcctcccaagtccgcgtcggagtcgtcctcgtccgagttctcgacggagttctgactgtgagctcgggctagcttcttttgcgctttggtcctcggtagattactatattgtaaccagagggtcgagggtgtctgtactgtacatacatggagacggggatggtgctgtaaattcgacgtagagttggtgtggttgtgcaaacattttgggaagcgcgagggctcgccggcgcactgtgctcgaggcattttcttcgtgtaatttttttccgcttggcttgcaagcgatcacctgactaccgaagaaaaggaaaaggataacttgaatcggcgcaattttact

SEQ ID NO: 63604 - DNA, 448 bp, Zea mays
  Clone ID: MRT4577_158007C.1
gctgccaatctttgcctgatttgtgggtgctccgccagtgggggcgctcgctccatccaagagtctgggcacccagctgaacttcgggggctcctgccgctactccaccgcagggcccaccgtggcggctcagaagattgcgtcccttgccagcaagatgcctggccagaagcccaagcccgctgcggtatcgtcctcttctccagacgtcagcgacgagctcgccaagtggcatggtcccgacaggaggatctacctgccgcatggtctgctggaccgatcggaggtgccggagctcctcaccggcgaggcccctggagactatggctacgacccttttggcctgggcaagaagccaaaggacttggccaagagccagcatgtacgagctgatccatgcctaatgggccatgctcggggccggtgccgctgtgatcccgcgggcctg

SEQ ID NO: 63605 - DNA, 290 bp, Zea mays
  Clone ID: MRT4577_158008C.1
gataagggaaaaatgcttaagggggggcttaaaacccaaattgcccaggggcgggacgtagcctactcggtacaaaagggaggaaagggtagatacgccaaaatgaacttaaaacccatggtggggcccaatacgaacagaccccgggccttaccacttattcaaaggagagaaaaggggggggtttttaaaaaaaacaaactggtttattcagaaaccttaggggccgtactttttagagaaggggggggacattggccgggagcttcttaacgggcacgttgataaac

SEQ ID NO: 63606 - DNA, 216 bp, Zea mays
  Clone ID: MRT4577_158009C.1
gcttagtattctcctccccgcaccgagaaactaggactctatggagaagaccatgccataacaccattgcgcgcaccagcattaagctctccaaagggtcatgtggttgggcacctagggaaacaaaggcttccaccgataggggggggcgagcgtgggccacggaaaaaagataggggtcaccacctgcaaaaaacaaaggcctaccaccaatat

SEQ ID NO: 63607 - DNA, 841 bp, Zea mays
  unsure (1)..(841): unsure at all n locations
  Clone ID: MRT4577_15800C.1
tgttcctagcatccatgtcaagtttggaggttggcttttctatgactttttgttgagatggcaaatgaagctaaaaatctagtgctttttactgagaagggtcagtttgggacacttgctcgcatgcttcaagtggatccacctcccaaagccgtaaaagtcactatgagcaagcgagttcctttagttggtgatgagctgaaagcttatgaagaggaacaagaacgcataaaaaaggaagaagtgctaaaggctagcatcagcaaggagaaggagctaaaggcttctcatgaatcaaatgcaaaggcttctgaccccatggttgttgatgcaagctcgtctcgtaaatcatccaatgctggctcacatgttggcgggaatgtggatattctaattgatggatttgtctctccggtgaccagcatcgctccaatgtttcctttctttgaaaatactgctgactgggatgacttcggcgaggttatcaatcctgatgattatatgatgaaacaagatgaaatggataataatatgatgctcggtgctggagatggcatggatggtaagcttgatgagagttcagcacgccttcttcttgattcagcaccgtcaaaagttatttccaacgagatgactgtgcaagtgaaatgctcattggcatatatggactttgaaggtcggtccgatggacgctccgttanatcagttattgctcatgtggccccactgaaactcgttttggtgcatggatcagcagaagctactgaacatttaaaatgcattgtgcaaaaaactctgacttgcatgtttatgctcctcaaatagaagaaaacattgatgt

SEQ ID NO: 63608 - DNA, 344 bp, Zea mays
  Clone ID: MRT4577_158010C.1
gggaaaaagaccaaaccatctttttttcctagggtaggctggagcctgcacacccccaattttgggcactttggtttggttttcaatctcggaaccgcatgcatgaaaatgggggttacccaagttactaggccccctactttggttggttcaaaacaaggtgtttccaccccccccggggctccgggggctttactctggtttggtttggtctggtaacaaaatggggtttttccacctccgggggtttcttggggcgttttcgggggctcccggaacgtgccccttgtgccccccccggtttccccccgttatttttggccaccctcccaaattttttcacc

SEQ ID NO: 63609 - DNA, 157 bp, Zea mays
  Clone ID: MRT4577_158011C.1
gggaaagggagatatttcatttcatatgaatgtcaaactggcatcgttcatttgcaggggataacaaagctttgcccccgggcgggtcttcgggtttgccctgtctgcttttttcttcccctcggggggggggggggggggggtttttctttttttc

SEQ ID NO: 63610 - DNA, 777 bp, Zea mays
  Clone ID: MRT4577_158012C.1
cattgggtacctcgaggccggccgggagtcctctcctcccgtgcgtatctctctgttgatcgccatcgcggagatcgaacatcaccgccggtgtgcccagtacctatcggcgcgccctccgccgcctggtcatggcgctggtcgctcgcttcccgtcgcgctcccgtcagctatattcggcctcgcggcactttgtcgaatggaggggacactcaagttcactcctttgcctccgatgcgcgtcctggtgaccgacctcctgtcggagatgatgatctccatgaacgccatattctttgaggcaaacaagatgtacgtcaccgatcttgtcgagcttaataccgaagagatcgctattgatccactatgacccggcggtagtgtctcgctatagtccacgatcatgttcgactgtcatggatgaggcggatcttctctctgattctcacaggattaaatataccattgagaccttcaccaagggcatctctgatggactcactcacttgaatactcttgagcagctcagaatatgcagcggtcttatagatcgtcttgagattgagactttgttgatggacgctcttgagaagattgagaaggacattatttacaccacttttgaggagcgtcctgatgaacatgtccaccctcttggcagagtgtgacaagattatcagatacgcttggctgtcggtaggaggatcttcccaagatcgaggaacagcttgcattgctaattgccaatagtgagctgactgaacttcacatggaatg

SEQ ID NO: 63611 - DNA, 867 bp, Zea mays
  Clone ID: MRT4577_158013C.1
cattgggtacctcgaggccggccgggacactcctcactcgcgcacccaccaccagtcagtccagttcccgcagtgcagcagcggccagcggctgcctaatctctccagccctttttcgtcccctagccacgccgcccaccgctgccgcgtcatccgccagtcgtcgcctgccccgcggcttccgcccccattcgccgccgaagcacgccgagccccgtcccagatcgccgccgcgcttcctgccgccgccggcgcggcgcagggttggaaatctgtttgaccactcacccagctacctcttcattttgataattctgcaccttgttgctcatgaggcaagaacactgagttcagatggcgaagcacttcttgctttcaaaaaggcagttacaaattcagatggagtcttcctaaattggcgtgagcaagatgcagacccctgcaattggaagggtgttagatgtgatagtcatagcaagagagtgattaatctgattcttgcataccacagattagttgggcccataccaccagaaattggaaggttaaatcagttgcaaaccttgtcattgcaggggaacagtttgtatggttcactccctcctgaactggggaattgtaccaagttgcaacaactgtatctacaaggaaattacttaagtggatacatcccttcagaattcggcgaactggtggaactcgtggcattggacttatccagtaatacattgagtggatctgttccgcattctcttgataagttgtccaaacttacatcattcaatgtttccatgaacttcctgacaggagcaataccatcttctggttcacttgtcaattcaatgagacatcctttggtgggaacct

SEQ ID NO: 63612 - DNA, 793 bp, Zea mays
  unsure (1)..(793): unsure at all n locations
  Clone ID: MRT4577_158014C.1
ttgggaccctcgaggccggccgggcagccctttttcgtcccctagccacgccgcccaccgctgccgcgtcatccgccagtcgtcgcctgccccgcggcttccgcccccattcgccgccgaagcacgccgagccccgtcccagatcgccgccgcgcttcctgccgccgccggcgcggcgcagggttggaaatctgtttgaccactcagtgagtggcttcatgttaaatccatttctggtttcaagatgcttcaccaatgacatctggaaactgtaatagtatgtgctgatcttctatgcttcaccacctgatcatcaatgggctctttcctgtggaaacagcccagctacctcttcattttgataattctgcaccttgttgctcatgaggcaagaacactgagttcagacggcgaagcacttcttgccttcaaaaaggcagttacaaattcagatggagtcttcctaaattggcatgagcaagatgcagacccnctgcaattggaaggngtgttnagatgtgatagtcatnagcaagagagtggattaatctgattcttgcataccancagattagttgggcccataccaccagaaattgatagagaacttgagattattgggaagtgttaaacatcgctatttggccanatctttcgtggttattgcaactctccttcatcanaacttttgatatatgtttatcttcaaggtgaagccctggatgaagtgcttcatgaaaagtctgaaacagttggatttgggatgcacgtattaacatcatacttggagctg

SEQ ID NO: 63613 - DNA, 2262 bp, Zea mays
  Clone ID: MRT4577_158015C.1
ctctttcgtcccctcgccacgccgcccaccgctgccgcatcatccgcccgttgccggccgtcgtcgcctggccagcggcttccgcccccattcgccgtcgcagcgcgccgagccccgttccagatcgccgcggcgcttcctgccgccgtcggcgcggcgcagcccagctacctcttcattttgataattcttcaccttgttgctcatgaggcaagaacgctgagttcagatggtgaagcacttcttgccttcaagaaggcagttacaaattcagatggagtctttctaaattggcgtgagcaagatgcagacccctgcaattggaagggtgttagatgtgatagtcatagcaagagagtgattgatctgattcttgcataccacagattagttgggcccataccacccgaaattggaaagttaaatcagttgcaaaccttgtcactgcaggggaacagtttgtatggttcactccctcctgaactggggaattgtaccaagctgcaacaattgtatctacaaggaaattatttaagtggatacatcccttcagaatttggcgatctggtggaactcgaggcattaatgcgcacaccctctctaagtacaacgcctaccaagaacatggtgaagggctcttcacaattgaagcacaaccccatacgtcagtgcaccatcatcttcgatgtcgggtgtctgaagggggacttgtccagtaatacattgagcggatctgttccacattctcttgataagttgtccaaacttacatcattcaatgtttccatgaacttcctgacaggagccataccatcttctggttcacttgtcaatttcaatgagacatcctttgttggcaaccttggtttatgtgggaagcagataaacttggtgtgcaaagatgcacttcaatcaccatcaaatggtctgcagtcaccttcaccagatgacatgattaataaaaggaatgggaagaattcaaccagacttgttataagtgcagtggcaacagtgggagctctcctattggtggctttaatgtgtttctggggttgctttctttacaaaaattttggaaaaaaagatatgcgtggtttcagagtggagctctgtggaggctcttctgtcgtgatgttccatggggacctcccttactcctcaaaagacatcctcaagaagctagagactatagatgaagaaaatatcattggagcaggaggcttcggaactgtttataaacttgcaatggatgatggcaatgtctttgctttgaaaaggatagtgaaaacaaatgaagggctagatcggttctttgatagagaacttgagatattgggaagtgttaaacatcgctatttggtcaatctccgtggttattgcaactccccttcatcaaaacttttgatatatgattatcttcaaggtggaagtctggatgaagtgcttcatgaaaaatctgaacagttggattgggatgcacgtattaacattatacttggagctgcaaaaggcttgtcttacttgcatcatgactgttcgcctcgaataatacatcgtgatattaagtcgagcaacatcttgcttgatggcagtttcgaggcccgtgtatcagactttggacttgcaaagcttttagaggatgaagaatcacatattactacaatagttgcaggaacatttggctatcttgcaccagagtatatgcaatttggcagagccaccgagaagactgatgtctacagttttggggttttggtactcgaaatactcagtggaaagcggcctactgatgcatccttcattgagaagggactaaacattgttggatggttaaattttcttgctagtgagaaccgggagagggaaattgtcgacctgaactgtgaaggagtgcagactgagaccttagatgccctgctctctcttgccaagcaatgtgttagctcctcgccagaggagaggccgacaatgcacagggtggttaaacagtgctggagtcggatgtactcgtgccctgtatgcgacttctacgattcagagtagcctcctggacggacaagccacagtggtgccgctagtttcccgtggaggcgcattcctttattctttgcagatattgtgtaaatgcattgccgcggtgtttgtttggtctcctccaatcggctggttcaacgggtgacatttttgcgtctgtgtttatctgtcatgctacaagttggctatgtgctgatttaataagagagaacttaccagtgtgtgttt

SEQ ID NO: 63614 - DNA, 284 bp, Zea mays
  Clone ID: MRT4577_158016C.1
ctcgcgccaccgtccactgcgtcacacacataataatgaatggtaccgcccttttcctacgagatccggaacgattgaggcgaacacacgtacattcacccggaggcaataatggctttgaacccggcttcggcgatgactacagcctatggcgtgctattcctacgctaccggctcacgcgtgccgcggctctcaaccggtacctctgcgattacatcatccaggggaccatgtactgtgacacctgccgaaccacggacaggagcaacgtcagcgagtacat

SEQ ID NO: 63615 - DNA, 2574 bp, Zea mays
  Clone ID: MRT4577_158017C.1
gggtaaaacgagggtggtttagctagctgttcgtcccgtgtcccgttccagtcctcgcccaccaccgcacgcggacaaaaccgctctccgctcctcacgacctcgccacactcccagcccaccggcccctcactcctcactcgcgcacaccacctccagtcagtccagttcccgcagtgcagcagcggccagcggctgcctaatctctccagccctttttcgtcccctagccacgccgcccaccgctgccgcgtcatccgcccgtcgtcgcctgccccgcggcttccgcccccattcgccgccgaagcacgccgagccccgtcccagatcgccgccgcgcttcctgccgccgccggcgcggcgcagggttggaaatctgtttgaccactcagtgagtggcttcatgttaaatccatttctggtttcaagatgcttcaccaatgacatctggaaactgtaatagtatgtgctgatcttctatgcttcaccacctgatcatcaatgggctctttcctgaggaaacagcccagctacctcttcattttgataattctgcaccttgttgctcatgaggcaagaacactgagttcagacggcgaagcacttcttgctttcaaaaaggcagttacaaattcagatggagtcttcctaaattggcgtgagcaagatgcagacccctgcaattggaagggtgttagatgtgatagtcatagcaagagagtgattaatctgattcttgcataccacagattagttgggcccataccaccagaaattggaaggttaaatcagttgcaaaccttgtcattgcaggggaacagtttgtatggttcactccctcctgaactggggaattgtaccaagttgcaacaactgtatctacaaggaaattacttaagtggatacatcccttcagaattcggcgaactggtggaactcgtggcattggacttatccagtaatacattgagtggatctgttccacattctcttgataagttgtccaaacttacatcattcaatgtttccatgaacttcctgacaggagccataccatcttctggttcacttgtcaatttcaatgagacatcctttgttggcaaccttggtttatgtgggaagcagataaacttggtgtgcaaagatgcacttcaatcaccatcaaatggtctgcagtcaccttcaccagatgacatgattaataaaaggaatgggaagaattcaaccagacttgttataagtgcagtggcaacagtgggagctctcctattggtggctttaatgtgtttctggggttgctttctttacaaaaattttggaaaaaaagatatgcgtggtttcagagtggagctctgtggaggctcttctgtcgtgatgttccatggggacctcccttactcctcaaaagacatcctcaagaagctagagactatagatgaagaaaatatcattggagcaggaggcttcggaactgtttataaacttgcaatggatgatggcaatgtctttgctttgaaaaggatagtgaaaacaaatgaagggctagatcggttctttgatagagaacttgagatattgggaagtgttaaacatcgctatttggtcaatctccgtggttattgcaactctccttcatcaaaacttttgatatatgattatcttcaaggtggaagcctggatgaagtgcttcatgaaaaatctgaacagttggattgggatgcacgtattaacatcatacttggagctgcaaaaggcttgtcttacttgcatcatgactgttcgcctcgaataatacatcgtgatatcaagtcgagcaacatcttgcttgatggcagtttcgaggcccgtgtatcagactttggacttgcaaagcttttagaggatgaagaatcacatattactacaatagttgcaggaacatttggctatcttgcaccagagtatatgcaatttggcagagccaccgagaagactgatgtctacagttttggggttttggtactcgaaatactcagtggaaagcggcctactgatgcatccttcattgagaagggactaaacattgttggatggttaaattttctggctagtgagaaccgggagagggaaattgtcgacctgaactgtgaaggagtgcagactgagaccttagatgccctgctctctcttgccaagcaatgtgttagctcctcgccagaggagaggccgacaatgcacagggtggtacagatgctggagtcggatgtaattacaccgtgccctagcgacttctatgattcagagtagtctcctggacaagccacgctgctgctagtttcccgtgggggcgcattcctttattctttgcgtatattgtgtaaatgcattgccgcggtgtttggtctccaatcggctggctcaacgggtgacttttttttgcgtctgtatacctatgtatgtatctgtcatgctacaagttggctatatgctgatttaataataagagagaacttactagtagaacttaccagtgtgtgtttaaaacattgatcttttggggttgtttggttccgaaggttaaattttaatctcatc

SEQ ID NO: 63616 - DNA, 368 bp, Zea mays
  Clone ID: MRT4577_158018C.1
ctggattaaaaagcccgagttgatcgttcaaagttctcgcgccagtctaaaggaagggggaccacttacatttggtgctaaaacaagcttgatcagttttttgcttccaaaccaaattattggggagacaaggttcttaaaaaagggggcaaaaaaaaccatgggctttttattttaaaacaaccatttttctaataaaattgggctggtttaaaaggctttcccaaattaaaaacaggggtgaatgggattaaaccgccccttttcaagggtgtaaaaggggttttttgcccaaaaaattactactgttttttgtttccccctcaaaacgttgggatttttttggccaaattttttttacgggaaaa

SEQ ID NO: 63617 - DNA, 132 bp, Zea mays
  Clone ID: MRT4577_158019C.1
tcgtcgccgactttcgatgagcttgagagggtggggacctctggtgagggggtgggggtgttcctgcttaatttcctctattagttcgagtacagacaataggctaatttattgacattttgagtcttttat

SEQ ID NO: 63618 - DNA, 378 bp, Zea mays
  unsure (1)..(378): unsure at all n locations
  Clone ID: MRT4577_15801C.1
agcaaccttgcgctcaaacaagaattcacggcctacccaatctattcaagagggagccctattcggataccgacgtcgtgttctaaaggcgcccaaaggcctgaagaagcctgnccgaccgaaacctgcgggggaggagcaccggggggagaaggccctggcggagaagaatcccactgccgagaagcgtgtccctgcgaccaagtccaggtgcaaggaggctggcaagaacaagggctagaagaaggcgaagatgtcggtggagacgtacaagacctacatcttccaggtgctagggcatgcgcacccggatatcggcatctggctcaaggccatgatcatgatgaactccttcatcaacgacatctttgagaatat

SEQ ID NO: 63619 - DNA, 2475 bp, Zea mays
  Clone ID: MRT4577_158020C.1
aaattcgggggtgactagctagctgttcgtcccgtgtcccgttcctcctcgcccaccaccaccgcacgccggacaaaaccgctctcctcgccacattcgcagcccccctcgctcgcgcacacgccacaccacaccaccagtacactgctctacgccacagtacagcagcgggcggctggctgcctaatctctccagctctttcgtcccctcgccacgccgcccaccgctgccgcatcatccgcccgttgcccgccgtcgtcgcctggccagcggcttccgcccccattcgccgtcgcagcgcgccgagccccgtcccagatcgccgcggcgcttcctgccgccgtcggcgcggcgcagggttgaaatctatttgaccactcagttataaccatttctggtctgaagatgcttcgtcaatgacatctggaaactgtaatagtatgcgctgatcttctatgcttcaccacctgactatcaatgggctctttcctgtggaaacagcccagctacctcttcattttgataattcttcaccttgttgctcatgaggcaagaacgctgagttcagatggtgaagcacttcttgccttcaagaaggcagttacaaattcagatggagtctttctaaattggcgtgagcaagatgcagacccctgcaattggaagggtgttagatgtgatagtcatagcaagagagtgattgatctgattcttgcataccacagattagttgggcccataccacccgaaattggaaagttaaatcagttgcaaaccttgtcactgcaggggaacagtttgtatggttcactccctcctgaactggggaattgtaccaagctgcaacaattgtatctacaaggaaactatttaagtggatacatcccttcagaatttggcgatctggtggaactcgaggcattggacttgtccagtaatacattgagtggatctgttccacattctcttgataagttgtccaaacttacattattcaatgtttccatgaacttcctgacaggagccataccatcttctggttcacttgtcaatttcaatgagacatcctttgttggcaaccttggtttatgtgggaagcagataaacttggtgtgcaaagatgcacttcaatcatcatcaaatggtctgcagtcaccttcaccagatgacatgattaataaaaggaatgggaagaattcgaccagacttgttataagtgcagtggcaacagtgggagctctcctattggtggctttaatgtgtttctggggttgctttctttacaaaaattttggaaaaaaagatatgcgtggtttcagagtggagctctgtggaggctcttctgtcgtgatgttccatggggacctcccttactcctcaaaagacatcctcaagaagctagagactatagatgaagaaaatatcattggagcaggaggcttcggaactgtttataaacttgcaatggatgatggcaatgtctttgctttgaaaaggatagtgaaaacaaatgaagggctagatcggttctttgatagagaacttgagatattgggaagtgttaaacatcgctatttggtcaatctccgtggttattgcaactccccttcatcaaaacttttgatatatgattatcttcaaggtggaagcctggatgaagtgcttcatgaaaaatctgaacagttggattgggatgcacgtattaacattatacttggagctgcaaaaggcttgtcttacttgcatcatgactgttcgcctcgaataatacatcgtgatattaagtctagcaacatcttgcttgatggcagtttcgaggcccgtgtatcagactttggacttgcaaagcttttagaggatgaagaatcacatattactacaatagttgcaggaacatttggctaccttgcaccagagtatatgcaatttggcagagccaccgagaagactgatgtctacagttttggggttttggtactcgaaatactcagtggaaagcggcctactgatgcatccttcattgagaagggactaaacattgttggatggttaaattttcttgctagtgagaaccgggagagggaaattgtcgacctgaactgtgaaggagtgcagactgagaccttagatgccctgctctctcttgccaagcaatgtgttagctcctcgccagaggagaggccgacaatgcacagggtggtacatatgctggagtcggatgtaattacaccgtgccctagcgacttctatgattcagagtagtctcctggacaagccacgctgctgctagtttcccgtgggggcgcattcctttattctttgcgtatattgtgtaaatgcattgccgcggtgtttggtctccaatcggctggctcaacgggtgacttttttttgcgtctgtatacctatgtatgtatctgtcatggtacaagttggctatatgctgatttaataataagagagaacttactagt

SEQ ID NO: 63620 - DNA, 307 bp, Zea mays
  Clone ID: MRT4577_158021C.1
acctttctattggtctttttgcttgccttgggtgatttttgctttgtctggtttcgcacgacgggggggaaaagaacccctgcgggcctcaatccaccacatttttgggctttctttttttgcaggacatggtcatgatcacccttttttaactgataaccggcaccctttacaggggcccaggccggaccttttacaaacgccccgggccctgcccatattgctctttgccgggaagtttggccacggtgggacacttgacagccatttgccccacccgtcccaggacccgtgggcggacccgtgg

SEQ ID NO: 63621 - DNA, 321 bp, Zea mays
  Clone ID: MRT4577_158022C.1
cttgctttcgaccattgtgacacggacacaccgccaccaatatttttatctaacacgattaagaagtaggaatgcaatgttcctttaagcattttcctttgggtttggagggggacccaagaaatgctacatgctttatttgcttctaatgaaaatgattgatctgtcatcggttccaagtgatagatctgtcggctaatcgtctcaaggagaaggatccatccctgattctgtacctgcacttaaaagcgcacaatgtcgaaagagaacttgacatcagatgcaatttctctgtcctagaaaatatgcctcaaactttct

SEQ ID NO: 63622 - DNA, 570 bp, Zea mays
  unsure (1)..(570): unsure at all n locations
  Clone ID: MRT4577_158023C.1
ccggcctcccaattcgcaacctcgcctccgcctctcctcctacccctccgaaaaagcaagctccggccgggccgccaccaccaccaccgcgcgcgcgtgcacgcgctcccacacacagacagacagacagacagacagagtgagagacgcacggtggttcggggtctcccttctgccaggcgcacgaggagccatggcgcagcgcgacaagaaggaggagcccacggagctccgggcgccggagatcacgctgtgcgccaacaactgcgggttcccgggtaacccggccacgcagcgcgacaaggtcttcggtgttattattattacgctgttcctttgattttaatctcctttttttttaaaaaaatatttgtcctatgggaatgggattgggagaagaggtggatgaagaantagtggagtaataataatgggtggtgggtgcagtggcggtggttgagggcccgaaacgatgaacagatgggttggattgggttggtgttgtatgtgtcacacgcaactttggacagaactattatactgaaaaaaaaaaaaaaaaaacccgcggcc

SEQ ID NO: 63623 - DNA, 302 bp, Zea mays
  Clone ID: MRT4577_158024C.1
ggagggggggggaggttggacaccacccgtttgaaaaccaaaagggaaaaaggcgtttaaccattttaaagccttatttggtataaaaagttcagttcgattaaattaaaaaaaaggaatgcaacataacgttataacctacaaatcctggaatttaagttccaaagttttacaggggaccaaaaaaacactttgtttttgttaaaaagggctcttttttattgaaagaaaacccgcgttatggggtaaaaatcattatttgtgcctttttcaaaaaacaaaattcctccaacctttatttt

SEQ ID NO: 63624 - DNA, 608 bp, Zea mays
  Clone ID: MRT4577_158025C.1
ggcctccaattcgtacctcgcctctgcctctcctcctaccccctccgaaaagaagctccgcccgggccgccaccaccaccaccgcgcgcgcgcgcacgcgctcacacacacagacagacagacagacagacagagagagagacgcaccggtactcggaccggcacggctgcagctacgactacaggggcgccgcccgggacgccatcgcccgggagaacccggtggtgcgcgcggccaaggtcgttaggttctgatccacggcggaaggaaggacacaacacaaggctcgcagggcggagaaggggaggaggaaggcgtgcagacaaggtcttcggtgttattattattacgctgttcctttgattttaatctccttttttttaaaaaaaaatatttgtcctatgggaatgggattgggagaagaggtggacgaagaatagtggagtaataataatggtggtggtgcagtggcggtggttgagggcccgaaacgatgaacagatgggttggattgggttgggtgtatgtatatgtcacacgcaactttggacagaactattatactagtactaagcttctcgtgaaaaaaaaaaaaaaaaaagcggcc

SEQ ID NO: 63625 - DNA, 220 bp, Zea mays
  Clone ID: MRT4577_158026C.1
tcgggggtatgtcttcaagatcacgggtggatgtgacaaacaaggctttccaatgaagcaagggggtctgacttctggtcgtgtgcgccttttgcttcacaaaggcactccctgctttcgcggatattgcaagcgtaatggtgagcgcacgaggaaaactgtacgtcggcgtattgtgagccaagacccatatgttatcaaactctggaattgttaaaaa

SEQ ID NO: 63626 - DNA, 626 bp, Zea mays
  Clone ID: MRT4577_158027C.1
ggccggcctcccaattcgctggccgctccggcggccgtggccgccgccgcgggccaggctacggaagccgcggcgagggcgtccgcgagccggtgctccagctgccggaagcgcgtggggctcacggggttccggtgccgctgcggcgagctcttctgcggcgcgcaccggtactcggaccggcacggctgcagctacgactacaagggcgccgcccgggacgccatcgcccgggagaacccggtggtgcgcgcggccaaggtggttaggttctgatccacgacggaaggaaccgcgccgcgcgcgtgcgtgcgcagacgggaaggaagtacacgacacaaaggctcgcagggcggagaagggaggaggaaggcgtgcagacaaggtcttcggtgttattattattacgctgttcctttgattttaatctcctttttttaaaaaaatatttgtcctatgggaatgggaggagaagaggtggacgaagaataatggtggtggtgcagtggcggtggttgagggcccgaaacgatgaacagatgggttggattgggttgggtgtatgtatgtgtcacacgcaactttggacagaactattatactagtacgtactaagcttctcgtct

SEQ ID NO: 63627 - DNA, 1504 bp, Zea mays
  Clone ID: MRT4577_158028C.1
cccccccccccccggggtttaatggcccgttaaagggggggtcccttttcccattaaggtgggcaaatttttggaaagggggtttgggggggcctttttttttttttccccacttgggaaaaagggatttttttcaaaaggatttaatttgggtaacccaaggtttttcccatttccccgtttttaaaacccgggccaggaaattaaattttgggggccccaaaaaaaaaacttttaattttgcaaacccacggggagtaaaactttggttcttttaaaaacgggcccccccttttttttttttttttttttttttttttttttttttttttttttttttttttttttttttttttttttttttttttttttttttttttttttttttttttttttttttttttttttttttttttttttttttttttttgacgagaagcttagtactagtataatagttctgtccaaagttgcgtgtgacacatacatacacctaacccaatcaccaacccatctgttcatcgtttcgggccctcaacccactgcaccaccaccattattattactccactattcttcgtccacctcttctcctcccattcccatagccataggacaaatattttttttttaaaaaaaaaggagattaaaatcaaaggaacagcgtaataataataacaccgaagaccttgtctgcacgccttcctcctccccttctccgccctgcgagcctttgtgttgtgtccttccttcccgtcgtggatcagaacctaacgaccttggccgcgcgcaccaccgggttctcccgggcgatggcgtcccgggcggcgcccctgtagtcgtagctgcagccgtgccggtccgagtaccggtgcgcgccgcagaagagctcgccgcagcggcaccggaaccccgtcagccccacgcgcttccggcagctggagcaccggctcgcggacgccctcgccgcggcttccgtagcctggcccacgcccgcagccgcggcagccggagcggccagcgcctccaccgctgccgcgtctacgacgagcgctgctggcctcggctgcgacgccgcggacgccagggaagaggaggaggaggtaggggacgacggcgacctcgacgccgagaagcagctctggcacaggttctgcgtggccgggttacccgggaacccgcagttgttggcgcacagcgtgatctccggcgcccggagctccgtgggctcctccttcttgtcgcgctgcgccatggctcctcgtgcgcctggcagaagggagaccccgaaccaccgtgcgtctctcactctgtctgtctgtctgtctgtctgtgtgtgggagcgcgtgcacgcgcgcgcggtggtggtggtggcggcccggccggagcttgctttttcggaggggtaggaggagaggcggaggcgaggttgcgaattgggaggccggccgtgaccgtgagcctgtctgtgatccgcgcgggagggggggagggagcgcggagc

SEQ ID NO: 63628 - DNA, 596 bp, Zea mays
  Clone ID: MRT4577_158029C.1
aacaatggcttatgctaacgcgtccaacaagttcaaaggatttttccacgtacgtccaacaatggctctttgcacgaatagtcaaggcacattggaggccttgcagggctttgatggcatggcacctagaggtcaataggagatgatacacttccaacaagctccatagcagatattcataggccacagcatgaggccactccttgcctcctcgtttataacaatgagtacccttgaggattgcttgacacacgacgcaaagaatgcagtccatatatacctaggactggtgattaccacatgtcatcgcaccacagctcgcgagtagagtctgagcggcaccccaagtttgaccaatgcattcccatgagaccggtgctgagcacggagtccaccaggcaagggtaaacatactgaaattgaacgaagtccgtagactgggaccaacgagttgtatgaacagggttcaaaagtcatatgcggggcatcaacagtcaagtgctttagttctgggaacacctccacgggaagggaccatggtaccagagagaaaacactcagcagcagattggtggggcacatgacccctgcatatt

SEQ ID NO: 63629 - DNA, 372 bp, Zea mays
  Clone ID: MRT4577_15802C.1
ccttaaaaaatttttttttcaaaactgagcatgactcagtaaatcagtctgttctgtttttaacaatatgggacctatttgttttggtgtataacttgccacactttacctgaacttttctggttaagggtagttcttcaattcgaacgactataacttaaacaaagggtggtatagttaggtacaaaccaaacatgcccataatctctaatttatatgcatgaagggctttcactgtcagcatacttttcctgaggaattatcaaacgtagatcctcgttattgttgttgacctgaaccaaagctgcagtcttgtatgctaggaaacccatcattcctggaagaacccaaaaactgaaaaaactatttttt

SEQ ID NO: 63630 - DNA, 787 bp, Zea mays
  unsure (1)..(787): unsure at all n locations
  Clone ID: MRT4577_158030C.1
gtaccctccgagnctcggccggggtgcccattatcagaccgctggaaaattttcctagttcgctcggtccgcccgccgccccctcgcggcctcgcctccgcgtccgcgacgactcgccagagaggcgaggctctggcctccgagatctccggtaaggcgacgaaatgtacgccgacacaatgaagggtcaccaacccaaaggggacaagggcaatagggacgactacaccttcagcttcagaaggctcgcggatgtctggccgacatactttcccgaggaggccgaggtcgggctgtcagaatccgaccagaaggtccgcctcaccaccgccctggctgatttcttctccacgcccgagatggcggaagtccttcgctcacgggttgaagatgatggcaacgacatcttgtgtcttccaattgatttccagcagcttcaggagttacgcatgtttattgaagataaactcaatgagtccccaaaagaagccttgctttgcatgggagttgcagctcatctggctctgtgctcggacaaggacaacaaaaggaacaagataaatatcaggctttacaacacgggagcagctattgcattaaagaaactaaaagcagcctttattaagaaacttgtcacagtgcgtggtactgtgctcaaagtcagcactgtaaaacctcttgttttgtggttgaaattccgatgcatgaagtgccgtaaagaataccccgtgtgttttgtgatggaaaattttctcctccaaggtcctgtaccatccagggatgcaag

SEQ ID NO: 63631 - DNA, 564 bp, Zea mays
  unsure (1)..(564): unsure at all n locations
  Clone ID: MRT4577_158031C.1
ccnggcccgggaaaaatcattcacatctactgtaatatctactacatcaattgattcgtctacgttgcaaagacaaacaaaccctggcataatatcatccaatatgcaacccatcctaagagccatgcctgtcgaaaagattgtccctcttctcttgacagttggcagcgccacagtcgttgtcggtggtgttcgcacacaactcaagccacagacacaatcacgatcttttgatagaagacttgcctcttatagcacagcacaaagcgaaaagacaatgacaaccatgatttatagcacttggctagaagattagacaaccatcggtctagaaatgcaggcgtttcagaccacatcaacttcacgacacataacgcatattaacgaagaaacatacacatattaaaatacttgctggcaagatcaacttctcaagcaagacaagtacactacaactattatactacggcctggattagataaagacacatacactagcgagcgatagaattttgggcaaggatcccacttagattacaaaaaaaaaaaaaaaaaaccgcggcc

SEQ ID NO: 63632 - DNA, 161 bp, Zea mays
  unsure (1)..(161): unsure at all n locations
  Clone ID: MRT4577_158032C.1
agtaggaacaattcttatcatacaataacacgaattctcatttggtactcctatggttctaggagnctatatatttaaccaaatgagaattngtgttattggatgataagaattgttatttggntaaatatatagaggggggggggggggttttttttttt

SEQ ID NO: 63633 - DNA, 425 bp, Zea mays
  Clone ID: MRT4577_158033C.1
gcctcgtccaggcaacagcacaagcgacgacgactacggcagcacaagcgcaggaaacgcctgcacagtggagcaagtagagaacctcaagtcagctctgagcgtgatgcccatgtggtcagccatggtgatgtcgttcctgctgcagagctcctcgttcggggtcctgcaggcagccaccatggaccgccgcgtcggcgcaacaaggttccagatacccgcgggctcgatctcggtcttcgagatcctgaccttcacggcgtggtcaagctgctacgacgcctgcatcgtgccggtcctccggaggatgacggagcggcagcgcgtgctgacgctgaagcagcgcatgggagtcggcgtgtccctggccgtcgcctccatggcggtggcatcggcggtggagacccatcggaggcagcacgccg

SEQ ID NO: 63634 - DNA, 207 bp, Zea mays
  Clone ID: MRT4577_158034C.1
gtgccctcctacttattgttgcatgtcgcttgcccagatggccgggtgggggttgcgcgctttatctccttccattttctgagctagttgattctgtacgtgagtttgttcacactttttatcgtatttcttcttttatgatcaccgtcctgctgttttaatcgacctacacttctttgtgggttctatggttttgctgcgcaattt

SEQ ID NO: 63635 - DNA, 185 bp, Zea mays
  Clone ID: MRT4577_158035C.1
agacaggcctttttttttttttttttttttgttggtttttattttggggttgggaccccagaggagatgcgggatttatagtcacactacattcaggccgggccctgggtttgtcaaaccaggacctttccaacggcccgggtaattctaaccgctcctggctaaggggccccttcggggggggg

SEQ ID NO: 63636 - DNA, 279 bp, Zea mays
  Clone ID: MRT4577_158036C.1
ttctgctcttaggctgtccctctcggttcgtctgccggccggactgagccaatgcctccggccatggggtgcgcgaacgccctaacgggtgtcgacccgggcggccagcttatgcgccggtagctagctcggattctgactgagaggcgctgattcatcatccgtcacacggtagtttttcaccattggttttttaaccaagagggacgaccaattgggtgaatcaacggttgctgtcggtctagggtgtaccacgatcggagcccggtcattagaagg

SEQ ID NO: 63637 - DNA, 484 bp, Zea mays
  Clone ID: MRT4577_158037C.1
acaagcggaacacaaggtatttacataaaagagagccaggatggcgcccttggcacaattaacatggacaaacaggcagaaaagggtgggagcattcaatcaggccctggggatagggttcaaagggaaacagggccaacccaccctagcctaaaaaaaccaatagggcccactttacaaaaagcttcaggggaaacagggggggacaaatctaaaaccctacctaagttacagggaaggaaaccggggggcatgcagttcccgaggatgttggggttttgaggccctggatctggatacagttacttggcagggggaaaacaaaactaagggcttttccactggctcttccttttccgggaaaagggtctccctgttggcaggggcccaaaagccacccacatttacaagcatgctggggaaagcccccccttgcttgcaaaaaaaaaaatctgatagcgaaaccctgaaaggatctgggggc

SEQ ID NO: 63638 - DNA, 256 bp, Zea mays
  Clone ID: MRT4577_158038C.1
gagcgttgagaatttaacataacatcggttccagaaacaaccaaagcgcaacagggtattgcagttcctatcccgcagcagcagcagctgctactactaatgctgattaatgatagaaacgaaacaaacccacgacagatgggggccggcctactactaccacgaccaccaaaaggagcaaatggttagtttttcatgactgaccgggactgaatgggaaacaaactattctaggcctggagaactcccttcttct

SEQ ID NO: 63639 - DNA, 440 bp, Zea mays
  Clone ID: MRT4577_158039C.1
ggggaaaaagccaaattataaaaaaaaggtacaaggatacaaattacggaaaactaaagcagtaaaaaacacgggtacaaaattaaacgccaaatggaaaaaaaatcgcattagggaaacaccagataaaaacacgggagggaaaaattaaagccgtccaaatcggggaccctgaaaaaattgggccaaaactgaccggaaattggaagccgatgtcaaaaccaaaaagggccttgtaataacgggaaagggcaaccgagctcctttgttggggaactgaggaaggggagcgtaaacccaatggcccgggggttgggggcttcccaatttaagcaccttttaacgtccgtttgccaattgaaaaagcctggggccaagcaccggaaggacgggctttggaagccgttccgctggtgttccccttggaatggcttgggggg

SEQ ID NO: 63640 - DNA, 126 bp, Zea mays
  Clone ID: MRT4577_15803C.1
ccgtgttcaaagactgcctaacatctccggtttgagtcaagctgattgtcgttaccgccttcgttctttaggtttccttgtagacctaatacaagcgtttgtgcgtcgcaacaggaaacaactatt

SEQ ID NO: 63641 - DNA, 438 bp, Zea mays
  Clone ID: MRT4577_158040C.1
tcggttcacaaggctgttggtcatagaacttttactgcagagactgtgaagctagagatcgttgtgttgttatcctaccatacacttttgaacgcacaggactgccatgctgctatgcttggccgactatcatatgctgtcgagtctgttatgcagacccttgtcggactccgcattagcgtaacgattctcaacatacttaggatcctgggcactagacacatgtacatctggcttaactcgttgcacaaccatagggccttatagggcgtgaccatgattgtcgctgatcatactggcacttacgaccagatggtcataactgccatacctttctagagcacgatttacgctgaccaggtcatactttgacatgccatgatccagaacggactgttacctgtgatggctacttgactgacaacgcctagcatgaat

SEQ ID NO: 63642 - DNA, 600 bp, Zea mays
  Clone ID: MRT4577_158041C.1
ccggccgggatatgatcctcaccagtaccatctggcgtctgcctgctcctccgcctgtattcggtgagcgccgcaagccagcgacgagcatgacctactgagacgaggaccacttcgaatccacggccgatctgcaagagaccagcagctcagcggcagagggctggtactgcctctaagaacggatctcatctgcgttaataaccggcatgtgcaggttacgcgggtttctacctcaaagactggtacgaatgcaaagggcacatgccactttgatgccatagatgtatttaccggcagacagatcgtagatattgcaacgtcgccatgcaactgtgcaatgccgcatgtgaaccggactgagtaaccgctgattgacatatccgaggatggatttgtgaggcttcttacttcacaaggcaacactaaggatgctgttagactcccaactgatgagactcttgtgtgccagaacgatggaggggctgaaagcggcaaggatcttgctgtgactgaccaacctgctatgggggatgacagatctgcgcggtgaacgatggtggacccaaggaacttccctggcttgggataatggatctc

SEQ ID NO: 63643 - DNA, 853 bp, Zea mays
  unsure (1)..(853): unsure at all n locations
  Clone ID: MRT4577_158042C.1
cctcgaggccggccgggccgggcgccggcgaggcgcgaggagggccagcaatgatagtctcctcccactcgcagtcgcaggcgggccgccggcggcgatggaggtgcttgctgccgctcctcgtaggcgccgccttcctcgccgagatcgccttcctcggccgcctcgacatggcgaaggacgccgaggtggtcgagagctggaccacctccttttaccgccgctcctcccattggggtgaatccgtgggccggggcgcggtcccgagggcagacggcgacggcgacggcgaggacgaagagatccggcggtgcgagcagcggctcgagagggaggacgccgtgccctacgaccgcgactttgacagggatcccgtgcttgtcggtggcgctgccaaggactggagtaaatgctatgtaggatgtcaatttggtttttctgccagtaagacacctgatgctacttttggaattgcaccagatccttctgtagagggtatcctgagatcaatggaatcatctcaatattattcagagaataatattgatgtggctcgagggtagatgtcccagttggctacttttcatgggctgaatatgatatcatggcacctgtgcctccaaagactgaagaagctcttgctgtagcctttatttctaactgtggtgcacggaacttccgtttgcaagcccttgagatgcttngaaatttggatgtcaaaatagattcatatggtagttgtcatcgtaaccgtgatggcaaagtggacaaagtggacaccttgaagcgctacagattcagcttgggcattgagaanttctatgaggagggatacgtaacagaaaagtttttt

SEQ ID NO: 63644 - DNA, 812 bp, Zea mays
  unsure (1)..(812): unsure at all n locations
  Clone ID: MRT4577_158043C.1
ttgaattggagccggccgaacagaaccaaatccgtgcccgtgcgaggaagatctcagcggctgctggcgcggggggtcgttggctcgttccaaactcgcctgactccgcccaccgtctcttggtcgccccacacgatctctccaccactccccacccggcgccggcgaggcgcgaggagggccagcaatgatggtctcctcccactcgcagtcgcaggcgggccgccggcggcgatggaggtgcttgctgccgctcctcgtaggcgccgccttcctcgccgagatcgccttcctcggccgcctcgacatggcgaagaacgccgaggtggtcgagagctggaccacctccttttaccgccgctcctcccattggggtgaatccgtgggccggggcgcggtcccgagggcagacggcgacggcgacggcgaggacgaagagatccggcggtgcgagcagcggctcgagagggaggacgccgtgccctacgaccgcgactttgacagggatcccgtgcttgtcggtggcgctgccaaggactggagtaaatgctatgtaggatgtcaatttggtttttctgccagtaagacacctgatgctacttttggaattgcaccagatccttctgtagagggtatcctgagatcaatggaatcatctcaatattattcagagaataatattgatgtggctcgagggtagtggacaaagtggacaccttgaagcgctacagattcagcttggcatttgagaattctaatgaggaggattacgtaacaganaagttttttcagtcactggtagcagggtctat

SEQ ID NO: 63645 - DNA, 395 bp, Zea mays
  Clone ID: MRT4577_158044C.1
caaccggattttggttgggttttttttttttttttttttttttttttttttttttgggaaaaacaacaggtggccttcattaaacaaaaggggttcccctacctgccccagtggggccccccaaaaaagggcctggccagacaacccgggacaacagcacattggttggtgggaaaagcaagcctcccccccccgaaataatgcccgattgaaaccccccccgggccagcccaaaaaaaaaaccctggtgtcaattccacaacctggttcccaaaggagttattaaaaggtgttgggggacccccaaactttttcccatgcgagaaaacattttgtcctagaccgccccccacaagatctaaaaacattccttaaatccttttaaaaaccttttt

SEQ ID NO: 63646 - DNA, 1962 bp, Zea mays
  Clone ID: MRT4577_158045C.1
ggaccctcgaggccggccgggccgggaatctccatagggatgcggccactccatgtttctgacatgtgcggccgaacataaccaaatccgtgcgaggaagatcccagcgggctgctggcgctggggtcgttgtctcgttccaaactagcctgaccaggtcgtccaacgactccgctcacccttcgcggtcgcccgcgcgatctctccaccacttccccgccggcgcctgctaggcgtccgcgaggagggccagcgatgaagggctcctcccactcgcaggcgggggcgcaggcggtacggaggcggcgctgggggtgtcttctgccgctcctcgttggcgccgccttcctcgccgagatcgcgttcctcggccgcctcgacatggcgaagaacgccgaggcggtcgagagctggaccacctccttttaccgccgctccgccgatttgggcgatgccgttggcgggggcgcagcctcgagggcaggcggcgacagcgaggacgaagagatccggctgtgcgagcagcggctcgagagggaggatgccgtgccctacgaccgcgactttgacagtgatcccgtgcttgtcggtggcgctgccaaggattggaataaatgctacgtaggatgtgaatttggtttttctgcgagtaagacacctgatgctacatttggaattgcaccagatccttctgtagatggtatcctcagatcaatggaatcatctcaatattattcagagaataatattgatgtggctcgagggagagggtacaagattgtgatgacaaccagcctttcttcagacgtaccagttggctacttttcatgggctgaatatgatatcatggcacctgtgcctccaaagactgaagaagctcttgctgcagcctttatttctaactgtggtgcacgaaactttcgtttgcaagcccttgagatgcttgaaaacttggatgtcaaaatagattcatatggtagttgtcatcgtaaccgtgacggcaaagtggacaaagtggacactttgaagcgctacagattcagcttggcatttgagaattctaatgaggaggattatgtaactgaaaagttttttcagtcactagtagcaggttctattccggttgttgttggtgctccaaatattcaagagttttctccgggagaaggcgcaatattacatattaaggagcttgatgatgttgcttcagttgctaagacaatgaaaaatattgcttcaaaccctgatgccttcaatcaatctttgaggtggaagtatgatggtccatccgattctttcaaagctcttattgacatggcagcggttcattcatcttgtcgtctttgtatacatattgctaccaagatccatttaaaggaggaaaggactccaaaatttacaaatcgtccttgtagctgttccaccaaaaagggaacaatttaccacttatttatccgagagagagggcggtttaagtcagagagcatttacatgagatcaggccagttaactctgggagccttggaatccgcagtgctcggtaaatttaggtccctcaaccacgttcctgtatggaaggatgaaaggccaccgagcattagaggtggggatgacctgaaattatacagaatttacccagtcggtctaacgcaacgtcaggctttgtacggttttagatttagggatgattctgaactcgagcaatatatcaaagaccatccctgtgcaaagcttgaagtaatttttgtgtaactactatgccctaggcttaacgttttccccccgattcttactgaactctgtgtgcgagtttcagttgtactgtaatgtagagtgttatgtgtagcaaagaaactcatgccagtacggatcatgtgtcggttgtaaattttccatgacagtaaacatcattccttcttttcagtaaaaagcaaacaaattaacacaattaataaaaatatt

SEQ ID NO: 63647 - DNA, 404 bp, Zea mays
  Clone ID: MRT4577_158046C.1
atcggaaaaatgtcctccctcagtaagggggtactgttcactatttataggcacgagacacagtctgtgaggaattacaattatgtccttcataagggattacaacagcgatccaaacatttatggactgaaaagtcattctacttttaagtcggtttgtaattccgaagcttcatgaagaagaaccttcggtcatctcctgcggacagcttcagctgaagctgcttcttcctacaagaccttcggcgcgacgaagcatagtcccaacaatgtctatctggtcctttggcaatctatttttgctaagatattcctttgtttatccagaaaatggtatctataatataactattaaatttgaagtctacagtatccttgaagtattcaatgcttgcaaacttgtc

SEQ ID NO: 63648 - DNA, 765 bp, Zea mays
  unsure (1)..(765): unsure at all n locations
  Clone ID: MRT4577_158047C.1
tgcaaggtgctaaagatagtcattgcatgattgcaagaaggcagtatgaacaatgtaagattgtacccctgcattgctagatgcaatacaaaatttgaacattatgttacaacccatttcacgttcaggcacacttccagcctaagtatacatgaaatcgatgtatatgtgtaatttcctatcagccctacgagaagtagatgacagcagaatctattaccactttacatccagcgacagcggttctggtggcaaaatgaatgacagaaactttgtgaaggaaatatttgaagtcaggctgccccaagtagtggtgtccactactggaaattgcctcctaaccttcttcaccgaaatagccttcagcctatcgtcatcttccactctagctataatgtcaactggaactcgctggaccatgggtctcgttttccactctggaacatcttcccagatgggatcatcctcagtgacatccctttcaaactccaaacggaatttcaccagaggtatcgatgtcactttagcttcaatgaagtgcactgaactattctcctggtttcttttgctaaaccaagtcttcaagatcttttcaagctttatcagtcttgggctaattgaggagaacaaaaattctgagatcaaccgatttgatatatggactttatacttggctgacaataactctatagtgtcatgtgccttgaagaaagtcttcacatgggctncagaacacttgtttgatgcacaacattacgactgatc

SEQ ID NO: 63649 - DNA, 571 bp, Zea mays
  unsure (1)..(571): unsure at all n locations
  Clone ID: MRT4577_158048C.1
ccccgcgtccgcggncgcgtgggtttttttggcatatgaaggtccctgaaattctctctgaagaagtgcttggaaagatgggcgcgccccctaagcccgacgtgccagtcatcacaccgcaggaacttgcagaggctgacggtatcctctttgggtttccgacaaggttcggaatgatggcagctcagatgaaggcgttcttcgatgccaccggtgggctctggagggagcagagcctcgctggcaagcctgccggcatgttcttcagcactggaacccagggtggtggccaagagactacaccgtaagtgctgttccgcttccgcacatggttacagctacaacatgcaggcctgatgtccaaagatcgcgattcgtttgttatattgtcttcattcattcaggctgacggngattacccagttgacgcaccacggcatggtgtttgtgcccgtgggctacaccttcggcgccaagctgttcggtatggaccaggtccagggtggtagcctttacggtgccggtacgttcgccgtcgacgggttgaggtggccgagcgaggtggagctgg

SEQ ID NO: 63650 - DNA, 1060 bp, Zea mays
  Clone ID: MRT4577_158049C.1
cacgaggcggaaatacacccctgcctataaatactctctccacttaccggaaactgacaccgccaccaagccagcaggtgctgcgatacattgcacacaacaacaaccccagctctctgccccagcccgcccacaggagttcccgcatctccctctggtctggtcacaggagttccgagacctctccaatggcggttaagatctacgttgtgtactattccatgtatgggcatgttggcaaactagctgaagagatcaagaaaggtgccttatctgttgaaggtgttgaggctaaaatatggcaggtccctgaaattctctctgaagaagtgcttggaaagatgggcgcgccccctaagcccgacgtgccagtcatcacaccgcaggaacttgcagaggctgacggtatcctctttgggtttccgacaaggttcggaatgatggcagctcagatgaaggcgttcttcgatgccaccggtgggctctggagggagcagagcctcgctggcaagcctgccggcatgttcttcagcactggaacccagggtggtggccaagagactacaccgctgacggcgattacccagttgacgcaccacggcatggtgtttgtgcccgtgggctacaccttcggcgccaagctgttcggcatggaccaggtccagggtggcagcccctacggcgccggcacgttcgccgccgacgggtcgaggtggccgagcgaggtggagctggagcacgccttccaccaggggaaatacttcgcgggcatcgccaagaagctcaagggctctgcttgatctgcacatacccctctgtcagtatcataaaacatttacagattcgtcatacccgtcaatagattggtctgtgttctctcgtggtgcctggatgctatgtagttcattggtactgctgccgtatgaatttcgatgattgctctggtgacttggtttgtaatctggagttggactatcgttgtttctgccgcataaatttcgatgattggtcaagtaaaaaaaaaaaaaaaaaaaagaaaaaaaaaaaaaaaaaagcggcc

SEQ ID NO: 63651 - DNA, 346 bp, Zea mays
  Clone ID: MRT4577_15804C.1
gtgggggagggcgactcgctgtctaataattaaggatagcacataacaaaggcgcggcgtattacacaactggggcacatgaattacaaggccgggtttggataaaatcaacttccaacttggcatgaggaatggaatggcactgcacataacatattacgggatcatttgaaacagccacaaacacattcttttaagaccggcaccatctaaaagaagaaggtgaacctcctttaagacctactctagaacgggatcgccctggtgatcaaccgaagggagatggctgtcatgctacaatgccgataaacgggccgacccaaaagaaccactgccaaggcacaaa

SEQ ID NO: 63652 - DNA, 435 bp, Zea mays
  Clone ID: MRT4577_158050C.1
cggaaaacaagacataagggggggggcaggggtaataggggcccccccccggatttttggttttccttcaacaggggggggctttaggggtcccgccctcaaaatggggttaatgggccgggatttttttttccccgacggggtttggggttcaggggaagcaaaacaaaccctgggtggggggggggaaaaacccccgccaagaagatccctcccccaaaggggcaatcaactttttgggaaaccaacatttgggggaaatcttccaaggggtggcccccatgatctggggttggccccagggcccaaggggggctttataacacccctttttggggggccaggttccccggaaaaaaaaaaatgggccttgggggctctggcccataggggggtcccgggaagcatttcacttccttttcacccggttttttt

SEQ ID NO: 63653 - DNA, 371 bp, Zea mays
  unsure (1)..(371): unsure at all n locations
  Clone ID: MRT4577_158051C.1
gacaaacaacatctttgactgggcacatatcacataatcgaaaccatagcatgatccacgcacggatcactatatccaaacacattgcctggggagtaggccacaacaattgaccggcaagcgtacgtgtgcatagcaccagtgcacgatcagagagagctgatggttgactgcagatgcagagcttccaagtgagcaactcattccccgggctcagaacgccggataggcaccaatgcctgcatggcgcatacttcctaatgaagaaccactgcctatgacgaggacccacccacgtgattgttgtaggtatgcgcatgcgcatacctgccgtaatctgacatacggncgaagtttaccagcaccaacag

SEQ ID NO: 63654 - DNA, 197 bp, Zea mays
  Clone ID: MRT4577_158052C.1
agccgacctgcccaatatcatgttctgtgggatgagaacaaatctacggctgatgggatgcaaacactcaccaacaacatggggtacacgtatgccaggtgcacacgctcaggatcaaacggtcctcctgcatactatgctcatcgggcagcctgccgagcacgggtttacatggagccagagacaagtgacagcgg

SEQ ID NO: 63655 - DNA, 668 bp, Zea mays
  unsure (1)..(668): unsure at all n locations
  Clone ID: MRT4577_158053C.1
cgtcccgtgaaccctaaatatgcatataaaattcacatattatccattcatcattttccattcaacatcacatacacatattcatatcattcaacatcatccaattttcattgtatatcatctatccatcacatttaaatgaccaagcctatcacatattatccattcaacattattatatacacatattcacatcgttccaccatattcaaatgcccacgcgtccgcccacgcgtctcatatccataaaaacaacggcaaagcaagtccagcaatctcgaaagcgaatatgtctttgagaaagtcaatagtgccaaagggcctctagacaagttggtagttggtttcagtagcactctttaggtcctggattcgactatctgtggaagcgaatttcatgttgtggttaaaaaattttctccgtatgtcccataccctgccctcggattaaagccgcagcgaacatggtgaatgaattggatgtctttattcagaacaaacaaactaaccttctctctagatgatgctaacaccgctngaaggggtttggtagatatttgtcataatcactcttgattcttagtatatacaagttgaaatagattgaataactaaggttgagtaagttcagctagaacacagtaagtatagtttcatccaccaaattt

SEQ ID NO: 63656 - DNA, 217 bp, Zea mays
  Clone ID: MRT4577_158054C.1
aaagcacccgcatgccagcccgcgcacgaggacaacacagcccggcctcatggggggacaggacgcaccccaggacccggggaaaaccgccgaaacagcatgcgaaacaacagggcaccaaccggccaggacacgtaaacaggcccacgtagcccgcgcgcaagcaaatgctccggccccctgacggccatccacccgaccataccgctaacttcag

SEQ ID NO: 63657 - DNA, 647 bp, Zea mays
  Clone ID: MRT4577_158055C.1
cattgggtacctcgaggccggccgggagccccaagtggtctagtctttgcggcaaacgtttttcgctacagagaatatggtctcgcagtggctggctctgcctcgcggaactcatccgcgtggagaagaaggtggcactcttgaaggagatatccttcgcacgaggtgcgcgatcgcgtggctagacaacctgaatccctcccggggggtgtaccacaaagctgcctgcatcttcttctgcaacagcgagaaattcgtgatctcctccgaggagaacccactttacctcgccgaggatcggctgagcgagttcaaccgagattgatgcgcagtgcgctacaaatgctgacacttgaacacaaaacagcatgctgatttggatgcacttctcgttgctcattgaatctctgcagctgggctgttgtgtacctaatccttgtcgtactgctactttctttttcttgagatgtactgctgagttgtgggccggatccctgatctacatttttgagcctgagtactagcttgaaatctacaatctcgactacagcaatacatgacctgaatacatttctatgactctatggatttctgctagtcaatctcggataccaaaatgacaaagcggccgctccagctacagcttt

SEQ ID NO: 63658 - DNA, 345 bp, Zea mays
  unsure (1)..(345): unsure at all n locations
  Clone ID: MRT4577_158056C.1
tctagggttcattagatatggntggcgttattatccttaccgtcgaggatactaaacccttattggtcctgctttcgtgcctcgcccgttctaaggactcacacagtgtctcacgtcccgcgttgtccgcggtacttctattagaatcttgtctgtctaagacatcgtggcgtcttggtgttcgggattcgttaccggaggctactatcgtatgcgtcttcggatccgccgagtcctattctgagaaatcataggctggtgattgcgggtccgtcgtgtccctcgttcgcgttaactcggaggcttcgccttccgctaagattttcgagcgtatcgacctgggta

SEQ ID NO: 63659 - DNA, 290 bp, Zea mays
  Clone ID: MRT4577_158057C.1
cccacgcgtccgcccacgcgtccgcggacgcgtgggaaaaaaaaaaaaaaaaaaaaggaaaagagaaaaaaaaaaaaaaaaaaaaaaaaacaaaagtaactacttcagaaaaaaaaaaaaaaaaacataaataaagcaaaaagaggccggccattctaaagaatccaacattcaaaccgagaacgttgtacgcatgaagtacgttatgtatactgctaaacaaagtaagaggccatttgagcatagcttccagtgcggaaactacaaggttccaacaaactgatgatatc

SEQ ID NO: 63660 - DNA, 116 bp, Zea mays
  Clone ID: MRT4577_158058C.1
ggactagtgcccacagcttgcactaatagagaccgattccatcgagattgtcctgagcaaaagagatggagacgactgttacccgccgaccgcctgctcctgccccagacgcgacc

SEQ ID NO: 63661 - DNA, 274 bp, Zea mays
  unsure (1)..(274): unsure at all n locations
  Clone ID: MRT4577_158059C.1
gtatgtggtgcagaacttcatcacggtgccgaccgagatcttggacacgancaacttcagctacgactctcagagcactcatacttgatagcatatcaaaacacatatagttacattccaacttctacataatctctaaggcacatagatagagagnnnntttagaaaaagctccttatttcttaataaaatatactcagcgtgtacacacgcacatctttaacctgtgacaagcaaannctgcattcatgaaaatgtttgtacacatatacta

SEQ ID NO: 63662 - DNA, 690 bp, Zea mays
  Clone ID: MRT4577_15805C.1
gtgtcaagcagggcattcggtagccgagctgaaaacgatcgatgaacatttatcactaatttgaacaacacacttctggggtgacagaataaattggggagatgtaacagcaaaattacagaccaacaaccacacgacccattctcaagctacaaatactcctggccgccgccgtctcgcgaccatgtcggcgaccacctcatcgagcagcgagctcagtacgtggttctccacctcctcaccagcctcgaactcctccacccggaaatcgacccatgtgcccagcccgccgctcatgtccttgtcgacgagctcatcctccgtccagtctcccatgctcttccagctggttacctcactgcagacttgggcctccatgccccggatcagcgttgctgctcctttgctccatgccgcatatcctgcccggaagtaggtcgtgcgtcttgtctccaggcactcattcacgcagtcgaacaacagccgcctgtaccctcgatggcaaaagggcgctttcccttgtgtgtacgcatgcgtattctccagcttctcgaagagggacgagtccaaagctggtctatcctgatcgacaaagagtggtcccagttcatctgttgtcaagttaacactgcttaacacgtctgcaatgtagtctagctctgtgtgtcttgatgttttagaacattgtgt

SEQ ID NO: 63663 - DNA, 1458 bp, Zea mays
  Clone ID: MRT4577_158060C.1
tatttggattgataaaaacaagctcatccagatttaccaactcgaggccggccggctgcctactctactcccggtaccggaggccggagctatccaattcccttcccacccagaccgcgatccctaaccctacccaatgtcctcgccgccgccggcttcgcccatggccgccgagaatgaggcctgcgactgggcggagatgccgtcggacgcgctcgcggccgtgttcgcgaagctggacgtggccgagatcctgtccggcgccgggctggtctgccgcgcgtggcaccgtctcgcggcctcggaccctacgctgtggcgccgcgtcgacatgtgctaccagggggaccagctgcagaccgaggaggtcgaggccatggcgcgcgccgcggtcgaccgctccgcgggcaccatggaggcgttctgtgccgagaccttcgtcaacgacgacctgctccgctacatctctcagagggccccctcattgaagagcctccatctctgcctgtgccattacgtcactaatcaaggttttgcagaggcagttaattgcttccctcagctcgaggagctagacattacattctgctcattgtatggcatcgtgtgtgagactgctgggagagcctgcccgcagcttaaatgcttcaggttgaatgagcgctggtctattcttcaaagcgagtttgcaccctacgagggcatggatgatgacacggaagcattagggatcgctagcaccatgcctgggctccaagaacttcagttgatcggtaacaacctgaccaacgacggactcgtggcaatccttgaccgttgccctcgccttgaatcccttgacattcgccaatgctacaacatacagatggacgacgcgctgagatcgaaatgcgctaggatacgatatctgaagcttcctcacgactccatctccgacttcaagtatcgggcttacatcgtcagcagcatagccaactcgggctctgattttgaggttgatatgtatgatgatctgctggatgtggtcactgaagatgatgatgctgatttcgatgacatggatgatttcgatgatacagtctcagatggaggcatgtacgatgatgacttggatatctgaaattaggaatcggttcaaacagcttttccgtggaccatgtaagtgctgttagctggaatggtttcccatcccttttctttgagattcgggtagctatgatggaatctccctgatgttcatacttctgcgcctctccatttgttaagaagctggagtagctgaactggttttaatcgatgtacaactgttgtttttttattctgaacctttgttaattggtattttaataataacctagggcaaaaaatgtgtatataaacctcctggccatgttagggatgtgtctagatgtttctatgcattatgcatgtgacaaatttcaatttttttgacttcct

SEQ ID NO: 63664 - DNA, 390 bp, Zea mays
  Clone ID: MRT4577_158061C.1
ctcttggacatcatcctcccgaccatcggcgtgtccctccgagtcggctgctgaagaagatagtgctgaatatggctgttgatcacaatgctgggctacatcctcggatatcatccacgcaatcaatgaccctgtcgatgtcctactctgaccagcactagagaggaatactacacgctagactacagcattggttagagccagggggtgctgcacaggggactgcaaagcagaatttaaatcatcatgtggattgtcagacatggcgtaagacgtggtggaaaaccaagtggggaagcaaatatctctgtcacccaacttgtgacctatcttgatagcgctccagatagtgaatcagtaattgagattctacttgagatactacaagag

SEQ ID NO: 63665 - DNA, 237 bp, Zea mays
  Clone ID: MRT4577_158062C.1
gttgagttggtcgattgcttctgccacgctgtgataacctgaggttttggaatgtgcatcagtttcattgctatataagggctgttactggactttgtatggagattgaaattgttagacttgtattgcagtgtcatgtctaggatctagtacacctcatgtaccctccttactcttatcgcatcacttctactttgtgacaaattggattttcctctggtaaatgggatggccgtg

SEQ ID NO: 63666 - DNA, 909 bp, Zea mays
  Clone ID: MRT4577_158063C.1
ccgggctgcaggaagccgccctcgccccacctctctcctctgccgtcgtctagctcggacccgcacccagccgtgaatacccatggcgcccaaccccagcttctttctccctcagctcccatggcgctctctctctctcctgctcgctctctggtgccgcgcgtcttctctgctcgtcggtgctcgccgcgggagacgacgctcggtcgcccaaccttcctgctcctccctgctgtcgtgtccctcggcgccggtcgcttcttcttgctattccatgccgcggcaatcgccctactgctccagtgcgcccagccgagcgattctctgctctgtgcgcgcggtatttctccagcctgccgcgcccagtccctgctccttgtttttctctgcgatgtggagcagtgttttctgatcgtccgattaatcgcgattaatcggcgattaatcgactgatcgtcatcacgcatccgataaggagtaccgacgcgatcagggcgatcagaaacctgatcgtccgattagtcgacgactaatcgcgattagtcgtccgattagatcgcggacgatcagtttggcctgcttcgttacttcatttcggcccactcactgcatgcatcttctgtgaactgtgaagctgtcccatttctttcgtgctactttttcattttggttctttatataacatatataatgtgtggctgtggcatggtaagagagcaggctacattgagccaatgagccttgtcagtttagtagcataacagtagcagactattttatttctagggtctttgcctttaagcctatacccattatttctagtgtttagctgaagtgctgaactgctgaatctgaatgctggaattctgagcctggaactttgggtgggttttcaaagcctggaccaac

SEQ ID NO: 63667 - DNA, 111 bp, Zea mays
  Clone ID: MRT4577_158064C.1
tttttagaagttcgcacagggcgaactgatactaggacaccaggggcggtcagaatacagataaacgggccctttcaaactccccaactgagacggcacaacaccccgctc

SEQ ID NO: 63668 - DNA, 1212 bp, Zea mays
  Clone ID: MRT4577_158065C.1
agttccgatttataagtcgttctggtcacgtaccagaagcatccaagacaagtcgttctagtatgtaaatcgctaccctgcacaaaatgttcgtgtttttctaggggccttttttttttttttttttagagataaatgtcacaaatattattattacatagcggaagagtcttacaaaaataagtgataacagtaaagtgaactaataattattccttggcaccataagctgactacgagacgccacctagataagctcgtactcctcgttgtggacctcctcctgggctacctactcttcacccgagtccgtgatgatgatggcgcaatacacgaagaggtgcggagacggtgctccgacaagaaattgccgcggctggatcggcaatccagccctagaattcccacgggtagtcacacgatgtctctggggaagcccagaccacggccaataggtttctacggcggtgtacggggaagtcaatggcggcggcctccagctggggtgaggctcttggttcttcgtaggttagaggattcggatggttagggttactagaggagaggtggcgcatgacagctttatggcaagcggagtatgaactcgccagcaacgacgccgacggaaaagggggcaagtgcgcgcgcgctttggcgcacgttttgccgctcgcgcccgtttccccgtgcaaggctcagcccaacttcgacccgcgcggtccccgggtcctcggtctcttgctcctataaatgattacgtagtgcctttccctgcccacggcgtgccccggatttgcggccactgcatcgaattggcggcgcccaggtcgcactccctcctagccaccacctcaacacgatcctggagcttggacggactctcccgacctcgcacagggcaccaattagtgcactgcatgccggacgaccgtggaggcctccggtggctcccagttctctctctcggaggtgagtatcccaattcggggtgctggtgcgcgtggtcgacgtggtgccctcccttggcgaagatggcgcacgtctaagtcagctggagatctcgagtgcagaggaagggttggagggagtcggcgcatggagatgtcggggcttccgttagggatgggtttggcgcgcggggtccacgagtagtgagacaccagagttcgagcacgggagacggctgaccccggccggcctcgagggtcccaa

SEQ ID NO: 63669 - DNA, 187 bp, Zea mays
  Clone ID: MRT4577_158066C.1
acggtctgggccgaaccaagggctgccgttccgtttcaaatacctgcgacccttctccagggaaccgtggaactaccacaccggccaggtccccaactactacggctgacacacctataggctctacatattcccctagacatttaccaacaacctctatctgaaagatatccactcatacttggcc

SEQ ID NO: 63670 - DNA, 387 bp, Zea mays
  unsure (1)..(387): unsure at all n locations
  Clone ID: MRT4577_158067C.1
acaagggaattgactcatatttttatcagacagcaacgatgcaaatccccccttcaaaaaagggtttgaggggtaactcaggattacaagaatgccaacaagaccaagaggggtatggatttactcagaaaaaaaagtttgataacaaatgagtaaatggcacacgggaaaccaaatcgaaacagcccctatttgcgcaactccagaccaagaggcattttccggctcatttcctttttttcccagtcaactttgaagtcgttttgcaaatcgagcagaaatagctttttgagagggggaagggattccatgccctggggtccctttttttggttgggcncccccgngatgtggttagcttggcccccctggagggccccctctcca

SEQ ID NO: 63671 - DNA, 450 bp, Zea mays
  Clone ID: MRT4577_158068C.1
atgccacctgccagggtgaggctgacagcagccaagtccagcctcgggcaccataggaatctccgcctcgcccgaccccagggctcggactcgacctcgctccagaagacggtctccgcctcgcccgaccccaaggctcggactcgacctcgcctcggacgacggtctccgcctcgcccgaccccaaggctcggactccacctcgactccggaagacggtctccacctcgcccgaccctagggctcggactcaacctcgactccagaagacgatctccgcctcgcccgaccccagggctcggactcaacctcgactccggaagacggtctccgcctcgcccgacccccgggcttgggctcagcctcgacctcggaggagccaccgcctcgcccgacctcgggctcgaaccgaccacgccacaaggggggccatcattaccctacccctag

SEQ ID NO: 63672 - DNA, 168 bp, Zea mays
  Clone ID: MRT4577_158069C.1
ccggtccgggggtcccggggcgggccacacgtacgggggcagcgcggacacggcgccacgggccatggggaccaatacaccggggcaatcgggggcgtggggcacggaacccaccgcattaagcacgttacggaaaccaccggcgggcatgggccagatggggtgagc

SEQ ID NO: 63673 - DNA, 334 bp, Zea mays
  Clone ID: MRT4577_15806C.1
ggaaaaaataaacaaactggagaaaactgtcaaatacaaaatccattttacgtattttatttgtctacagtttgccctcagggggggttaaaatgtaaaaaccacatgttggtggggcaaataagtttacaggggggtaaaaccaaaacatgttgctgggagcaaattagtttacagaggggtaaaaccaaaacaaggtttagggtggctgttatataaaggatgctggtatttttggttgaaacaattaattattaacagacaaattaatccacctttttcaagaaaattcttgatttctgatgggcttaaaaatttgaacttacggggtagt

SEQ ID NO: 63674 - DNA, 237 bp, Zea mays
  unsure (1)..(237): unsure at all n locations
  Clone ID: MRT4577_158070C.1
gggactcccttctctaccagtctccactgcatctaaaaataacgtaaaacccccaccacgccgtagcggagagaagagaagataggagcgcgcgatcgatgtcgggctccggcgatcgtcgcggcggcggtcctcccgggncccatagtggctgggaaaccatggggaagtagcgcaagcccccgggcaagccggggggagacagtggttattccgcagctctacacatgtgacacg

SEQ ID NO: 63675 - DNA, 759 bp, Zea mays
  Clone ID: MRT4577_158071C.1
cattgggtacctcgaggccggccgggaaaaaaaaaaactacctcacccggagccgccacctcgagcacccgcacttcgtcgaggtgccgctggcatcgccggaggggctctatctcagagatgtgattaatcacctgaacatggtgcgcggcaagggcatggccgcgatgtactcgtggtcctgcaagaggagctacaagaacgggttcgtgtggcacgacctttcggaggacgacctcgtcctcccggcaaccgacggcgagtacgtgctcaagggctccgagctcgtggaccaatccccttcgggtccattttaccctgtcactgtcagcaacggcaaccagaagcaacagagcaggccgaaagagggcgcgcggcagccactgccaagagaccaatccgacccatcctccccgcctagcgtgacagtcagagaagccaaggcccggcggtcaccgtccgtgccttcgcaagacgaggaggatgacaccccgtctccgtgcagggatcgctccatgtcacagccacaggagctggagccccagcggaacgagaggaggacgcaaccgccagcgagcgggtctgcgagcccagtggagctcagagctcacaggcccaccaccggctgcacggacgccgcaacccagaccgacgatctcggcagaaggccggcgggccgcagggcgctcgagctgccgcgcaagaagagtctgagcacggaccacgacgccgtcgtccgtgagatcgcagagtaccggc

SEQ ID NO: 63676 - DNA, 184 bp, Zea mays
  Clone ID: MRT4577_158072C.1
acccctggcgcaccgcagcgcggcggccatggcctgcctgaccgacctggtgaacctgaacctctcggacaacaccgagaagatcatcggggaatacatatggatcggcggatctggcatggatctgaggagcaaaggaaggacgctgtgcggcggggggacgcgatcggagcaagctccccaa

SEQ ID NO: 63677 - DNA, 579 bp, Zea mays
  unsure (1)..(579): unsure at all n locations
  Clone ID: MRT4577_158073C.1
cctacgcgtccggtgctccaaagtacaaggggcacttgatttgctgtaatcatcattgaagaaggaataaacctcccaggcgggtgggtttcttttcgactatggcgaccggcgattcagccgcagccgccgtcgacgaaaccaccgcgccacttcctcgctatcctcagcgctccagttcttgatcccaattgctcttccgatctccactatgcactcctcactgccacgcagcatcacaattcacacacacattactgtgcttccaaatatccaaggccactagggtaatgagtgaattaagcccttttttcatctccttaggcacatccttgattgccggttccaccagcttgaaaatttgctagcagaaaccggactgagatggggctcaacccaatctctgaagaataacaaaccatacctgtctagcgaagacgcaagagatcaacaagtgctggatggaatctcttgtgtgatcacaaagaggacaggtcgctggatgaggaaatctctttgctagatgatcaccgttcgcacatatagntgattgcagggcaaatgaaggacttgaatttt

SEQ ID NO: 63678 - DNA, 381 bp, Zea mays
  Clone ID: MRT4577_158074C.1
cagccaacaaacaaactcacttcacacctacactccataaaccacaaacaaccatcaacatgtcgtccgagaacacctccaccgtcaagtccatgatcgactcggtcaccggcaccgcccagaacgtcgccggcaacctctttggcacctccggcgaccaagtcgagggtcaagccaagaagaacaaggcgcaggccgagtacgacgcctcgcacgcgaccatcaagcttcccggcgcgacggccactgccgatggcgtgacgcgcgacgatcccgaccgcagcgccggctcgtggaaccaaaccgtcggctctgctaaggagacggttggcggggttattggctccgagaacctgaaacaagccgggcgcgagcagaaca

SEQ ID NO: 63679 - DNA, 598 bp, Zea mays
  Clone ID: MRT4577_158075C.1
cgggatctgaaaagcttgccaaacacaaccatacaacatggtgagcccaggttctcgctaccatccgtggcgctcgtcttgaaggctatctcaccggcagtgctaagaagcctgccatgatgatcgacggcaaggacggtgacatggtcaccaatccggtctatgaagattggctagctgcagatcaacaagtcctcagcttccttctctcctctgtatcaaaggagatcttgattcttgttgcgaccaaggagatcgcggcggaggtctggcaggcgattgaaaccatgttcgcatcgaagacacgggctcgcgcagtgaacacacgtctggccctggccaccacacagaaaggtaacatgacggtaactgagtacattgggaagatgcgttttcttggtgacgagatgtctgcagctggtcgaccccttgaagatgacgagttggttgaatatattctcaccggactggacgatgagtttgaccccgtggtctcatcagtccttgctcgaaccgaggccatctccgtaagcgagttgtactctcaactgcttgcgtttgagattcggctagatcttcgcaacaacggaggcaactt

SEQ ID NO: 63680 - DNA, 274 bp, Zea mays
  unsure (1)..(274): unsure at all n locations
  Clone ID: MRT4577_158076C.1
acgcgtccaagatctgcagctacgcgcaggggcatggaacattcattcaagggccaagagcgcggagaaagggctgggagggctgcaacctcggcgagctggnccaggnatctgggaaggggcggggtggcatgcatnccgcggcacatgctttgcctgggaanccgncattcaaagnaagggncctaacgnacaagggaaaccncgngggccttcgnccaagccctggctncgttaggaccccccggagntttcggcggcagggaagnattca

SEQ ID NO: 63681 - DNA, 2331 bp, Zea mays
  Clone ID: MRT4577_158077C.1
ctcgagccgcaaggagtttgaggagatgtctgagcagtacgtggccgtcacgaagaaggagaagaggagaagggcatgctatcgctgtgggaagaggaaatgggagagcaaggagtcgtgccttgtttgcgatgcaaggtattgcggctattgtgtccttaggatgatggggtcaatgccagaagggcgcaagtgtgtcaactgcatcggccagccaattgatgaatccaaaaggtcgaagctggggaagaactccaggacgctttcgcggttgctcagcccgttggaagttcggcaaatcttgaaagctgagaaggagtgccaagcgaatcagcttcggccagagcagcttattgtcaatggttgcccattgcggccagaggagttaaccgacctgctaagttgctcacggcctcctcagaagctaaagccaggaaaatattggtatgacaaggagtcaggcttatggggaaaggaaggagaaaaaccagacaggattattagctccaacctcaattttactgggaagcttcaggtcaatgctagtaacggaaacacccaggtttatatgaacggaagggagataacaaagattgagctgaaagttctgaaggttgcaaatgttcagtgtccccgtgacactcatttttgggtttatgacgatggtcgttatgaggaagaaggtcaaaacaacataaaaggaaaaatatgggaatcagctctggcacgttttgcatgcgcattattttcactgccggtgcctccggggaactcaaatggaaccagagatgaagttccatatacagcaagagctgtccctgattatttggaccaaaaaagaatacaaaagctgctgcttcttggaccacctggtgctggtacgagcactatttttaagcaggctaaatacttgtacgggactaggttcacccaagaagaacttgaaggtatcaaactgatgatccaaagcaatatgttcaagtatcttgggattttgctagagggccgcgagcgttttgaggaagaggctttgtctagattgaattacacgatttctcagggtgaagaaactcagcatgatgaaaataaagccaatggatcaaattcttgtatatactccataaatgcgaggctaaagaaattttcagattggcttttggatatcatagcaatgggcgacctagatgcattcttccctgctgcaacgcgtgaatatgctccgtttgttgatgagatgtggaaggaccccgccatacaagcaacatttaaaagaaaggaagaattgcattttctccctgatgtggctgagcacttcttgagcagggccgttgaggtgtcaagcaatgagtatgaaccttcagagaaagatgtaatcttcgctgaaggagtaacacaaggaaatgggctagccttcatcgagttcacacttgatgatcgcagcccaatgtctgaaccttatatcgacaacagtgaggcacattcgcagcctctcaccaaatatcagctgatcagagtcagtgcaaaaggcatgaatgatggctgcaaatgggtggaaatgtttgaagatgtccgcatggtaatattctgtgtagcactcagtgactatgaccaattgggaccccctgtaagtggcagcagtcggcctcttgtgaacaaaatgatgcaaagcaaagagttgtttgaggctacaatccggcagccatgcttctgcgatactccatttgttctggttctgaacaagtacgaccttttcgaggagaagatcaaccgcgcgcccctctctagctgcgagtggttcaacgacttctgcccggtgcggacgcaccacaacaaccagtcgctggctcatcaggcatactactacgtggccatgaagttcaaggacctgtactctgcgcagacgaaccggaagcttttcgtgtggcaggcccgtgcccgtgagcgccagactgtggacgaagcattcaagtacattagggaggttctcaagtgggaggaggagaaggatgacaactgctaccaggaggaatcattctacagcacgactgagatgagctcctccccgttcatcagagcggaatgagatttttttttttgttttagctgatcaaatcaatcactgataatcagtgtatattgattgtctaattgatttgcttattcgtatcctagttggtattggttgtgtgtattttagaactaaggctgggctggcatataagaatcgagtgtccatgcattgtatgtaccagtactaatttaattttatccagctggttaaaatgtaaaacaaaaaaaaaaaaaaaactcgagtaagttaggttttagttt

SEQ ID NO: 63682 - DNA, 293 bp, Zea mays
  Clone ID: MRT4577_158078C.1
tatatttttacctctacctcgacaaaaaagtggtggtctctctgacttgcgcatgccccacataatttacattcctcaataatcataaattgattaatagatttaatcacagcatttaatgaactcaacacttaaataataatatttctaagctcatagcttttaaaatcaagcaataacaatactactgccactttcctaagatcatatcaatgcttactcttaacctcctcaaaaattcaaatactttcttcatcttgcaattagaaacaaaacctagactacttataatc

SEQ ID NO: 63683 - DNA, 453 bp, Zea mays
  Clone ID: MRT4577_158079C.1
cgtgcgcccacgcgtgcggtgccaccttcaaacgtagcttatgtagcgaaagaactttatgacatgggctgctatgaggtttcacttggtgataccattggagtcggtactccaggtgatattacatgcctatttttgtttcttcagaaaaatattcatattcgcttcttctgagctaattagttcctgcttgctgtagaccttgatttgcttacataacgcctgtctttctagaactagagctaggctttggatatgctgatcagtttggcgctgatcgatttcattatatcctcgaacaaatagcaaaggccgccccttacataatttcaaaaaatggatccgattttaagaccacacatcacattggatttaaaaacaatgagggtaaagcatcaagcgtgcgtcaaccacaatcttttttttatgccataccaaagttccgtatttttt

SEQ ID NO: 63684 - DNA, 395 bp, Zea mays
  Clone ID: MRT4577_15807C.1
gcggccgccctttttttttttttttttttgatgaacatttatcactgatttgaacaacacacttctggggtgacagaataaattggggagatatgtaacagcaaaacgaaacaaaattacaggacccattctcaaatcacaaatactcctggccgccgccgtctcgcgaccatgtcgccgaccacctcatcgagcagtgagctcagtacgtggctctccacctgctcaccggcctcgaactcctccacccggaaatcgacccatgtgcccagcccgccgctcatgtccttgtcgacgagctcgtcctccgtccagtctcccatgctcttccagctggttacctcactgcagacttgggcctccatgcccagcgtcgctgctcctttgctccatgc

SEQ ID NO: 63685 - DNA, 1033 bp, Zea mays
  Clone ID: MRT4577_158080C.1
attggtacccccgggccggccgggataccgccgaaccaaatccaacgtccacagaaaagaaaacacattcccgtcgactcccctagtttcatcctattcatttctccccccaaacactccagctactagttactcgaggaatccatgtgcggcggcgcaatcatcttcgactacatcccggcgcggcgccgggtgtcgacagccgacttctggcctggttctgaagcagacgccgaggacattcatgcctcgcactccactgacccacagagagcgccgccgccgcgcgcgaaggcgaagcctgggcgccgcaagaaccagtaccgcgggatccggcagcggccgtggggcaagtgggcggcggagatccgcgaccccgtgaagggcgtccgcgtctggctcggcacctaccccaccgctgaggccgccgcgcgcgcgtacgaccgcgccgcgaggcgcatcaggggagccaaagccaaggtgaacttccccagcgacacctcctccagcgtcaccgtgccgacggcggtgtcgaggtctgctgctgctgctgctgcacaggccccggccgttctcccgctgcccaaggtggaggcacagactcaggtgtccgacgaggtcaaggagttgtccgaggagctgatggcctacgagaactacatgaacttcctcggcatcccttacatggagggagggactacagctgcaagtgccaccacagctgccgcctccgcctccgccgccgccggtcgccgaagaatcgcaggtcccggctccggccgggctgtggagcttcgaagattactactacccgccgtctctgtcgctctttactgaatgatgaacgtgctttgaccgtgcctgttttggtaacacctttgtgaacagatttcctgctcgtcgtagtcggtgtgatgtgatggcatcaatcgagctcctgtcctgtaattttgttgaacccatccattgtttcgtgactaatgtgtgtccctgtaactcgcaagttgaggcatcaaagtttccagtttaactc

SEQ ID NO: 63686 - DNA, 222 bp, Zea mays
  Clone ID: MRT4577_158081C.1
atgaccggcaacaaggccacgggctcgggaaggattccatcaagggagtccggcgacaagtacaaagaggaatcatcttcctccatcaagtcacttaggaggggtgacaagaagaaaatgaagaaggtggtctactacgagaccgactcatcatcacctccacatccggtgtcgagtcgacaacttcgaaatgccacgagcgtgccaaaggttcatctataa

SEQ ID NO: 63687 - DNA, 625 bp, Zea mays
  Clone ID: MRT4577_158082C.1
gacttctggcctggttctgaagcagacgccgaggacattcatgcctcgcactcccctgacccacagagaggtaagccctgctttcgtctcttgctctgctatcccggcgacaacacgccatccaggcagcaagctgcaaacggtcaaatcaatggtgtgacgccgtgctgccgactgttcccatgcagcgccgcgcgcgaaggcgaagcctgggcgccgcaagaaccagtaccgcggcatccggcagcggccgtggggcaagtgggcggcggagatccgcgaccccgtgaagggcgtccgcgtctggctcggcacctaccccaccgccgaggccgccgcgcgcgcgtacgaccgcgccgcgaggcgcatcaggggagccaaagccaaggtgaacttccccagcgacacctcctccagcgtcaccgtgccgacggcggtgtcgaggtctgctgctgctgctgcacaggccccggccgttctcccgccgcccaaggtggaggcacagactcaggtgtccgacgaggtcaaggagttgtccgaagagctgatggcctacgagaactacatgaacttcctcggcattccttacatggagggagggactacagctgcaagtgccaccaca

SEQ ID NO: 63688 - DNA, 193 bp, Zea mays
  Clone ID: MRT4577_158083C.1
tgcctttatagactggccgtgggggagggacttagtttgttttttttagtggtttttttttttcaaaaccagaaactgtattaagaccatgtcgtacattattggacatcccacacatgagaaagagcgtggcgttaccgacttattacgtctttaagaagaagagagatgtgatacgaggagatgttcccaa

SEQ ID NO: 63689 - DNA, 184 bp, Zea mays
  unsure (1)..(184): unsure at all n locations
  Clone ID: MRT4577_158084C.1
gggcgaccgtcgccgcccccctggcgctagtttttggtccgtcgggtccttttgtngggaggagcacctaccaggcgacccagtggggggtttgggaaggtttncgnggtcgggcggngccccccagtggcgaagatgatccgactaccgaggtacgcggcgttcagactgctggcgacacaat

SEQ ID NO: 63690 - DNA, 598 bp, Zea mays
  Clone ID: MRT4577_158085C.1
cacgcctgcgtgtaccgggcccctataccacggtcgacctagtcgttcgtagctctttaacctataggctttatcatgctctggaaatgtagctcatactttttgggtgctcgcatgcttcaacacaaaacacttcctattttgggtgcagccattggtacaaaccataggggccccccacctgcatcagctggtgctaccagggatcaaccattggctatggcgaacctcaatggctactcttagcagcaacaattacttgcattcaaccaactgcctacactgaaccctgatgggtatttgcagcagctgctattaccattaagccagctagctactgcctactctcaaaaacaacaacttctttcatttaaccaattggccgcactgaaccccgctgcttatttgcagaagcaaatactactgccatttagcgagctagctgcagcaagtcgtgcttccttcttgacacagcaacagatgctgcctttctacaagcagtttgcggctaaccccggaaccctcttacaactacaacaattggtgccctttgtccaacttgctttgacaaacgcagcaggctactaccaacaacaca

SEQ ID NO: 63691 - DNA, 617 bp, Zea mays
  unsure (1)..(617): unsure at all n locations
  Clone ID: MRT4577_158086C.1
ttcggattctcctcaaccaaatcaagtcacagcggcgacactctcggcgatgtctgcccccggcaagggcgggaagggtctgtgcaagggcggcgccaagcgccaccccttcgtgctgcctcaccccatataggccatcaccaagccggcgatcacgcagatgaggacgaggggcgcgagtcaccgcatctacgcactaatcctcgaggaggcccgcggaatactccatatccatctgctagcatccccttcacccaccctccctcctatanctgccacccctcccctcagtacttgaccgccaggcacgagcgtttccctctcctacgacactgcgatacccaatcgggtctcttcaaagcacgggcacgctgtccgcacgaggaatgacatatgagccaagccgatcacttcgactccgagctccagcatcccatccccatccctaatccctaagtctaccctgtggccagtgccgtgctcgtgacccccaccaatccttctgccttcaccagtgatgatgatatactagagctcgctcccagccgtcacatctacaattgactatatcacggtgactaaaacaccacaacagttctgccaatcaagccatccat

SEQ ID NO: 63692 - DNA, 321 bp, Zea mays
  unsure (1)..(321): unsure at all n locations
  Clone ID: MRT4577_158087C.1
aagacagaagagaagcccatcttctctttcagtaccgtcgtggctgctgagaacatgagcatttatgatgacattgatgctgacgtgctgcagaantaccaggaatacaatctggccaacatcatctactactccctgaaggagtccaccaccagtgngcagagtgccaggatgaccgccatggacaacgccancaagaagcctctgatatgattgataaatgacgctgattcaccgcatcgcagcgcacagnagactgatagnanactcgngtgcgcctgatatgagacattcatctcancagaggagaagnangcnctg

SEQ ID NO: 63693 - DNA, 1496 bp, Zea mays
  Clone ID: MRT4577_158088C.1
tgggaccctcgaggccggccgggccgggacgcagaagccagaacccctcgtctcccggcgcctgttccccgcgcgcaccgcggctacacataccctctccccatcccatttccattttcccagatcccaccaacgcagcgcagggatcgagtagcccaccaccccaccccgcgacgctaaccgacgcaatggcgacgctcaccgttccttcctccgtcccggccgtcgccgaggactgcgagcagctccacaaggctttcgaaggttggggcaccaacgagaagctgatcatctccatcctgggccaccgcaacgccgcgcagcgccgcgcgatccgccgcggctacgccgaggcgtacgggaaggagctgctccgcgctctcggcgacgagatccacggcaagttcgagagggcggtgatcctgtggacgctggaccccgcggagagggacgcggtgctggcgaacgaggaggcgaagaagagccaccccggcggccgcgcgctggtggagatcgcgtgcgcgcgcacgcccgcgcagctctttgcggtcaagcaggcgtaccatgaccggtttaagcgatcgctcgaggaggacgttgccgcgcatgtcaccggcgacttccgaaagcttttagtgcctcttgttagtgcgtaccgctatgatggcccagaggtgaacacatctttggctcattctgaagccaaaatacttcatgagaagatccataagaaggcttacagtgatgaggagatcattagaattctcaccacacggagcaaagctcagctacttgcaacattcaatagctacaaggatcagttcactcatgcaatcaacaaggatctgaaagctgaccccaaggatgagtttctttcaacactgcgggcgatcatccggtgcttcacctgccctgacagatacttcgagaaagtcattcgactggctcttggaggcatgggcactgatgaggatgacctcaccagggtcgtaactactcgcgccgaggtcgacctgaagctgataaaggaggcttatcagaagagaaacagtgtgccgctggagcgtgctgtggccaaagatacaactagagattatgaggatattatgcttgccctccttggggcggagtgaggaggcgtgcctcaactcgatctcatctgctcctacttgtttgatggggccaaaaaactgcatcgacgtggtatccacatggccgtggttttgaataataataaatttgtaacacgtagcctgcattagcagcgcgttttaaataaaggaacttcctgatatacttgttatcgtttgactgcgttttcacagaagctgttttgttcgttatggttaaaaaaaactgaaaaatgatgggaacataactctgtttgactacacagctctcttctttttccttttcttaagtcgagactgaaaaaaaaaaaaaaaaaaaaaaaaaaaaaaaaacgcccacgggggcgcggaccggtaccgacccgg

SEQ ID NO: 63694 - DNA, 711 bp, Zea mays
  unsure (1)..(711): unsure at all n locations
  Clone ID: MRT4577_158089C.1
gacgcctgcaggttccggtccggaattcccgggtcgacccacgcgtccgcgacttcaagcccagctatgggacccctgcccctggcttctcctccatgctgtatggaatgaagatcgcaaatctggccttcgtcaccaagactcgggtcaggttcttcaaactagaccgctgggctgatgtgcagttaccagaaaagaggcgaataaagccagggtcgaacatcagcaaacaacacagatcactgttggccaggatctttcacgacagggctgagtaccttcatgggaagcatggggtagacgtggaggtccaggggccccatgaagcccgagacgggcaactccttatccgcctggatttgaaccgcaaggaggtactaaccctacggcttcggaacggcggaagcaaacctgtcaccctcactcacctattcccactgtgctggacgccccagtttgtcttctaccatggagaacaggacctgccctgcccactgggccccggtgaaagctatgaactccacatctactgtaagaccagcattgtgggttacttcccagccactgtcctctgngaactcctgngacccggngagtcgggagcagaaggagcagaaactttctacattgcccgattcctggcggctgtcgcccacagtcccctggctgcccagntgaaacccacaactcccttcaaacgcccccctcggc

SEQ ID NO: 63695 - DNA, 583 bp, Zea mays
  Clone ID: MRT4577_15808C.1
attgggtccctcgaggccggccgggaaatctgcatccgctgtctcctcctctggagttatctccactgggcctgattctacctcctctactcgccatcccacatgggacagatcaaaataaggataagcggctctctctagatcgggaggctcgaggccaccgcacccctccatcagcgacgactgctcatgtcaacccacccatggacccctgaatcaccacggactacgtgacctacatgtgcaagtacatacaccgggtacagccactgcaaacacagtcacagcacaatcaaagactcccagacacttctctacggggacaaaccgaccacagactgaggcatcttgaacccagacgaaatctgcgagggtgaagctgatgctgaatatgccatgaagaacacctgcgtctgctgtgacacagacaaggctgctgcacatctcagaggagaagtgaataaggtttgtatctacggccccagcaaatatgcatacatgctagccgtaggagaatgtgaggacaaccacacctctgatggtaacattgatgccatagctagctgcactactgactgccttg

SEQ ID NO: 63696 - DNA, 414 bp, Zea mays
  Clone ID: MRT4577_158090C.1
attcttcgctgcgccgccgccttcgacatcgtctctatccctacacgcgccaccgacgatcccacgatgatgaaacgcttggtcatcgggacctcctatatgactacgagctcctcgtcccattcttcacctatcaatatctcggatcacatgacgtctgctgaccagttcttggtaaagagagccacccagaggctctggtgctgtaatccttgaagacatccctttcatcgaggatgatgagccagcaatctccaagggccccctcgtgaagatgatggatataaatgagaatatccttgtatgtgagagtacctctcttgttgactgaagatcatatgatctcttagtgtgcagatactgtctgaaccgtcactgatgttcaccaagccgataaagctcatgattgccaaa

SEQ ID NO: 63697 - DNA, 244 bp, Zea mays
  Clone ID: MRT4577_158091C.1
ctttccttggtcctcactgagaacccccttcggttgcgaatatctattcactccggtcgtgccctctggagtgtgggcgcggtacagccgattttgttacatatctaggccattcagttgtaaaactgccatcttaagtgtaaatacgtgtttaccaaaggttgtttttgtccatttcaccttatgagcttctctataacacacagttaacacttaacagctactccacatttgcagtctcctt

SEQ ID NO: 63698 - DNA, 564 bp, Zea mays
  Clone ID: MRT4577_158092C.1
cattgggtacctcgaggccggccgggacttactattccacctccacctttcattcccggccatgtcgtactcatgtgcatctgcactctcagtccctcgaaaaccaccacctccattcatctagtgaacacgcatggaacatgtctgatgcgggatcatgactagggtctgatagataaatgtcttctcctctcgactagtcatcacgattcagcacccctagaccttctacatcgaggcgtcttctcttctagatcgcgacagcgctcaacatgagagaaatcactgacaggtggttctccgtgccaattggcgattggaacgcaaccgtgtaaactgcccacttgctatcatagataccagtgatactgggcatgtaaaatcttgtaggatgtgtgataattccattctcttgagaatacggatatctcctaatgataactggttcgctccccgtggatcggatcctcgtagcgctgcctcatagtatgactccatgctcgcatgcgtcattacataacgatacatctcgcgcatctggaggaggtatccgactgtgccgaa

SEQ ID NO: 63699 - DNA, 208 bp, Zea mays
  Clone ID: MRT4577_158093C.1
ccaaatgaaaacaagttgggggtttgcattccctgtttccttgaaaaagaaatgtgactgttgcgtgagatgcaaaataggtctcttgtgcgagatcaagctcaatgaacttggctgtggcgaacactttgtaagctatgttgacttgaacacaaacaaaattgtgaaatgaaggattggacaaaactttactgtgcttagcacaagg

SEQ ID NO: 63700 - DNA, 665 bp, Zea mays
  Clone ID: MRT4577_158094C.1
cccgggtcgcccagcgtccgggcgcgcgtggagctcgagttcctgtacgagctccgcttcctgaacgcgcggcagcgcgccgacgccgccaggcacgccatcggctacaggctcgagcccaagggcgtgcgggagcttgcgcgcgccatgaagggcttcccgcgctggcgcggggaggaaggctgggaggccttctcgaaggactcccccgccgactgcctcgccttcgcgcggttccggcagtcgcgggaggccatcgacgtgcaggaccgcgtggcggagctggagcgcgcgctgcaggtggtggagaccgagtccggcagggcgcgcgtggagctcgagttggagcgcgccaggaggaaggcggccggggaggaggaggtgggcgaggagggcgaggacgacgacgctgccgccttgctgcggcccggcgtcacggtggtgcggctccgctacggcgaggtcgccgaggcgaccaccgtcatcctgctgccggtggtgagggagacggacggcgtcgcggccatggagtcggcgcccaggcgggctaagacggacgtgggccttggcgtggtggaggtggacagggcgtgggcgcgctgggccgtggtgcccggatggggccccgtggccgagcagcggcgacgccgtcgtcgtagagctgc

SEQ ID NO: 63701 - DNA, 464 bp, Zea mays
  Clone ID: MRT4577_158095C.1
acgcatctcgacaggactcgctacccgaaagtgtaaccgtctcggccaacaaccgtgtctctctggtggcaactttccttgcgcatgtgagggatactaaataaaaggtccttgggatgactcactactacaactagaaatacatctccttcaccttcactgttaagcaatatagcttccgtctagaataacatgacctctctaaactctgcaaaacaatgctatttcgattgagcattttgcactcatgcacgaatagcttctaaaacgcaatagagtatgcattgcatttgacatgtcacgattccagaggttaaataatgtaagcatcctctctgcaacgactttcagtcacctaacataagggtggctagccatcttcctcccctgataagaaagttatcagcgtcagttgccagcatctcaaacagagaagtatgagatgagctcttatctctgcttca

SEQ ID NO: 63702 - DNA, 646 bp, Zea mays
  Clone ID: MRT4577_158096C.1
cccacgcgtccgcggacgcgtgggtctgcaggttgttgcaggatgctggcttaacagacctgacacattttggcctggtaagcacttgtttttacgaacagcttaattcagtatcaacagttaaggcgaaaaggaacttttattctgcttaggactttcagccctctgtgttttgggtttcgttgtcttgttttatgctgttgaaactgaagcctaggctcttggatatttttgttggcccacacttggacttttgaaacattgtcacatactcacatgagtgaacaagttggagcaagataacttccctcattcctttcagggtttattgacatcaatagtttaagaccaaatattttgcacttggtatggaatacccttggaagcagatacttctatctcttttagagtttcctttatcttctgaatttggcccactttggcagggctccggctcctcctaaaagggattcaactctggctcctcttgtggagtaccttcttgggcagagctgaagcggttttggaaaacatttggtaataacggctctagtggtagtttgtgaggggctgggagaagctacgtttttgtggcaccagcttctaaataaaaatggctcctgcttctctggcgcttcttcgccag

SEQ ID NO: 63703 - DNA, 335 bp, Zea mays
  Clone ID: MRT4577_158097C.1
gaactgggaaaaatcattttttggtactgtacctgtccatggatctttaatggccacaggtgccataaaaataataccccacaggattagagggggttttaaagagtgatttacatgccgacggacacatttatcattggccgcaaccgtttattctttattggccggtgaggcatccaggaccccttgccacccaattgttcccccctattggcagccccccaacaggcactggcaatacggcctccacaaccatgcccagttgcagcggccctccgcgtggcccgcatcctgggagggcgccacccaatttttggaaaaacatatagggtggg

SEQ ID NO: 63704 - DNA, 386 bp, Zea mays
  Clone ID: MRT4577_158098C.1
cctcgaggccggcccgggttcccctgccggcctgccccaggcccccaagctaaccgccgccgagacgcggcattcccgtccccttcccgccgccactaccttcgccttcgcgccacggccgattctcccatggcgcaggcctcgtccttggtggcggtgctgcgccggcgcaaccccgccgctgcccgcctgcttcctcaccggctcgtctcctccgctcccgctccggcgttcgcctcgtcctcactggacccgctccccttgccaagcctgctcgagggagacagatgcggcggcagcctctccgcttcgttcgtctcccactcacgcctccgacttcctcggcgacaccatgcggatgctatggctaccaggacagcgcacca

SEQ ID NO: 63705 - DNA, 378 bp, Zea mays
  Clone ID: MRT4577_158099C.1
gcacggaatcgtggactacacctcgcttacctggacacgccttacagtgccgcaaagaccccacaggtcccggacgtggaacatcctaccctgcctcgcatagccctaccccatgacttcggatacgaatacaggcctaccattacgatcttccctaaggaaacttctacataggagacctgagtaatgttggtaatctactagggtatggtcacaacgacttccaccggagtaaagatagaggtgcaaaggacttgctgactatattagtccaggttgtcctaaaacagggagtagagaccgtcgaggggttattaactttccaggtccaggctatatcatactctaggatagttacgtttactacggtggtgaagg

SEQ ID NO: 63706 - DNA, 1758 bp, Zea mays
  Clone ID: MRT4577_15809C.1
attcggctcgaggttcgttgcctctttctctttgtggtaggcatgcggttcgatctcatcggcgcgtccatcacccactacgcatccaaatggctcccgggtctcaccaaggacggcccgcacggtggcgcgctggaggagccctgggctcaggcccaggcgtcccccggcggcgggctccacatgatcatcgccagcggcggcggcggcggcggcggcaaggacgacatcgccgggagcacgccggcgcgggagcagcgcatggtggtggagagcctgatcagcatcatcccgctgcagcgcgacagcgtctcgtgcggcttcctcctccgcctgctccgcctggccgtcatgctgaaggccgccccggcgctggtgacggagctggagaagcgcgtgggcatgcagctcgagcaggcggtgctggccgacctgctcatcccctcctacggccgcgccgagaccgcctacgacgtggacctcgtgcagcgcctcgtcgagcacttcctggtgcaggagcagacggagctgctggcgtcgtccagccccggccgcgtggagcagccgccgcttcccgagtactacggcgctaggacggcgggcgccgcggcagcgtcggcgtcggcggggctgaacgccaaggcgcgcgtcgcccggctgctggacagctacctctccgaggtgtcccgcgaccgcaacctgtccctgacgaagttccaggtgctggccgagtcgctcccggagtcggcgcgcacctgcgacgacggtctctaccgcgccgtcgactcgtacctcaaggcaagtcaagtcactgctgttgatttgattcctcggtcttccttcgttcttggcgatgagccgatgatggtggtctgctcatgctctggctggttcaggcgcacccgacgctgacggagcacgagcggaagcgtctgtgccgggtgatggactgccagaagctgtcgctggacgcgtgcatgcacgcggcgcagaacgagcggctgccgctgcgggtggtggtccaggtgctcttctcggagcaggtgaagatcagcaacgcgctggccagcggctcgtcctccaacgccgccgccgccgcgctgctggccaacaaggcggcggacggcgtggcgccgccgacgcgacggcagctgctggacggcacgccgcagtcgttccaggaagggtgggcggcggcgaagaaggacatcaacacgctgaagctggagctggagagcatgaaggccaagtacctggagctgcagcacgagatggacgcgctccagaagctggtggagcgtggcgcgccgtcgcccctggcggcggggctcaaggccaccggcggcggaggcgttggtagcaagaatcacagccaggggccctcggcgtggagcagcgggtggaagaagctgggcaggctggccaagatgaccggcggcgacgcggcggggcacgacgggcacgtgccgggagcgcccggagacgcgccgaggaagccgcggaggtggagaaactccatctcgtgagcagagcagagcagagcagagtagagacgacggagccccggtggcggtggaatcagcttgtttcgtagcgagcagagtaggcggcctagtaacttgtgtaacacccattttcatgcatgcagttccgagattgaaaaccaaagcagagtggccgagattgcgtgtgtgcaggctgcagactatcctaggagaagaagatcgtctcgtctatttccagttccagtgtgctgcc

SEQ ID NO: 63707 - DNA, 453 bp, Zea mays
  Clone ID: MRT4577_1580C.1
actcctaagggcaattgggttcctcgaggccggccgggaacttaaacttagctagtaccattcactaacccaagacaaaacatggatgtgaatgtgataaccatgtgctcctcgatgcgcacacaggttgctatgcctgtgctgatgatgttcttgtcgagcgctacatgctgtacacctcccacagcccccccagagaagaacatcacgcccacctatgtcaaggactggatggacactaaagctacatgtgatggcaaggctactgatgccgatcccgacaacacggaggtgcgtgtacatacaaagacgtgaacaagtcctccttcaattgcatgggatcatctcctacatacccatcttaaggatgaactgtgatgcggatcctgctacaacatatacgtgtagaaatcttataagtgctccgataaatcttatcattggcgcattgct

SEQ ID NO: 63708 - DNA, 527 bp, Zea mays
  Clone ID: MRT4577_158100C.1
gttggttattaacttacaatatctgttgtcttaaggaatggttttttatgggatagtcaaaagaaccttgttgatgttacaaaaaacgtcgcgctgtggactgcccatgggtacatggctaactactgggaaaaaatcctacaacaatctagcccgtggcgaggacaagcggactgattctaacgggaaaaaaaacaaaaacctaagcctttttacaggaagttgactaccaccaggggcaagctttgccttattgctcccagccttgggcccattttatgattttattctggcgaaaaggaccacctaaagaggcttcaaaaccaccgactaagctttgataaccgcgaagaacaaagaaccttcatccgcatcaggcgcctgaccatctgagggcaggattgggaaaaaaccgctctactattttaccaccgggaacaccacgccccttctcctagaccttggtaccgagaccatccacaacagcgcttgggttgggaccatccccattgctgccactgtgggcc

SEQ ID NO: 63709 - DNA, 202 bp, Zea mays
  Clone ID: MRT4577_158101C.1
cccaatcttacccccacccattttcaatacacacatccccaaaaaaaacgggcggatacaaacgtatagtttgatagcacaccaccaacaatggcctcaacgtactctatactgcttgccacaacaacactaaataggttgctccaattctagtcatgcaccaacataatcaccttacaagcaaataaatgctctaactctg

SEQ ID NO: 63710 - DNA, 292 bp, Zea mays
  Clone ID: MRT4577_158102C.1
gcagggggctcggcttctcgcatcgggcggagatgagctctctgcccgccggatgctgggtggtcggcgacgacaggcgagtgttccacctcctgctgcacatggttggcgttctgctggaccagtgcgaatgccattgccatgacctctgctttgccgtggacactgttccggtgggtgaccaagagaccatgtcaggctcaggccttcctgattggatcatacccaacttctctggctgcaacacggtgtgcgtcaggttccgatttgggatcacaagacacttcagaaa

SEQ ID NO: 63711 - DNA, 471 bp, Zea mays
  Clone ID: MRT4577_158103C.1
ctagactgctcaggaggcacggggctggaaagggcaagaggaggagaagctgaaccatggcgagagtagaagcggtggtcatctgcctcctggtcctcgccatggacgtcgccgccggcgtgctcggagtctacgcggagaaggctcagaaccagggcaggcacctgcggatcctgttcgtcgagtgccggcagccggtccggcgggcctacgagctcggcatggcggcggccgcggtgctggcggcggcgcacgccatcgccaacgcggccggcggatgcgcgtgcgcctgctccggcgacaagctccgccgtgcgtcgcccaaccggcagatggcatccttcgccttggtcctcacatggatggtcctcgtcgtcgcgctctcgctgctggtgctcggcgcgctgcccaacgcgaagcgcaagctggcggagtgcggggtggcgcggcaccggttcctctccatcggcg

SEQ ID NO: 63712 - DNA, 285 bp, Zea mays
  Clone ID: MRT4577_158104C.1
ctgcaggtaccgtccggaattattcccgggtcgacgagctcactagtcggcggccgcccttttttttttttttttttttttttttttttttggcaccgtccttttttattttattttttttcgccggtttgggctgctttaaacctactcaatgaaattggaagaaacaacagccttgggcggaccaaacccaagcttacgtgcgcgtcatacctatttataactgctctataaagaaacacaaatggcattcactgaccaccgttttacaacgtagaaaccggg

SEQ ID NO: 63713 - DNA, 257 bp, Zea mays
  Clone ID: MRT4577_158105C.1
ggcttcaagtgcggcatcaactaccaacctcctagcgttgtgcctggtggcgacctgcccaaggtgcacggtgccgtgtgcatgatctccaactccaccagtgttgtggaggtgttcttcctgatcgaccacaagttcgaccttatgtacgccaagcgtgccttggtgcactggtacgtcagtcagggtatggaggaaggtgagttctgtgaggcccttcaggacctggtggtgctcgagaaggactactaagaggg

SEQ ID NO: 63714 - DNA, 564 bp, Zea mays
  unsure (1)..(564): unsure at all n locations
  Clone ID: MRT4577_158106C.1
aaggagcggctgtggcagtttgtctcagtgcaacgcgcaggggcagctgctacattgttacatccatggatcagccaaacaagatccccgacggcgacgacgagaaggaggaggagcaggagaagcaagtcgagcaaagcaagaacgacaggacgcgcaagaagaacccaatcaaggagccggagaccaagccgaacaacgaagtctcagaagacatcaagagaataagccgcgaaggcacgacgagggggtagtaatctcctcaaccctcattcgtctcggttcgatcgatatatatagatcatatataggccacggtcgaggttatgcgtcctgctagctatactccgtgatttgtacgcgtgtgcagcgtatcttattttacgaccttagtgtcctatagctataccctcggtggtttgtatgtgtgtaacagatcttattttactagtactagtggtttgcatgtgttactattactgaatattgtaataatgttactgttaataatggagactttttttggagcctcannnnanaaaaaaaaaaanaaaaaaaannnaa

SEQ ID NO: 63715 - DNA, 709 bp, Zea mays
  unsure (1)..(709): unsure at all n locations
  Clone ID: MRT4577_158107C.1
agcagtggtaacaacgcagagtactcggttcttatggtttctgttttgttttctagagttttgatttaaataagaaaactacccaaaacataataataaagggaaagatagaaatgttgttagaccaggattgagaaaaatagtggagacactaacctagtagttacaatgtttaaaattaataaacaccccagtatacagggttaaggaagatttattcactaaaacttgtttatgcttaaacttaggaaaatggaaaaagggattaaaaatggaaactagagggcaaccttacttttcctagcatgcctaagtgatgtagttcacaagaaaaatctgttgaaccatagtccagtgaaaagaaattgcactcacatttattcgtggaaaacagagaaaactttgaaaagtcataagaaaataatcctaaggagaaaacacccctaccttacgaatgactgctcttgtgctaagaagaacctaggaaaaatacaagttctattgtttgatacttttcaaatagcaagttagttataagtgtctttttggcattaaactttagaaaatcataactaaataaccactaagtaaccctctgtgatttttggcacagaagcatgttattacccatagataccagcanaaataactcttagtacagaacccacatctagataagagttgtagtgcaaagtgacccctctgcccc

SEQ ID NO: 63716 - DNA, 180 bp, Zea mays
  unsure (1)..(180): unsure at all n locations
  Clone ID: MRT4577_158108C.1
gggncgggcgacgcggccgtgtacgcttctatcaaaagctaccctttattttatccaaccctctctatctctccggcgggcgttcttattagcagtgcaggatctactctgacgatttagcctaactcatccttcaatgcgctcaaactctctgcggtcggtggcgaatcccgaactgct

SEQ ID NO: 63717 - DNA, 664 bp, Zea mays
  Clone ID: MRT4577_158109C.1
cgagggcatcgtcgcggccctgctgcgcgccggctccggcggcgccgtcgtccaggtgcgcggcctcctgcggcgggcgtcgctctactacatcatgcggttcgtgttcggcaaggagtacgacgtgtcacgcgtggtgccgccgtccggcggggaggaggtggaggagctgctcgagatggtgcacgaggggtacgagctcctgggcatggagaacctgtgcgactacttcccggggctcgccgccctcgacccgcagggcgtgggcgcacgatgcgccgagctcatgccgcgggtgaaccggttcgtgcacggcgtcatccaggagcaccgtgccaaggcggtcgccggtggagacgcgcgtgacttcgtcgacatcttgctctccctgcaggagagtgaggggctcgccgacgccgacatagcctctgtgctctgggagatgatcttcagaggaacggacgccatggcggtgctcatggagtggaccctagctcgcctcgtcctccaccgcgacgtccaagccaaggcgcaccgtgagctcgacaaggtcgtcggcgcggacagccagaccaccgagtccgcggcgccgtacctgcaggcgttgctaaaggaggctctccggatgcacccgccggggcccctcctgtcgtggcgccacagg

SEQ ID NO: 63718 - DNA, 227 bp, Zea mays
  Clone ID: MRT4577_15810C.1
ttgtttttttcttttatactaaacgctacaaaggagggtatctgacccacggcagggtgatcaaaatccaggcatacacatccaagtcgaaacataaaaactacatccatattgttttcacaatccaactttatagtatacaataaatacagcacaagaagccaatcactgcacaggttactatcaaagagcttgaccagcgaacataaccaaagcttttgatgagc

SEQ ID NO: 63719 - DNA, 591 bp, Zea mays
  unsure (1)..(591): unsure at all n locations
  Clone ID: MRT4577_158110C.1
aggggggggggggggggggcgggcgtaacgtcggacggcggccccgaacattgcgaggcacaattctactcnacctcacgttctcctgaagcttagcaatctaacatttttttataattaagtcacaggcacttttttaaataccattggtaaaaacaaatgtaacagttcttcctggacaaattttcattctacataacgtaacatacactactacactagcatagtagtgactaagaagaagaattactaaatggctcgagtactagatttattctaagaacatttttagcattaataattattataatacgaatttcatcttgtagaatttatttcaaattatcatcctgatcgtctagaaggtaattcagatgatgatgataaatatttattattatctcgaattctactacattttcaataacaacttcctcttaaatgttctcatctactattaactcccccgtcacaacattataatctaagtttaaatcattattctcgatctcatttttaatattaacatccctaacaatagtattaataagtacaaattttagaaacacagccagaaaatctaggaaaggt

SEQ ID NO: 63720 - DNA, 365 bp, Zea mays
  Clone ID: MRT4577_158111C.1
tttttaccacgcgaccgggccgaggcggccaggggggcgggcgccgagccggcggaaatggcagcggaggcagaaacggaggacggcgcgaaagaggcggcaggccggccaacggaggcagtggcggctacggcggacggcgcgagggaggcggcggcggcaacggcggaggaggcggcagacgccggagggcccgacgagagggcccaccctggccacggccgaaacatctacagcgacccataggatcgagcaaccgagcgattcatcacagagccaaagacccaccaccacaggaaaaggggaaggaaccctgttgcaagccaaggatgccacccgatacgaaacgagacccgggaagaacg

SEQ ID NO: 63721 - DNA, 767 bp, Zea mays
  Clone ID: MRT4577_158112C.1
gtactgggggccgataccctgccgccgccgtcgccgccgccttgttcggagaaatggggaaaaaagccatccgatacgccgtggtggatgccttcgcggctgagccgttcaagggcaaccccgccgcagtatgcctcctcgaagaggagggcgcctccgcggccgtggacgaccggtggatgcagtccgtcgccgccgagttcaacctctcggagaccgccttcctcgcccgggactcctccgggggagccggcgcagccccgcggttccacctccgatggttcactcccgtcaccgaggttgacctctgcggccacgcgacgttggcctctgcgcacttcctcttcacgactgttcttccggagcatggcaagctggagttcatgaccaggtccgggatcctgactgccaagaaagtccccgcaccagggagcactggcgtccctggtgaggagcaggggaagctgtttattgagctggatttccccatgattggttttctggaatgcgacgaaacgccgtcgattctggagaccctaaacggtgcacccattgtcagcgttcacaaatcggctaccgacggcgacctcattgtggaactttcttcaggaaaagaagttgttaatatccttcctagcatcgatgaaattaaaaacttggcctgcaggggtcttatttttacaggaccggcgccggctggatctggttatgacttctttacacgtttcttctgcccaaaaattgggatagatgaggaccctgttact

SEQ ID NO: 63722 - DNA, 285 bp, Zea mays
  Clone ID: MRT4577_158113C.1
gatgaaaaaacaatgtattgataaacagataaatctgtcgaaacaatatagttacacatgtagtgcttgaatctaaagaagtattatggtttacaggtaacagaaggataaatcagaacatggtctttatttggacgaaaccacacggcctatagcacttttatatatcttcctgactggtccattaacagtttccattgtattggttgtgtcctggacaatatttccttcaagatgttctgctctcattctgcagctgcactcattgtcatacttgcccatttt

SEQ ID NO: 63723 - DNA, 217 bp, Zea mays
  Clone ID: MRT4577_158114C.1
gcggcgagcttcgccgcgatcgaaccaggcgtgcggcctaccgttcccgtcgccggtgcctaccgtatccgccgtcggccaacctactctaccgtggtgctttttcagatatcactcgagatcggggagtggtgaggaccagagcgcttgtacctgacatttccgggctgtgatcagctgttcgtgagggactaagattcttatcgagaactccttc

SEQ ID NO: 63724 - DNA, 286 bp, Zea mays
  Clone ID: MRT4577_158115C.1
ataaccaggaaggcttacaacatcagggggtggaaaccacaacggggacaagagcagcacacaaggctgacgatgaccggatcaggatacttctaggactcatcaccatcatcaccttcctcaccctcatcaaactcaggaccaacctcctcggagtccttctcgaggggtggcagatcctcacgggcctcagagaactcggcctcctccatacccttaccgacataccagtggacgaagggacgcttggcggacatgagggcgaacttgggggcgatgcgggaga

SEQ ID NO: 63725 - DNA, 824 bp, Zea mays
  Clone ID: MRT4577_158116C.1
atgtcagacgacgcgccatcgcgcctctaccaccccgacaccgaccccgccgtcgcaacaggccaagacgcagcagtagaagcaccaccaacaccggcacacgaccccggcggcagcgagtgccggttctgcgagatgacgcggcagcaccagccgcagtgcgcgcggcggctgccgaagcgcatcatcctggtgcggcacggcgagagccagggcaacctggacatgtcggcctacaccaccacgcccgactaccgcatcccgctgacggcgctgggcgcggagcaggcgcgcgccgcgggccagcgcatccgcgacgtggtggcgggcagcggcaactggaaggtgtacttctacgtgtccccctacgcgcgcctccgccaaccgccgctgctgggccgaggagtgctcctccttcatcgacaccttcttcgaggagccctacggctcgtcggagacctcctcctcggacgaagacgaagcagaggacaaggaggaggagaccaagctgctggaccaactataactggtttcatccacatccaatccacccattcgcctcgtcctttgaaattctctccattggattgaatcttataccatgtgggaaaaacggagcagtgatgctgcattcagtcatcgctgatccctctcttattcgaaaacagtctgtagcatgttcataatagctattagctagaactagaaatgattcgagggcaatttcagaaaatgctaaaaaaacatatgctgtatctcaaggttttagctctgaaaaaaaaaaaaaaaaaaaaaaaaaaaaaaaaaaaaaaaaaaaaaaaaaa

SEQ ID NO: 63726 - DNA, 1850 bp, Zea mays
  Clone ID: MRT4577_158117C.1
cgtctcctcccctctcgcacctgctcctcccgtgacagcctcggttttcgagggttcaagggatgactaggggctcgggtctatggaggtaacttcaagtgacggatctcaattggagttgacaaaacttgcagcaatatttttcttcttggtggcggcggcgggcgcctccctccatggctccagctggtgatcggagcgccgccgcccggaaccccacaaaataaaacagctcgtcggtgccccaccccacccatcggggcgggatcctcctcaccggctttatatatacccgcgcaccccggcgccaggccgggatgtcagacgacgcgccatcgcgcctccaccaccccgaccctgaccccgaactcgccgtcgcaacaggccaagacgcagcagtagaagcaccaccaccaccaccaccggcacacgaccccggcggcagcgagtgccggttctgcgagatgacgcggcagcaccagccgcagtgcgcgcggcggctgccgaagcgcatcatcctggtgcggcacggcgagagccagggcaacctggacatgtcggcctacaccaccacgcccgactaccgcatcccgctgacggcgctgggcgcggagcaggcgcgcgccgcggggcagcgcatccgcgacgtggtggcgggcagcggcaactggaaggtctacttctacgtgtccccctacgcgcgcacccgcgccacgctgcgcgagatcggccgcgccttcccgcgggaccgcgtcatcggcgcccgcgaggagtgccgcgtccgggagcaggacttcggcaacttccaggtggaggagcgcatgcgcgccgtcaaggagacgcgccagcgcttcggccgcttcttcttccgcttccccgagggcgagtccgccgccgacgtcttcgaccgcgtcgccagtacgatcatccgatccgagccgagccgattcagtccatcgtctccctcttctcttctcctccccacaccattatttattgacacaccaatcaacgaacccatgcgtttgcgcaggcttccttgagtcgctgtggcgggacatcgacatggggcggctggaccaggaccccagctgcgagacgaacctggtgatcgtctcccacggcctcacctcgcgggtgttcctgatgaagtggttcaagtggacggtggcccagttcgagcgcctcaacaacttcgacaactgcgagttcagggtcatgcagctgggccccggcggggagtactccctcctcgtccaccacacccaggaggagctccagcagtggggcatgtcgccggagatgatcgccgaccagcagtggcgcgcctccgccaaccgccgctgctgggccgaggagtgctcctccttcatcgacaccttcttcgaggagccctacggctcgtcggagacctcctcctcggacgaagacgaagcagaggacaaggaggaggagaccaagctgctggagcaactataactggtttcatccacatccaatccacccattcgcctcgtcctttgaaattctctccattggattggatcttataccatgtgggaagagcggagcagtgatgctgcattcagtcatcgctgatccctctcttattcgaaaacagtctgtagcatgttcataatagctattagctagaactagaaatgattcgagggcaatttcagaaaatgctaaagaaacatatgctgtatctcaaggttttagctctgacatgattctgtatgttcctagatataagaacgcatacattctctattcaaaataaaatgctcagaggagataaatttgtctcaaaaaaaaaaagccataaaaaaaaaaaaaaaaaagcggcc

SEQ ID NO: 63727 - DNA, 792 bp, Zea mays
  Clone ID: MRT4577_158118C.1
aattattcaaactgaatcactgaactaaagcttggagagtaggtacaaagacaggcaaaaatcccctatcacgttgcatgggaaaaaaatgggcgtctctcagaaccatcacgtgactaaacaccaggcagtcactgatatcacattcctactaaagcgggagctagctagacttgaaaacaaatccgaaagcctaaagctcgttcttgtcgtaagacgacggctccggctccggctccttctccacctccggctgctcctcggcctcgttctcctcctccacggtcgcgtcggggctcaggtccaggcccttctgcaccgacttgtagatgctggacgcgaacttcttggggtcggggaggttgaacccgctctccatcagggccgtctggtacaccagcctcgccgtgtgcttcagctcctcgctctgttgttgttttacgttgcaatcaacacgaacaaacgaatcaacatcctcccacgttcgtgtgccccttacgagcaaatcaaaatgcaggtaaggtaaggtaaggtacctcgttgtcctgggcgaccttgtcgcggagctccttgatgatggggtgcctggggttgatctcgagcaccctcttgccgcgcatgtacgcctgcttgctcgagtccgacagggtctgcgcctgcatgatcttctccatgttggcgctccacccgtacttggaggtgaccacgacgcagggggtgtcatgcagccggttgctgatcttcaccgagtccacgttctcgctctccagggccttcttccaccagtcagtc

SEQ ID NO: 63728 - DNA, 646 bp, Zea mays
  unsure (1)..(646): unsure at all n locations
  Clone ID: MRT4577_158119C.1
cgacagcaaaagttttgcagctaattttattagaagagaaaaggagagtcatggcccaacttttaagggaaaaaacgggcccaaaaaccttacaagtagaggttaaccaacacagctagctcaagaaaagaaaaaaataaccacaccaaacacatctagctcacctccaaccatctaaaactcaacttgctaaggagaaacacactaaacaaggctaaaaaagcttcgtctagaaaagaaccacaagaaaaacttgctaagggctttagcattgagcaccacttacaacaacagaggccgacacgcgacatgtccttactaccaaagctaagctattgtcaataaacaaacagaagtctgaactctggaaaaccttggatgagaaaggttcagatagcttgctggactgatagaaccttggatgatgttgaattatcagcgttccttcctcacggctttgatgatttctatattttcctaagtgagagagcgataagatgtgatcagaccatctggcttccatattttccttagtgagagagcaataagaggtgctgagaccatctgattggcgttgacgactggcgcttttctggtttttctagcctttttttctttttcagttgntgnccatgctctatcaatg

SEQ ID NO: 63729 - DNA, 788 bp, Zea mays
  Clone ID: MRT4577_15811C.1
ccccgcgtccgccccgcgtccgcccacgcgtccgcccacgcgtccgcccacgcgtccgcccacgcgtccggcaccagaaatcctggctgtaattggcaaagtacctcacctctccgagtttctcaactccctgtacaactgccagtataagtcgttcttcgttgcattttctggtctgacagagcaaatcaagttagaccgttatcttcagcctcatttccgctactacatgagggaagtgcgcaccgtggtatactcacagttcttagagtcatacaagagtgtgacaatggaagcaatggccactgcgttcggtgtaactgttgatttcattgaccaggaactgtcacggttcattgcagctgggaagctgcactgcaagattgataaggttgctggcgttctggagactaaccgacctgatgagaggaatgctttctaccaggcgaccatcaagcaaggggacttcttgctgaaccgcatccagaagctttcacgggtcattgacctgtaaggactgtttgtgttggagctattcctgcaatcggcgcctgcaaatgtttaccaccctacgtcttccacaagacatctctgcttgagtggggattggggaacaagccctaagaacatctgtgttttaagtgcagaatatttgtgttttaatcagtaaacgctgtcctgtcatttcaagtttcctatctgtggctctgtctgtattttcttccttaagttgttagcttgacaaaaaaaaaaaaaaaaaaaaaaagggcgactagttctagatcgca

SEQ ID NO: 63730 - DNA, 462 bp, Zea mays
  Clone ID: MRT4577_158120C.1
ctctgttgtaacacccttgttctcggtgctctattgatagtgtgtgccctacgtttggaggaagtgatcctggggtacgggcagaagttgtccattcattgaaagaggaattgaatctgatgtgtggcctctcttgctcgcggcatccataagttaatactgctctatctgtaacctttacttaacattttggattcgtcctttttaaaataatagttggaatgtaacttactgccttactttttacatggcaaatggaacaatcaaggtgaaccggccaattggccagttttgaatggtaattaacttggaaaccacttttaattaccttggaaaggccgccgtatttggtcaacttgatggggggtttgaagtgggaatctttaaaattcaagggttgaacttgaccttccaatggggattttatggccttaaccatggttggggctcattagttggggg

SEQ ID NO: 63731 - DNA, 1244 bp, Zea mays
  Clone ID: MRT4577_158121C.1
tcgagttttttttttttttttttttttttttttttttttttagggacaaagacaggcaaaaatcccgtatcacgttgcatgggaaaaaaatgggcgtctctcaagaaccatcacgtgacttgaaccaggcagtcaccgatatcatcacattcctagtaaagcgggagctagctagacttgaaaacaaatccgaaagcctaaagctcgtccttgtcgtaggacgacggctccggctccggctccttctcctccacctccggctgctcctctgcctcgtcgtcctcctccacggtcgcgtcggggctcaggtccaggcccttctgcaccgacttgtagatgctggacgcgaactccttggggtcggggaggttgaacccgctctccatcagggccgtctggtacaccagcctcgccgtgtgcttcagctcctcgctctgttggtggtttacgttgcaatcaacatcctcccacgtatgctggttcgtgtgtgtgcctcttacgagcaaattaaagtgcaggtaacgtaagggaaggtacctcgttgtcctgggcgaccttgtcgcggagctccttgatgatggggtgcctggggttgatctccagcaccctcttgccgcgcatgtacgcctgcttgctcgagtccgacagggtctgcgcctgcatgatcttctccatgttggcgctccacccgtacttggaggtgacgacgacggagggggtgtcgtgcagccggctgctgaccttcaccgagtccacgctctcgctctccagggccttcttcccccactccgtcagctaccttattagactcgttgaggtccttgagccacgagtccatgcccagcttcaggccctcattgaacacgttctggaacttcctgtcctcgtagtccatcaggtactgcatcaggtactagtccatagggtcggtgaagaagatgtcctgcaaaaacaaaaacaaaccaaaaaccaagcgcagcggtggtacttctcaagctgtattccagacccggcccgctctgtaatgaaagtggataaaccagcagcgtacatatatacctcgtagttcttcttggttagcctctcgaggaacggagacttctccagctgctctttgctgcttcccgtgaggtagaagatgtctttctgccctggcttcatccttgaaatgtactcgtcaagggaggcaagtttgccatccgacttggtactcacccaagcaaatatcagatcagcttttttta

SEQ ID NO: 63732 - DNA, 476 bp, Zea mays
  Clone ID: MRT4577_158123C.1
acgaaaaagtcggaatcgtctgaaaaatacctgcgaactcatgaagtctgcggtgtgcagatcgtatgcagggcgcagcgagctaggctacgcgcgatcgtggtagacgccacctgacacgaacgctgtgcgtatacggccactactaggacgcgggaagaccctgcataagtggaagtgccactgaatggcatcccgggcctggctagggcatacaaatctgccttaatcgctatgaggagtatggctcgtaggaccctgccactacgcatgccttgcttccagtgctacggtgcggctgtggctgattttggaatgtataccacattacgtactgagcttggcattgttacgtattgtcatatcaccgacaatgctgcaggaattgttgaaatggctgcgatgaggcatacaatccgtgagagaactgatgctcttgatgctgttgaagatactactgctgccatcgggaaggg

SEQ ID NO: 63733 - DNA, 1084 bp, Zea mays
  Clone ID: MRT4577_158124C.1
cattgggaccctcgaggatggccgggtcgagcaggccggcaaaaattaacaattcagtttcgttaacaagcctggagggaaaaaggacacatcacccaaaggcacagggaatcgcaccatcgtgggacccgtacagcgcaccgcccagccgccggatctgcgccggcgacgcgcccggacgtcggatctacgccgccgcaggaggggggaggcggcgctgtggccgttctctgcccgtgagcgcccggatccgtcccgccgcaaggattatggatccgaaagagaagccaaatgtatcgagcagtccaccaacaccacggctggactgcataaaatgctttgatatgctctggttctgttactcaccattccaccagatgcagaattattaccggtatggggagttcgacacctgcttcggcaagtggggcgatcttatgggctgcctcgctctcaagacaaagcggaaggcagaggtggaggagatcctcatcgcgcgggagaaggccaaaccacatatctggacctaccggacggtcgatgaggcatcggagaattggtggcggatgtacaagcatgctgtgatgatgtcaccactgccaggttctgctcagcttcctcccaggtccgatgaatcttgatagtcgaggggatttgtgcaagtgttttgtttgcgcttatgtcacattatggcattagcgatcatttctgttcaaaatcttactgtaaactacaataccaagagatggaaccattgaggtaggcagaacatgtactgctgaagattgagaatttgaaatcgccttggattcagaagcaaataaatgaacgaggtttcctttatgatctatttcttgtatagaatcagaagaatgggaaatgtgttcattttgtaaaggaatcagtagtacatctgaagagtgcaggtgtgttcgcagttcttatgctgtggtgctgctaccttcgtaaatatgcagcacattttcacaccgaccagtgacttgcagtgtaccctacgaaccaaagtaatgtaattatggtatttggtaccagttcagatgacttgcgatgtgttaaagattat

SEQ ID NO: 63734 - DNA, 2629 bp, Zea mays
  Clone ID: MRT4577_158125C.1
cttcttgtgggaccctcgaggcctgccgtggatcgagttggctcattaacaattcagtttcgttaacaagcctacggggaaaaaggaccgtgggcccaaaggcacagggaatcgcaccatcgtgggacccgtacagcgcaccgcccagccgccggatctgcgccggcgacgcgcccggacgtcggatctacgccgccgcaggaggggggaggcggcgctgtggccgttctctgcccgtgagcgcccggatccgtcccgccgatattattaccggtatggggagttcgacacctgcttcggcaagtggggcgatcttatgggctgcctcgctctcaagacaaagcggaaggcagaggtggaggagatcctcatcgcgcgggagaaggccaaaccacatatctggacctaccggacggtcgatgaggcatcagagaattggtggcggatgtacaagcatgctgtgatgatgtcaccactgccaggttctgctcagcttcctcccaggtccgatgagtcttgatagtcgaggggatttgtgcaagtgttttgtttgcgcttatgtcacattatggcattaggatctggctctattactattcattttgaactaaagtttttaaaagccctaaattagggcgtgtttagtttttagggactaatttttagtcatttcaatttatttcattttagtccctaaattgtcaaatatagaaactaaaactctattttagtttccatatttgtcaatttaggaactaaaatgaaataaaatggaggaactaaaaattagtctctagaaacaaagcacctatttattgtgaagaaacgtttggatcgtgatccattaccacacctagctgcaccgaaactgtgcatttccaaaaacaaataagatgcaccctgtatatttctggttatcgattatatacgcatctttcggtacatcatggatcatgctttgaagtgaacattaccaaagatggagcactggaacagtttttcggcatatagataggcttgacatccggaccatatttcgtgtaagtgtaatgacactgccttcatatgtcatgctgaacactttcaggaataggcacacagtacattctcgtatcgcaggctctgttctttagatgtgctcataacactgatcattcatttctttataatgcaggcagagattatggaaatgcagaagaacgaggtaactgttaattctaaacttcgtttgtttgacccctgtatattatcttgatgccctttctggtttgctaaaaactttggcagagatagatagagaattacagaatagagatatcaggctgtaagcataccattccttctattactttgccaataaccaaagacgaaagaagaaaattccatattattcaaatataagccattaaatctgtgaaccgctagctgagcaaccggtcactaaattggttctaggattcagttaggggatcacacgttcacacttcgggcttattcgtttcaccgttaatccatgtggattgggtggtattgaggtggtattgagtcggtttaaatccatagcaagctaaaattcatcccaatttattccaatacactccaatccacatgtaattagaataactgaacaaggtcttcagtgtttcattctattccacacacttagttcaactttgtttaaggtatactacattatccttgtacactactcagcctgtgagttcatatcggttatgatgattgcctgtcactcatcaaatcatacttttcattatccatagaaaaaaaaaccgaattaggtttttaagacagctagcttttgatacatgtgtgtgttatctcaatattatgagggctccaaaagagtatgatgggtagctcgagtaaatcgaattaaactattttttactggcagatatctggaacagtttacaaatatatgaaacattgtcgccagcacgtataaatctaattattttgataatcaccacgtgtttctgcatttggcaatgacgactgcaaattttgcccggcagctaccagaaatgttgaaggatccattcggacggaagaagcgtctgtgcttgcgaagaacattgactgggccttggtgatgactatctgaaacagcagacgagtcgctgcatacctgcagtggtgcctgggatctgtacacaatttgtctcctatagactagcgatggacgtaacgtagtggggatgattgtactgttaccgcttatagtggagtcgggaaactgacacatgtagattatgttagtagagaaccaaatggagtgaagccggccgcgcaagactcggcggcttcggccatcctccagagcttgtgtagagttgcctagctttgcatcttgccggaagcagcacatcgtgtagagattggacggttttaaaggatcggtggctgggtgtaagtaggttggtgggattacaagcatgggcatggcgacgttcaggatgcaaccggcttgacgactgtacatctgatggctgtagagctgttgtagtatgcaaactgtcccgctgctgctgcttgtgtgtaatggtgaaaccagatgaatcggttatttgtgtattactacttagcaaatatgctcacgaggatttct

SEQ ID NO: 63735 - DNA, 2229 bp, Zea mays
  Clone ID: MRT4577_158126C.1
cccacgcgtccgcccacgcgtccgcggacgcgtgggcgagttggctcattaacaattcagtttcgttaacaagcctggagggaaaaaggacacatcacccaaaggcacagggaatcgcaccatcgtgggacccgtacagcgcaccgcccagccgccggatctgcgccggcgacgcgcccggacgtcggatctacgccgccgcaggaggggggaggcggcgctgtggccgttctctgcccgtgagcgcccggatccgtcccgccggtcataattccagaccgctggcgtcgtcgggtactcaggttccgacatgttcattcatgaagcgtgttttggctttctgattttttggtgttattcaattgcaaatacgtgggcttcggatctcgtataatttcttatcaaacatgttggattactcgtggagtgtttctcacttgtgtgaaaccgtgtgagctatttgaacaattcgatccggtcagcaaagggaaaactttttttaaaaaaaatatctgtgtggggggatcgatttgttcctagcatcctgtggacttaaatcagttgaactttggagtccttgtttagcttgtcaccgtcaattaattctacttcatttctggccgcatgcaaaatctgcctaactaatcgtaaacatttctggtggcatgcaaaatccgcactgatcccaatcactggattgtattacagacctatgtgattctgatgatatttggtcacctagtaccaaaacaggcggaaatggttgttttcctcgagaagctaattattattttttacattttaggcttgttcatttcgccgttaatccatgtggattgggtggtattgagtcggtttaaatccataataggttaaaattcatctcaatccatcccaatacactctaatccacatggaattggaataaccgaacaaggctttagtgagaataatacacgtgtatgcttacatgtgtgttgttataaatcctctttattgattctactctctgtccgagattgagatctaagctttagtgacatttctagttataatggtcttatcaccagtggttttgaaatgtagtcagaagcttgcaacactcaaatataatctactacttattgtggtcaacagttgttaataggtttatcgccttataggggatagacttgtgaagccatgctacctcactctggcaaaggactgtaacttagtcctttgcaatggaatgagcaaagaaaagatccaaagaatattgcgtttatggaagcaacttgatagttctgttacatgctaggctgctagctaatccatttgtaccagacaacagacatctgtaatcgctccatatttttttgtatttcctagatttgtctagaatcttacatttatcattgcatgaacgttcattttgtgttatatagtattcatttatcatatatatcaatcaaaatggtcctgtgatatcgagcttcagttgatgcagaggtggtgaaaacatcttgtcttctccaaagactgctgactgcaagttgcaaaagtttgtctttagcttgctgtgttgtttcttcctgcggagtacacgagaagtttgtagatagagtttctggtgtgccttttcctgtaccaatgtgtataaatcttacattgctggcctcttattatgcagcaaggattatggatccgaaagagaagccaaatgtatcgagcagtccaccaacaccacggctggactgcataaaatgctttgatatgctctggttctgttactcaccattccaccagatgcagaattattaccggtatggggagttcgacacctgcttcggcaagtggggcgatcttatgggctgcctcgctctcaagacaaagcggaaggcagaggtggaggagatcctcatcgcgcgggagaaggccaaaccacatatctggacctaccggacggtcgatgaggcatcggagaattggtggcggatgtacaagcatgctgtgatgatgtcaccactgccaggttctgctcagcttcctcccaggtccgatgaatcttgatagtcgaggggatttgtgcaagtgttttgtttgcgcttatgtcacattatggcattagcgatcatttctgttcaaaatcttactgtaaactacaataccaagagatggaaccattgaggtaggcagaacatgtactgctgaagattgagaatttgaaatcgccttggattcagaagc

SEQ ID NO: 63736 - DNA, 337 bp, Zea mays
  Clone ID: MRT4577_158127C.1
gaatggaatttaatttttttggtcacatcacatcacccgacgaatgacgcaactgacccataaccaaggcgtaaacaaacacccatgcctcccagacaacagggatccaggaacgtgcaaagcgacgaaaaaaactttttaacctataaaattgagacaagtataacttgagcatctttgcgtgtactacgatcccactaaatttgctccaatatgaagcacagctggtggccctggcatctatggaactgctcacccagaggcttattacacatcagcgatggtgatcacgctatccaaacgaacggcgaactggcggctcaaatgatactggtat

SEQ ID NO: 63737 - DNA, 272 bp, Zea mays
  Clone ID: MRT4577_158128C.1
ggggggcgacaacccgggtcaacaagattttgataggccaattaaagcattaccgcttgcttcaaaccctgttcaagaacccaaagccacaaaacatgatgttaaaaccttttgggaagggagctttatttccttgccgataaaaataaaacttgaccttgcaaaaagctcccagccggccattcagagaacttatgccttggcaacaacctgggcagaaaaatcccgcctcctctgctcctcgaagatgctgagcttgaaacccttgccct

SEQ ID NO: 63738 - DNA, 475 bp, Zea mays
  Clone ID: MRT4577_158129C.1
ccggggctccgcttcgcttcgacttggacttcgtcgcgccttccccgccatctccggcgaccggcgccacagccaatggagcccatggacagccagctcacggctctcgcgctctccgactccgacagcgcctccgtcgagggcgccgcagctgacgcggcggacgccgacctgcaggcgctccgccgcctctccgacaacctcgcggcggcgttccgctccccagacgacttcgccttcctcgccgacgcgcgcatcgtggttcccggcgcgcccgacctccgcgtgcaccgctgcgtgctctgcgcgcgcagccccttcctgcgcgacgcctttgcgcgccgcgccgccagcgccggcgaggaggagaaggacaaggacagttacatgtgcaaggtggagctccgggatctcctcggagacgaggtcgaggtcgggtacgacgcgctgcggctggtgctcgactacctctaca

SEQ ID NO: 63739 - DNA, 790 bp, Zea mays
  Clone ID: MRT4577_15812C.1
ggtagatgcaccagaaatcctggctgtaattggcaaagtacctcacctctccgagtttctcaactccctgtacaactgccagtataagtcgttcttcgttgcattttgtaagttcagatattgaaataacatgtccatactcctgcagtattataagattactgtcggtgcattttgtggcttgcattgatatggtctataattgtttccagctggtctgacagagcaaatcaagttagaccgttatcttcagcctcatttccgctactacatgagggaagtgcgcaccgtggtatactcacagttcttagagtcatacaagagtgtgacaatggaagcaatggccactgcgttcggtgtaactgttgatttcattgaccaggaactgtcacggttcattgcagctgggaagctgcactgcaagattgataaggttgctggtgttctggagactaaccgacctgatgagaggaatgctttctaccaggcgaccatcaagcaaggggacttcttgctgaaccgcatccagaagctttcacgggtcattgacctgtaaggactgtttgtgttggagctattcctgcaatcggcgcctgcaaatgtttcccaccctacgtcttccacaagacatctctccttgagtggggattggggaacaagccctaagaacatctgtgttttaagtgcagaatatttgtgttttaatcagtaaacgctgtcctgtcatttcgagtttcctatctgtggctctgtctgtgattttcttaaaaaaaaaaaaaaaaaagcggcc

SEQ ID NO: 63740 - DNA, 318 bp, Zea mays
  Clone ID: MRT4577_158130C.1
ctaccaagactccatgatcactccatcaaataaataatacatcagcaacttcaaactatcttttctcactatgtagtcatgaacaaactacttagatggaaataggtggcaaccatcgtttgctacaatgcactgatgatcaatctgcttagatatatactatgctactatgtagttataaacaacctacttagatgtaaatatgtggcagccatcttttgctactatacactggcaatctgtttagatataaatatgtaataatacagtgtttgtcacataaatattatgccagacttatgtttcttttaaaaaaga

SEQ ID NO: 63741 - DNA, 370 bp, Zea mays
  Clone ID: MRT4577_158131C.1
acctgccccgaaattcccggaataaccgagtcgtccatgcattccaacctttttagattttatcaggaacacagaccggagctcacctagcatactgatcctgccaactaatgtgcatgtcctgttcctatgccttgatgtagttgcagatcactgtatgcattctgacggttcaaatagctgctgattcttctggatgcttgaccttctagccggcggctgcacgcggactaaacatcctggaccgcgtgcccacaacgcgggctatgacctaaacacacctagcagtctgttggggcgcgagctctgacctcctactgaggcctccaggtgcgggcttcatgcagtggtttaataccattgtggcctc

SEQ ID NO: 63742 - DNA, 933 bp, Zea mays
  unsure (1)..(933): unsure at all n locations
  Clone ID: MRT4577_158132C.1
gcaacagcaacggcgtcgcgctgcccccacaacaccaccacagcgaaaagcagcagcctcctgggaagccttcacccacctccccgctccccccggcctgtctctccgttcctctcacgcacttcttcctccacacagacacccacacccacccacccacttggccgcccggggcgccccataatcccccctggcctcttgatgactactgcgcccaacatcgagatgatcgcctcctcgctgcgccactgctccctcaccggcggcgctggcgggcggcgccggggaggcaccaggcgccgcggcgccgagggtggcggcgacaccgacggcgtcaccgtggagctgaactccgaggtggcactgccctaccactgggagcagtgcctcgacatccggacggggcaagtgtactacatcaactgggagaacggcacccggacgacggtggacccgcgcacggcgtcggccttcgtctcctccccgacaccgcgctcctccacgtctcggcgcacccggcgcgcgtccacgccgtcgtcggggtacacctccgtgtcgtcgtccgtgggcgcggcggacgtcgtgaccggcgcgtggcggggcgccagcaacgacagcgggtacgacaacgacgacgagcaggaggacggggaggcggacgacgaggacgaggccgagagcagcagcaccaccaccaccagcagcagcagctccagcagcacgggcagcagcccgggggtcggcaatctcgtcgacgctctcgtccttctcgcccaccgacgagtccggctccggcgacaacggcggcgcccgcctcggcgccgggcacgtcnctcgtggcgggcggctgccgcgcctgcttcatgtacttcatggtgcccaagcgcgccgacgtgtggcccaagtgcgggagctccgggctcctccacctca

SEQ ID NO: 63743 - DNA, 244 bp, Zea mays
  Clone ID: MRT4577_158133C.1
acaaactgattccatattcctctgattattacttagacgaggaggggttccctttgttttaggcgatcgactatcgcggccgaatttgtttggttgtctttttctccttgttccatctgttagacggagctaggatcgttctctagcctcggccgtcctctgtaatgtaggatcatattattatcaataatcaatctgtcaccgtcgacccggcgatccttggaagattggttgatgccaaaac

SEQ ID NO: 63744 - DNA, 294 bp, Zea mays
  Clone ID: MRT4577_158134C.1
gtgataacaacgggatcaatatctttgcaaacaaaacattcacattcactctagttacatttcattgagccctaacagcgggtatagaggctatgcgctacaaaaaacttcaacagctgaactgatgaaaccagtcacaaagaagttgacaatataacgcatggaactattgtgagggcctaacctagcagacttgaaaatgaatccgtctgaccacaccttaattgttgtgcaaaagacagtgtatacgaacctgcgcggttgaacagggataatatacttgaacgttgaaaa

SEQ ID NO: 63745 - DNA, 1788 bp, Zea mays
  Clone ID: MRT4577_158135C.1
aaaccggagcggcggcaccatttcgttaccatggagaacctggcagggcagcagttcgtttatgaggtgacgagtctacgagcattgtttctgctgctgctcctctctcccttcctcttcctcatcatgcgcaacgcgcgagcaacaacactaatgttcgataccaagaggacaaggggccaccggcagcctgcagatcggcagcagagcctcccgccgtcgcctccggcagtgcctgtcctcggccacctgcacctcgtcggctctctcccgcacgtctccctccgcagcctcgccaggacgcttggcgcggacctcatgctgctccgcctgggctccacgccggtgctggtcgtgtcgtcgtccagcgccgccgaggccgtgctgcgcacgcacgaccacgtgttcgcgtcgcggccgcacgccctggtctccgaggtcgtcctgtacggtccgtccgacgtcgggttcgcgccgcacggcgactgctggcggcgggggcggaagctcatcaccacgcaccttctcagcgtcaacagggtgcagtcgttccgccacgcccgggaagaagaggtgagcgtggtgatgggccggatcgccgaggcggcggccgctggtgcggcggtggacgtgggcgagctgctcggctcgttcacgaacgacctagcgtgccgcgccgtgatgggcaagtccttccggagcgagggtcgcaacaagctgttccgggagcttgtcctcgacaccaccaagctgctggtcggcttcaacgtcgaggacttcttccccttcctggctcgcttcggcgtgctcagcaagctggtccgcgccaagtccgagagactgaggaggaggtgggacgagctactcgataggctgatcgaggatcgtgagagcaagtatgaggcggcggcggcgggggcgagtgatctcaaggacgatgatgacgataacttcatacatgtcttgctctccgttcgacaggagtacgaccatattaccagggagcaaatgaaagctctcctgcaggacgtgtttatcggggggatagactccacatcttcgctgctcgagttcaccatggctgagctcatgcggaaaccacgagtgatgaacaagctccaagccgaggtaaggagcagcacgcccgaggggcatgatggagtcgtcggcgaagacagcctggagcacatggcctacctgagggccgtgacaaaagagtccctccggatccataacgtgacgccgctcctggccccgcacctgtccatggatagctgcaccatcgatggctacacggtccccgccggggtgcaggtcctgatcaactcttgggccatcggcagggacacgcgctactggggcgacgacgctgaggagttcgtccctgagaggttcatggatggcggcagcgccgttcatgtcagcttcaaggggagtgacttcgagttcctgccattcgggtctggacgaaggatgtgcgccggggtgaacttcgcgatggccacggtagagctaatgttggcgaacctcgtgcatcgttttgactgggatttaccaccggggcaggagggtcgcgacattgatgtgtcgcaggtgttcggactagtagtccgccggaaaaagaaacttctcttggttccaaaattacgtgtatactagcatccccctccccgcacccaagatatactgggctgttgcatcatatatgtatgtactgcaataaaggttgcgtatatgtaagcttacgacattacttatactgggtatatgatgcaataatgttattag

SEQ ID NO: 63746 - DNA, 269 bp, Zea mays
  Clone ID: MRT4577_158136C.1
tttgtgatttcatagcgagttttctgaccagcttttgcggagattttgaacagaactgctatttcctctaatgaagaattctgtttagctgtgggtgtgccgggtggggtgtgtgtgatcaaaggacaaagacagtattttgaccaaatacgaggtggagatttacactacattgtacaaggactgaaagtgtcacgggtaaaaactctaaaaggttaattcctgtcaaatgcagtagatgatgaaagaaaggttggtattatcaggaa

SEQ ID NO: 63747 - DNA, 527 bp, Zea mays
  Clone ID: MRT4577_158137C.1
aaaaaaaaaaaaaaaaaaaaaaaatttggagctaaggagttgctgctttagtgaacgtgcattggcagttgcagccttacagctgaagtcactcagatatctttgggggcagggatacaaggcatctcctactggcaccgatctcatggcaatggtacgccccttctggaacattgagtttattgcaccaaatcaagatgagccttgcccaaagggtcaggcacagattctggcatactactctctggctggggcaaggacagattgtcctcagtcagaaattcccctccatccgtcagggggaagctaaaaagaccaccaccagtttgactgtacatacatgtttgatgccagcaaaacccacaatgcggtatagggacattccaccttacagtgccaattacgggactgaaagctcaagtaaaagcgacccactctgaactgccttggtatcttaggggcaacatttttgggtaagctgttcatctggccaacatggatatctttgtgtactacaccattttgac

SEQ ID NO: 63748 - DNA, 317 bp, Zea mays
  Clone ID: MRT4577_158139C.1
gagacaaaaaaacactattttatggtagcgaaaaccgcagtgcagacccaaggaggcgaatgtaacacactacattaacaaataggcactaatctacgatatatcagtcagactcaaggttgtagctctacatatgaattactggtcctactaaccgacccggaaccactggaaaatggaattgctaggcctccacagtcgatggacgatacaaatatttattcaagcaccggacaaactgatgaacaactgattcttattgagcgcattgctaggctaccttggaacctcaatgccaagggatagcataccaccct

SEQ ID NO: 63749 - DNA, 371 bp, Zea mays
  Clone ID: MRT4577_15813C.1
atcggtctctgcatgcaccgctcattgctatttaaaaaaaaatattttgtgcagaggggacggcaaggccgaggggttgccgctgatgtcgttattggtgaggttgacggtggtgatgccgtggatgctcgagtggcgcttgtccttgacgctggagttgaggcggatgatgtacttctatgcatggttggccaactacattggagttgaggcagatgttcctccagtccctggaagctcaactttgagccaccaagagaaccgaatacttgggaagttgaggagcaaaatggagcaaactctatccaaggtttttgagaattacaagtcactaatacgactctatacttgttggtttgacagaagatttt

SEQ ID NO: 63750 - DNA, 291 bp, Zea mays
  Clone ID: MRT4577_158140C.1
ggaacaccatccatacaaaatattattagagattgaaggccttaggggaactaacccccccaaccacattataatacgatgccattaaaggctccatgcccaaaaagcaaacccctgatagctacgggtccaacaaataaaacaaaaaaccgcgacagggatgaccaggaaagaacgcaaaaaaaaacacgaaaagccaacacaatctcacatctaatctcccctttctagtatccttaggacagcctcctgaatatttagtcgcaggccacacccatttaggtcatttgg

SEQ ID NO: 63751 - DNA, 359 bp, Zea mays
  Clone ID: MRT4577_158141C.1
gtgccggactgggagaaattgggagggtttgagtaggccgccaagtgctccttgccacgcagagagagagggcatgtaccactactgttaatcccgccctacaccatctcttggggttcaagcaggggggccacggagcacgaatgaagctcatcaggtctcctctgtgggtccgtacgccgggcggttggccggaatctcatgggatttcttgccggagtatggcggtcgttgtgggattacggtgccatggcggtttgggtctcagaaaacggcttgggatgatcttcggaccctattgatgaggtgcgtgcgcttgattcgaactaaggtcaaccggggatcttggcaattggtcg

SEQ ID NO: 63752 - DNA, 198 bp, Zea mays
  Clone ID: MRT4577_158142C.1
cctttttttttttttttttttttttttatttaattaagaggttaaaaaagtgaactgatttgattaaaagggggacttttttcacatgggcgcgacaaaatttcacccattaatgctcaaccaaccactagtatacacccaacatatcttcatacattcctatggaaaaaaatttattctttaaagcacttttcttcg

SEQ ID NO: 63753 - DNA, 455 bp, Zea mays
  Clone ID: MRT4577_158143C.1
attattgagaccaacaagcaacatgagactgagtactccactatcaacatcagagcagcactggtgaacaagatgttgtcgctccttatgctgcttgttcttttggtggtgctgctatgcgacagataataacgaagaggtcacagacgagtatgatgaccactatggtgcttcatacctgttcatactgagagaggaccccactcactccagaacattacacaatatttcacttgtagctgtcaaagactatcttgtcttatggtatgactctaggcttagctacaactacccaagctttgagtttttgagatgtggctatggcatgaactcaaaccatcttatgagggtgaaacctgtttctaatttctatattggtgctgttcattaaaaaaagaaaaaaggctaccaaaaggtgagccccaggtaccaaaaaaaaaaaaaaaaaagcggcc

SEQ ID NO: 63754 - DNA, 442 bp, Zea mays
  Clone ID: MRT4577_158144C.1
aagcagtggtaacaacgcagagtactttttttttttttttttttttttttttttcttttttttttttttttttttttttttttttttttttttttttttggcaggcaattaaaccgccccaaacaaattaatggataataaatacaaaacagggggggcaaaaaagcaaaggagggggggggcccagaatgtaaccacataagggagacccggggcaacacccagggacccctgcacttgggttggccatagaaaaagccagcccaagccagagggatgtctctggagcaaaccttgataccctccttttctcgatttacgcttaggaaaacagcattccaaggcggggaagttacttgggggcaacctcccccagcccccaaatctggtccccccccacaccaaagtagcccgggccccttgggcgggcccccccgccaag

SEQ ID NO: 63755 - DNA, 400 bp, Zea mays
  Clone ID: MRT4577_158145C.1
ggccgcttttttttttttttttttgttttttttttttttttttttttgtttttttttttttttttggtctgaaaaactgctgttaaattgtcaaggatcactttgagagggacaaataaaccgcaagctgcacatgacctgacgatgcttgcactaagaactacaagcctcgattgccttctatatgagtcgactattggatgattctgcgctgcaaagcaaattatctcctaattacagggccgtttatacatacctcttgcaccaacaaaaccttctgggggctgagggtcctccaattgctccaaccaaactacctgtgagctttctttctcagcaggaaaaacaactggtgggtgttttatgtgatactttcggaagtattaacagaggcccccat

SEQ ID NO: 63756 - DNA, 371 bp, Zea mays
  Clone ID: MRT4577_158146C.1
cgcctggcctaccggaccggaattaatttacagggttgacgagctcactataactttgccgccccgtccttttttttttaagggaaggttggctaagaccttccatagcagcaacagcagcacttgaagctcgagacatcttaggctaggcttgcaggggcacgaaacccctcagtgtcaaatcgtgacaatctagctcccagacctgaacataaacaaaaggctacagctacgtttcataagctggagcgcgactgtcgctggcttgatctgaattatgatcctacttgctggatgatttctccaggccctgaacccgacagttccggcctttgctaaaccctttcacaaggtgagagaaaccaacccgt

SEQ ID NO: 63757 - DNA, 401 bp, Zea mays
  Clone ID: MRT4577_158147C.1
gggcattctatcaacctttggggggggggaaacattttcaaaactggcgcattggagtttttgattcagggccaatgatttttcccggggtcccatttaaagttcaagaccgggacttttgggaaaagccttccaatttgggcgccaaaaaaaacacggggaaaaaaatggggggcaacattggcatgaaaaaacaatgcaaggtcacttcttttttttggcggggacacctggaaccacattatttaaaaaagggggaggaactttttccccggtctgccattaatccaagattggcccgacaactggtggaaaaaaaaaacccaatcccactattagggaggagggcccaactaccggcttcttaaaaacaaaaattttgagctttttcattaagggca

SEQ ID NO: 63758 - DNA, 373 bp, Zea mays
  Clone ID: MRT4577_158148C.1
ctacactaccacacaagaaagaaccccgtctaacttccaagcaataccacgaccagcacttcactaaactagggccctggcctgaaccaatgttacccattcgcctcaaatccaccctagagctccccgtagctcgccattcacagtgagttcgcgctaacacccctgtcgaacacaaatcttattatctcccggttccataaaccacgacataacgttaactaaccaaacttaccttgttttttgatgcactgtaaacaatagcagtgagatccattcacgttacgttaaccactccttgcaatgaaccaaacaccaccttaaatgaactaacccatctcaggaattgcaatgtccttaattggaatataat

SEQ ID NO: 63759 - DNA, 798 bp, Zea mays
  unsure (1)..(798): unsure at all n locations
  Clone ID: MRT4577_158149C.1
aaactcgtgatccattcctcattcgccaggaacgtgaaaatccaacgnnnnnnnnnnnggatcggtttgcgcatagagaatatattagattggccatgggaaggagatgttgaagatgcttcaaatggaagtggtgatgtgtgggacgaatcacttgaggctccattctgaatggcgtcttgctgcacgaatttggttgaacatgggtgattatggttgtgaagcggaagaattgtaaagtcggtggctacagtgttgaggccattgtaggctcacagcagattcagtgacactgaagactacttacaagttttactgtgcagatctgattcgatatttttggctggaaaattggggaggttggtgggcgccctgcagtttcaagtcaacaccctcagcagtcgcaaatgataatatagtgatggacccttcctggtcgactagttgcatttgtgttctgattggtccttagggtggatatctgttaattcaattgttgtgctaaaattttggagctgaactgttaatgtttgcctgcattttctttgttaatcttggaagcgtgggctagcacttccatcaaactaagatcgtggcatgtagctttccagttctgctttatcatcagcgtgttgttctgtaattcttggtgcatcttgggcggatggatactgttgtcattttgtaacatcaccgagaagctgtggattgggtgcatagtaacacaaaggtagataacattgtcaatccaatttttgttaaggtgtaaattcagagaagttttaggtttcaagtact

SEQ ID NO: 63760 - DNA, 374 bp, Zea mays
  Clone ID: MRT4577_15814C.1
tgggcggaggacttacggtgcgccggcggcggagtatgctagggggcctgattcgaccaccacatttggagcatttggtgaacgaaccttggagagacagacgacctagcaggtggcgatgcttcttacgttggactcgctatgccctgcccgaagggtaggaggtagaggattggtacagtgacgggggaatgctggcagaggatgtgtaggcgaggtttggtatgggaatagataatgtcgtgcgtgtgcaaaggcgcaattgcaagcacgctattcgttgcataatacatcgcgcagtgtatgtcctgaagagcggctatattcatacataataacaacctgagggatgtccattaagaacagaacgaccg

SEQ ID NO: 63761 - DNA, 705 bp, Zea mays
  Clone ID: MRT4577_158150C.1
aattcggcacgaggctactgctactctgcagtctgcaccctccaagaaggcaaagaaaggaagaacgaagctcacccatcagcctcatcacttacccggtgggcactggaggattagggtttggttgaagagggagcaacgaaatggggggcttttgctccaaggagtcggccgtcgacaagtcaccaagcgacactacgctcggcccaggcagggtggtcgaccaccaccatgaccgtctagtggtgaaggaggagaagaaagctgtggtgggggaggctgctgccaagaggattcaagaagagcaacatcaacagcagcggcagccagcgccgccaccgctgcacgtatcggtgtcgcggactgcagtgcctggagcttccgcagataccactgcagcaccatgggatggggtaccaccactggcacggttgccatcgctgaagtcggggatgggtgtggcgaataaggtttcggaagtaagctcaattctgggtagagctagtactgctggccttggaaaagcagtggaagtgcttgatacacttggcagtagcatgacagatttgaatataagtagttttggatcaggcactgcaacaaagggcaacaaaatatatattttagcatttgaggttgccaataccatagtcaaaggttgcaatctaatgcatgccctttcaaagatagcataaagtacttaaa

SEQ ID NO: 63762 - DNA, 200 bp, Zea mays
  Clone ID: MRT4577_158151C.1
agaccattagcattatctactccagagcgcagaagaacccgatcgacaccatgaggacagtagctcgttgccctcgctctactggctcttgctgggagcgccatctacacgcatacaaacggagggtgaggctgccatccaccgccgtcagttcatctaccgacgtcagtgcatttgccacctacggatcagctgtcacc

SEQ ID NO: 63763 - DNA, 568 bp, Zea mays
  unsure (1)..(568): unsure at all n locations
  Clone ID: MRT4577_158152C.1
tcggccgggnncgaaactaggaggcccgtttcataaaattcatgaagctccttatagggtgcttcaaaaacactgtttttatatcttctcatgaagttgtacgaaaattacccaccatgccactggttacgcaacatacaacttctgttctctctggcgacaacacactaatcatcaagggtaatcaaggaaacctacacaaatcaattgtaatataaaagttggagtccatatacaaaccaaacgctcttggaactcaccttaacaatttgctggagctgttttatagtgaaattggaaaaccaaagctgatgtttttgaagcaaagctctctcaaacaggccctaactattttctgtatttttttatccatgtatctactcctagtttatattaactgtactcctttttcagattgtgcaatgttttgggtttttttgtttgtttctagactagatttcagattgtgcaatgggtttgggtttctttctttcttttctggactagaacgagtattggacagtgtgggcaatgaaaaaaaatgtactattttttaaaaaannaaaaa

SEQ ID NO: 63764 - DNA, 305 bp, Zea mays
  unsure (1)..(305): unsure at all n locations
  Clone ID: MRT4577_158153C.1
ggcggattanggccggcagcatggacttctttttgtaggagagtgggagagacgatcatgctatattttttgtggacgagacgatcatactgtcattgtaacgtgtggtgtacgagacgatcatactgtcatggtatcgtggtggcgtattcatgtattaccagacaacctctaggccatagcaaattccatctatcctacaaccttatcagatccacgctgacttattacattacatgcttgtctttacgatcactagtacactacacccttctcgcggaattcaacatttttatattcaactt

SEQ ID NO: 63765 - DNA, 890 bp, Zea mays
  Clone ID: MRT4577_158154C.1
ggctagctgagtttttttttttttttttttttaaaaagaactagcagtgcagtacttggccgctttttttttttttttttttaagaaaaaacaactcatcgatgttattatacaccaacgaatggctaaataacacagtaggacgatggaatgaaggaggtagaacagaataacaccatgcattgatgccctgctatctatggcgccgggtgagtgacaaggctgagaaaattgaactctgctactatagcgtggaaaatgaagagcaacaaggaatggaaattaacgggccgggactcttccggtgtacaaggaaggaacgtactccatcagttcatggtgttaccgtagctcgacgacccgccgagaatgtgcggatgatgtcctccgccaccgccaccgtacagccccgtgggaggagccatcgacatcgaggtgccggtgccggcgccggaaccagacgccgctccgagatggagctcggagatgttgggcaccccgccggccgtgcagtcgtcgttgctggtggccgcgtggcgcccgtcgtcggggccctggtcgtacaggaaccccttgaagaggtggccgttgatggtgaccgtcgcctggtacgcgtactcgtcctcgccgtcctcgatggacgtcacgcgcacgcacttgaacaccgccggcgcgcgcacctgcctcgggagcctgtccctgaacgacgcgtcttggtggctggacgtggtgtcgaagcttcggggcgtcgtggcgttggaggtggacgtgtgcgaggtggtggtctgcgacgagaggaggcggggcttcttggacgcggacgcggacgcgtaccggcgccggccgccgccaggcggtggcgggggagaagaggcggagccgagacggcg

SEQ ID NO: 63766 - DNA, 387 bp, Zea mays
  Clone ID: MRT4577_158155C.1
atggcccctgccggcccccccttggctccgcccctggccgagtgccacggagacacttggcaaaggttcactctttgtcgagtgtctactactgacactcgacaaagaagctctccatgggtccctttgtcagttcctttgccgagagtattaggtggcactcggcaaaaaaggctccctctttgccgagtgccccgccggacaagcactcggcaaagggatcacccaacgagcccctttgtcagtacctttgccgagtgcactaggaggcactcgacaaaggttgcttctttgccgaataccaaggctacaacactcagcaaagaagctttaccggttcccaggcgtgccttctttgccgagtgctatgaccttgacactcggtaa

SEQ ID NO: 63767 - DNA, 293 bp, Zea mays
  unsure (1)..(293): unsure at all n locations
  Clone ID: MRT4577_158156C.1
cgcatgttcccaataannttttgacttgtgtaatactccatggtctacatctattattcggtgcgagtatggaatagctacgtatgcgtcaccacataatatttattacttctagggaatatagacaatagacacttggttgatgataaatcggatcagaatttcgtgtggaataaaaataaaaataaataaaaaataaataaaataaataaataaaaataataaataaagaaataataaataataaataaaacaaataaataataaagaataaaataaaaataacaaaaata

SEQ ID NO: 63768 - DNA, 173 bp, Zea mays
  Clone ID: MRT4577_158157C.1
gacgtcacatgcacgcctacctaagcctggatcctctatactgacccacgggagcgggagccttttcactgagcgctaccacaacactacctgggcgcgcctacaaactagagactcagcacgcacagcggaatctggagcctcactggcgcaccagaggagcggcgcaccca

SEQ ID NO: 63769 - DNA, 973 bp, Zea mays
  unsure (1)..(973): unsure at all n locations
  Clone ID: MRT4577_158158C.1
ataatatgtataattttataactcataaaatatgtaacagttctccagtcatatcattttaaaaaanaatgtgtaaatcatcaacttctttttttttcagatatcatttaaagttgaaaaatagcagaatcaaactttcgtataggacctctatgtagattttcgcttagggcccccaaaatgtcaggaccggccctgatcctctggctgccgcccctccctattcttggtggtcgagtcttctcccatggatgctggccgtcgctgccctccctggtgctcgacaaaatgggtgacctacctcattctcgaccttgctgtggtggtcggtcacgccatggtcgtggatgctctacattctcgctatcgcgtctttaattgccgttggaaaggaaggtttcaggtttcggagctgatgaagtaagcgaagctcgaacgacgctctctaggtgtccgtcggatttccgatgccagacgtcgtcctctctgttccgtgtctccctgcatcttcatcgatgtagcatcggtcgtcaacctcgccgtggcagctctcaaactaggagtgttggtgcaaaaccgtcgtcaccccgtcattgcaggtcgctgcgctatcgtttgcttatgtttcatcatctgcgccatggcacttgctattgtccctagtttaattctatgtgtggttaatggtcgaagtctagattgcaaatgccaattttaatgaagggtatgtgtaggcatatatgtgatgagctgtcgaattaatgatatgtaagataggtctagtgtttctatcggctagttgtcatattcgactagaattatgtgagccaattatatggatacaatgatgacttgctttagaaattgtcgtgtcgatgttcagcatcagtgaaatgtcatagatgggtcgtcggtcatttagattaataaccttgtttaggtaatcaagtaaaatctgattgtgcttgagctg

SEQ ID NO: 63770 - DNA, 366 bp, Zea mays
  Clone ID: MRT4577_158159C.1
gcggactagtcgggggccgcccttttttttttcttttggtatttaaattttctacaaatcaatttggattgggggacgggggacaaggtacaaggacactacagtacacatgagttgggggagcttattgctgctatagctggctagtagctccagagcgcgacgtcagctacggagacgcaacagtcaccatgatcccaggcagagggcggtggcagtggcggcggctccacgagcaacccttgcgacaggctggcataggacaaggccaagtgcacgtacccgaaccagtcggcctggaacacggagccgtccaaccccaccgttctaatggccaccacagggaggggcccaagggccggcgcc

SEQ ID NO: 63771 - DNA, 364 bp, Zea mays
  unsure (1)..(364): unsure at all n locations
  Clone ID: MRT4577_15815C.1
agcagtggtaacaacgcagagtacgcgggcgttcatcgctcgttcatagttcctattcaccattcgttcatagtccatattcaccgttcgtccaaataatctttgtccagccgttatgctaccaaaattctgatcgtttgttcgtccgatcattcgatcgttcgtccgttctttcatagttcctattcatcgttcattcatagtcactattcatcgctcatcgttcgttcatacgactattcacattactattcattatcttactattcaccattactattnatcattgttactggttattattgttactatgcattgttactatttattcgctgctgttcttgttgttatgtgttgagtatgc

SEQ ID NO: 63772 - DNA, 2418 bp, Zea mays
  Clone ID: MRT4577_158160C.1
atgtctgaagataagaaagttgttggtgattcgaagctaagtctttttgaggagatgcatctgggttttcttcaatcaatgtcgaagactaatacagagaagattactaaagaaattttggagggtttatctgaagatactggtgacagcgatagctatgatatggatagtggtggtgaagacttcgaagatcgaccttggcgaccaagccatgcggtttttggtaaatctagtattaaagaaaatcatcttgtcaacatgtggggcagatatttccgggacgtgtccgttgtgagggctgatgaaggagagaagacttgtccagctcctgaggaaaatgaagtcgtggtatttcgaagcttcttgaaagctggactacgatttcccttaagcagctttgttgtagaggtgctgaagatatttgaaatcttccttcaccaacttacccccgaagcaatcataaggatgaatatcttcgtgtgggccgagaccattaaagagactgacgaaggtggactagtcaggctgaaatacacatttaagtttggagataaattcgttgagccagatgatgactggctaaaaagcattgaaactgtcgaagatactgcattgtcagcagccttcggaggccgaaagaagaagaggctgaaccgagtgtttgacgcaattgggttcgtctaccccgactaccattatccagtgcggggtcaaaaaagaaaaaatacttcctctgcgaaggaaactacttcagtcgttcctagtgagccggcgccgaagaggaaaaggttggccgaagagccagcaaaagaaaagatagaagaagcaaagactgaagaagcaaaaacattagaagttttaagtccttcagtaaaaattgagtcagaaaaaagccagaagggtccaacagtgaccccgaaaagaaagaggatggttaatgtgttagatgttttggagacaattaaatcttcaagcataactccaaagaaaaccattgaaacttttgaagtgtctactgaagcctttgttgctgaaatttcgaagcaacaacttgaagctgaacctgggccttcagagcccaccaaggaacaacctttggaaatcgaagaaacaaaggttacaaaggcagcattggaagccgaaaaaataaaaatgtcagagccaatttcggttgaagaaattgacactgctgcccccgaagcaccttccaacatacgcgattacattgtgcgacatgcttcggggaagaaactatctgaagaagagatttatgaagctaatcactatgccagagaattaaaatatccgaagggggcactagtgttcaatggaacagacgaagatgacttcctatactgcctccctgacaacaaagaattatctgtctgccgggagatggctaggagtatggggtttccgaagcttgaagctggactatgcgctatgacgaaggaggatcttgctgatagccttgcatataatagtctgaagggtttaatactaagcaacgctctgagagcgcaaaagaatgctgaagacgaaaattataatattgctttcaacaacctacgagcagaggttatcaagctgaggaacgaagctctggaaaaagataaaattctgcttacactagtggataaaataaaagaagacaaagctacctctaaagctcaagttgaagcccaaaaacgcgaaattcaggatcttcagaaacaactggccagggctaaagaagaacgcataatagaagaaacaaaacgagaacttagtgatcaatgggccaatcatttggaaataaatgttgaagagcttcgtgcttccaagaaaagatactatgataaatccatagagtgtgttaagaagataaaatccagcttcgccagcgttggcgcattctctagcgaagagaatttcacaagggggaatccggaaggcccgattgaatggatcagtcacgaagctgaggccttcgaagaaatcttgaacagccgcggagatatatgtgctttttcaggcgctagggggattgctactgtgttggaaagaaagggatgtaatcatgtgaaatctttagcacaaaccggaacctccttgtcccccgaagacataaaggacccctcgaccgaatcaagcctagttggtggaaaatttttcactgacatttgggacaatggtggccgagaaatggctcaagagatcattcgaaggagcgaaaaaggcgtccatgatgctaggaaaatagcagaggctgctgagaaaggcgcagagcccgaagggcaaatagaacctgctaaggcacctccgggcccccacccaaagggagacgatgaaattagaaaaatggccgaagccatcatggacaaggttgtcgatcagctactgaacgaagctgcagaagtagttcttagggaagattag

SEQ ID NO: 63773 - DNA, 1319 bp, Zea mays
  Clone ID: MRT4577_158161C.1
atggcgtacggctataattcaccggactgtccggtgtgcaccggactgtccggaaaaagattatctgaagaagagatttttgaagctaatcactatgcccgagaattgaagtatccaaagggggccttagtattcaatggcacagacgaagatgacttcttatactgcctcccagacaacaaagaattatctgtctaccgggagatggctagaagtatggggttcacgaagcttgaagctggcctctgcgctatgacaaaggacgatcttgcagatagccttgcatataatagtctgaagggtttaatacttagcaacgctttgagagcgcaaaagaatgctgaagacgagagctataatattgctttcaacaacctacgaacagaggttattaagctgaggaacgaagctttggaaaaagataaaattctgcttacattggtggataagataaaggaagacgaagctacttctaatgctcaagctgaggctcagaagcgcgaaattgaagatcttcggaaacacttcgccagcgttgacgcattctcgagcgaggaaaacttcacaaggggtaaccccgaaggcccgattgaatggatcaatcacgaagttgaggcctttgaggaaattttgaatagccgcggagacatatgtgccttttcgggtgccagggggattgctactattttggagaggaaaggctgtgagcatgtgaaatctttagcacaatctgaaactgccttatcctccgaagatataaaagacccctcggccgaagcaagcctggtcggtggaaaatttttcaccgacatcttggacaatggcgaccgggaaatggcccaagaaattattcaaaaaagcgaaaaaggcattcatgatgctagaaaagtagcagaggtcgctgagaaaagcgcagagcccgaagggcaaataggtattaactagcatccaggtatctcagcagtttcccactggttttccttttcaaaaacagctactggacttccagtccaccatagctcacggctcaaccgccggaccttttaaaaaccatttatctcaaatgcaccctttttgaaaacaaacattaattgccataccataccagactcgtccattcctgtggacacggactattcgaataggttttcaaactctgcgcagaggtgtacactttacccactagtccggtttctgtgatctcaccgtcgtgagacccgaatgccgaatctctttctttcctcgcacgtcctaaccttaacggttataccggaaggagtcaggccaccgccatgtccaaaccggacaaaacattcccc

SEQ ID NO: 63774 - DNA, 1425 bp, Zea mays
  Clone ID: MRT4577_158162C.1
atgtctgaagataaaaaagttgttggtgattcgaagctaagtctttctgaggagatgcatctgggctttcttcaatcaatgtcgaagactaatacagagaagattactaaagaaattttggaggtggtggcgaagactccgaagatcgaccttggcgaccaagccatgcggttttttggtaaatcaagtattaaagaaaatcatcttgtcaacatgaggggcagatatttctgggacttgtccgttgtgagggctgatgaaggagagaagacttgtccaactcctgaggaaaatgaaatcatggtattccgaagcttcttgaaagctggactacgatttcccttaagcagttttgttgtagaggtactgaagatatttgaaatctaccttcaccaacttacccccgaagcaatcataaggatgaatatcttcgtgtgggccatgagaagccaaggcttggaacctaatgcgaaaagtttctgcaacattcacgaattattcttcggctcctggtctgggtcaagctgccccgtgccgacctttcgaaagaggtggcccggcgactggatgacggaatggttttacgtgaagaatgacttgaaatcacgggaagatataaaaaagatcatcatgcgccccatctggcaacgcttcggcctgcggaggccgaaggtggaaatggatgaagcagccgaagaatgccagagagccttcggtgttgtttgttcttttattgggacaagggatttggtccaagaacacattgccttcagagtatggccacttgcggaaaaatgggagatgccgaaggaaaccgttaaagaacctgacgaaggtggactagtcaggctaaaatacacattcaagtacggagataaatttgttgagccagatgatgactggctaaaaagcattgagactgtaagtgatgaattacttggggtatactcaaaggccgaagacactgcattatcagcggccttcggaggccgaaagaaaaagaggctcaaccgagtatttgacgccattgggtttgtctaccccgactaccgctatccagcgcggggtgaaaaaagaaagaatacatcttctgcgaaagaaactgcttcagccgctcctagcgagctagcgccgaagaggagaagggtaaaagttctcacacaccggccacgttatattgaaccggccatagtgcatgtatttgtcggtgggattccttcggccactgaagctaaagagacagctcccctgccaaatgttgaagcgctggccgaagtaccagtgactgaaaaaatagaagaaacgaaagctgaagaaacgagggctgaagaagtaaagacatcagaaattttgagtcctccagcaaaaactgaggcaacaaaaagccaaaagggtctagcagtgaccccgaaaagaaaaaggatg

SEQ ID NO: 63775 - DNA, 642 bp, Zea mays
  Clone ID: MRT4577_158163C.1
tgaagatatttgaaatctaccttcaccagcttacccccgaagcaatcataaggatgaatatcttcgtgtgggccgtgagaagctaaggcttggagcctgatgcgaaaagcttctgcaacatacatgagttgttgtacgaaacaaaaccctggggtaaagaacagtatcacaacaattttggctgctacagcttcggctcccggtctgggtcaagctgccccgcgccgacctttcgaaagaggtggcctggcggttggatgacggagtggttttacgtgaaaaatgacttgaaatcacgagaagatataaagaagatcattatgcgccccatttggcaacgcttcggcctgcggaggccgaaggtggagatgaatgaagcagccgaagaatgccagagagccttcggtgttgtttgctcttttattgggatgagggatttggtccaagaacacattgccttcagagtatggccacttatggaaaaatgggaaatgccgcaggagaccattaaagagactaacgaaggtggactagtcaggctgaaatacacattcaaatatggagataaattcgttgagccagatgatgactggctaaaaacattgaaactgtaagtgatgaactgcttgggggtatattcaa

SEQ ID NO: 63776 - DNA, 3588 bp, Zea mays
  Clone ID: MRT4577_158164C.1
atggctgaatttagggttatcgcagagcacatcgacactagggacttagtgcaggaatttttggctttcaaattgtttccaactatgaaagagtgggccatgccgaagcttgaaggaaaaaagaaggaaggagaacttatccggctaccctaccattacaaattcaagagacatttcaaagtgccttgccaagaatggctggatacaatcaaagtaatgtgcaacgaaatacttggaaattattttaaaaaagaagaccaattgatgactgcggccttcggcacccgtccgaaacgaaggctaaaccgagtgatggatgctataggttttgaatatcctgactatgagcggctggacaaggaaggaaaagagcccgcaaaaacgaaggcaccaaggccaaagaggcaaagaatcgttactgtaacaccaccaggaacttcagctccgaagatgtcggctattgaaagcatgacaactactgaagttgtaccttcggaggctgccgcagaagaggtcagagccgaagatgccaaatccgaagatattaatttagaaagcatggttgctgatatagacaaaatgttactaaacatggccacggaagaagctgccgcagtcaccgaagagactacgaccgcaaaacccgagaaggaagaaatgacttcggaagacgaagcttttaattttcaaaacttagttggccaagagctgacaaaagctgaaaaagaagaactaaaagaatatgctatatattgcggatttttaagcttcggtttcgagagcactttctcagcgtttgcaaggatgtctgaagataaaaaagctgctggtgattcgaagctaagtctttctgaggagatgcatctgggctttcttcaatcaatgtcgaagactaatacaaagaagattactaaagaaattttggagggtttatctgaagatactggtgacagtcacagttatgatgtggatagtggtggtgaagacttcgaagatcgaccttggcgaccaagccatgcagtttttggtaaatcaagtattaaagaaaatcatcttgtcaatatgaggggccagtatttttgggacttgtccgttgtgagggctgataaaggggtgaagacttgtccgactcctgaggaaaatgaagtcgtggtattccgaagcttcttgaaagctggactacgatttcccttaagcagctttgttgtggaaatactgaagatatttgaaatctaccttcaccaacttacccccgaagcaatcataatgatgagcatctttgtgtgggccgtgcgaagccaaggtttggaacctaatgcgaaaagtttctgcaacatacatgagttattcttcggctcccggtctgggtcaagctgccccgtgccaacctttcgaaagaggtggcccgacgactggatgacagaatggttttacgtgaagaatgacttgaaatcacgggaagatattaaaactatcattatgcgtcccatctggcaacgcttcggcctgcggaggccgaaggtggaaatgaatgaagcagccgaagaatgccagagagccttcggtgttgtctgttcttttattgggacaagggatttggtccaagaacacattgccttcagagtatggccacttgtggaaaaatgggaaatgccgaaggagaccattaaagaaactgacgaaggtggactagtcaggctgaaatacacatttaaatacggagataaatccgttgagccagatgatgactggttgaaaagtattgaggccatcagtgatgaattacttggtgtatactcaaaggccgaagatactgcattatcggcggccttcggaggccgaaaaaggaaaaggctcaaccgagtatttgatgcaattaggtttgtctaccccgactaccattatccagcacggggtgaaaaaagaaagaatacatcttctgcgaaggaaactgcttcagccgctcctagcgagccggcgctgaagaggagaagggtaaaagttctcacacaccggccacgttatattgaaccggccataatgcctgcatttgtcggtgggactccttcggccactgaagctaaagagagagctcctctgccaaatattgaagtgctggccgaagtgccagtgactgaaaaaatagaagaaacgagggctgaggaagtaaagacgtcagaaatcttgagtccttcggcaaaaactgaggcaacaaaaagccataagggtctagcagtgacccctaaaagaaaaaggatggttaatgtgctagatgttttagagacaattaaatcttcaagcacaactccaaagaaaattgctaaaacttccgaagtgcacactgaaacctttgacgccgaagcttcaaagccacggtctgaaactaaagccgggccttcagaggtcgccaaggtgaaatccttggaagtcgaaaaaacagaaatagcagaacaaatgttaagtgaagaaactggcactgctgcccctgaagcatcttccaaaatacacgaagatgacttcctataccgtctcccagacaacaaagaattatctatctgccgggagatggctagaagtatggggtttccgaagcttgaagctggactctgcgctatgacgaaggacgatcttgcggatagcctcgcatataatagtctgaagggtttaatactgagcaacgctttgaaagggcaaaagaatgccaaagacgagagctacaatattgctttcaacaacctacgaacagaggttattaagctgaggaacgaagctttggaaaaagataaaattctgcttacattggtggataaaataaaggaagacgaagctacctctaaggctcaagctgaagcccaaaaacgcgaaattgaagatcttcggaaacagctagccagagctaaaaaagaacgcatacttgaagagacaaaacgagaacttagtgatcaatgggcaaatcatttggaaataaatgttaaagagcttcgtgcatccaataaaatgttctatgacaaatccatagaatgtgctaagaaaataaaatccagcttcgccagcgttggcgcattctctagcgaagaaaatttcacaaggggtaatccagaaggcccgattgaatggatcagtcacgaagctgaggccttcgaggaaatcttgaatagccacggagacatttgtgctttttcgggcgccagggggattgttactgttttggaaagaaaaggctgtgagcatgtgaaatctttagcgcaatccgaaactgccttgtctttcgaagatataaaagacccctcggccgaagcaagcctagtcggtgggaaatttttcaccgacatctgggacaatggcggccgagaaatggcccaagaaatcattcaaaaaagcgaaaaaggcatccatgacgctagaaaggtagcagaggctgctgagaaaagcgcagagcccgaaggacaaatagaatatgctaagctatctccaggcccccacatgaagggggatgacgaaattagacaaatggctgaagccatcatggatagagttgttgatcagcttctaaacgaagctgcagaagtagtcttaaaggaagattaa

SEQ ID NO: 63777 - DNA, 3215 bp, Zea mays
  Clone ID: MRT4577_158165C.1
atgtctgaagataaaaaagttgttggtgatttgaagctaagtctttctgaggagatgcatctgggttttcttcaatcaatgtcgaagactaatacagagaagattactaaagaaattttggagggtttatctgaagatactggtgacagtgacagctatgatgtggatagtggtggtgaagactccgaagatcgaccttggcgaccaagccatgcgatttttggtaaatcaagtattaaagaaaatcatcttgtcaacatgaggggcagatatttccgggacttgtccattgtaagggctgatgaaggagaaaagacttgtccaactcctgaggaaaatgaagtcgtggtattccgaagcttcttgaaagctggactacgatttcccttaagcagctttattgtagaggtgctgaagatatttgaaatctaccttcaccaacttacccccgaagcaatcataaggatgaatgttttcgtgtgggccggtaaggaacagtatcacaacaattttggctgctacagcttcggctcccggtctgggtcaagctgccccatgccaacctttcgaaagaggtggcctggcgactggatgacggaatggttttacgtgaagaatgacttgaaatcacgagaaaatataaagaagatcattatgcgtcccatctggcaacgcttcggcctgcggaggctgaaggtggaaatgaatgaagcagccgaagaatgccagagagccttcggcgttgtttgctcttttattgggacgagggatttggtccaagaacacattgccttcagagtatggccacttgtggaaaaatgggaaatgccgcaagagaccattaaagagaccgacgaaggtggattagtcaagctgaaatacacattcaagtacggagataaattcgttgagccagatgatgactggctaaaaagcattgaaactgtaagtgatgaattgcttggggtatattcaaaggccgaagatactgcattgtcagcagccttcggaggccgaaaaaagaagaggttgaaccgagtatttgacgcgattgggttcgtctaccccgactaccattatccagtgtggggtcagaaaagaaagaatacttcctctgcgaaggagactacttcagccgctcctagtgagtcggcgccgaagaggaaaagggtaaaggttctcacacaccggccacgttatattgaactggccacagtgcctgagttcgccggtgagacctcttcggccaccgaagctaaagaatcaactctgctgccagaaatcgaaaagttggccgaagtgccagcaatagaaaagatggaaaaaccaaggactgaagaagcaaaaacatcagaaattttaagtccttcagcaaagattgagacaggaaaaaaccagaagggtccaacagtgaccccgaaaagaaaaaggatggttaatgtgttagatgttttggagacaattaaatcttcaagcttaactccaaagaaaaccgttgaaacttctaaagtgtctaccgaagcttttgttgctgaagcttcgaagcaacaattcgaaactgaagccgggccttcggagcctacgaagaaattatccgaagaagaggtttttgaagctaatcactatgccaaggaattgaaatatccgaagggggcactagtgttcaatggaacagacgaagatgacttcctatactgcctcccagacaataaagaattatccgtctgccgggagatggctagaagcatggggtttccgaaacttgaagctggacttcgcgctatgacaaaggacgatcttgcggatagccttgcatataatagtctgaagggtttaatactaagcaatgctttgagagcgcaaaagaatgctgaagacgaaagttataatatcgccttcaacaacctacgaacagaggttatcaagctgaggaacgaagctttggagaaagataaaattctacttacactagtggataaaataaaggaagacgaagctacctctaaagctcaagctgaagcccaaaaacgcgaaattcaagatcttcagaaacaattcggcccgaggctggccagggctaaagaagaacgcatacttgaagaaacaaaacgagagcttagcgagcaattggcaaatcatttggaaataaatgttgaagagcttcgtgcttcccagagaaaatactatgataaatccatggagtgcgtcaagaagataaaatccagcttcgccagcgttggcgcattctctagcgaagagaatttctcaagaggcaatcctgaaggcccgatggaatggatcagtcacgaagcagaggccttcgaggaaattctgaacagccgcggcgacatctgcgctttttcgggtgctagagggattgctactgttttggagaagaaaggctgcaagcatgtaaaatctttagcgcagtccgaagctaccttgtccactgaagacattaaagacccctcactcgaagcaagcatggtcggcggaaaatttttcaccgatatctgggataacggcggccgagaactggcgcaagaaattattcaaaggagtgaaaaaggcatccatgatgctagaaaagtagcggaagctgccgagaaaagcacagagcccgaagggcacatagaacctgctgaggcatctccgggcccccacccgaagggggacgatgaaattagaaaaatggccgaagccattatggacaaggttgtcgaccagctattgaacgaagctgcagaaatagttcttaaggaggattaaacgctactgtagagacatttggaacgtaacatgtgtaacacattgtaactttgaatgtaatatataatctatttatagtttaattctttacgatgcatgaaattttgcatacataccattttttgagccttcggcgaaaaatacacccttcccttcttttcatgcttcgtgaagaaaatcctttctatatgacaagaatttgcttgcttttttgatgaagaatattcaaactttgtgaaatattcttcgaagctgtataaaaaagttttgtgttgcctctctaatgaagctacacttcatctcgatttatcttgtgacttagcatgattttctcttgtccaaagtattctccgaagatcaacactgtatccccttcttgttccagatgcagtatgctgtatgatgcttatgttatgcaaaatgatgtgatgatgttatgttatgca

SEQ ID NO: 63778 - DNA, 2160 bp, Zea mays
  Clone ID: MRT4577_158166C.1
atgtctgaagataacaaagctgttggtggtttgaagctgagtctttatgaggaaatgcatctgggttttcttcaatctatatcgaagactaatacagagaagatcactaaagaaattttggaaggtttatctgaagatactggcgacagcgacagctatgatgtggatagtggtggtgaagactccgaagatcgaccttggcgaccaagccatgcggttttcggcaaatcaagtattaaagaaaatcatcttgtcaatatgaggggaagatatttccgggacttgtccgttgtgagggccgacgaaggagagaagacttgtccaactcctgaggaaaatgaagtcgtagtattccgaagcttcttgaaggctggactacgatttccactaagcagttttgttgtagaggtgctaaagatatttgaaatctaccttcaccaacttacccccgaagcaatcatacggatgaatatcttcgtgtgggccgcgagaagccaaggcttggaacctgatgcgaaaagcttctgcaacatacacgaattattatacgagacaaaaccgtggggtaaggaacaatatcacaacaactttggctgctacagcttcggctcccggtctgggtcaagctgcccagtgccgacctttcgaaagagatggcctggcgactggatgatggaatggttttacgtgaagaatgacttgaaatctcgagaagatataaagaagatcattatgcgtcccatctggcaacgcttcggcctgcggaggccgaaggtggaaatgaatgaagcagccgaagaatgtcagagagccttcggagttgtttgctcttttattgggacgagggatttggtccaagaacacattgccttcagagtatggccgcttgtggaaaaatgggaaatgccgcaggagaccattaaagagactgacgaaggtggactagtcaggctgaagtacacttttaagtttggagataaattcgttgaaccggatgatgactggctaaaaagcattgaaactgtaagtgatgaactgcttggagtatattcaaaggccgaagatactgcattgtcagtagctttcggaggccgaaaaaagaaaagactgaaccgagtatttgacgcaattgggttcgtgtaccctgactaccattatccagtgcggggtcaaaaaagaaagaacacttcttctgcgaaagaaactgcttcagccgctcctagtgagccggcgccgaagaggaaaagggtaaaggttctcacacaccggccacgttacattgaactagccacagtgcctgagttcgccggtgatacttcttcggcccccgaagctgaggaatcaattctactgccaggagtcaaagagctggccgaagtgccagcaacagaaaaattggaagaaccaaagactctactgccagaaatcaaagagctgaccgaagtgccagcaacagaaaaattggaagaaccaaggattgaaaaagaaaaaacatcagaagttttggtgtcgaaaggtccaaccgtaaccccaaaaagaaaaagaatggttaatgtattagatgttttggagacaattaaatcttcaagcataactccaaagaaaactgttgaaacttctgaagtgtctactgaagcctttggcgccgaagcttcgaagcaacaatttgaaactgaagctgggccttcagagccaaccaaggtaaaacctttcgaaaccgaagaaacgaacgttgcagaggcagccgagaaaataaaaatatcagagccaattttggttgaagaaaccgacactgctgcccccgaagcaccttcaaaaatatatgattatattgtgcgacacgcttcgggaaagaaattatccgaagaagagatttttgaagctaatcactatgacagagaattgaaatatccgaagggggcactagtgttcaatgggacagacgaagatgacttcctatactgcctcccagacaacaaagaattatctgtctgccgggaaatggctagaagcatggggtttccgaagcttgaagctggattatgcgctatgacgaaggaggatcttgcggatagccttgcatacaatagcctgaaggtacgagaactgcgtgtttggaaattttgtaatttgcaacttattcttttattcttatattaa

SEQ ID NO: 63779 - DNA, 133 bp, Zea mays
  Clone ID: MRT4577_158167C.1
gaaacctagagatagaacgaagctacagtctacagagtcactgacctatcgccatggcatcgatgcagaacacgcttgatgctcgcgccgatgccgactcgcggcgcgccgttgaggagctggctcggtctct

SEQ ID NO: 63780 - DNA, 2544 bp, Zea mays
  Clone ID: MRT4577_158168C.1
atgtctgaagataaaaaagttgttggtgattcgaagctaagtctttctgaggagatgcatctgggttttcttcaatcaatgtcgaagactaatacagagaagattactaaagaaattttggagggtttatctgaagatactggtgacagtgatagttatgatgtggatagtggtggtgaagactccgaagatcgaccttggcgaccaagccacgcggtttttggtaaatcaagcattaaagaaagtcatcttgtcaacatgaggggcagatatttccgggacttgtccgttgtgagggctgatgaaggagagaagacttgtccgattcctgaggaaaatgaagttgtggtattccgaagcttcttaaaagctggactacgatttcccttaagcagctttgttgtagaggtactgaagatatttgaaatctaccttcaccaacttacccccgaagcaatcataaggatgaatatcttcgtgtgggccgtgagaagccaaggcttggaacctaatgcgaaaagtttctgcaacatacatgaattattgtacgagacaaaaccctggggtaaggaacagtatcacaacaattttggctgctacagcttcggctcccggtctgggtcaagctgccccgtgccgacctttcgaaagaggtggcctggcgactggatgacggaatggttttacgtgaaaaatgatttgaaatcacgagaagatataaaaaggatcattatgcgttccatctggcaacgcttcggcctgcggaggccgaaggtggaaatgaatgaagcaaccgaagaatgccagagagccttcggcgttgtttgctcttttattgggacgagggatttggttcaagaacacattgccttcagagtatggccacttgcagacaactgggaaatgccgcaggaaactgttaaagaacctgacgaaggtgggctagtcaggctaaaatacacattcaagtacggagataaattcgttgagccagatgatgactggctaaaaagcattgagactgccgaagataccgcattatcagcagccttcagaggccgaaagaagaagaggctgaaccgagtatttgacgcaattgggtttgtctaccccgactaccattatccagtgcgggtgcctgagttcgccggtgagacctcttcggccaccgaagctaaagaatcaactctgctaccagaaatcgaaaagttggccgaagtgccagcaacagaaaagatggaaaaaccaaggactgaagaagcaaaagcattagaagttttgagtccttcagccaagattgagacagaaaaaagccagaaggctaggccttcagagcccaccaaggtaaaacctttggaagctgaagaaacgaaaattgcaaaggcagacgaaaaaataaaaatctcagagccaattttggttgaagaaattgacactgctgcccccgaagcaccttccaaaatatacgattatattgtgcgacacgcttcggggaagaaattatccaaagaagagatttttgaagctaatcactatgccaaagaattgaaatatccaaagggggcactagtgttcaatgggacagacgaagatgacttcctgtactgcctcctagacaacaaagaattatccgtctgccgggagatggctagaagcatggggtttccaaagcttgaagctggactctgtgctatgacgaaggacgatcttgcggatagccttgcatataatagtctgaagggtttaatactgagcaacgctttgagagcgcaaaagaatgctgaagacgaaagctataatattgctttcaacaacctacgagcagaggttatcaagctgaggaacgaagctttggaaaaagacaaaattctgcttacgctagtggataaaataaaggaagacgaagctacctctaaggctcaagctgaagcccaaaaacgcgaaattcaagatcttcagaagcaactggccagagctaaagaagaatgcatactagaagaaacaaaacgagaacttagtgatcaatgggcaaatcatttggaaataaatgttgaagagcttcgtgcttccaagaaaagatactatgataaatccatagagtgtgttaagaagataaaatccagcttcgccagcgttggcgtattctctagcgaagagaatttcacaaggggaaatccagaaggcccgattgaatggatcagtcacgaagctgaggccttcgaagaaatcttgaatagccgcggagacatatgtgctttctcaggcgccagggggattgctactgttttggaaagaaaaggctgtaatcatgtgaaatctttatcacaaaccgaaaccgccttgtcttccgaagacataaaggacccctcggccgaatcaagcctgattggtggaaaatttttcaccgacatttgggacaatggcggccgagaaatggctcaagaaatcattcaaagaagtgagaaaggcatccatgatgataggaagatagcagaggctgctgagaaaggcgcagagcccaaagggcaaataggtattaactag

SEQ ID NO: 63781 - DNA, 485 bp, Zea mays
  Clone ID: MRT4577_158169C.1
cgttgctgtcgggcatatgtcatcctctcccaccactccgaatgggtacgatcgtggccccgaacctggacgccatcctgacgaactcaggctgctccggccagaacaacttggactcctctcctgcaaaaccacaccaccaccaccaccttcctgtgaagcgcttcccgcgcaccccccggatacagcagcacgaactccttggccgcgaggagcctgtagaagttggcgcccgtcaccggcacagcccccatgacgcggtgcaggtcgaagtgcgccgagtcgggcatgagccgctcggtggccccgtcgaacatgaaggggtgcgccaggccccggacgtggacaccggtgccgctcaggatgcccgtcaccatcggccccagctcgaaccccaggagcatgtggtaccccaccagcacggcgggcccctccctcggcagccccgccaggcccctcactaccctcccgtcgcccagcgtcga

SEQ ID NO: 63782 - DNA, 377 bp, Zea mays
  Clone ID: MRT4577_15816C.1
taagatacgtaacgtttacgtgggttatacatgcctttttttttgttagagattgatgatcggactacctttttacaagtactgtccagagagctacccttcacatgcatgcgtgcgtgcacgtccttcctcgctctagggggtaggcagaccaatatgcaagctgttaattaggccatgttgttgttgtcttgttgatcccggccggaccacgtgcttctcgtcgtctccttctcgcgaagcacatgcctgcacgtacggagtcggagacacatcagtttaggccggacggtttggacgaccgattggtttttaattagctacaggtttctaacattagtttttcgatagcgcgagtgtgtgtttgagatttttta

SEQ ID NO: 63783 - DNA, 336 bp, Zea mays
  unsure (1)..(336): unsure at all n locations
  Clone ID: MRT4577_158170C.1
ccggggncgggaaacaggagccaaactttanagtaagaaggcacnngaggaagngcngcgganggcagaggaganngggcggaagggganngagacnccaaagcangancnnaacanggnggnnggaaaccgaccacaccaaggngnggngcncgangcancacccnnnggaaanggncaananaaaggagnnaggggggggcagggnggaagggggaaaggcaccngngagganagcccnggangagagaaagganccccagaaannaggagccacnaanagggccccccaccacaccnggggcccaaggggggggggngggggccaaggacccc

SEQ ID NO: 63784 - DNA, 277 bp, Zea mays
  unsure (1)..(277): unsure at all n locations
  Clone ID: MRT4577_158171C.1
aagcacggaacccggctcgagcccaaacacacatataatatgcaccacccccgcacccaaccgccgggggggttaaccaaacacaacaaggcggacaccccccacgaagacacangaagcacagagcgacccgacacccccatgggcgaacaaaccacgaagggaaggcgaacggagccgcggaaacacgcacaggggaagacaaccgggggaaggccaagcgacccaggacacaaatcaacaactcgcaacccgggatagcccggagacctgaccc

SEQ ID NO: 63785 - DNA, 512 bp, Zea mays
  Clone ID: MRT4577_158172C.1
gtcggacaatcgggagttctggctggcaccgtcgacgctctcttcgtcgaaaatgtgggggctggttacattatagagagggatcatcgcgatcgtcactgtggaggtgacgtgcaatccgaaggcaatgcctgacgactgataacggcgcattcgcccacaccaactacagcacctattccatgaggaacgagggcgaatccaaagtgatcaaggggggcatatacaaactgaagctgaattacatggatcacattggggcttacggccagggcaacaagcgcctgataaccgctgggcacaagaccatctacataaacaccttaatctgaggaggacataactgatgcatgtggaggcctgatgtccgcaatacggagctaacctaaaaggacttctttgatgaccttcagaacacagtcaacatggacctctacttactcaccttcattatcgcacaacaccatcatacactggaaccactgatgcaccctgtagacaaaaaaaagtaa

SEQ ID NO: 63786 - DNA, 319 bp, Zea mays
  unsure (1)..(319): unsure at all n locations
  Clone ID: MRT4577_158173C.1
gaaacgagtttgctagctgttgaatttatattgtacatacttcgataatgatcttcctggccaccagggcccacaacgttctggaaggcctattaaatcaatttgcagcaggctgaaagctaaagaaggcaggattagaggaaacttgatgggcaagcgtgttgatttctcggcccgtacagttatcacaccagatccgaacataaacattgatgaattgngagtaccatggagtattgctttgaacctgacatatcctgaaactgtcactccatataatattgagaggttgaaggaacttgttgaatatgggcctcac

SEQ ID NO: 63787 - DNA, 447 bp, Zea mays
  Clone ID: MRT4577_158174C.1
caccaagcgtaacagaaaaagaaaaaaagaaggaaagggagaaaaaaaataaaaggatccaaagcttaaataggcgggcctgtctaagtggtggatcctttctaacgcccccttgcttcaatccactgaccttatttaaacaactacgctgactggaaaaaaccctgcctgttaacaaccattagtggtggggggggaaaatccggtttaacccaattgcttctacgaaaagcccttactgaaggcggttgtccaacattggcggaacctccaaggcgatcgccaacacgcaactgtacgcggcaacacttaatcgtcgaggaggaacggtggattgcgcccaatgcgtacaagctacactggagagcgccctagcacccagtcttatcgcttccgtagcttcctatctagccacgtcctttgtttttccccttcaaggtttaaacc

SEQ ID NO: 63788 - DNA, 296 bp, Zea mays
  Clone ID: MRT4577_158175C.1
tcgagccggccgggccgggctctattcctcttcccctcccactccccagctcctgccgccccgctccacgttccagaacatctgggggggtatcccactcatatggtctccctatagcccccccgacaaaatagcacacctacgcacatacatgatcgctatcgaggtagggtactagatgctgctccacaccttcctcacctcactacttgtagttccacatgtaccatgtcatcgacacacacatcactcctcctcagcgtacttatcttcctcaacaaccacctaatatacta

SEQ ID NO: 63789 - DNA, 117 bp, Zea mays
  unsure (1)..(117): unsure at all n locations
  Clone ID: MRT4577_158176C.1
ttccaggagtcttctataggtgaagggggaccacgtttccgcanccgcggcagcaccggcgacctaccccggcagaatccttgatcgagacaggagcggacgtggcctatggtttct

SEQ ID NO: 63790 - DNA, 551 bp, Zea mays
  Clone ID: MRT4577_158177C.1
accacgcatcccattcgagagacctggacacgaggctgcaagacagaagatcctggactaccacttgacactaccactacacacagtgagactactacgtgagctccttcttttgatccaactgtgcattcaacgggagcggcatcttgtggggcatactacgctgtgaactaggaatgaccggaccaaggaccagaacatggatgaggacatgcatctcaccatcaaggccaggaagaagggctacatgttcgactaccaggggaaaagccagctgaaaagtaacttgaacggctccttgatagactagcacatgcagcagcacaggcgggcgaacctgccgaggaacatgctcatgaagatggtgatgaacattaaaacgaacatcaaaaagacgatccagaagattaccacttcttctacaaattcatgatgatacgcaacatcatcacgcacatgatctactgcttgatctactgggtaatcatcttggtaaccatgttcctcatacacgaccggatacgcaagtacatctgcttctacatcacctt

SEQ ID NO: 63791 - DNA, 409 bp, Zea mays
  Clone ID: MRT4577_158178C.1
ggacggccaggcaacgccaacagataaaaaaaattaaaaacggggggggggggattaacaaaagaaaaaaacacaagggtcagcccggggggggacaccactaacaaaaacagggggtacggggagggaagcttgggacccggagacaaaagggacaaaaaaagcggttaaccgaacaggaagggacgggttcgggaaaacccccgggaacaggggaggacaaacgccccggggggagacaatggggggggggggacagaaccaggggggaacaaggaggggccaaaacaaagcaccaccggggaaagggaacccctcccaccccgggaccaggaagacaaaaaaccccagggacccgggatgggggggggacaaaaaacaggttcccttctttcaaaagccctaaagg

SEQ ID NO: 63792 - DNA, 265 bp, Zea mays
  unsure (1)..(265): unsure at all n locations
  Clone ID: MRT4577_158179C.1
tttttttttnnnnnnnnnnnnnnnnnnnnnnnnactcgtatactgaaatgattaatggtagcaatgtcctattcctggtatctgcaacgcctccaacgccaacccagcgtaaatacattatcgtgacaacattggccaaccaaaaagaagcgattgtcttcttagagagtctgccagaacgagttcgcgtccattattcccgagaacttcttgcccatgttgacaacatgcacgttccctttaccatcattccgaataacagcct

SEQ ID NO: 63793 - DNA, 595 bp, Zea mays
  Clone ID: MRT4577_15817C.1
gccggcagcggaaaaggaaaagctccccaacgaagtgcgagcgacccacgtccacacgacacgaaccaccaccaccaaccagcagccgcaccacgcacccagcgcaaagcgatggcgtcgctcaccatgatggcgtccttcgccgccgtggcggtggccgcgccctcgcgccgcggcaccttcgccgtggtcaggtccgccaaggtcgaccgctgccaggagcccgccacgctagcagcaaccgaggccaggcccgccggcgccgccatggcgggccccaagaacgggacccccgaggcgaagaagaagtacgcggccatctgcgtcaccatgcccaccgccaaggtctgccacaactgagcacgcccgcgttgcatgcagctgcagggccggggggtggtatataattaatgtacgtgccacggtgttgttgtccctattgttggttcgagctttagatgcatgcctgacgtgaggccgcttaattgctttctgacggcctcggagctgtaagaatatcaagtgcactgcaaaactgaattcggttgaaaccgttcttattttatcacaaaaaaaaaaaaaaaaaaggccccta

SEQ ID NO: 63794 - DNA, 285 bp, Zea mays
  Clone ID: MRT4577_158180C.1
taggcactacagtacgctcattcatgctggcggacagacctccagatacacggagcgaattgttactacgcaaacaacgaagagcttatttgaggtgtcttacaaattcacatggcacatttatgatagctgggtgcctattgaaagctcattcatagcctacctggcgaggtttgaagtactatgtatacttttgtgaggagcccatatgctcacaaagggtgtccaaggaaaacaaggcacattcgacatagtcaagggacccaactattgcatgatcagaaa

SEQ ID NO: 63795 - DNA, 550 bp, Zea mays
  Clone ID: MRT4577_158181C.1
aattcggcacgaggcggacccgcaaccctcgacagtgctacgaacaggaaaacgaaataactgtcttccattaccatcttgccgggcagctcctgcggctggacgtcgcggcaggcaccgtcaccaatcattatcttgcgccacatggttcgtaccatcgttcgctagctaggagatgaagtcaaggtgaggccataagggacgagcgggcgaccgcaccacgatgctgagcgtgctcgagaaggtcgtgaccggcagcataataggcgtagtgcttaaggcctgcgggctgcggatcacgtatatcaagatcaatgcatacatcaacaccgatgccagaaccatgttcacattcaatcacacagaaaagtgggctttgtacgatggcgaagaagaggacttggaccttggaaactatgagagacatttggacataaatttgactcgtgacatcgacataaccacggagaaaatataccagttctgactttgacagagaacggagaagagattaactatgaaaaactgatcagtctcgagccacacatga

SEQ ID NO: 63796 - DNA, 608 bp, Zea mays
  Clone ID: MRT4577_158182C.1
gttcctcctcccggccgtcataagagacgagtcgagtcgagtcgagtccacccacgcgacgccaatccatctcctcgcctctcctctcctctccatcctgcgaaaggcgcagacgcgaatacgcacgagcaatcagggcggacacatcctctcgcggcggcggcggctgctgcagcggcgtcggatttcgagacgctctcccttttagatcttgcccgcggaatcagcagatctagggttactccctactccactgcactccccatggcttcggcggcggcggcgactcaagtgggcacttacttcctccgcaactactacaatctgttgcagcagaaccccgatgtcgtccaccagttctacagcgaagcaagcaccatggtccgcgtcgacgacctcaacgggaccagcaccactgctaactcaatgatggatatacactcccttatcatgtccctcaatttcacccaaatcgagataaaaactgcgaactttgccaactcatggggagatggggtgctagtgatggtctctggtcttgtacagaccaaagagtacagcaaccaaaggaaatttatccagatgtttttccttgcgcctcaggagaa

SEQ ID NO: 63797 - DNA, 1487 bp, Zea mays
  unsure (1)..(1487): unsure at all n locations
  Clone ID: MRT4577_158183C.1
ccacgcgtccgcgtgcggcagcttctcccctcccccccctcgtctccgcacagagagggctcctcgctgccgtgtgccggccttcactttcccctctcgtctcctctcctctcccatggctcagcgcgacaagaaggtggaggagccgacggagctgcgcgcgccggagctcacgctgtgcgccaacagctgcggcttcccgggcaacccggccaccaacaacctctgccaggcctgcttcctggccgccacggcttcctcctccgcctccgtctcgccgccgccgccctcctcctcctcgtctccggcggtgctccagttcgacgagcagcagcagcagcaaaatccgaggccgtgtgcgccggcggcgtccgggcccacggaggaaccgcccaggccggcccgggcgtcagcgccggctccggcccggcgtcgtcctcgtccgtccgccggtgccagacctgccgcaagcgggtggggctcacgggcttccgctgccgctgcggagacctcttctgcggcgcgcaccgctactcggaccgccacgactgctgcttcgactacagggccgccggccgcgacgccatcgccagggacaaccccgtcgtgcgcgccgccaagatcgttaggttctaggcgtctcggatccggccggaggagctagctagctagctagctaggggcgggcacacacacacacacgcgcggtgatgggcgccgagatccgtcgccggtcctcatcgccctctatagtccgtccccccttcctctcctcctctccctctttgattgtcctctccttttcttcttgctgtcatctatttttattgcgagggggaaaaatgatttgatggtcaccgatcgatccgtccttggagggtgttggttatgtgttgatcgccatgctgttctagaaaattattcttccgtctacgaggacgacgatcgacgagaagcgtcgaaaaagagaggggagagagaatgaagacgaaaagaatagtgcgatgataacgttgttgttgttgtttgtagcggtggtggtggtggctggtggaagcgatatggttcggttcggttcggtgtgctcttgtcctgctgcgaatcacaaattcctgttgaattttttttatatatctttgtataaaacgaaattgaaaatgtttatatggtgtgccatgagcccatgacagctataatactacccatttcattcgtaaaaaaaaaaaaaaaagtgttgtggtggtgaccggtgcggtgtgctctaccacaccatcatggttggttggatggatggatggatcagctcaccagctgctaggagagtagccgacctaaattattattttacatatcgtagagccagacgacagagagagagctcaaagctgtaccactcgagctggaaaaaaaaaggtcctccacccaataatcttggtgagcatccagacacaggcaagaacacgcggcccangctggaccggagcggg

SEQ ID NO: 63798 - DNA, 550 bp, Zea mays
  Clone ID: MRT4577_158184C.1
cttaaaccccacaaccgttttttacctttaaaaacccttcccccccccctgggttgccccccccttgggcggggggggggccccctttccccaaaaaaaaaaggggaaccccccccccccccccccccattcgggttggttaattcaacccaaaattaaccaccaaaaggggttgaggggcccatttggaaaaaacccgggaccgggttttttttttttcaaggttttcccccccccccttctttttttcttgggggttttttactttaaggtgaagggcaagggttttcccccccccttctttggggccttgaacatgggggccaaaaattttcccttgtttatgcccaaaaaaacctttttggccttcttgccgggggaattgggccttttgccgggaaagaaaacccaaccgaatttttttggcaaaaaagggtacaaggggaaccaccggttttccccaaaccggtttcccacggggggcggggcccttgggaaaccccaccggggggggcttcaccttttgggggaaaacccggggggggttctt

SEQ ID NO: 63799 - DNA, 527 bp, Zea mays
  Clone ID: MRT4577_158185C.1
ggtggggtttttttttttttttttttttttttttttttttttttttttttttttttttttttttttttttttgaggaccaaaactttaaagaggggcagatcgggggggtacaaagcggggggcaaccgctaatacatgagaggggtatcgagggggggctagcttaattaggggagggggagcttgccgaccattccgggtccttaaggcgggtcccaaaaaaagccctaggttccccgcacggggagggggaccgagtaagtctcccctggggcgtggagggactcctccttcgaaatcttgggggggtgaacccccttcgggacctttttttcttcaaaaacaactttttgcgggaaggcggggtttttcttaaatgggagggggtcccccgccttaacggggaactggctgggctcaaaaacaagccccccgtggcctgggcccagaaaaacctcctgggccatgggaccccccggaagcagggcgcttgcagccattgccacggggggggggcccggggcct

SEQ ID NO: 63800 - DNA, 743 bp, Zea mays
  unsure (1)..(743): unsure at all n locations
  Clone ID: MRT4577_158186C.1
acctcgctacccacccactctcatcggctttgcagtctcacgatgaagaagttctacggcctcaggggcacgcagctcaatatcgccattgctgttatagcaggcacggattttgctcttttcggttatgaccaaggtgttatgggcggtctgctcacactcaagtcttttgttagatactttcccgaaattgacagcgtcaacccgcccccaggaagctccacgagccatgctgcaacaatccaggccatcactgtcggtgcatacacccttggttgctttttcggcgcagtcgccaccatctggctcggaaacatgcttgggcgcaaaaagaccatcttcatcggctctgctatcatggttatcggcgctatcctccaaaccgcatcttatggacttgctcaacttatcgtcggacgatggattactggttttggcaacggcatgaacaccagtacggttccaacatggcaatcagaaacatccaagccccatcgcagaggccaaatggtcatgattgaaggctctttgattgtctttggtgttatgttgagttactggattgatcttggcttctcgttccttgagcccagtagtatcgcctggcgcttccctattgcctttcagatcatcttggctctattcatcatcgccttgatcccgggtctncctgaaagtccgcgttggctggtgctcaagggccgagaggatgaagctctagaggtactagctgcgctgagcga

SEQ ID NO: 63801 - DNA, 489 bp, Zea mays
  Clone ID: MRT4577_158187C.1
cccttgtctttcccttaatcctgatcgccaccgttaccatgaggaagaaggacgaagtcgcgaccacctccattggaccgtctccgcgccgccgtaagagtaccccgggctacggcgtcaagcggtcgaggaagcagcagggaggcatctccgtcgcgtggggaatccaggcggagtcttattgaatcagatttaaaccatatcggggaagaatcgctcgccggtgcgggcgccctgcctccaacgtcgcgcttgccgtggtccgtgatttctgcgccaccattgtaggtgaagagtaggtggtccaggaggagccgccctataatgagagtacgagttgatctaggtggcatctcccagtcaactttgtggcgccaaggaataatacttagttcactttattattatcatttatttttgtaagacttacgctatgtaataacgacattcatgatatttgtgaaatttacctctatacactttgtcatc

SEQ ID NO: 63802 - DNA, 418 bp, Zea mays
  unsure (1)..(418): unsure at all n locations
  Clone ID: MRT4577_158188C.1
agaggacccattggcgtattaagacctatcttgctattagccacatggatgctggaaaaagtgggttgctgacatgaggaaagttttggcaaaaaatccgcatatagaacaacaaaagctgcacaggagagtattctttgagaaaattgatccaaaaaatcaagcacttatgattttcatatcctgctttgtaaagacatcacattttgaggagtatctcaatgtccaggtaatgtgcctttacattgatagatatttgttgtgcaagaaagccttggaacatattatgctggcattcgcctatggtgtctgctgaaaatatatggtctgtcactttggaccctagttntctagcttgtgttcttcaaataaattactcangaaagctgtatgttggaccttcttagaatagtgggca

SEQ ID NO: 63803 - DNA, 529 bp, Zea mays
  Clone ID: MRT4577_158189C.1
ggtccgagatacccggggccagccaagccttcgcccacgcgtccgcccacgcgtccggtgaataggtgatcctgcaaaacttaactcaaaccaacacaaacttgggctaaaatgtgagttagagggaattagaaccaagtttgagagtagagagaagagagaagttcctttcacttgattgctctatcaagatttaatttagatttagagcaatatcacaagtgaagaattggaacaaagaagagataaagattgcaataatgtaaatggcacaagagacatgacaattttattccgtggttcggtcaagcataatatgcttgcctactcacgttgtgtcgtcccaatgaacgagggttgcactcaacctctctcaagtgatccaaagaccaaacttgagtatcttagttcttcctaatgttttagaatatcccgattgtgaggaatctccgcaatttggagtctctcacgccttacacatgtgatcacaatcaatacatgggtaagggagagaatagaatacgcacac

SEQ ID NO: 63804 - DNA, 375 bp, Zea mays
  Clone ID: MRT4577_15818C.1
gccggtctcgattacctgtactgtttttgcctatgaagatctgttgctacctagattaacttctctcactccctctctttctttctctgatttagcattggtctaataggcaggttgcagttctagcttctcatcgcaagcagaatgttctgtctagtctaacccacctacctaatagtaactgctactacggaacaaaataactttctttgcttggattaggagatgggaaattgagacagtctttgcaggctttgaagggtttgtacataacgatgaaaggaaagagagcagatctgatgcagacaactcagaaggagataagaagactaagattgggtctttcaagaaaaaaaaaaaaaaaaaaggccccta

SEQ ID NO: 63805 - DNA, 564 bp, Zea mays
  unsure (1)..(564): unsure at all n locations
  Clone ID: MRT4577_158190C.1
tgggaccctcgagccgccggaactatagtctggtcggctcgctctaatgcgccatgctacttcgtcctgacctcgtgcgccttattacaagacattcgatggtctctatctgcctccgatccacggccgatataaataattcgagtctggatgtacagtgcgagcatcatcgagcgcatgatagaagcctaggcagctctaggagtgccactgacgcgtcacctatacggcctaacgtgggatgcgaacatgtccagtacgacacgactctggcagcctacatcatccacaaggaaactactgctgccgattgggttccgcctcagaggaggcatgcatatctttgtgaaaaccctgaccggcgagactatcaccctcgaggtggagttctctgacaccattgacaacgtcaaggccaatatccaggacaaggagggcatccctccagaccagcagcggntcatctttgctgggaagcagcttgaggacgggcgcacgcttgccgctacaacattcagaaggagagcaccctccacttggtgctgcgcctcaggggagggatgc

SEQ ID NO: 63806 - DNA, 915 bp, Zea mays
  Clone ID: MRT4577_158191C.1
gccgcggaaaaaaaaaaaaaaaaaaaaaaaaaaaaaaaaaacgcgtcatcaacactcaacagcgctacaagtgcagtccatgcatcgatccatggcagcagacatcaagtgcgagcagccgaagcggacgccgagcccgagcgcttcgtctctgaggatcttcggctacgacgtggctggctcgggtatcgccgaccgcatcatcgagcctccgcctcaggacgatggccggccggccgtggtggacagcaggcgcaggttcgagtgccagtactgctgccgcgagttcgctaactcgcaggcgcttggcggacaccagaacgcgcacaagaaggagcggcagcagctgaagagggagcgccagttcgcagcccgcgcacttgtcggcggccccgctgcagcgggcttgggtggcatctgcgccgccggcttcacgtcgtcacagtcacagccaccgccagggcacatcatcgcagtaagcccgggcgccatagccagctgggtctacctcgccaaccagccagccgcaaccatgggcctgcccttccacgccggcgtatgccaacctgagccgttgatgctgcgcggcggtaccggcagcagcatcctccgtcgatcatacgagctgtgcgctcctgctgacgacgacttggaggaatcatcggcgatggggctagacctgcacctcagccttgctccggccagttcatcctaactggggataaatcatcccccggcctcatcgattgaaccacgcaacacataaactgtaactcacataagtcccaagacgatttatgttgtcgtgccaaaaaaaaaaaaaaaaaagcgccctattttccaatatctcgggccttatgtatggcaacacctcaattaatggtgcacaagggactcacttttatacttagtacg

SEQ ID NO: 63807 - DNA, 240 bp, Zea mays
  Clone ID: MRT4577_158192C.1
ggtcaagccaaatcactgattgaattattcaaaaggcattgcacccgtttagaggcgggaaatttctgtattttccccataccccgggcccctggattttgctgggttactttttacaccctaaccaaaaaacccgcccccgttcaaactgttggaaaaaaaaaaatcgacaaaccttcggctaaggcttctaacaacagattgtgaaattggctcttttacatttacattaacattggg

SEQ ID NO: 63808 - DNA, 900 bp, Zea mays
  Clone ID: MRT4577_158193C.1
cattgggtacctcgaggccggccgggatccctcaagcacactcaaaatggctatcggcaagaacaagcgcttgtcaaagggcaagaagggcatcaagaaaaaggtcgtcgaccctttcacccgcaaggagtggtacgacatcgaggcccctggcttcttcgagacccgcaacgctggcaagacccttgtcaaccgatcgcagggtttgaagaacgccgatgactcgctcaagggccgtgtgctcgagctctcgctcgccgacctcatgaacggcgaccaggagcagggcttccggaagatcaagctgcgtgtcgaggccatctctggcaagaactgcttgacctcgttctacggcatggactttaccaccgacaagctccgctccattgtccgcaagtggcagaccttgatcgaggcctcggtcgacgtcaagacgaccgacggctacgtgctccgtcttttcgctatcggcttcaccaagcgcgcgtacaaccaggtcaagaagaccacctacgcccagtcgtcgcaggtccgcgagatccgcgccaagatggtcgagatcatgaagcgcgaggccgagggcggtgacttgaaggagttggtgcaaaagtttgtgcccgagagcattggccgggagattgagaaggctaccaagggcatctaccccttgcacaacgtctacgtccgcaaggccaagatcgtcaagacccccaagctcgacatgaccaagctcctcgagtctaacggcgagaccggcgccgacgccacccccggctccaaggtcgtcaagggcggcgactttgtcgagcccgaagtgcttgcttccgtctaaacgcgttatatctatctataaaaactttgataggtatgcgttaggggggatgcatgtattacgaacat

SEQ ID NO: 63809 - DNA, 270 bp, Zea mays
  Clone ID: MRT4577_158194C.1
ttcacgcgtacggctacaggtccgagcttgtgctgtctcaggcacacgccgaccatgaccaaatccaacagggcaaactggcttgtcaaatagacagactccaactcacacccgaaggccatcaacactgaaatgctggggggagcgcgcatacaggggccctggtgggtggtctacacggacagaagtgagaataggacgatactaaggaagatctgccccctaccagcccggcggaccttgacggctaccacaataaacgacaaggcc

SEQ ID NO: 63810 - DNA, 3069 bp, Zea mays
  unsure (1)..(3069): unsure at all n locations
  Clone ID: MRT4577_158195C.1
ttgtccccgggctccgcgctcccctgctcacccctcactcctaagcgccgtcgcgatctgctgcggtggccgctgccggcgccgtccatccccaccgcacaccaccgcctccaccacgccaccgactccgcctctcgctcccccctcgccgcgccgcccgaacgccacgatgcgtcacctcctcctctcccgcttcctccgccgcggtggcggcagcggcatccccaacggccactaccaccacctccccctcctccgcgccctctcctcctccccctccccggtctcctcggacgcagagctccgcaagtacgcgggctacgcgctgcttcttctcggctgcggcgccgcgacctactactccttcccgttccccgccgacgcgctgcacaagaaggccgtgccattccggtacgcgccgctgccggaggacctccacgccgtctccaactggagcggcacgcacgaggtccacgcccgcgtcctgctccagccggactcgctcccggccctcgagggcgcgctcgccgccgcgcacaaggagcgccgcaagctcaggcccctcggctccggcctgtcccccaatgggatcgcgctctcccgcgctgggatggtcaacctcgcgctcatggacaaggtgctcgacgtcgacgccaagaagaagaccgtcacggtgcaggctgggatacgtgtcgcggagctcgtagacgcgcttcgggaacatggcctcacgctgcagaactttgcgtccattcgggagcagcaggtcggagggttcactcaggttggtgcccatggcactggtgcaacattacctcctgttgatgagcaagtcattagcatgaaactggttacccctgccaaagggacaatagagctgtcgagggagaaggatcctgagttgttttatcttgctcgctgtggacttggtggcctaggtgttgttgcagaagttacccttcagtgcgtagaaagacaccagcttgtggaacacacatttgtttccaatgcagatgaagtcaagaaaaaccacaagaagtggctatccgaaaacaaacatattaagtacttgtggattccatatactgacacggttgttgttgtccaatgcaatcctccctcaaagtggataaccccaaagttggcatcaaaatatggaaaagatgaagctttacagcatgttcgggacctttatcgcgagtcactgaaaaaatatagatgcttttcagaactgaaacagaaagtaaagacccagaaatagatacactttcatttactgagctgagggacaagctgcttgcccttgatcctctggataaagatcatgtggtgaaaatcaataaagcggaagctgagtattggaagaagtcagaagggtatcgcatgggctggagtgatgaaatactgggcttcgattgtggtgggcagcagtgggtttctgaaaactgcttccccactggaaccctagcaaagccaagtatgaaggatcttgattatatagataagctgctgcagttgattgaaaaggaggagatacccgcacctggacctattgagcagcgttggactgcccgcagcaagagcccgatgagcccggcatcaagctctgaagaagatgatgtattttcatgggttggtattataatgtatctgccaacatctgatgctcgccaaaggaaggaaatcacagaggagttcttcagttacaggagcctggcgcgaagtctctgggatgattattccgcctatgaacactgggccaagatcgaggttccaaaagacaaggacgaacttgccgaactccaggcccggctgaggaagcgtttccctgtcgatgcatataacaaggcacgtatggagctggaccccaacaaggtgctctcaaacgccaagttggagaagatgttcccagtgttggagcctgctcaccagacaaagtaatacgtgttgaagagcgcagagcaagggcacgtacgcagaacttggttgcaggaggcttaacccatacacatttgtagcactgttagttcctgtcatgattctgggaccctaccctggctgtcaaatgtgatggcgattaagattggtcactgaaataaagttttttttgaagttcgaaatggaacccttttgaacgcgagatgtgctgccagaaggagatgagccttttgaactctctcccaaagaaaaatgagcattcgnannatgnnatatnntacnncatntnntcaacncacntnananncaatgnantnngttntcaacaaaaaannttaacntnntgtacttccacgcgtccgctctttttaatctaggggcaagtggttattttagataatcacactttgagctattttgcaggaatttatcaaagaggttatggctctggtagagcttgatcagctgagatatgcattagtagggaagcagggttctactgggttatcaacagagcaaatgaagggccttactaatttttcaaattctattgcttattgtagcagattgccagagttaccttacttttttcttgtaaaagaactattttgtttgttactgaatctcaatttaggggggaatacttccgcaactatctgcccatgatatcattaaatgtttttctaagatacttgttctccacacaaggccctttttatctgatactaatattgtatcatccaatgcaggtaatttcaatcttttggaggatcgtgcttttcttttggattttgtcttcaactatccttgtaaaggttgtgttcaggttgagctatcctgaattatttggagctcatggttctctttttctcttctttttcagcattaacctttagatttgtgtaatggatttctgcaacatcaagattgatactggcaactccattgataagactgcatgctcaaataaagcttggaccatgaagtgagatcaagctcatggacaagtagcgatcatcttttatccaatcttagtgtattcccaatagagcacacgtgaagaaaatattttgtttgactactgtaaatgtttaaggcaatgaaaattacaaatatgaaatagttgtggta

SEQ ID NO: 63811 - DNA, 373 bp, Zea mays
  Clone ID: MRT4577_158196C.1
aatattttgtttttctttttttaaagcaaagcgaaagttatgcgcaccgtacaaacaagccaaccctgagacaccttgaataaagggaaccggatagagggatgtaataacacatgaccccagagatgctttaaaccaccagcgcacccaccacatcggggacgcatggatacaacacaaaattaccgaccgaagagaaatgggctaccactggtggcaccgcgtgtggctataaaaaggaggcgccaatggggacatggcggagcccacaaatgaaaatgacaaacagtgacaatgggacactaaaaaagagccggatggaaaaaggggaacgcctgtgatgactgccgcggaaacagacttacaagcctag

SEQ ID NO: 63812 - DNA, 383 bp, Zea mays
  Clone ID: MRT4577_158197C.1
accggccgcctttttttttttttttgagttttaaaaatcaaatgaccggaacatatatgcaccagaggggggtgggggtcccaattcatagaccatggtccctaatgcataaacaaagccactgtttttgtagataagatgccttttcaccatggataaactcccaatcaatgcagaggaatgttgattttattgcttaccgtgaaaacaggaacctcattccctcattgctatccaaatattagtttgtgtgactcatggtcctttttttaaagccatccgtggggaattgttgagcacatccctcttcatcatggcgaatctttgggatctccacctggatgctatcagatggtaaagggcccccaaaggccttcaccttt

SEQ ID NO: 63813 - DNA, 369 bp, Zea mays
  unsure (1)..(369): unsure at all n locations
  Clone ID: MRT4577_158198C.1
aataggcacgggcccttggggcgctgaacaccataacaatagtaggggcgggagagcgagcagaggcgctctttgttatcttgtattctgacttacaggtgttgaggggggggggtgtaaacttatcttccaacatatgaatttgtgtggagggcttacagtatttatttttgtggttnttgctttttggncctgtttttttttttttttctttttgntttttttttgttngtnatgtgagttttttttttttttttttnnnnttnttttttttttggtggtgggttntngntttnnnnnntttttttttttttgnttttttttttntttttttttttnttnntnnttttttttttttttttttttttt

SEQ ID NO: 63814 - DNA, 328 bp, Zea mays
  Clone ID: MRT4577_158199C.1
gcgtcgtttaggattggcggctgcagccggtgggggagaacgaggaggagttcagggacatgcacgcgctgagcccgccggcgagccaggcttcgtggtaccgccggagccgggacgcgtgcgtcgggagcgacaccgggcccagggagcccttgccgaccatgagcagggagttctcgggcatggtcgccgccgcagcagccatcgccaacggtgccgccgccgacagggtcggggaggccgaggacgaggagaccaacccgctgggcatggtgccggacaggaaccccatgccgtgcgcgcgccgggcccaggggccagccacccc

SEQ ID NO: 63815 - DNA, 749 bp, Zea mays
  Clone ID: MRT4577_15819C.1
aaaaaaaataaataaaataaattgccggctaacgaggggcattgggtacctcgaggccggccgggaaaaggaaaagctccccaacgaagtgcgagcgacccacgtccacacgacacgaaccaccaccaccaaccagcagccgcaccacgcacccagcgcaaagcgatggcgtcgctcaccatgatggcgtccttcgccgccgtggcggtggccgcgccctcgcgccgcggcaccttcgccgtggtcaggtccgccaaggtcgaccgctgccaggagcccgccacgctagcagcaaccgaggccaggcccgccgccgacggacgccgcgccgtcatgctcgcggctgctgcggcggccgtggcagccatcggcggcgccggcgccgccatggcgggccccaagaacgggacccccgaggcgaagaagaagtacgcggccatctgcgtcaccatgcccaccgccaaggtctgccacaactgagcacgcccgcgttgcatgcagctgcagggccggggggtggtatataattaatgtacgtgccacggtgttgttgtccctattgttggttcgagctttagatgcatgcctgacgtgaggccgcttaattgctttctgacggcctcggagctgtaagaatatcaagtgcactgcaaaactgaattcggttgaaaccgttcttattttatcattaaaaaaaaaaaaaaacaggccgaagaaaaagggcggccaaaaaaaaaaaaatttcccta

SEQ ID NO: 63816 - DNA, 420 bp, Zea mays
  Clone ID: MRT4577_1581C.1
ggaaactaaagctccaattattccaggtttataaaagggtttagttaaatccaggggagttttactaggggtaaattagacattggggggggtttttttttggtacgggggggtacataaaataactactaggggttttttaaaaaaggggaaaaggcaaaagactggggggaaggtaaaaaagataaaatcaatcgttggttggggggggggggttttagggcaagtaaaacgcatagtttttaccttaaagggttaaaagttatgctggaggatcctaaaaaatgggggcagggccaggggggagctgagggctttgtttttttttcacaaaaaggggaactggggacattcgggtttttttaaaagaaaaacggtcgggggggggggaaagggggaggaacagaagcctttattttt

SEQ ID NO: 63817 - DNA, 1360 bp, Zea mays
  Clone ID: MRT4577_158200C.1
cgatggtaaggatgacatgctttgatatgctggtaaggaaagatatgtattgagcttttactacaatacacttcaaacttttggactgaagtttttcatatatggattattgctaaagtgctgaaggccgaagccaatctgtgacctgtcaattacttggacactaatgacctgtttggttcgttgcctaacttaccacagtttgccgcacataaggttaggcaagtttgatcaacttaggcacgtgtttgttttgtagtcacagttgtggcaagatttgtctcttgctgcgttggtcccactcatcaatgacttataaaagtgtagcatgattctcttaggcattgccaaaatgcggcaaataatttgagcgcctaacctttggcatgtgtggcagaaaatatatggcaatttatgacaccttagccgtacaaccaaacagacgctaaaggtcccagtttgtataattgtgaggccatcatgaactgctatgcttttgttcgtaggaaacaacataagatatatttatgtgtaaattaatagattgttcatatctatgttcattcggggtaaggagtgacattacaatgtcttggttgaactcaatttatgtgatcgccaagtggttcaagtgtgccccaatgttatgtttgttcactttccagtgcttagtttgccggatgctgttgcccacagaagatgcccccccacacaaacaaattggttgggcatcacttgtaatatatttctcccaaatgcaggttgtttggggttagacttgttacatacattcttcacctgctcatggattttgtccaaactactcatagggttatcgttcacatgtgtaacttattcagcacactactgtgatttttttatagaactaggtaggatggttatttagcaagatgatggtatgattcaaaacaacttggtgctttctgctactacccttgacttgtagcccgctattagtttggatataaccaatcaattaaaaggcaccctttggatgtaagcacaattcggttggctgcttccaattgatttggctacagatcaaatcctcttcaaaattgcatggtgtattttgcgttgctcaaagacaagaaatcattcaagatgcttacactgcccctatttattttctctgactggaacggggttggctaccatgacgacttagcaattggaatgccaaactctaggttcatcaatggttttgtaattttgaggtcaccagtgatttgttatacagaattgtgggtgaaaatgaaaacatctctggcaagttccagtcagtttctgaccagtttttgacacagactggtctgatgttgattgtcacatttttgta

SEQ ID NO: 63818 - DNA, 941 bp, Zea mays
  Clone ID: MRT4577_158201C.1
taactgtcaaattgcgaactgaaagaatcgccttgtaacatatcaatcacacattgtattcaaaacagaccacacgcgtcagtctacacaaaatggacttttagcctctgaagacaccgatgataacagatactgaatgttttctggcctcaggacagggagagaaaaaaaatcaatccagctcgccgaacattattattgctgtatggcaatctaccgcctcaatgactcaagacttacttcacttgacctgtttctaaatcccctattctccacctgtttaactaacactacccaaaaaaaaacaagaaagaccttacattcatgcaaaactaccagaatgaagggaaaaaacaaaaagaatgtacaatgggctttcaggtaaggatcgccaggaaaaaggctagccatccacatttgaattgcctcttgtttcatcatgcaggagaggtacaaggccaactttgccgaactaggtgcagactatgttcgccttctcaggcttgtaccctttaggatatataaacacggagtcaacgcacaagccgcctttcatatgtgtgcaatcgatctgcatcattgagaacttgagtttcatgggctcatcggaatttgatatgacaaaatcaccaacatggtaaagcttccagcccccttgttcatgtagatgcagataatattcggatgtcgcctgctgctcatcagaggtcgtgagctggaaccgtgtgggcgtgacatcccaaccatgcacatgctcagttccacaaagccaacgacccatgcgcctatagggtcgacccaggtgaagatgaaaaaaaaggctgtaggcaccagcaggaaagcagaactcaagctccccatctacctcgagccaccaaatctgctggagataggcaacagtatggaatcttacgtgcctcgtgcctccgatcatctatccc

SEQ ID NO: 63819 - DNA, 788 bp, Zea mays
  unsure (1)..(788): unsure at all n locations
  Clone ID: MRT4577_158202C.1
tgggcgggggcagggggacccnggctnggtcaaaggcttgnctggggcacggcaacagctgcttcctgngcgatctttggttccgcccaactttccactcgccctgctagccgcatgccgngagtgcgcacacggcgatccccactgcgcggccgggctcccacaaggggggatgggctcacctgcccgttttccgtgcggaagcccgggggggcctactgtcctcccgcgtcgccccgccccccgcgcgaggcccnccgcgggcggaccgctcgggcgattccccgcgcnctggctccctgcgcgcgatcgctgccttgcaagctggcggtgcccggtcgctgggcgtctgcnnctgggggggcctcccgctgcgcctgccggccggggcgcgctccngcgcngcnnccgcgcggctgggcgggcagcgctcccctgcccctgccgnnccccccccccccacggctgngggggccggccgcgcggggcccctccccnccnnccgccccccccggccccccncccccccccccccccccccccccnntcnccgcccgcgccccccgccgcccccccggccccccgccgccgccggcccccccgccccccccgcccccctcccccccccgccccccccgccccgcccgcccccccccccccccccccnccccncccccccccgcccccccccccccccccccccgcccccccccccccccccccggccggcccccccgccctccccccccccccccgccccccngcgctcccccccccccccccccccc

SEQ ID NO: 63820 - DNA, 480 bp, Zea mays
  Clone ID: MRT4577_158203C.1
ggggtggtttttttttttttttttttttttttgttttttttttttttttttttttttttttttttttttttttttttttttaagggaaaagggagcaggattttggaaggccaacccttgggcgaaaggaaacagggccaaagaaacatccggggggggggggggggaaaaaacggtgaacaggaaccttattccccatcaaacaaaaaattttttggggccgggggaagacatttaacagggggcaaccgcgattctggcccggggttccaggaaacatccggggcccctaggcaggtcgggggggacattcaaggggggccccaagccttgctcccaatggtggtggacagccagtccaggcctttatacaaaccctcgccaggtgggggacaagggccctgggtgtaccaagggccctggcgccgggggggtaaaccaagcttgggagtaattccagcagcattcatgggattggga

SEQ ID NO: 63821 - DNA, 354 bp, Zea mays
  Clone ID: MRT4577_158204C.1
cggagtaagaggtaagatcgtgtgataaaacacactggatgctcgatagcaggtagttgtcagaatgaatctgccaaagattcctcagagcaatttatggctgttagctgcgaagccaatgctagaaaggagaacggctctcatctcctatatgggaacgatgacaaattccagtagaagctgtgagggatgtcaatagtgattgatcacactataggatatcagctgtcataagagggggctactgatttgctgaacatggatgctttggaacacagcacagatctagatgactgaattcattattgggacaaacaccaattcaaatttttcggaagaaacacccaaggagag

SEQ ID NO: 63822 - DNA, 984 bp, Zea mays
  Clone ID: MRT4577_158205C.1
tgtttattgtgttgtatccctttgtctgcatggttcctggtgtcagcattcctgtatgggggctggtctatattcccactggaatcacatgtatgaacttcatcagaaatccttggtctctccatttgatgcccttctggattctcttcgagaatgttatgtccatgcaccgcatgcgtgctgctgtaaccggtttacttgagactgcacgggcaaatgattgggtagtcactgagaaggtaggagatcttgtgaaggatgacctagatgttccactccttgaaccagtgaagccaacagaatgcgttgagaggatttactttcctgagctcttgcttgcactccacctcctaatatgtgcttcatatgacttcgtacttggaagccacaaatactatctttacatatacctccaggcctttgcatatgttgtaatgggttttggtttcgttggaacgaaaactccatgttcatagctgccaatatgatgttactattccccatttcacagtaagttcctaggagtactgccactatgtgcaagatgaaatttatctgatggtaaatgttattcgcattgcggggcccatgcttagtctagtgggtgtgtgggtggggggcggttgggcctttggttcttagattgctaacaagatgttcttcaacagttcaactgccattggtaaactcagttttatgatttgcctctgtaaacgcattttccttgacatacatgtgttttctcaataatcgccctgtgctagatgtattcatctgtagcagttccattgcagaactgaatataattggtatggatttcagattttggattcatggttgtaatagggcgagaggcaagtttgtatccaagttggatttgtaaattattatagcttattttttatgattgtcatgtatagattggcaccaggaaggaatgtatggcataatgagaagacaatgaaatatgaaattaattaatgt

SEQ ID NO: 63823 - DNA, 300 bp, Zea mays
  Clone ID: MRT4577_158206C.1
gacccacgcgttcgttcaggagtcactaagctcggaccaatgataggagcatcttgtagcacattggacactcactgcacggcgagcgcgtgcaccacctacataatcatctatagggcgcccgatggatgcccctacaagaagaccaccgtcgacaggttccggtgtccgacggacacacgcagggccagcagcggcggtggctgttgtcgatgcaggctactcagggtctgccctggctgccccggagggacgtgatgctgaacggtctgaccggcgtcgtcgccgggctcgcctggt

SEQ ID NO: 63824 - DNA, 586 bp, Zea mays
  unsure (1)..(586): unsure at all n locations
  Clone ID: MRT4577_158207C.1
ggtacttttttttttttttttttttttttttttaaatnnnttttttttttttttttttttttttttttttttttttttttttttttttttttttttaaaaccaagggggtttaaggggacggttttttttttcaaagggaattttttaggggggggggcaggggtttttggaaggaaacccccaattttttcccgggggaaaaaaaggggttttttaaaaccaaaatttggtttgaaggccaaacatttttttgcaggcagataggtttttttttttttggggggggttttttttggggccttttggggggacttttttttttttttttttagggggggccgggtctttgggggcttgggaaaattcccctttttttttgcctttggggagtttcttggggggggaccacctttggggggaattccaaccacttgggggcggttttttggggttccaggttgggacccaactttggggaaatatgtggattagttgtttcttggggaaaattgttttccgttaaaatttccaaccaaatttcagcccggaagcttaaggggaaaacctgggggggctttagggggg

SEQ ID NO: 63825 - DNA, 286 bp, Zea mays
  Clone ID: MRT4577_158208C.1
gtttctggcaagcattattgcaggatctgctttagagcagctaaaaagctatattcatcagtcagcaaatgagtatgtctttggctagccttttatgtcatgccattcatcattctcatccttgtattgtgtactgatacattatagagatgcattaaataattacaagttggggaattattcatcatctatcccatttggcttgatgaaaagatttgggataatcatagagatgcattaacataatgctttgagataaatatatttaagatagagatatttatca

SEQ ID NO: 63826 - DNA, 376 bp, Zea mays
  Clone ID: MRT4577_158209C.1
gggggggaagacttaacttaatactgacctaaaaaccatttaatcatggggatcccttattttgagcgctcacctgacaccacatttataattagcttgcatcgaaactggggggacccacattcacttttttataacagaaaaaaccacttgcccatcggggaccgggaccaaacatttaaaggcgccatgccaaggttcttggtggctcaattggcttccaatcttgatcggaacttaataacgactgcgtcgatgaactcctcggtggtcaaggaatggctttttgtgacccttgaaaaaccaaggacaaaaattgccaaaactttagttatctttccggacttcacggtctcaacccaagcagcctttaatt

SEQ ID NO: 63827 - DNA, 181 bp, Zea mays
  Clone ID: MRT4577_15820C.1
ctctgggattcaatgaaacaaatcagccccatttttcattgaatcccagagttcatacaacgacccatcaggtgaaagtaagatggcgcgtgctaacaggtcaggtgagaggagtgatactaaacaaaatggggctgatttgtttcaaaaaaaaaaaaaaaaaaaaaaaataattattaat

SEQ ID NO: 63828 - DNA, 456 bp, Zea mays
  Clone ID: MRT4577_158210C.1
ttcgactccacgcttgagccaagcgttcgtacggcttctagaagaccactgaaggggtttcggggatgctgctgatggtgtgccttgtggaggtttcttctgctccaaagagacaagaacaaatactggaagaagaactacattctcccgataacaagccacttattgtgagagacgggaacagatggctaatgcaggacatagattgtagcgggttgtgcaagacgaggtgcactgcacattccatacccaacttgtgcactaaggcgtgtggcacatgctgagtgaggtgtaagtgtctcccacctggtacatctggaaatacgcaactatgtggagcttgctacactgatatgactacccatggcaacacgaccaagtgcccttagagaaactacccattgcgaaatgtgtgcttcattgattatgcaccgaacttcaagtgtactagtatgt

SEQ ID NO: 63829 - DNA, 464 bp, Zea mays
  Clone ID: MRT4577_158211C.1
acccgtgcggccacgcgtccgggagcgctctctggacctcatctttctctgtttacgcgacgcaggagagcctcggggggctgaaggccgccgtccaggacctgctggcgggtctcaggcggagggacgacgcgagcgtccaggccaaggtccagtcgtatgtccgcctggccaagaacgcacggaagcagctcacgaaggccggcaggagggccgctgccgcctctggcagggaggagcgcgagtgcagtctcgtcaggctgctgctcagggccaggctggtcgctgcatccctcctcggatcggcgctgcagtgcctcgcggccgtggcgaagcaggtggtgactctgacgcccaggaggtcccttgtctccaaggcgttgcagaggagaagcaaggccgtcgtgtgcgaagagggccaggagctggcgctggagcgcgtcctcattggagagcttgagcgt

SEQ ID NO: 63830 - DNA, 261 bp, Zea mays
  Clone ID: MRT4577_158212C.1
gaaaaaatctcttcaggatcccaaataacaataacactctacatattactcttagggatggctgcggcagcaaaaaggcttgtcttgattactggtgccagtggtggcattggctttgagctcgcagcacagctcctagcaaaagggacgtatcatgtatttctgggagctcgatcgttcgaaaagggtaattctgccctgcaacagttgcgctctcgcaacttgcccgacagcgtagagatgctcttactcgatgtcacc

SEQ ID NO: 63831 - DNA, 341 bp, Zea mays
  Clone ID: MRT4577_158213C.1
aataaaacgacccaatagtagtcattttgcagtagcaagaagtaaatcaggaccagtaatcgcacaaagttaatggttgggacaaaacaatggaaaaatcaaattaaaacgggtaagaactgcaggaaatgtgaaatggggcctttttaccatcattttccaggggaggtagccaacgggcccttcccggttaccatcgccactgggagagatatgctccccttccgggccgggttcgagtcccccttttctgagcacgtttttgacaaaatcgacaggttgcttttttttcccgcggtcccagtagagggcgacgggcttttttacgggggtgaacccgg

SEQ ID NO: 63832 - DNA, 258 bp, Zea mays
  Clone ID: MRT4577_158214C.1
aaaaaaaggaaacagttggggatgcccactaacaaaattgtgccgaaatttgggccattttgggggaacaatggccaaaactacaaggggctaggtggtatcggcatataagattggggcatcgacaacatgggaaaacataacataagggccatttgttggggaaacaaacccgggttaacaaccaaacaaaaattccgcccaacttttggccatgaaactgactagcagcaaccccttaatttttgattttttttt

SEQ ID NO: 63833 - DNA, 238 bp, Zea mays
  Clone ID: MRT4577_158215C.1
cttgctgacctttggcgcggggaactttggtattgcggggtggttcgcgatcacgcccgtggtgacgggggtgttgctggtgagcgaaacgagtatcgggaggagcgagaatagtttgttgggactggacgggttgaagtatgatcataagtcggcttgacgcgcttttcaccctcggtatcacctactgcatgtctcaactatcatccgcatacaatctgataagtggctcatagcg

SEQ ID NO: 63834 - DNA, 455 bp, Zea mays
  unsure (1)..(455): unsure at all n locations
  Clone ID: MRT4577_158216C.1
agtccatccaagatgcagcagccccaaatctcaatctttggcaaaaccctcgcctcccctcccccattctcccgtgagattcccctcatcagatcgagagctgcacctccacagtagcgttccgcattcggatcgagcagccggagggccaaccatggcggcgacgcaccacccggcctccccgaccggcgccggcaagtccccctcctcctccccctcgccgccgacgcctgtgcgcctggcggcggcgcaggcggcggcggtggcggngatccagcccagctcgccgcgctacttcttctcctccctcgcggcctcctcctcgccgcaccgccgcatcggcatcgccgtcgacctgtccgacgagtccgccttcgccgacaagtgggtcgtgcagaactacctgcgcccgggcgactccgtggtgctcctccatgagcgccccaactccgtgc

SEQ ID NO: 63835 - DNA, 591 bp, Zea mays
  unsure (1)..(591): unsure at all n locations
  Clone ID: MRT4577_158217C.1
caaagtcatgactnnncatgaaactaccgnnatatcctgaatggaaacccacatatattgtaccagaaggggattcggatcatagaatcacccaaaattcttaccatatgccgctagcgaaaaaaagaggagagagctagacacactaccactgtgtgtgtggtcggctagtctgtcttgtctactanccgtgtgaatgaatgatcaagtgtcgccgcgttgcctcgtgcaggcgctggcgcgatcgtggcatgagtgattaattggtcgttcgtggaatgatttcaccagcaaaaactctaccaatccgccgctagtcaacgaggtgaagcgtgtgtgtcggttgtctgtcttgtctactgctgtgtattgtatgatcaagtcaagtgtcgctatgttgcctcgtgtttgtcgtccgatccttggccgccggcgcccacggcaggccgtcgtcgtcggcgcagaggccgccgggcagccgcttgctgccgcgccactgccagatcttggacacggagaagctgtcgccgcgcgcgaacaccttcttgccctgacgcgggtcgctgccgctgggcgccgcggcgctggtgc

SEQ ID NO: 63836 - DNA, 1339 bp, Zea mays
  Clone ID: MRT4577_158218C.1
agggcgaatgggatcctcgaggccggccgggagaaccagagcgacgaagtaccagtcctgttcagagatgatgggtttcagctgccaacaccgttccgcctccctgcgcatcttcctcgtctccgtcgtcctcctgctcaccgctcctgcggggcgttgccattgctacaagcgcatcttcagcttcggcgactctatcatcgacacgggcaacttcgcgcgcagcggcccgataatggagtacccatttggcatgacctacttccaccaccctaccggccgcatcagcgacggccgtgtcctcgtcgatttctacgctcaagcgctccagctgccgctgataccaccaaatctgccggagaaggacacggggctattcccgacaggcgcaaacttcgctgtgtatggctccacggcgatgcccccggagtactaccgcaggtggaaccacgacgtgcgggcctgttacctgggcgtgcagatgggatggttcaaacaaatgctgcaacgaattgctccctgggatggcgccaagaggcagatcctgagcgagtctctcatcgtgctgggcgagatcggcggcaacgactacaacttttggttcgctgcccgtaggccccgcgagcaagccggccagttcatcccagtgatcgtcgcgaccattggctctgctgcccaggagctcatcggcatgggcgcgaaggcgatcctgatcccgaacaacttccctatcggctgcgtaccgacatacctgagcgggtacaggagcggcaaccgcgcggactacgacgagcacgggtgcctccggtggttcaacgacttctcccagaggcacaaccgggcgctgcgcggcgaggtcgaccggctcagggcgcagcaccccggcgtgaagctcatctacgccgactactacggtgccgccatggagttcgtcaaggacccgcacaggttcggcatcggtgaccccctcacggcgtgctgcggtggcgatgaccagccgtaccacatcaacaggccgtgcaaccgagcggccaggctctggggcaaaccgagcggcttcgccagctgggacggcatgcacatgactgagaaggcgtaccaagtcatctcccatggggtgctcaacgggccgttcgccgacccgccatttgctaaatggagctgctagctgttagttttggtggtaacggtgaaaggggattggtttgttctcttagctgagagctcacagcatcttcaatagactttttttaaattcatcgctctctaaatcatcatgtaaagaatcatttaaataaaaattactttctataccttctaaaaatttttcacaagggtt

SEQ ID NO: 63837 - DNA, 306 bp, Zea mays
  Clone ID: MRT4577_158219C.1
acaataaaggggggggttttttattttgacggggggccaatttgtaatactttacctagtgcacttccaaaggtgaaactggtgtacccaataaaagccaacatgtcacactttatgatgcaggcagattatattggcttttatgctcgatcttgatgaagcgttaattctgcaacaaaatttctatgatgggcctcactgagaaaccttatccatttaaaccggtaccaagcctgctaaagaacatctatgaggtgctgcttgacacccagaagatgagatactttatgtccatggcacctcacc

SEQ ID NO: 63838 - DNA, 233 bp, Zea mays
  Clone ID: MRT4577_15821C.1
taatagaaagtgcatgctttatttttttagttcaaaaaactttctatgcacggagaccaatgctgcctgaaatgcaatatttactctttaattcataatatgaactattttttatgcaattagattaaactgatcctgctatctgccttaattttggtatctttaactcatgagtacatttataacaatttactgtttttcaaaaatctttcccatcttctttacccaatcta

SEQ ID NO: 63839 - DNA, 882 bp, Zea mays
  Clone ID: MRT4577_158220C.1
atggccgcgagcgggcaggctgcaggcgcgccgcgccgcgccgaacgagagggggccgcgctggttttattgatacatgacattaaaataaatccttctgctactttaaaacataaagaaaagattgaaaatgaagatgaggataaaggttttaccttgcagcatgtggaccgcgccaagaatgaggaggccgactcattggccaaggcagccgccagagacgaggcactaccctccgacgtattctaccatgtcatcggcacaccagccgtccgcagcccagaggggctccaaataaccaatgacagcgagggccaccgcatagtcaacctcatcatgaccgaggactggcgggcaccaataaccatgttcctgcaggggtactatcatccaaccgatatcaatgaggccaagcgccttaaacatcgaagctgggacttcgcactagtcgaaggtcagctttacaagaagggggtcagtcaacccatgcttaaatgtgtcaccgagaccgaaggcgtccaaatcctgcgcgaagtccacagcgggacttgtggctctcacgcagggcctagggccctagccgcaaaggtgatccgtcaaggtttctactggcccgccatgatctgcgccgcaaatcgggtcacaaggtcctgcgaagcctgccagaagttttctccacgctcgggaagcccttcgcaattcacaaagctaatcgcccacacgtggcctcttcagcgctggggcctggacattgtcgggcccctacccacgacccaagggaacctcaagctcaccttcgtcgccgtcgagtattttaccaaatggatcgaggcgagggttgtatccacgataacatcgaagactgcccagaaattcttctag

SEQ ID NO: 63840 - DNA, 601 bp, Zea mays
  Clone ID: MRT4577_158221C.1
ccgtccgcatgaagccaatacacaaaacctcaagtgagtatcaagcagtgcaggctttatttgatggccatggaattgagaagtggaagcgtggctcacagatcaacttctcaaccagcaaaggtgagagggttaaaatgtaaggtttctctaacaaagaagttggacattaacagcaaaaggaggaatgtctatgtcttttttgaaaatgggcagtgaagttctcagaaccagtgtcatctttctttttgtcttgttatgacttcttccagtcattattatggcaattgtgaactgtcatggtgctggtgcgaatgttatttagcatggaaatgaaatcataacaaagtctaaggtctttttaaaattgttgggtcagccatcttgcttctaaccagtctctcctggtctggttacaaagggaacatcctaccacagttgtcctatttcttaaagataagcagagttagggcaaggtagaaattcagctaagtcacgtaggcattacaccaggtaacaattctaccacttaatatcatgtaggatcttgggcacgttgctgaccctctctaaggctgtttccctgatataaaatgtcaga

SEQ ID NO: 63841 - DNA, 364 bp, Zea mays
  Clone ID: MRT4577_158222C.1
atagtgagtcgtattaatcgtcggagcacacagagacttcctcgcctccatcgcatcacgccgacgacgtcgctacggtcgctaacaagccgccgcatccagggatggagatgaagaagatcggctgcgccgtcctcgtcgccgcctcggccaccgtggctctggacgcggaggtgccggctcagtcccacagcagcggctccgcggctgtcgcatccgacatcgtcggggccgccgtggtctccgtcgtcgggtacaacagatactgactcgccggaccatgagtcggactgccggacggaacaaaccaatggggggagagacttggatgcgctgtcctgctctgccgccctggcgcagtccc

SEQ ID NO: 63842 - DNA, 265 bp, Zea mays
  unsure (1)..(265): unsure at all n locations
  Clone ID: MRT4577_158223C.1
ganaagcttagatgtagaaggagctgtgaaaccaattctctgagtgcgctgctaggtttgtgaggtagcataagttatgttcatgtttctatacatcctcactatagaatagatgaaacacactttgttgtgcttagctcctgctttggggagaaaactgcatgcatacatttagctttgactatgtactttcaaaattttgttcagatttcatttactgaatttgcttctataaaccagactgacatgatatgataagcggggg

SEQ ID NO: 63843 - DNA, 200 bp, Zea mays
  Clone ID: MRT4577_158224C.1
gcctgcgggcccacgctggatgatcctctcggttaattccacttccacgattggccataataagagaacgcaaaactgctcatctttgaagagcaattatgcgttctcatatcaggcctatccggaagccgaatgtcatgagagcggacttcctcggggaattccgactccacgttttgcctaatatagaggacgcaaaa

SEQ ID NO: 63844 - DNA, 861 bp, Zea mays
  unsure (1)..(861): unsure at all n locations
  Clone ID: MRT4577_158225C.1
cccgtacctattctcttcaccaccgatccgtcatctcctccgcgaccgcgctccgttctccggcagcccgccgtccgtcgacatcctccaggggtccgcccggccatggcgtcgccggcgctcatctccgacaccgaccagtggaaggccctccaggcgcacgtcagcgcgatccacaagacgcacctgcgcgatctcatgacggacgccgaccgatgcaaggcaatgacggcggagttcgaaggcgtcttcctggactactcgaggcagcaggccaccacggagaccgtcgacaagctcttcaagctggcagagaccgcaaagctcaaggagaagattgacaagatgtttaaaggcgagaagataaataccacggagaacagatcagtgctccatgtggctctcagggctccaagagacgcagtcataaacagtgacggggtgaacgtggtccccgaagtttgggctgttaaggataaaatcaagcagttctctgagactttcagaagtggctcatgggttggggcaactgggaaaccgttgacaaatgttgtctcagttgggattggtggtagcttccttggacctctgtttgtgcatacggctctccagactgacccagaagcagcagaatgtgccaaaggccgacaactgagatttcttgcaaatgttgatccagttgatgttgcacggagcatcaaagatttagaccctggcaactactcttgttgtggttgtctcaaagaccttcacgacagctgaaacaatgttgaatgctcgaactatcnagggagtggattgtctctgctcttggacctcaggctgttccaaacacatgattgctgtcagtactaatcttag

SEQ ID NO: 63845 - DNA, 489 bp, Zea mays
  Clone ID: MRT4577_158226C.1
gggtacctcgaggccggccgcggcgcgggctccgcccagcgcgcccgaggcgctgtggcagaagcgggtgcccgtgcgccggtccagcagcagccaggccgggcggaagcccgatgagctcggccagaggctcgtcatggagatgtacaagtccgtgctcgcgtccaggaacatctccggcatgctccaagcgtcggtggctgcgatagcgcaagcaggcgtgctgctgtgcctaatctccggtatgccacgcacagctcgacaagcaacactagtcttccacgtttctttgcctctctggtcatctgtattgacatgtgacatatgacgtcttcgctccacctacttaatgaaatgtgcggactgtttatatgcggagttgcacctcaacataacttactagtacagcacttgctattgcgatatatatgtactttattattattattatatgtgttacaagccattaaataacaatataaagcgccc

SEQ ID NO: 63846 - DNA, 478 bp, Zea mays
  Clone ID: MRT4577_158227C.1
gttcaatggtcctcctcgacatgctgtgtgactacaccgttgcaggcccgggcccggacaccgggctcgcccgcctccgcaagcagcctgtgcgtcctggcttcgtaaagatcagtgatcctgccgatgacgctgatgtgttctttccgccctccactgcttagggtagctatgagacgctgttgaaggtgacacgcaacatcatgagcaagcgccacgcggtgtacccgtggtcacctatgagcacggcaagcacgaagacttcctcgccactggggactactgcaaccatctcgacgtttgtcggcgtctgatgtcgctacataaggaaatcatcgtgctacgcatatgacagtgcattccccccaggtatgatcagtcatattcttacctttgatgtgtgaactaaccaatccctctcacttgcttttgatacttgacagccaacaagtacggttgacatggagtacctgataag

SEQ ID NO: 63847 - DNA, 816 bp, Zea mays
  unsure (1)..(816): unsure at all n locations
  Clone ID: MRT4577_158228C.1
actctgccgcgccgccgtgacacctttgtcgcagcgtgtgaaccgtacggaatcgccggcatgagatggcggccgcctccgcgttcgggtcgtcccccggagatggagcggttcctctgcgagaggctgcttgatgcggaggaccccatcgcggagcgcttccgggcgttcttctccctcggtccctccgcaacctccgcggggatgcgccgcgccctcatctaagctgcaaaggatccttccaacttgcttgctcatggggctgcatttgcacttggacaaatgcaggatgctgaggctattcctgatctggtggcagttctcaaagatttttctctacatccaattgtcttccatgagggcaagggtcgggtctacaatgttggaggaggaaggacgccacccttggagtcactaggaggcacgaccgcggcaggcgacgggatgggtggaaccacctcggcctcgaagtggcgagccagcgaagaccctggcccctcaacgacatcaactagccccagcatctcggcgtcggtgaggtcgggctcgtcggggaggacgtagcctttgcacacccgctcgaggtcgatctcgtagtgagaggcgaccacggtcagcgcctgtcatacatccagtggtgggagcaggctacatatgaggacatgaagacaattgggccgaggcggagtgagcaagcctgggcggcaattgtgaagctgagcggcccagagtgaccagncatgtaattttgtgtcgtgagccagttgaacgagtatttagaggagatcgtccatagggcaagggaagatatcagac

SEQ ID NO: 63848 - DNA, 570 bp, Zea mays
  unsure (1)..(570): unsure at all n locations
  Clone ID: MRT4577_158229C.1
tatggatgatgaaattgctgatgtagatgtaaatgatgacacggatctgtggatcaatgcagccgatgcgctgcgagctcaagtgaacgcagaggagcatcaggagcagcaggacagctcaagctctagtgggagcagcagcagcagcagcggaagtgagagcggcagtggaagtgggagcagcagcagtggtagcgatggtagtgatgctgattcggcaagttccggaggtgatgttgatatatgagcttgatacgcaagcttttgttttgacacatgccttgcttcacaagttttcattcacaaggtaggtgtagggtatgtatatgttcagctaatattgctccagtgagtgcattaaattttcactaacaatggcggcctgggtccgtttttatgtttgctagacctggattggaagaatagaatctgtaaacatatctgtacaactatttgcttatgggaccatggatgttacaattgttcggttgaaatgacaaaaggtatactgctatgcttgcctattaaaaaaaaaaaaaaaaagggcggacgcccgcgtnctagaactag

SEQ ID NO: 63849 - DNA, 548 bp, Zea mays
  Clone ID: MRT4577_15822C.1
atgggacttatgatgaactcggtcaaagtttatcttaggaattgatgcggtagtaggtgacatagcgaattttggccaaccgttctctatatgtggactacactcttccttatactgagtcaggggtacgcatgctggttccagttcgggaccagagacagaagactgcatggacattcctagaacctttaacagctgatctatggtttggaactggatccttcgttgtcttcacaggttttatagtttggtttatcgagcacagaacgaatcaggaattcagaggaccgccagccagtcaaattggaacagtcttctacttctccttctcaacacttgtatttgctcatagggagagaattgtgaacaatttatcaagaattgcagtagttgtttggctttttgtggttctaatattgcagcagagttataccgcaagcttaagctcaattctcacggtagaacaacttcaaccaacagtcaccaatttagatgaagttatcagacgaggggattatgttggctacctcaatgattctttcatgcct

SEQ ID NO: 63850 - DNA, 426 bp, Zea mays
  Clone ID: MRT4577_158230C.1
ctccgaccaccttccccgtttcaattcgggtcactccctgcagtctccactcgccgctcccgcgaccccagagctctctctcgctctccctccctcttcctagctccccctttccggcatggcctcctgctagctcccgtcggaacgcctcccagatcccagacgcagcgcgctaccccacgcgagcgaaggccggcgcgcgacatgggagggtgccacgcgaagccgctcacgcaggacgcggacggctcgccgccgcacgcggcgccggcgaccccgcccccgggcaacgctacccccggccccgggaagaagcactgggcggtgtccccgttcttcgcgttctccacgccgagcccgagccccgcgcaccacctcttcggcggctccgcggcgtcgccgcgcaagtcccccgctcccccgggc

SEQ ID NO: 63851 - DNA, 492 bp, Zea mays
  Clone ID: MRT4577_158231C.1
ggcataaagagaaacaaatgggtttacagggccgttttccaacacccggggcccaaaaaatttaatcacgggttcaagatccagggaaacccggtcgccccgcgattaaaaaaaacccactgggcccacggttcaaaaaacccccccccagcccggggggaaccaacaagagttccggaaactttcttgaccccaagacttgggggcccggccaaaaaaccccccttttgcgaaaggggaaaacatcggggggggcccattaccctaccccccaaaccccaaaagggggcggccctggcccttgaacccctaaataaaccccaaaaagcccttgacgccgcccctcctttccagccgccggaacgccggtttggggaacccctggatggttgcgcccaaaaccttccggggaccctccgggccccccttggcgagccccttgccacccttaccgggcccgggaatgggtttttccgctcgggtctggggggg

SEQ ID NO: 63852 - DNA, 249 bp, Zea mays
  Clone ID: MRT4577_158233C.1
cccacgcgtccggtgagcgccaagcactgatctgttgtttggaataaaagaccaaatgttggaacacttggaactcgcgcaaaactggaatccgattcatgacctgtgttttagttaaaaaaaaaataaaataaaaaaaaaaaaaaaaaaaaaaaaaataaaaaaaattaatatataaataaaaaaaaaaaaaataaataaaaattaaatataatatattgggggggcctttttaaaggatcaaaattt

SEQ ID NO: 63853 - DNA, 545 bp, Zea mays
  unsure (1)..(545): unsure at all n locations
  Clone ID: MRT4577_158234C.1
tccatctcccgttcgctatactcgctcgggcgagcgccgctcgcactgtcccccttcgggatggcccggaccctggagcgcgtcttgcgctaagaagaacaaggaggtgtctgcacacngccgcttaccgccctatccagcacaaggccccctgctacgagcagccaaaggcaccgctccgagatcccgaacaaggctccctcatccaggatgtgagcccctccctcgcgagagtgctgaacgacatctcccagaagcagaaagcatgagctgaggagaggcgcacagcaacaacaagatggtccctgtcgacctccggccggagaagacccgcagcatccggatgagcctcgccaagaaccagctcaccatgaagaccaagagtgatttgaagggagcccattctttacccatgcaggaccactctatctctgccgagaacggaggaagaccatatatgctgaggagccttgcgcacacgatacctgcctgtgagaagaatctatctccatgcaggtactaggtacctgatcaactggatgatg

SEQ ID NO: 63854 - DNA, 198 bp, Zea mays
  Clone ID: MRT4577_158235C.1
atggcgcccctttgcaacgctccatccggcggtggccctcatctacggcgaccgggcaactaccacgactactctccttcgtacaaggagctcgaggacgagctgcttgtccaggggggtgtagtgtcggggcctaaggaggcccacggagggcctgcggcagcagcagccatgggccctccaagggggattagataa

SEQ ID NO: 63855 - DNA, 569 bp, Zea mays
  Clone ID: MRT4577_158236C.1
ggcagcgagtgaaatggattgccggttggacaggttagcttggctgcatggcagaatgtatcaggagatagcctgtgcctgtgcatggccatgacctgtgggccttatatgcagggagccagggaggcaatcagtttctgatgaatactagtactaatactagaccatgattgaagggctcctgtccaataaaactggaaaatgagtaagactttgtttgtttgcgtcggattacacctggaatcgttccaactaaggccttgttcgtttgtgccggattagtgggtcggaacgattcctacccggaatagttccagctaatcaaagtttatataaattagagaagcaatccggtcaagaatcgttccgacccaccaatccgacagaaacgaacaagacctaatcaaagtttatataaattagagaagtgatccggttaggaatcgttccgatccaccaatccagcacaaacgaacaaaccctgagccaattcccagcaccacgtttactagtactactctctctctctctcaaaataattaacctttattttaaccgatgaagcgaac

SEQ ID NO: 63856 - DNA, 436 bp, Zea mays
  Clone ID: MRT4577_158237C.1
tttgggttgatttatgtgcttgtttatgtgcttgtcaacactaatcgctacgcgagcacacgttccgatacctctaaagagtagcggagtttcgtcccgataaccctcaaggcttcgtctcttactcgtctttcgtcgattgattttaatttggatgatttctccgctttggagaccgtttatacgcataagatggattggttgaagcatgagctgatggtttgtagtcggatgtagaagcatgtgacgggtcgatgaatgtcccttcgtctgctcgggtgttaccgcctttccggacccgccgccggctgcacgcactttcgacttactcaggactactgcaccgcaccgcagcgcacgcacgctgctggttcattactgccgttacttattacagcgaggcggccggatacgtcctgttcacacgtattcgcgt

SEQ ID NO: 63857 - DNA, 210 bp, Zea mays
  Clone ID: MRT4577_158238C.1
cccattcgatacgtcttttatatccaagggcaagtgtcgccgctcaaaaaaatggagagagccttcgccgatccgaatgtgcagaccaacaaggtcgaccttctctcctgcctctacatgccgcttgacgaagctgagaagatcagccgcgacatccggatccacgcttaagtcggccgcatcaatttcctcctcgataatcgcggcaac

SEQ ID NO: 63858 - DNA, 233 bp, Zea mays
  Clone ID: MRT4577_158239C.1
ataagggatacttcccgttcataaccaaccggccatagacacgtattagttgagtccttcggaaccccaactggcattctacctacacagccggggagacctccaagcaggggtccggacaactccttccctttatgtttttttattcacaaacagagttttccgtttgtataacccatctccaagcttaggttaaacatgcatttttgatgccaaacagaccatgtaacact

SEQ ID NO: 63859 - DNA, 613 bp, Zea mays
  Clone ID: MRT4577_15823C.1
cgggcccgaccgcgacgcgcaacgggtcgctctgccaaacgtcatcggcttcagcttcggcgtggtccagatgggtctctacgcgctctaccgcaacgcgacgcccagggtgcctgccaaggacgtggccgacgacgccagcaaggacaaggcgcccggcgaacatgtggtggtcaccattgccaagctgaccgcggcgacgacggcacctgcagctgccgtggcggaggatcttgtcaaggtccacgacggccacccggaggaagcagccaagggcgccgccaagccggcggagaacggcgcgggacgcagcgacgccgagcaagtctagattcctcgctcgatcagatcagaattcatgaagaagaacatgcgtatgtatgtgtatccggtaggtcgtaacataacataaattaagtgcgcatgcagtttggcaactcatgttgtttcatttcgttctcgcgcaatatgcgcatgtattaattttagattgtcattgttgtagttcttgcctccgattattattagtgtgtccgtcaccttccatgtaataacaaaaaaaatatatataaatggtcctattaaagcaaaagctaaagttcgtttttatgcc

SEQ ID NO: 63860 - DNA, 325 bp, Zea mays
  Clone ID: MRT4577_158240C.1
aaagaacaaaccccttttttttttaacggggattttgttcaaaagagctaatgaattggcatttttgaaaagttttacacaacaggggaaaaagtaaaaacatttttccagtcaaagggttggagcgatctactagggggggttttcaattcgggtcatgttcattaattggggaagagttacaggactccatttggcgattcccttttgaaggtgggcataaagtattccttttacaaagttttttcaaatacttaatggggcgaacttatacactgggatgccattataaaacttggccacttttgggataaatagcaaacct

SEQ ID NO: 63861 - DNA, 510 bp, Zea mays
  Clone ID: MRT4577_158241C.1
gcgaactgttttatcaattttagcccagtcgtgtaattctgtttctgcactattcatgtctgctgagtacaagtagtgtttcacgctcaaacgagttcatgcctcaggcagcaacaactgcggttgcagcttcagcaggtgcattgtcaccgacgagttcacgcctggcgtactccctcgccccgtccttgtcaacaatcttgataacaaagttctgaggcgcgacaaccaatcgcagccgaatctccttgatgcacttgtcaacaagatctactgcttccctctactacatcgactacattgcaaccttgcacaaaatcgacaaaggtgcttttgggtacggatcatacttgctgcgtgtgacgcatgcgcctatttgccatccccgttatgtttttcaaatagggaggatgcttacggtggactggcactaaggacttttgggctgcctttatacgctgacttgacaaatctgttgccgatgcatcagttccatgtttaacctaggaa

SEQ ID NO: 63862 - DNA, 448 bp, Zea mays
  Clone ID: MRT4577_158242C.1
agacgaggatggcatttccatagagttcagatagtgttcattacaagcataattcctgaagacagacatcatctcctacatatacttcacacacacggggacccaccaggcagactaacagatagataaacccaccacacagagacctgcatcaagcccactccggaccactcgtacggacattaggacgacgcttgcgagctcctcggtaagtggtttcctttgtgtgcaccggcaacggaggtgtaacattccctggctcttgaagacctgcttgaccccaagcaggggcgaacggaaagcactgttggagagctttacggtccttccaagttgcgagatcgagcgggaggccagaccattccacaagcccttgctggacaaggggatttcccttggtaataccttttagttggaaaatctggtgagaaacacctgaacttccgga

SEQ ID NO: 63863 - DNA, 262 bp, Zea mays
  unsure (1)..(262): unsure at all n locations
  Clone ID: MRT4577_158243C.1
gggtgtgtgggggggttttttttttttttttttttttttttttttttttggcggaacattcatttttttatgggccccccgctctgaaaaaacannnnntcctgtggccaggggaaaaatttattttcccccttgctttgccctttcctaaaaaaataccttctttttttcagaaaggctccaatgccgttggggtcctataaaaccaaaaacagggtttaaaaaagggcctgagaagcctgtcnctccctgttccgggggg

SEQ ID NO: 63864 - DNA, 210 bp, Zea mays
  Clone ID: MRT4577_158244C.1
cctctcgaaagcctacctctccttgtaccacaacgtgcacccgccgtcctcgtccccactcgagtccatcatcgcgctcgcccgctcctacaacactcagctccttttactatcaaacaaagcggactcctcccgcagcgtcacctccgctcccttcaaactacttccagactccgacctcttacgtagtccgctcgaaactcagcaccc

SEQ ID NO: 63865 - DNA, 719 bp, Zea mays
  Clone ID: MRT4577_158245C.1
tttttgttttttttggaaacgtgggatgacgggtatcgaattaattactaaaaagcccagtgcatctttgcatgagagccatccagcatgcgcctccatccgcaactgaataaaggaaataaggaactgatatcgccgtccatgcccgtcgtaaaatcggcgtccaaactcgtaagcgcggatcaccggcgtgatgtattaaagcgaagccaaggttgcgcaaatagaaacacagagcttccagccgactgcgcgtacccggtcgacacggcagtcattggtgtcttggccgtcagacagcgtgtcgcatggtccaggacaaccgatgaccgaccacttattgacgatggttggaaagcggggtactcattaagccattagggaagcgccgtggccctgagaagtcaagtgcggtaaggcttagtacttcaggatgatgtatagagcgtggataataccgggaatgtaacccagaatggtgaggaggatgttgatgaagaagtcggcaccacaaccacgctcgaggaagacaccgacgggagggaggatgatggcaaggatgatcttgcagatgtcgctagcggtgaaaggcatgttgtcggttgtgaagacgaggaattactcgaaaatgtgtgagatgattgttgttgaaaagttgtttagggaactttgttaggcttgggttgttatccatcggcttcctcatctaccccggccgg

SEQ ID NO: 63866 - DNA, 246 bp, Zea mays
  Clone ID: MRT4577_158246C.1
tgtgcggcgctcgagtcggctcgaggccgcgagagattaatgagctgttgcaaaaagcaaataatatcggtctagcatacagtagcatccccctgcagtgctggccacataatggcaaataagacagctgccgctgccattctgctcgtcgccgccgtgctcgggtgtcttgaatgcagatgtcacgacagagcatgccaacgggaaatagtatatagagtacaatccaataaaggggaaaaagca

SEQ ID NO: 63867 - DNA, 431 bp, Zea mays
  Clone ID: MRT4577_158247C.1
ggtaccggcgccccttctcgagttttttttttttttttttttttttttttttttttttttttttttttttttttttttttttttttttttttttttaatccaccccccatttttttagcccccaaggggtgggccttttcaacccaaaaaataccccccctactttaaaaaggggccctttacaaaaaacaaccccaaggggggcccctcgccccgggggcaaaaccctcggaaaggaaaagaaaatttaacccgcccccgccaaataaacaggaaaggctggctacggggttttggcgggggggaaaaaatccctcacagggccaggacgttcggcataagttatcttggccttggggggcccccttccgcttcggggggccccggggccgaaatgatttggtggcttttgacaaggccctatcctccgg

SEQ ID NO: 63868 - DNA, 148 bp, Zea mays
  Clone ID: MRT4577_158248C.1
ctcaatcaagtacttgcatctatgtcaatgaaatggactaacaaatcaatagagtataccattcaaaattatgaaatggggaggggtagtcctatgcattgtggatggcttacttaataatacttaaaaaaaacaaattaataatcga

SEQ ID NO: 63869 - DNA, 177 bp, Zea mays
  Clone ID: MRT4577_158249C.1
gtcccctttccttatcccatcccacccaccccgccgacgagcaaccctacggcgagagacccggagccggagaccgccagctggcgctgcgtgccctgtacaacgagatccggagcatgaacgcgcgcgacgaccagctggactgaagcaggcgcatggcgccgcggggccctcttt

SEQ ID NO: 63870 - DNA, 362 bp, Zea mays
  Clone ID: MRT4577_15824C.1
ttccattcgtccgcccacgcgtccgcccacgcgtgcggttatgaacaaggcaagcagccaattttgaaactccctgagagcaaagatgatgcggcgacccaccttcacgctggcctgggtgctggctactacgctggctgtgacggttccccacctgatgcggctaacctgagcatgaagggggacttagcctacaaaagcactctcgataggatggggaagacgctgaacaatgacggcccttaggcattcaacagaggcagcctgtcaaactgtgcaagaccgggacctgggaatgtgaatctggtgtacacatggctgcaggtccaaaagcagtacgtgaggaaagcgacaacctgcag

SEQ ID NO: 63871 - DNA, 836 bp, Zea mays
  unsure (1)..(836): unsure at all n locations
  Clone ID: MRT4577_158250C.1
aaaattttggtctatgaatacttgccaaacaaaagcttggacttctttatctttgatgaaaacaggaaatcgttactggattggaaaaagcgtctagcgataattgaaggaatagcagaaggacttctctacctgcataagcactcccgtttgcgtgtcattcatcgagatcttaaaccaagtaacattctcctggacagcgaaatgaatcctaaaatttcagactttgggttagcaaaaatatttagctcaaataacatcgaaggaagcactacaaggagagtggttggtacatatggttatatggctcccgagtatgcctctgagggcatcttctctatcaaatctgacgtattcagctttggcgttctcattcttgagatcctnagcggaaaaaggaatgccggcaaccacgattatggagatttcatcaatattctcggatatgcatggcaattgtatgaagaggcaagatggatggatctcgttgatgcctcattggtaccaatggatcactcatctgaaatcatgaggtgcatgaacattgcattgctgtgtgtacaagagaatgccgctgatcgaccagccatgttggatgttgttgcgatgctaagcaacaaggctaagaccctggctcagccgaaccacccagcgtatttcaatgtacgggtaggaaacgaagaggagtccactgctgctacggcgtcaggcagtatcaatgagatgaccgtatctgtcacaactggtagataatttttgtttgtacaaagtggttactgttgagcttatatatataattatccttttgataatgtgcaatgcagacatatttcatt

SEQ ID NO: 63872 - DNA, 448 bp, Zea mays
  Clone ID: MRT4577_158251C.1
taggggccttttttttttttttttttggccagtagacacgttggacccaaagatgccacctatggagcgaacacggatcagagctaccacaatctagcctactatggtcgtataggatcgcgtctccaaccgcgtgggaaatattaagatatgatctgtatgctcaagaaccgaacgaggttcgacggccgaccgacagtacgagacgaccctgcgcatgagaatgctatagctagcgacaccccacattatgatgttcgttcttcgcatgggctcacttcttgcaccccacttgttgatgccgaagccgaccttgctagcgacgacgccaaggtcgcgcttcccgatgatcatgagggccttggtggacatgcgcagcttgacgaacagcttggcgtcctcgcaccacagcttcttgcactgcaggtacacgaactgcatgcttctt

SEQ ID NO: 63873 - DNA, 357 bp, Zea mays
  Clone ID: MRT4577_158252C.1
attcggctcggggccttcctttcacatatgtttatggggggccctgcgaatttggagttgccgggctggttgcgcctctgcttcaatccgctctaggaaaccagggtgggactaaactccctatacattgacgccggtatcgtggagggtttatccaacataccagacatgaccgcattttcccagatcctgtgtgaaatacgctgacttagcatggcttagaggtgtgcccaacttgctaccagtagtgctgattctcgcacctcatggtgtgcatcgcctgctaggctggctctcggacctatagcacacactggagtatcatcaacagagggcgcggatgcaactgttatctgt

SEQ ID NO: 63874 - DNA, 281 bp, Zea mays
  Clone ID: MRT4577_158253C.1
gagaccaacaaggagcatagaaagtggaatacaggagcaacaatggagcaacaatggtgaccaatatatttgcccttcgtatgctccgtgctctttgtacacgcgacgctaacgcgacaatgttcactcaatgctaacaagctcctattgcttccattctttccatatacgttagattaattataggttcagcatgtgaaaacacagcttttgaaccatataggcttcaacaagcgatagctacatgcatcatacctgtatcgaccttggtgtgcaacaat

SEQ ID NO: 63875 - DNA, 329 bp, Zea mays
  Clone ID: MRT4577_158254C.1
accggacttgaattcccgggtcgagccacgcgtccggccacgcgtccagttggcttctcctctatcttcggttcgactacgggttcgtgaggttgcggcggggttcacactcgtggatgaccggatctacatgtcaccttctgatgttgattaccgctgattattctactgcctcatctgagccacggactaccactccctacacaacgccttcatcacctacagagatgtcctcgagtccaaaatcattcctgatcggtagacgcataggtacctctgcttcggctctcacaacttttccacagaagaagccatgcgtaaccccatcg

SEQ ID NO: 63876 - DNA, 405 bp, Zea mays
  unsure (1)..(405): unsure at all n locations
  Clone ID: MRT4577_158255C.1
cggtcctaaattcacgggtccacgcacgcgtccgcaaacagaagctctgctcggctatcccttcgatttcaccacggcaggtgcggaagaacaagacgagcagcagctccacgaacatcgcgacaatctctcgacttctgcacgagcagccgctatgcctttggcacaattgcctgacgccgatcaacaccgggagattgtagataacctacgtaagagcagcacggcatactacacgctccagcagattgttcgcctgttggttctcttccgtgaatggcgtgaagaggaacaaacacttattcaaattcgtgcagaacgcaaggaaagaaggcgcatctgccanacacaagcctgacactcaacgcacgaaggcgcttctagactcaatatccaatgtcttcg

SEQ ID NO: 63877 - DNA, 285 bp, Zea mays
  Clone ID: MRT4577_158256C.1
gctccacctagtttagaatcatagattttcctccctgtgcaagcattatattattgtctttttggattggttaactaacagttctcgatgagtatttgctgcaaccactgttgttctttttcctttttaatctattcaaggattgctagtggccgaagggcactgccaccttcttttgcttttacgtgatgcaaggccattgttatgtattccatgtgtattattacttcgaacatggctagaatacaatggttcagcatcagcttaatccatgggaggatccca

SEQ ID NO: 63878 - DNA, 333 bp, Zea mays
  Clone ID: MRT4577_158257C.1
aacggccctgctccacgcaatggctagaccattgaaagtgtatggagccgagctcaaggaaactgcatacagctacatcaatgtgtcatgccggattaagtcagatcagtgtgaaatttaagcattcaagattggttgggttgcttttgaatacaaccaaataacaattagtagatgaagttttaattggccatgtaagagtgatcaaggtagcagcagaagctcatatcaaagaaaatagacaagaaattgactgtactctcggagcattttggcggcttttgcaagtcttgtaactgcattctcatatgactatattgtccccaacgaagc

SEQ ID NO: 63879 - DNA, 366 bp, Zea mays
  Clone ID: MRT4577_158258C.1
gccgttagttccaaaagcaaataccttactgctgccactatttcctcatgggcgggggcgacataccacgcacacgactagcacgacggctacatgcaacagcgtggcatatggcaggtggtatttgacgaggcctagctattacgtgcaatcccttgcaaacatctcgaccatactgcgtacataaaccagcgtgtgcatgtaaacatggcacacaccgatgtgcactgcctgcaaggtgccacttcctgtgaacaaccaggccatgactactcaaccttgaaaaccatagcgagcgcgcgttgatatttatctacaccaaggtggtatgtaagcagcgccaactgggaaattgttcacagaagc

SEQ ID NO: 63880 - DNA, 818 bp, Zea mays
  Clone ID: MRT4577_158259C.1
cattgggaccctcgaggccggccgggaaaggatgtgtccctgcttcacctctttcctatcctcagtctctcactcttccctaggttcgccacacctgtggcgcatactctcgtgtcccaaaaccaaacacggcggtgctggtgcgcgcgcagctagcagttgagtgctcgcccttgtcgtcagtcgagtcgagcgatggagaagaagacggtggtgctgtacccgggcgcgggcgtcggccatctcgcgccgatgctcgagctagccaaggcgttgctccgccacgcaggtgaccaggtggacgtcgccatcgtggtcgtcgagccgcccgtctacgcggacggcttcgccgccacggtcgcgcgcgccaaggcctccaacgcctccgtcgccttccacgtgctacccccgccggcctccgacggcgacgccgagcctgacgacgaccccttgacccgactgctccgcttcctccgcgccacgaacgcgccgctccgggacttcctccgcgcgctgtcggcgtcgcgccgcgtccaggcgatcgtcctcgacatgttctgcgccggcgcgctcgacgtcgcggccgacctcggcctgcccgcctacttccacttcgcctcgggcgccgccggcctcgcctacttcctcggcctgcccgccatgcgggccagcgtgggcacgagcttcgccgagctcggcgagtcgaccgtcctgtcgttcccaggcgcccctccgctcacggtcgcggacctgccacagggggtgctcaacgacagcgaggcgtgccgggtcatcatgggcgcggctgcccggatgcc

SEQ ID NO: 63881 - DNA, 276 bp, Zea mays
  Clone ID: MRT4577_15825C.1
attcggctcgagcatttacacaccacggaatgctacacccaaccagcgtaccagcgatcgcgggagtgttccgagaggggcacctatggatctgacttgctgccctactggcgcctgggggcattactactggcgtgtgccggagttcaacaggacaaatgattgcagtgatggccaaggtcttctttatggtggccttgtagcctttgtaccaaaagaccgtgcgccacgccatgtgatcacctctataaaatgagactctgaatggggcaaccg

SEQ ID NO: 63882 - DNA, 141 bp, Zea mays
  unsure (1)..(141): unsure at all n locations
  Clone ID: MRT4577_158260C.1
tcgcggactcgtgggcggactcgtgggttctgtgccaacgttgtacntgatagcaacggtgtggttcttttacctacgcgtggtgctacacaaaatacataccatccacattaacgacatcaaccactgctggaacaacct

SEQ ID NO: 63883 - DNA, 196 bp, Zea mays
  Clone ID: MRT4577_158261C.1
gagcggccgccctttttcagcttttacactcaaactgcagtttattgatacaacaatctttagtttcggccctagcacttgatcagacttggaagcactaaatgggccgctgaacacgctgattaccccgggggccttacaaccatcacaccctaaattacccaaacgggcccaaggttttcacatattggaaaac

SEQ ID NO: 63884 - DNA, 270 bp, Zea mays
  Clone ID: MRT4577_158262C.1
tttcacgcgttcgcatcacggacagcggtggtgccgtctgcgaaacaagcctgccatgttccacactttgggggtatgcatcccttacaaatggactgacacgagcaccttggacgaggacatgcataggatgcttatctagacggcgcgcatccagtgagactattgggagttccacaaggtcatgtccgggaagatgacgatgctctggaagactgggagctttcccgtccgaaagacccgggctgaccagatgattagcaacgatgc

SEQ ID NO: 63885 - DNA, 648 bp, Zea mays
  Clone ID: MRT4577_158263C.1
cgggaaaacacttgtgacctatgaccgtcacaatgaaaagattggcttttggaaaactaactgttcagagatgtgggagagactcatatcggtgatgctccttcaccagccccttcaagtgacacaatttcaaaaactgatttgtcacctgctccttcccctagtagcttgccaggttcgagttatgaatattacgagccaaggaaattctactctgattaaatggggtatttttccagcaggatctgataatgctatgtccaacgcaacagcgatgggtatcatctatcggttaactcagcatcatgttcagttgcctgaaaatcttggcaattatcaattgctcgagtggaatgtgcagcccttgtcaagaaggtcatggtttcaagagcatgcagtttctatattgcttgggattttattagctattttggtcactttgtcagcctttttagtagtacttatttggagaaaaaaatttagtggtcaaactgcctacagacctgttgattcagtggttcccgagcaagaactccagccactataattcaaagctgtttggcggagcaacatatatatgattctttggtagagatacccttgtgcggggttacatatcacagcggcacgcatctgctgctggagtaa

SEQ ID NO: 63886 - DNA, 917 bp, Zea mays
  Clone ID: MRT4577_158264C.1
tgtcaaccacgtcaacgacgaccgactcctccaaaacggtggcgccgagacggccggaacgacaccgcgcgccgggcgctcaactcaaccgaaagtgatagaggtagtatagtacttgttggaacacgaggcggttgacgtcgacgatatgctgctgaaactgcgccgccacatcgtcggccgcgcagacctggaacaccggcggcgtctgctgctgctcggcgcgcttccgcctcttgggcgccggcgccactgccgtcacctcctgccgcgccgcagctcctcctcctccgaacgtgacgtcgctctccgccgcgtcgcccaggaacatctgtccgccggcagcgatcgtcgagacccgtggagccagcacgcccacgcacgaggcgttgtggagcctcaactcctgctgctgctgttgttgttgatggtgatgatgttggctcggtctcgccgtcgtcgcgcacctatcttcgtcggcgccggcccaaggccaccccgcgctggcgagctgctgctgctgttgctgctgcctgtgtcctcctgccaagaggaggcgatgcgcttcgacggccatggctacgcacccgatcgtggctggcacggctgggcggcaacgcccttgccctcaggctccgggagggaagaagaagatgcgtccgcgtcctctcttatgtaggagtacgtacgattcctaaaagaagaaggcgggcgagcacggcaatatatatcctcctgtcctgtgtcgaggagcgaatgccaagccaagcatggagggcccggcggccaaggcgtggtggtgggtgcctggtggagatggcgacgcgggtggcgctgcctgggacgtcacagcagcctctcgcctcggggaagaggctcgcggaggtggcgacaaaggagcgagctcgtgccgaatt

SEQ ID NO: 63887 - DNA, 1186 bp, Zea mays
  unsure (1)..(1186): unsure at all n locations
  Clone ID: MRT4577_158265C.1
gccctgaaaaccttttaagaagccaaataccatcagcacttatcaaatagatattacatcgtttcgttccacaggggggcttagtctcttctctacccctacttaatctacattacatgaacagaaccttctactgtaagcataagagaggagctcttgatctgaatcactagacagtttatgaacaacacttctaagttttgaatgaagtcacgtaatcataatgtgcttcttctgtaagcttctagcttgtgttacatacaaagaagggcttactccagcagcagatgcgtgccgctgtgatatgtaaccccgcacaagggtatctctaccaaagaatcatatatatgttgctccgccaaacagctttgaattatagtggctggagttcttgctcgggaaccactgaatcaacaggtctgtaggcagtttgaccactaaannnnnnnctccaaataagtactactnnnnnggctgacaaagtgaccaaaatagctaataaaatcccaagcaatatagaaactgcatgttcttgaaaccatgaccttcttgacaagggctgcacattccactcgagcaattgataattgccaagattttcaggcaactgaacatgatgctgagttaaccgatagatgatacccatcgctgttgcgttggacatagcattatcagatcctgctggnnnnntaccccatttaatcagagtagaatttccttggctcgtaatattcataactcgaacctgacgagagtcaatctccagctctttagctatcagctcagccagctcatggagatgaggtttcagatttgggtaagtgacatttatggacatatcaacggtgatgagaccaacatcaaactctggcaagctactaggggaaggagcaggtgacaaatcagnnnnngaaattgtgtcacttgaaggggctggtgaaggagcatcaccgatatgtagtctctcccacatctctgaacagttagttttccaaaagccaatcttttcattgtgacggtcataggtcacaagtgtattacgaacaatgatgcctcctaatagtgtcgttggatctttaccattttggaatacacccaaacaataagccccatcaaccttggagtgccggaataaataattttcaggtgtaagtgagagcttctgctggtgccgaattcctcaaaa

SEQ ID NO: 63888 - DNA, 148 bp, Zea mays
  Clone ID: MRT4577_158266C.1
gggagacaaaagatcgggctctcgggggcctctttttttttttttttttagtaagtagccactttcacatgctgcgtactactcatggacactgcgagagtcctgtaacatgtaatcattcatgaaagtcgagagaaataagaccgat

SEQ ID NO: 63889 - DNA, 532 bp, Zea mays
  Clone ID: MRT4577_158267C.1
gtggggggtgtgttttttttttttttttttttttttttttttttttttttttaattttttttttttttttgtttgttacccgtttttttttttttaatggaaaaaccaaatttttaaagtggctgtaaaccggggtccccaaaaaaacaaaaccgggggggggggggggcccgggaaaaccgggccggcccctgcgggcgaacccagccccccggatagggcggggaattaaagcccggggccagaaggggcaccagggttccctgggggaaaggggaatccggccccaattccacaaaaaaaaaaacccgaaagcaaaagaaaaaaagcccgggggcccaaagggggaacctaccccccattaacggcatggggcaaaccggcggggcccaaggggggaacccacccaccccaattgcgtaaaggaaaccgccccccccccgggggaggaacctggcggaccgggcgccaggagggatctgcccacccccagggagagggggaacacctgatggccccccacgggggggcc

SEQ ID NO: 63890 - DNA, 407 bp, Zea mays
  Clone ID: MRT4577_158268C.1
gtgtgcagggaggtgcctattatgccgaggagccatactgggcaaggctctttcagactaaacattggatggatgtggtcctaccgtaccgggcggtgaacaagagggggaatactggcctggatgcatggggctatcctaattttactggagaggactaccaggatcctggtgtcatgaaggtgactatgtcaggaccaggcatgatcctgacatgttcatgagagtgtgtcaagcccacaaaccggttcctgtgtatagaggcaaccactacagggctagcaagacctgtgctaaacgcgcacgggagggaacacacctgtagctacagtcgggtgagcggtttatggactgtggctattcgtcgtgggaatcatgctggcgctgaaaccccagataccgcgggc

SEQ ID NO: 63891 - DNA, 302 bp, Zea mays
  Clone ID: MRT4577_158269C.1
cgctcacatccggccacgcgttttggagaggccaaggacccaggcgttaaggcaagccaaaaccattttggtcgacaccttctgcccttgcccagggcccaaattggattttatgtacccttgccgttggcggtttcccgcccagctcaaaatcgcgaggtcatctcgcaaatccgggtgttcttgggtgaattctgtactttgggagcaaagaggtgcttgccggtggcgttgcttggtgctctgtggccaaagagtttttttgcgtgcgctcgctctgtctgtagtcttttttcttcggc

SEQ ID NO: 63892 - DNA, 365 bp, Zea mays
  Clone ID: MRT4577_15826C.1
agctcacacgcccaccggggcgtgcactctcacacaccgaaccatcaatctgtacagtggttcagcatctccatgctcaacattcgcgaggcacaccgtacttgcacgatgacgcatgtcaccaagacgcttcgccatgggggacggatgctagtgtcctcgggtgctgtgggcctgtgaagcgcgagtggagttcgacgacgcgggacctgcgtctcggacgagggagtcgtgcggacgtgtacgaccagtggcaggcgcacgactgaggtggatgggcatgacggatacaaggacctgcggttcgggacgtacaaggaaaacgtgcacttcatcgacgctgataatactcgcggcgacgagcc

SEQ ID NO: 63893 - DNA, 419 bp, Zea mays
  Clone ID: MRT4577_158270C.1
taattccctctccagccactcctccaacctactctaatcaacaacactatcttcattttaaccaactaactgcatctaactctgcttgtaatttattacaactacatctaccattcagccatctatctactgcctacccccaaaaaattcttccattcaaccaactaacacctataaactcttctgcttattcacacctctaacaactactaccattcatacatctaaatccaattatccaatcttacattatcacacaaccacaattatcacccatctaacattaatcatcctctaacctccaacaacctcttacaactattacaacagctaccattcaaccatctttctttacaaaacatcaacacactctacctacaacccatcattctaggaaaccttctttacaactcttaaca

SEQ ID NO: 63894 - DNA, 477 bp, Zea mays
  Clone ID: MRT4577_158271C.1
ctgcgcacgcacctaggacttacgcgccgccgccgcagccgcaacaatgccgtcgcacaagaccttccggatcaataataagttggtgaataagatgcgccagaaccgccccatcccctactgaatccgcatgcgtactgaccataccatcaggtacaacgccaagcgcaggcactggcaccgcaccaagctcggcttctgagcgtgcggattggccggctgctgcgacggaaagctataccctaacagctatcttctgtactatcattgactctgtgtctggaaggtagcaagagatgttgtgatctgttgattaagattgtgatgagagcagacgtgtaatagaaaattaggagcactgcgacgtacccctggatacctagcgagattgctatgctaagtaacgaaccctgtatcttattatactatggagtgctgcaatgatagatgtccaaaaaaagaatgaagaaaaggtct

SEQ ID NO: 63895 - DNA, 390 bp, Zea mays
  Clone ID: MRT4577_158272C.1
cttcaatacaatataatctaatggcgtccaaggctctgttcctcctcgccatcctgctgctagcgacgtcggccgccgtgctcgccgccgcggcggagcaaactcatgaaaacaacgagaagatggtggcgaggagcaaggacgccgccgccggcgtgatgaagcagcaggaacggcgcggcggcggatcagacgagtacggccacgcctgcgagtacggctgctgccaccacgtattccatggaggatgccagaagtgctgcccgccgccacccggcgctgcaggtggccgaccgcaggaggttaagaactagtagacgtctacacccgccggccggccgctgccatgcatgcatgacgccgggagtggaccggagctgtaccgtacgt

SEQ ID NO: 63896 - DNA, 313 bp, Zea mays
  Clone ID: MRT4577_158273C.1
attctatctgagttctacatctgcttgtattgcttaacaaaaaataaaaaataatacgggggtcgctttaaacgatcctatcttacctcctcgtacctacaaatggatagctcctttattgacaaacactaacttaattaactggccgacgctttacaacatgccgaatgtcaaaacctctacgtgactcaactcaactggctcgcgccacatgctattgactccagctgcagtaataactaaaaggcatgcacctatctccctaacaaacagtaccgctctctcaatggaaacaggcactacctctgtaata

SEQ ID NO: 63897 - DNA, 3170 bp, Zea mays
  unsure (1)..(3170): unsure at all n locations
  Clone ID: MRT4577_158274C.1
ccggccggggtctcgcacattcttggatcagacagctccgacaggtggtgcttatatataatcttagcttgaggcacatttgtgcgccgccgtaaccacacgcgctcgtacgttgcgatgggtctctctggctccggtgccgtcgcgtcgattgtgttcctcggcctctgcgccaccgtgtcgtgctggcctgcaccgccgccaccggagatgctgcacgagagcttcgcagggaagtcggagttcaggacggtgaaccggaggaggctgtcctcgtgctccaacccgagccagtacctgtcgatcaacgtgagcagcggcggggcgccgctccccgacgaggcgttcctcacggtcaccgtggccggcgtcctcaggcccgacgccgacgactgggtcgcgatgatcacgccatgcagctccagtgtctccgggtgcccntttgagtggtgttaactacgtccagaccggcgatctagcgcatctcccgcttctgtgccactaccccgtcaaggcccagtacatgaagcgcgaccctggctacctgggctgcaaggccgcggcatgccagaagcgcgacgcgtcgggcgcctgcagtgtccgcacctgcgccgccaccgtcgccttccacgtcatcaatttcccgcaccgatgtcgagttcgtgctcttctccggcggctttccggacgccgtgggtccctcagcggtcgggcgcgctccggtcccgcgtccgcttccggacgccgtgcgtcctcaagcggtccggcgcgctccggttcgccaaccccgccagcccgctctacggccacctctccagcaccgactccacggccacatcgatgaggcttacctgggtgagcggcgacgggaggccgcagcaggttcagtacggaggaggcaagtccggtacttctcaagtggcaacgttcacgcggaatgatatgtgcagtagccccttgttaccaagccctgccaaggatttcgggtggcatgaccctggctacatccacacggccgtcatgaccgggctccagccttctcaatcctacacctaccgttacggaagtgattccgagggttggagtgacacaaacacattcagaatgccaccagctgcaggctccgacgcacgcgcacgcgacctcgacacgcacgcagcagccagcaggtgaacgccgtacgcgcccgctggccacactcccttccccaccagccgaaaccgaggctgacgctgcgcgagccaaccggcggtgatgcaggcggcagtcggccaccgcggcgccaaccttggctccccgtcactctcgcgcttccggtatggcttccgcctccacggccggtcccgcctcttctctgagggcgtggcggcggcgccactccgcgtcggctctctgccccagccacggacccatggcagcggcggtttcgcgcacctcggggccatggatggggaggcgccgaggctgccgcacgccctcaggagaatgcttatcgatcatcagaaaatggcatgtcccaaccttctgaaagctgctgtactttcaaccatgacattgctttctgtacctcttgaggcgtcagcggagatgtgccagccacctagttctttcgccaatatgccaatttttattgttgtagctctaataggagctgctgttggcggattattagcacgccaaagaaaggcggaattgaagcggctcaataatcaacttcgccagatcaatgcagcacttagaaggcaggcacagattgagtcatttgcgcctggccttacttatgcgccagttgggagaacaaatgaaactgatgttattgttgacccaaggaagcagcagttggtcacaaacctgagaaatgggaagaattacatgaggaatcaagatcttgataaggctatagtggagttcagaacagctctggagcttgcagagagcataggtgatcgttttgaagaaaagaaagctgcccgaggactaggcgcatcgctgcagaggctcgggaagtaccgagaagcaatgagacagtacagcaaggttctggagctgtccaaggagacaggtgaagattccggctgcaccgaggcctacggtgccatagcggactgctacaccgagctgggcgacctggagcgagcggcgaaggtgtatgacaagtacatatcgaggctgcagcccggcgagtaaggtagatttctttacagacgagacagcgagttccttcccgttcgttgagttttgcgttttgtcggtcttgttaaactcactgcaggtattggattgttttgagaacgattttaatattcgtatataaataactattgatttaatcacacaacgcaggctcagatgagacatcatttgtgatctacggtgatatggggaaggctccgctggacccatctgtggaacactacattcagcctggatcggtttctgtggccaaggcagtggctaaagagatccaaacaggaaacgtggactccattttccatataggagacatcagctatgccacaggattcctggtcgagtgggacttcttccttcacctcatcacgccactggcctctcaagttccctacatgacagctattggtaatcacgaaagggattacgcgagctctgcatctgtgtatgtgactcctgattcagggggtgaatgtggggttgcctacgaatcatacttgagaacaacaagaaaatggtggcgaggagcaaggacgccgcggccggcgtgataaaccagcaggaacggcgcggcggcggatcagacgagtacggccacgcctgcgagtacggctgctgccaccacgtattccatggaggatgccaaaagtgctgcccgcccccacccggcgctgcaggtggccgaccgcaggaggttaagaactagtagaggtctacacccgccggccggccgttgccatgcatgcatgacgccgggagtggaccggagctgtaccgtacgtaccattgcgccgcgctcgcgcgcgtgccaacaacgtacgtggcgagaataatcatcatctcctttaattttgttaaaaaaacacgtacggctcggctgtagctaggtacgtaacagcttcccttaatatataccgtcgaccgacttgctttaaaaaaaaaaaaaaaacccccaaaaaaaaaaaaaaaaaagggcgggc

SEQ ID NO: 63898 - DNA, 238 bp, Zea mays
  Clone ID: MRT4577_158275C.1
ccacgcgttcgcgcaaactttgctacgtaatcgtctcagaagatgtcataaaggcgcaggagggtgtcataatataaagcacacctacatcatgtgatacagatactaaatgaactggctcttcgtcaagaaatatgcagtggcattcctctttaggtccaagtgctaccgatgagaattctgctcttaagaaagccttcattgcaatcgtactatgcattccgatccaggtggatat

SEQ ID NO: 63899 - DNA, 903 bp, Zea mays
  Clone ID: MRT4577_158276C.1
gcggctagctgcgacatcccatcgatccacgcatgatacaatataatgtgattggcgtccaaggctctgttcctcctcgccatcctgctgctagcgacgtcggccgccgtgctcgccgccgcggcggagcaaactcagagagcataggtgatcgttttgaagaaaagaaagctgcccgaggactaggcgcatcgctgcagaggctcgggaagtaccgagaagcaatgagacagtacagcaaggttctggagctgtccaaggagacaggtgaagattccggctgcaccgaggcctacggtgccatagcggactgctacaccgagctgggcgacctggagcgagcggcgaaggtgtatgacaagtacatatcgaggctgcagcccggcgagtaagatgaaaacaacgagaagatggtggcgaggagcaaggacgccgccgccggcgtgatgaagcagcaggaacggcgcggcggcggatcagacgagtacggccacgcctgcgagtacggctgctgccaccacgtattccatggaggatgccagaagtgctgcccgccgccacccggcgctgcaggtggccgaccgcaggaggttaagaactagtagacgtctacacccgccggccggccgctgccatgcatgcatgacgccgggagtggaccggagctgtaccgtacgtaccactgcgccgcgctcgcgcgcgtgccaacaacgtacgtggcgagaataatcatcatctcctttaattttgttaaataacacgtacggctcggctgtagctaggtacgtaacagcttcccttaatatataccgtcggccgacttgcttttgtatgtgtataacgggggcgtacgtgcgtgttatatacgtatatataggcgtacatgcgtacgtctttcgcgca

SEQ ID NO: 63900 - DNA, 365 bp, Zea mays
  Clone ID: MRT4577_158277C.1
gggtggggaggcgccgaggctgccgcacgccctcaggagaatgcttatcgatcatcagttgtgttgcagtgtggatgctgacctggcattatctctgcacttgaaatttgccactgcagaaaatggcatgtcccaaccttctgaaagctgcactttcaaccatgacattgctttctgtacctcttgaggcgtcagcggagatgtgccagccacctagttctttcgccaatatgccaatttttattggtgtagcactaataggagctgctgttggcggattattagcacgccaaagaaaggcggaattgaagcggctcaataatcaacttcgccagatcaatgcagcacttataaggcaggcacag

SEQ ID NO: 63901 - DNA, 197 bp, Zea mays
  Clone ID: MRT4577_158278C.1
gaagccgccgccgcttcaatgtccatattcaccgcaagagactgagatggggggttggggcattatccacaagaccaaggcctacttcaagcgttttcaagtgaagttcaagataaagcgcccctgccatacaaacttcaaggcccggattaagcttatttacccagaccaaaaccagttccatacaaccatattca

SEQ ID NO: 63902 - DNA, 2519 bp, Zea mays
  Clone ID: MRT4577_158279C.1
ttgggtacctcgaggacggccgggacgctgctccgcgcgcgactcgaacaccccgctcacgctgcgcagctccacgcccgcctcctcatctctgctggcgcgcgtcctcacccgcacccggtcctcctcacgcagctcgtctccctctacgccgccgcgggccgcctcgccgacgcgctccgcgccttccgcgcccacctacccagcgccaacctgcacacctacgccgtcctcgtctccgccctcgcgcggccgtacccggacctcgcgttctccctcttctcgggctcgcgccgccagctccgccccagcccccatgtcatctccgccgtgctcgccgcatgcgccggcctccagcctctctgcggacgccaggtccacacgtgcgcggccaaggtcgtaccgcccggcgacgtgttcgtctacaccgggatggtcgacgtgtacgccaagggcggggacatggagtcgtccagaaaggtgtttgatgaaatgctgaaccggggcgcggcgtcgtggaacgcgctcctcgttggttacgccaggtacaagatgtgcctcgaagccctgtcggtgttcagggagttggccgcgcaggggcgggaggtgtctctcgatcaggtgagcgtgtcgagtgtgctcagcgcttgcgctgtggcaggggccctgaactatggtcgccaggtacacgcgtgcgctaccaaggtagggctggagctcagcgcggtttgtgtcagcaacgctcttcttgacatgtacaccaggtgtggatgctcacgagaatcttccgctctgctaaatgctgtgggttgcaaggatgttgtcacctggaacatcatcattcgtagctgcattcatgacaatcggttcaaggaagcttgtgtgctgttccggtccatggtcaggaacggtaccttgccggatgatgtagcctttgctactgtgttgcaggcgtcagcgtgtatgtcggcatgggctataggagcaagcatgcatgcctccgtcgtgaagacagggttcttatacagtgatggcgttgctagctcgctaatcaccatgtattccaaatgtggctgcttggacgatgcacaccgagcatttgtgggggcaaaagatcatctgcatataatgtcctggacggccatgataactgcactgcagcagcatggacatggcatgcaggcaattgatgtatttgagaatatgctagagaatggcattcctccggaccacatcacatttgtgagtgttctctcttcctgtagccacagcggactgttgagcaaggacgcaggtacttgatttcgatgacttgggttcataagatcacaccacggaatgagcactatgcgtgcatggttgacatgtttgggcgagcaggccttctaactgaggcaaagcgattcattcaccagatgggacctaagcaagatgcatcagtccttggggcactcctttgggcttgcatgaactgcagggaccttgagatgggtaaggaggttgccaagaagctttttgtgattgagccaggtaataccgggaactatgtcctgcttgctaatatctatacgtcacatggaagattggaggaggcaaaggaggtgcggaggtggatgatgtttcaggagttaaggaaggaaaagggatgcagtttaatcaacaattgagaaccaaatctgtaccttatgaatacttcagcaaaggtgaggtttctattgtctcaaggatggtacctgcacttgtcaaacataaaagctcgctacctattttatttagacacaattaaggtaataaggcctactggagtttctgcatactcaagggttcatgggcatcccaggctcccagaagtggaatctgcaaggtatggctcattcgaaccatatgcgaagaagtttaattccttattagtgagagcagaagacagaaaatgcagaacagttgtattcctacgcacgtccagccgtgtccagccgtccaggtatctccagctcgccctgggaaacagtgattccttgtttcctaggcgtccaggcagactcagcattcgcttggaagcctagtcgccttttcagcactggtggtcaatatacatgtattcctcgtagtaaccactgctacatgctgaactatacagaaaatgaggaaatagagcagtacagcatctcttgcaagaacttctactgtggtgccatcatgttggatcacatttttttggcagtcagatgagagcctcagggtcaggttaaggttccaagttagttttcttccacattagaccttgtttcgatgcacttgtatcaaactcaattcaagtaaaattataaaccaatccactccaacacacatggatcgaggtagaaaaagtgtatctaagcaaggcatagtgtgtagatgtttatcccttggcaatattcctgtttgagcttctcttcttttatccgtggctactcagagttgtatctgtggtagagataaaggaatatgaaacgtgacatagtgtgtagatgtttatttac

SEQ ID NO: 63903 - DNA, 631 bp, Zea mays
  Clone ID: MRT4577_15827C.1
ctccctaatcatatcgccgctgcatctcatcttcttactacgcatctccgcctccgccgattcaatccggatcttccaacccatgggcagacgatggacgacgaccacgatcgagcgcaccctcaccgaggcgcatctgaaagctaacaaggagatcgtgcgcgccgacctcaacgtccctctctacgtgcccagaacatcacctgcgacacccggatccgctcctccttccccaccgtcaagtttctcctcgacaagggcgccttggtcatcctcgacatgtcacctgggttgtccgtagggagatcacgcccacttactcctcgaatgctcttgttccacatttgtctgaactcgcttatagttgtgagttcgatgttgtccgatgattgcattgtgtgacatcttgctacataggctgccgctttgacgatagtagacttctgctcctagagaatgttgtattctacaatgaggaagagaacaacgaacctgaggatgctgatagagtagcatctgtctgctgacctttatgtccatgatgcttttggtacaggacgctgagctcatgcttcttccgagggtgttaccacggatttctactctgtctgctgctggattcctcatgcag

SEQ ID NO: 63904 - DNA, 259 bp, Zea mays
  Clone ID: MRT4577_158280C.1
gggggccacacgcattctttactagtaataaaaaaaagacactcctataaaaaaattcgtaaggggcccattttatacaaaagacctctccacttgagcttgttttccatttacctccaggcccccaaaatatggctaacagtgaaacccccctcttgctaccgaaggccccaaaaattgaatgtgcgaaccggaacaactatcccgaaacaaaaattcctctatgccattggggggcggttttctcacattgcccaaa

SEQ ID NO: 63905 - DNA, 610 bp, Zea mays
  Clone ID: MRT4577_158281C.1
attgggtacctcgaggccggccgggctcagcgctgccactgccaccgcgccgtctcccgtcccccgtccgcgcgcgcgcgcgcacgcacgccggccaggcccaggcccaggccctcatggaggtcggtccgacgcagcagcgcctcggcgacagcttctcccgcgggtggctggcgaagcgcggcgcgcgggcgccgtcactcgagcacctcgtcgccgacgccgacctcggccattccttcggcagctccaggtcgtcgttcatcgacatggaccccgccgcgctcttctccatgcggtggacggccacggccgcgccgccgccggagagcgacttcgagttcgggcttattattcccggtggcgtgggcgggggcagtgaccccccgtccccggcgctggtcagcgcgagccgccgggtcatccgcgacggccgcctcgtccccggcgacccgctgttctgctcggcccgcagcgcgccggcctccccgtccccgagcccgtgctgcggcgggagggccgccgccgccgggaggcgctcgtcgtggtggaagatgccgctgcagtacctccgggtcctcctgccgctgtaccgcaaggtgagggccct

SEQ ID NO: 63906 - DNA, 117 bp, Zea mays
  Clone ID: MRT4577_158282C.1
cggacgcgtgggcaaacaacaaattattttttggcacatcatgcggtaataagcttgtgacaatgctgtaattgggagcgtttttcttgttataagtgtttctggtttgtttgagct

SEQ ID NO: 63907 - DNA, 358 bp, Zea mays
  Clone ID: MRT4577_158283C.1
accccgggcccattttgattccctgatatggaaggcatgttttctcttccatacaagttccaaacagggtctagattaccttctgatcaatggaaatggtgaaatcaggtagtagacgtggtttacatgcagatacaagaaaacgatttcgtagttctctgaacgcacatgatctccattggtaagactgaaatggcacagaaatattttgtgcaagaaggaagattaattattcttctgggggtatgtatttttgctcagggattaatcaatactctttttcttcgtcgtcctccagcgacccagcctgggatgtcttctcgtggtcattctcgaccgacgcgtgggcggacccttg

SEQ ID NO: 63908 - DNA, 174 bp, Zea mays
  unsure (1)..(174): unsure at all n locations
  Clone ID: MRT4577_158284C.1
agcgataagagtagctcgatcgctcacgtctcagctcagatccacagcgaangaaactggagagctaagagcagcagcgctgcattgctacctgagcgntcgccntcagctgctcaacgcgtgcttgntntcangagagcccttgtggcatctctgtttcatggccgagatctg

SEQ ID NO: 63909 - DNA, 1211 bp, Zea mays
  Clone ID: MRT4577_158285C.1
ttgggtacctcgaagccggccggttgatttcagtgttagcatctttgtatggagagcagccactagataacaatatatttttccttgagagatgacaaaaaaaaaaaaaaaaaaaaaaaaaaaaaaaaaaaaaaaaaaaaaaaaaaaaaaaaaaaaagtttttttctctcgctagcaccttgcctccgggcgatttgcgagcgccgcatcgacccccaccgccgacgaacgccgcgccgccgacgtcctgccttctcctcgccggcgagcgccgttccgctgtaccctccgtgattccgccccaacctctgcgtccgaatctcccgcgaaacagtcacggcgatggcggcggccggtggcgtttcaactgacgatgtcccgatcctgcaggcagagaacctcaccagcaacgtcaagtccgtctactacagtcgaacattcttgtcaatcattggtggagttgttgctggaatctggggattcacaggcttgatggggtttgtcttctactttctgataatgatggttgcatctattgggctcttagcgaagtcaaagttttcagtccaggcgtacttcgatagttggaccaggatttcaattgaaggagtttttggtggcctgatgtcattcgtgctgttttggactgttggtccgtttctgcatgagttcatccttgacgacgtatatagatttgcttatgacattgttcacatcttctgacggacatagaaagagctacactccggaggaaacacggaatcgtcgacgatgaacattcccaattggctttttgtacactcaatttttgtattggtaattgatatagtctgtagtgagactatatcggtgtagacctaagcaaagctcatgaactggtgttgcatttcctttccttggatgatccgtagcagttgcaatttttcatttcaagtgatggatatgaactttgatgttttctggcacaatgttttgtactctcgagttttctggcactttcgatggatgtacacacttctcaatgcaaaaaaaaaaaaaataaaaaaaaaaataaaaaaaaaaaaaaaaaaggcccctagtgagactatatcggtgtagacctaagcaaagctcatgaactttgcatttccttggatgatccgtagcagttgcaatttttcatttcaagtgaggaaaaaaaaaaaaaaaaacggacatagaaagagctactc

SEQ ID NO: 63910 - DNA, 426 bp, Zea mays
  Clone ID: MRT4577_158286C.1
aatagaccatcgggacagtcatatgttcctgtatctcttcggtgacactgccaaagttttgtttgtgatttaaaaaaaaaaaaaaaaaaaaaaaaaaaaaaaaaaaaaaaaaaaaaaaaaaaaaaaaaaaaaaaaaaaaaaaaaaaaaaaaaaaaaaaaaaaaaaaaaaaaaaaaacatgcgatttagaggaaccaaattgcaacttaatagaaggtctccttccaatggggcgcggccaaagggaaaaattttgaggacccaaaaaaaccctggggggcgcccaaataaaaattcattggggcaaaatcctccctttaccaaattgagaaaaaaccaaggggcccccacttaaaaaaccttacaaacagaaaaacacctttaataccaaattaactccccatgaaccggccccttaatctttaag

SEQ ID NO: 63911 - DNA, 389 bp, Zea mays
  Clone ID: MRT4577_158287C.1
gtatcacacaagaattctcgcaatgatagtatacaggttacataccctatatggtccttaaggaatacgtgcactatatatcatatgggttaaatttggattcaattgaatgaaaaaggatctttaaaatgttcttttttatgtcataaggaccctgtactacattacacataatgagcagaagaagtgttacctcaaaaacatttattgacaaccagaatacaacaaacacgcttgttgggttaaaaatgtgcaaggcataagtattctacttccttcgtcttaaaatataagaaatctaaagttcaaaatttgcaccaaaatacaagtattctggagttccctttttctttgtcttttaacatacaatattgagattccttttaaaa

SEQ ID NO: 63912 - DNA, 396 bp, Zea mays
  Clone ID: MRT4577_158288C.1
ggttataacactttaatgcttgctttgcattaaccatatattattttctattgtttttatccaaccaaaggcctgaggcaccggaatgccatgaaaggccaaaaccccaatccgagcaaaacccaggaccacttgtaataacccaccccgtcctaaaaaaacaaaacgcccgggcggagaatacctgacccgtacccaagaccccccaaaatatcctaaaagggaggccaataaaagctgagcctaaacacggaacaaactgtgcccgagggacaaaagttatcggccaacacggccacaaaaaaaagcttgggaaaatgaaaagtgaaacaccaccgggtccccaaaaggaaggcaaccaccattaatttgggcaccaaaaccggccctttcacc

SEQ ID NO: 63913 - DNA, 634 bp, Zea mays
  Clone ID: MRT4577_158289C.1
gccggccgggaagaccaagcaacccaatccaaaccaggacaagcataggaatcccccgatggatcatcgcgttctcctcctcctctctctcgcgtcggacgccgagattgccgccggcggcgacgcggaggacccgctgatccggcaggcggttcccggtggagatgacaacgatctggatgtgaacgaggagtcccacttcctgagcttcgcgcagcggttcggcgaggcctacaaggacgccgacgatgacgcgtaccggctgtgcgatttcaaggccaacctgcgccgcgcgggacggcaccagcgtgctgagacccgtctgctgagcatgctgatactaatgactgcgacgtgacgccgcctgaaggccggccgtagctacgtcgtactcgctgagtgccgacggcgctctcgctgacgaacgcacggagggtcatcacattcgacgcgagctgcgagtactaggactccgcgaggatcttcatcgaacgcacaagggtggcggccaacgcggacttacgcaaggttccggcgctgcgagatgtgcactagctcctcgtcgacccgtgcaagcacggcgccttcgacttcgtgttaatctgcgccgactagcctaactacgtccggtacc

SEQ ID NO: 63914 - DNA, 143 bp, Zea mays
  Clone ID: MRT4577_15828C.1
aaaacaaaaccgggcaacggggggctggatctcaggggatcggggcaaaaaggccactttgccacttacaaggccccggggggtttaaagtcctctgcaaaggattcaaccccccccccgttggaaagggaactttaaggggg

SEQ ID NO: 63915 - DNA, 151 bp, Zea mays
  Clone ID: MRT4577_158290C.1
gcggggcgaccccaggtcagtcgggactacccgctgagtttaagcatataattacgcggcggagaagacacttacgaggtttcccctcggttcggtgtgctcgcctgctcgcgtccctgtgtgtgccgctgtctgctcgtctggggtgggg

SEQ ID NO: 63916 - DNA, 536 bp, Zea mays
  unsure (1)..(536): unsure at all n locations
  Clone ID: MRT4577_158291C.1
naaaaaaaaaaaaaaaaaaaaaaaaaaaaaaaaaaaaaaaaaaaaaaaaaaaaaaaaaaaaaaaaaaaaaaaaaaaaaaaaaaaaaaagaaagaccgtctttaaaggagccggctttccttttcgcggccgccacgatgccttaccccttcttggggtggcccttacctttgattttaccggccctaattttccttacgcgggcgcctggtttaacccgggggtgaccgaactaaccgggctggacccaaatcccttttcctccggggggctccctttttggcaggcgggacccgtccggctttgcccccatttgctgcgcccttattgacaattgcccccccccctggcccgtggcttcccccccggcgggggggcggtttccccgcagggtgaccttttttcttgccagggccctgcggcccttccctttcccttattccccttccttttcctttaggtccccggtttttccccctccggctccgatttcccgggtccctttatggttcggatgttccttttaggggtcccttt

SEQ ID NO: 63917 - DNA, 366 bp, Zea mays
  Clone ID: MRT4577_158292C.1
ttatccacgaatcaggcttgagtcttaaatttatggggggcgacataatttaacacccatacaaacaacttttttcaaagggtcataacatacatttataaagttatgttcatgtaatatttgaaaaccttacttcttcctaaagggcctaagtgccattctctcttgaattcgatttggatgtatctggaccacaactaattgcaaacactaacacttctttaaaccttatctttaacatgcctttcttcgtgtctatacaaatagaactttaggatgacgcatccactcagcttgagtctgaatatcactgcccatgatagcagccggatggctcaacacttcaagaacgtcatgatccacaga

SEQ ID NO: 63918 - DNA, 204 bp, Zea mays
  Clone ID: MRT4577_158293C.1
gctctctgcctccaagctccccgcctgtccgagcttgtgcttagctacccctgtgcttgtctcgggtggaattacagtttctcgacaggacaattcctgcccgttccccatggtactctctctccttgcagtagcatgtggtccatgcttccaccttggggtgctcttagtctggcccagttgttttcacactctgttctctgt

SEQ ID NO: 63919 - DNA, 427 bp, Zea mays
  Clone ID: MRT4577_158294C.1
ccggccgggataacctccgtccatcccatccccgctcgcctctcctctcctcgccccgctctagacgatcgatggccgcgacggcggcgtgaggagatggagaggatggtggaggcgcagtggcaggaggtgaacctacatatgaggaagacaccttgaccatggtgttctccttgctggatatggcgcttctgctttcgcccccattcgactgaaggacaagccttactggatcatcaacaactcctgaggcgagaactgccggcacaacgtatactacaagatatgcaggggttccaacgatcgcaacaagtgcggcgtctattccatgctctctaccgagtccgcagtccacgcctcgaatgagtaaactctgctcagcgttgataatcgtgcttccgtatcttgtagaactataatccctgct

SEQ ID NO: 63920 - DNA, 240 bp, Zea mays
  Clone ID: MRT4577_158295C.1
aattatggagattaataatgtttttttttaattttatttttttgtgataaaacattgttgctgtgtgtgcaacagattagatttttatagaattggttattaatttaatcattagcaggcaaaaaaaatgggatgaaaacagcatgcttagtatagaatgttattcaagaaaaaaaaaaacataaggcatgaatgagaaatagagctcttctcgaagggcggggggtgcaactcccggga

SEQ ID NO: 63921 - DNA, 635 bp, Zea mays
  Clone ID: MRT4577_158296C.1
ccgggaaggcatagcccactgcccttctctccccttcctctctcctctgcgtcgcttccacctctcaatctcaccccacgcctgccccgagctccaaccctaaaggaacacacccctgcttgcggcggcggggagcggtcttgggcgtccgccgttgctgtggcccagccgtgacagatccgggccccgcgccgttaggtcggtgtttcttcggcgacggtgcagccgctggatgttagtctggcggatcggggctcgttgttcgcgtgattcgaggaagggtcttcgagaggaggtgaactccccagcatgcaagctcacggagttcagactggcacaagggctgccgtcctggcgggcaaccaacatatttggaagtttctcccagccataatattcggatactggtgcagagcgcacgctagcgccggtcccagcagatccattatagtagaataacaaggttttttataccatgcgagatacggttgttgtaggccctggttgcagcttagtaatagtagcaatctaacagaaacggtgtggccttcatggatgtaaggcccaatgctgggttacacaaccagcttgctagattatttattgtactcgatgttgcttaatgatgattgact

SEQ ID NO: 63922 - DNA, 363 bp, Zea mays
  Clone ID: MRT4577_158297C.1
gggggggggaaagctgttcctttatagttgtcccacgcgttctttctcccgcagcgaaagagggtgctcgcgcggggctacgcacacacagcagagggtggtcttcgatactcgcggtggtctgcggagctggcgcttgccgcaggcacggccatcgccgtggcgtccatggcggagcaggcgacatgaacgcggacaagacggagtgcgcggaccatctgttgggcctggcgccgtgcctgctgtacttgctggggcaggcccgcgcgccgccacccgactgttgttgtgggctgcgccaggtgctgaggaagagccccaagagcctgtgcctgctcatcaaggacaaggtctacctcaacc

SEQ ID NO: 63923 - DNA, 2766 bp, Zea mays
  Clone ID: MRT4577_158298C.1
gggacgctcgcctccggcccggccggggtttccgctcgcaggcaggcacagcgccaagcggcgaccgagagtccgagacccattcccatccacgcgaccacgctgccgttctctccccttcctccccgtcgcttccattcccgtccctcacaatctcacccccgccagccgagccccaaccctaacgaaatttacacctgcttcgttggcgtgagcggtcttaggcgtcgggcgtcgctgctgtccagcggtgtcggatccgggtcccgcgccgttaggtcgaggtttcttcggcgacggtgcagccgctggatgttagtctggcagatcggggccgagctaggcagtgttgggttgtaacatttgtatcgcatgaatgaactcagagcatctcaatgttaaaactgttaaggggcagacctggtgccagaggctcccacatgagtgggttctagggaagggataatccgaagcaagccttccccctgcaaatgcagagatgcggctttgaacccgtgacctggtgactcagtgagacacctctcaccactgcaacaggcctgtccttcctcatcgttaaaactgagcatattaattcttcttcttaagcaatatgggagctaattgctgcattgctgcaaaggagaggacacagccgtgcatcactcctatagaagtatcggcatataggaatgtgaggcgctcgccatcatggaacattcgatgggacaatcgcacacatatagaagacataatggacattcctactctgttctccaatcatagtagtggaagcattcatcctcatacaaagagtggttccgttgctccaactgaagggttctctaatgggaatagccttggaactagcccttccaatgtgttccatggagcaaagtggcacaaatctgataaaaaaatggaagcacgcaaggttacaaagtctgattctcgagctaaccgctccacagcaagtaactcttctcctgagacaaagctttccaggaaatcactgcattggtcacctcgaggccggccgggaaggacttcattcgtcttccatgctatcagtctgcagcaatgacttgtcagcagcaggatcctatgctgagtcatctgatggttggtcaatgcgcacattttctgaaatggtcgcaacatcccaaagagagaggtggtcacttgatagcgaactcttgggatccatttctagtaaagtgacaagaactagtgcttcaaattctactacacttccccctgagcaagaggtgtgcaagctgtgcttgaagctgttgaaggagagatcaacatggaatgctcaggagctggccgttgttgctgttctgttgtgtggacatgtgtaccatgctgactgtctggacagcataactacagaagctgacaaatacgatccgccatgccctgtatgcacgcatggtgagaaatgtacagtgaagctatttgggaagctggaatccaaggttaagaacaagataccaaaaaatgtggcagctgatatcaatccagatgggaacagtaataagcaccagaagaaaggtagaagagagcccaggttaggtacaagctcaagcatgaaggtcccattcagtcgcccgtttttgaggagacatttctccattgggtctcgaccgcctcggtcagtctcagaaaccgattcgacgagaaagaagggattctgggcaagacattggagggagtagaatagcctccaattgccattaggtgggctggtttccattagtgtgttttggaagggtcttcgagaggaggtgaactccccagcatgcaagctcacggagttcagactggcacaagggctgccgtcctggcgggcaaccaacatatttggaagtttctcccagccataatattcggatactggtgcagagcgcacgctagcgccggtcccagcagatccattatagtagaataacaaggttttttataccatgcgagatacggttgttgtaggccctggttgcagcttagtaatagtagcaatctaacagaaacggtgtggccttcatggatgtaaggcccaatgctgggttacacaaccagcttgctagattatttattgtactcgatgttttttaatgatgattgactaaggtacttcgtattgttggatggaatgcgtttaatccgaagtcttcagtggtagccgagcaaccaacaaatttggaagtttttctcaaccatcgtattctgaaacatggtgcagagcgcacaacaaggtttcttataccatgcgaggcagggtcgttgtaggccccgcttgcatctaagtaatagtagaatcgatctaacagaaacggtgtggccttcctggatttaaggcccaatgatgggttataagattacacaaccagcatgctagattatttactggacccgcagtttttttaattattggctaaggaatttgttggtggttgatggaatgcgtttaatttaaaggctttagtggacctgaagaacttttcacccagattggctgcacttttcatccttgcgttcacatatactaaatctagacgcacgaaaaatctctctagttgatcacatatgacaagacgggtctcgggcacggctcccccaccgaggacggtatcatccactggtccctcagggaggctagaattcgggccaatgctcgcgaagagggtcgattcggaccatatggtcgcgaagtgctgctctattcagcatatctgaaaacaaagctcatcagtgacagcaaca

SEQ ID NO: 63924 - DNA, 739 bp, Zea mays
  Clone ID: MRT4577_158299C.1
cggacgcgtgggtttgttaagctggaatcaaagatcaagaacaagataccaaaaaatgtgtcagttgatattaatctagatgggaatagtagtaataagcaccacaagaaaggtagaagagagcccaggttaggtacaagttcaagcatgaaggtcccatttagtcgtccatttttgaggagacatttctccattggatctcgaccacctcggtcggtctcagaaactgattccacaagaaagaagggattctgggcaagacactgggagagagtagaatagaatccaattgtcgttaggtgggatggtctcaattattatgttttggaaggatctttaagaagaggtgaactcctcagcatgcaagctagtggaggtgaactccccagtatacaagggctgccgagcaaccaacatatttggaagtttctctcagccatcgtattctgatactggtgcagagcgcacaacaaggtttcttataccatgcgaggcagggtcgttgtaggccccgcttgcatctaagtaatagtagtatcgatctaacagaaacggtgtggccttcctggatttaaggcccaatgctgggttataagattacacaaccagcatgctagattatttactgtacccgcagtttttttaatttttgggtaaggtgatgttggtgccagcatgctagattattttctgtacccgcagtttttttaattattgcctaaggtatttgttggtggtt

SEQ ID NO: 63925 - DNA, 176 bp, Zea mays
  Clone ID: MRT4577_15829C.1
ccggccgggcagatagcatcccgcgtcgccgcgatggaactctcgcccttgccgatgctcgctgcctcccgcttcctgtccctgtcgccgctgctggcgccaacatgcccccagcggaccgctccttccgtccgcgtggccacgcagacgctggaagcgccggaggcgcccaaacc

SEQ ID NO: 63926 - DNA, 273 bp, Zea mays
  unsure (1)..(273): unsure at all n locations
  Clone ID: MRT4577_1582C.1
gctcgatgtaccgtacagacgatggtcgggaattaatagaatatttcgtttattgtgtaaagtgcactagctggccatttatttacagtagtaacgcatgaacagcgtgtatatatagccgtatactgatggactgcaggatggaagtgtcatcgtcatcggtatatatgctcatgtatacgacgtggccacgtgtcgcagcgtgtgtgtgtgtgtggtactatatatacaattgtcagctaactgacgccatctnaaaaaaaattattattt

SEQ ID NO: 63927 - DNA, 2205 bp, Zea mays
  Clone ID: MRT4577_158300C.1
cattgggaccctcgaggccggccgggataaagacagaaaggtttgaactctgaattctgaaaacagtttcggcttgctggtgccattgcggctgcggcgcatggtggtagcagcagccagcaggcatattccaaccccccaagcacactggcaaatgacaggcagcagctacgcctgcacgtgcacggccttccgctccatcagcacgaagctagcagcacggtccagcggtggccgccgttctgccgtggccccctctgctggagggccgccgctgccgccgccaccaccagttgtcatggccggcgccgtggcgtcgccgggcaagcgaatcccgccgtcaccaattggttgcaccagcagggccgccagcggcgtcgccgtctctgctagtgccaccgtcgccgcccccgctagtagtagtaggcaggcgaaagaggacgatggcgcgagcagaaacgtctcgggctttgagccatccatctggggcgatttcttcctcacctactccagccctctggccacgtcgtcccttcacaaggcatggatggtacatcgagcagagcagctgaaggaacaagtggcagcaaaactggtagcagcttcgtcgagcgcctgtagcctgcaccgtaggattcatctcatccacgtcttggagcgtctctgtctggatcatctcttcgaggacgagatcagcgacatgctagctcgaatgaacgacgtcgatgtcagtggctgcgaccttcaaacggtggccatgtggttctatcttctccgaaagcacggatacagtgtctcgtcagatgtctttgccgagttcagagacgaacaggggggtggttttacagcaaacagtgcaagggatctgctgagccttcactgcgctgcttgtctcgcgacgcgtggagagacgatacttgacgaggccatttccttcacagccaagagtttaaaatcaacagcgccgtatacgggagcagcgtcgttagcatgtgaaataaagcgtgcgctcgagatccccctcccaagacgtgtgagaatttacgaggctaaatctcgtatagctgaatatggaagagaggctgaggctgatgaactggtaatggagctagcaaagctcaactataatctcgtgcaactccagtatcaacaagagctgaagatcataacaaggtggtggaatggtctagagcttcagtcaaggctatcgttcgctcgagacagagttgtggagtgctacttctggatcgtgggagtatattttgagccaagctactctcgagctcgaataatactaacaaaagtcatcgccatcgtgtccctattggacgacacttatgatgtctatggaactccacaggagtgcgagttatttaccgagtgtatagaaagctgggaccctgcagttgctggaggtcttccagagaacatgaagttcatttttggaaaaattttggatacttaccaaagcattgaggaagaattagcgccggaagagaaataccgcatgccctacataaaaaattttattatagatctagtaagagcatacaacaaggaggtaagatggcgcgaacaagggtatgtgcctgcaaccgttgaggagcacctgcaggtttcagcaagaagtggcgcttgtcacctcttgtcgtgcgcatcatttgttggaatgggagatgttgcaggtgaagaagctttcgaatgggtgtgcagtgtgcctaaactagtgcaggcgctctgcatcattctcagactttccgatgatctcaagtcatatgagcgagagaaaatggccccgcatgttgcctcgacaatagaaagctgcatgagagagcacgaggtcccgctcgaagtggctcgcgtgaagatacaggaaatgatagatgaaacatggaaagatttcaacgaggagtggctgaacatgaacaagcaccagccggcggagctgctcgagaggatcttcaacctgacaagaacaatggtgtatatgtacaagaatgatgacgcgtacacaaattgccatgtcatcaaagacaccataaactcgttgtttgtggagcctgttttcatagcctaggacgttcgttaaatagttgtgatgccccatgcatggttgtgtgatgacacataaaagccatcaattaaaataataaatttagatattatattgattagggtaataaaatttttagtgtttaattgttc

SEQ ID NO: 63928 - DNA, 871 bp, Zea mays
  Clone ID: MRT4577_158301C.1
ccggccgggaccatccgcaccgggttttgtacccgcacaggcacagccacactgcccttctctccccttcctctctcctctgcgtcgcttccacctctcaatctcaccccacgcctgccccgagctccaaccctaaaggaacacacccctgcttgcggcggcggggagcggtcttgggcgtccgccttttgctgtggcccagccgtgacagatccgggccccgcgccgttaggtcggtgtttcttcggcgacggtgtagccgctggatgttagtctggcggatcggggcccgttgttcgcgtgattcgagctaggcggtgttgagttgtaacatttgtgtcacatgaatgaactcagagcatctcagtgttaaaactgtgagcatatcaattcccctcctttaagcaatatgggagctaattgctgcattgctgcaaaggagaggacacaaccatgcattactccattagaagtatcagcgtacaggaatgtgagacattcaccatcatggagctttcggtgggacaatcgcacacatatagaagacataatggaaatccctactctgttctccaaccatagtagtggaagcattcgacctgatacaaagagtggttccattgccccgactgaagggttttctaatggaaatagccttggaactagcccttccaatgtgtctcacggaacaaagtggcacaaatctgacaaaaaaatggaagcatctaaggttacaaaggctgatcctcgagctgaccaccccactgcaagtaactcttcccttgaggcaaagcttttcatgaatcactggacatgctgttgcttcagatttgaagacatcaggggcgcagattcatcattcctcaggggc

SEQ ID NO: 63929 - DNA, 938 bp, Zea mays
  Clone ID: MRT4577_158302C.1
cgccgacctgttagtaggtcaggtcagtcgaccaggtcggtgtaatcagtaacgatcgatcgatatcgattatatgccttggatggaatcagacggtatcaacagattttagttgataatgatcgacagcgtggtcgataattcggttaatagctgacatggtggtccataaagacagaaaggtttgaacaaagaaatatgaaaacagtttcggcttgctggtgccattgcggttgcggcgccagatggtagcagcagccagcaccacccaagcacactggcaaatgacaggcagcagctacgcctgcacgtgcacggccttccgctccatcagcacgaagctagcagcacggtccagcgctggccgccgcagccgtggccgccgttctgccgttgacccctctgctggagggccgccgctgccgccgccaccagttgtcatcgccggcgccgtggcgtcgcccggcaagcgaatgccgccgtcaccaattggttgcaccagcagggccgccaccgctagtagtagtaggcaggcgaaagaggacgatggcgcgagcagaaacgtctcaggctttgagccatccatctggggcgatttcttcctcacctactccagccctctggccacgtcgtcccttcacaaggcatggatggtacatcgagcagagcagctgaaggaagaagtggcagcaaaactggtagcagcttccagcgcctgtagcctgcaccgtaggattcatctcatccacgtcttggagcgtctctgtctggatcatctcttcgaggacgagatcagcgacatgctagctcgaatgaacgacgtcgatgtcagtggctgcgaccttcaaacggggggcatgtggttctatcttctccgaaagcacggatacatggtctcgtcagatgtcttttgccgagttcagagacgaacagggggg

SEQ ID NO: 63930 - DNA, 194 bp, Zea mays
  unsure (1)..(194): unsure at all n locations
  Clone ID: MRT4577_158303C.1
tgncttaggaacctgagcgcggacaccaaggcggggcttcttctgtttcacgccgtgccctttcactactcgctggtgagccttaagtccaacatctttcccataaacactcttgctaccgacggcttcgccaggaacttttattcactgtgcattactcctcttattttttttttttttattatatctttttt

SEQ ID NO: 63931 - DNA, 838 bp, Zea mays
  Clone ID: MRT4577_158304C.1
gctttgcagatttgatctcatgacttcaccgtaaagtatttggatcaaacacacttatttgaaaacatcaatgtttctgcacccgtacaagacaaaacacacaccacgttctccgttcacaggtccttctctagcatcccgctgtccttggtcaagctttatgcagaaggttctacaggttactaaggcatgccgactattaaacacaatcacgccatagagtgatacgatccatcaattgtctgtgccgaagtagcggtcgccatattctcccagtcctgggatcaccctgaattcctcgttcagaccataatcgatttcagatgtaacaatcttcagcgaaggaaatcgcttgcagatacactgaatcccttcaggagccgagatgagattgagaaaaatgatccgatcctcaggaacaccttttcttataagaaggtcaattgcttgggctactgagttacctgtaccaagcaccggatccaaaagtagaacatgtcgttcagcaatatccatgggcagtttgtgataaacaagctgctgtccattgtctccaacacgatgaattagaattttcccaatttttattcctttacaacaagcacgcaatgcgttctccatactctcaccacttcgcacaatagagactccacagagcttcttacagaagtcaactcccatataaacagatcctgttggggtaataacctgcttttctgtaaatggcaaatgtccaagaccatgctccactaccaaacggatcaatcgatctgaataaaatacaaagtcaggtgtggtgatgtccctatcacggataagagcctcgtgccgaattcct

SEQ ID NO: 63932 - DNA, 815 bp, Zea mays
  Clone ID: MRT4577_158305C.1
ggcacagctgttgtgtggacatgtgtaccatgctgactgtctggacagcataactacagaagctgacaaatacgagccgccatgccctgtatgcacgcatggtgagaaatgtacagtgaagctatttgggaagctggaatccaaggttaagaacaagataccaaaaaatgtggcagctgatatcaatccagatgggaacagtaataagcaccagaagaaaggtagaagagagcccaggctaggtacaagctcaagcatgaaggtcccattcagtcgcccgtttttaaggagacatttctccattgggtctcgaccgcctcggtcagtctcagaaactgattcgacgagaaagaagggattctgggcaagacactggagggagtagaatagcctccaattgccattaggtgggctggtttccattagtgtgttttggaagggtcttcgagaggaggtgaactctccagcatgcaagctcacggagttcagactggcacaagggctgccgtcctggcgggcaaccaacatatttggaagtttctcccagccataatattcggatactggtgcagagcgcacgctagcgccggtcccagcagatccattatagtagaataacaaggttttttataccatgcgagatacggttgttgtaggccctggttgcagcttagtaatagtagcaatctaacagaaacggtgtggccttcatggatgtaaggcccaatgctgggttacacaaccagcttgctagattatttattgtactcgatgtttttttaatgatgattgactaaggtacttcgtattgttgg

SEQ ID NO: 63933 - DNA, 1978 bp, Zea mays
  Clone ID: MRT4577_158306C.1
gtaagcattaatgacgacaataaagccttttatcctgagcaagttgatgtaggttggaattaaaaacccaatagaacaacagagttaaagtgctttgcagatttaatctcatgacttcaccgtaaagtatttggatcaaacacacttatttgaaaacatcaatgtttctgcacccgtacaagacaaaacacacaccacgttctccgttcacaggtccttctctagcatcccgctgtccttggtcaagctttatgcagaaggttctacatgttactaaggcatgccgactattaaacacaattacgcctccatattaaatattacttgcaagataccatccctatccagggaccaagtgagatcttcacacagccatagagtggtatgatccatcaattgtctgtgccgaagtagcggtcgccatattctcccagtcctgggatcaccctgaattcctcgttcagaccataatcgatttcagatgtaacaatcttcagcgaaggaaatcgcttgcagatacactgaatcccttcaggagccgagatgagattgagaaaaatgatccgatcctcaggaacaccttttcttataagaaggtcaattgcttgggctactgagttgcctgtaccaagcaccggatccaaaagtagaacatgtcgttcagcaatatccatgggcagtttgtgataaacaagctgttgtccattgtctccaacacgatgaattagaattttcccaatttttattcctttacaacaagcacgcaatgcgttctccatactctcaccacttcgcacaatagagactccacagagcttcttacaaaagtcaactcccatataaacagatcctgttggggtaataacctgcttttctgtaaatggcaaatgtccaagaccatgctccactaccaaacggatcaatcgatctgaataaaatgcaaagtcaggtgtggtgatgtccctatcacggataagagtatgcattcctcggatctgaaaagttgattgaacaacatgaacatttggatagattttgcacaagtcatgctgaccaagttttgtacggatatgttgaacaatcagatcaactgctacatggttatcaccacctcgaggaatgatcacgtcagcatacttctttgaaggcaaaacaaaatcatcgaacgctggcttcacaaacctcccatattggtcaagcacggagctgatatctcttcctctttcaactgtatcacgtctgattcgtcgagcaagcctaatgtcagcatctgtgtctacaaaaattttcatgtccatcagattgcgaactctctggtcatggaacactaaaatgccctccaaaataatgacatctgatgcattgacctttctaaagctttcagaacaccgtcgatgcttcttgaaatcatatataggaacatttacaggttgagcacatttcagctgccccatgcattctagaagttgctctgtatcaaatgcatcagggtgatcaaaattatagtcttgtgcatgtgcagactcttcagcagtaaggccacggtaaaacgaatcctggttaacgagcacgacacggtggtcgtgcagctgctggatgatcatgtcgcacaccgtcgtcttccccgacgccgtccctccagaaaccccgatgacgaatggctgccgggcagcggcaggagagggaagctcggtggtgccgttggcgtagacggctccgttggagtgcgtgtgcgccgcggcggcgggggaggaggaaggggaagagggcgcagaggtggagaggcgcagcgcctcgaggcggaggccgctgaagtgggcccccaccgcggcctccatgacgtcgtccaccgccttgtccggcatcgcctcccgcgccgccggtcgatagggattcgggattgattcgcgggtttctggtgcgaggcgagcttgtgtaccccggccggttctcccggccggcctcgaggtacccaatg

SEQ ID NO: 63934 - DNA, 788 bp, Zea mays
  Clone ID: MRT4577_158307C.1
ggccgcttttttttttttttttttaacttaaacgcattccatccaacaatacaaagtaccttagtcaatcatcattaaaaaacatcgagtacaaaaaataatctagcaagctggttgtgtaacccagcattgggccttacatccatgaaggccacaccgtttctgttagattgctactattactaagctgcaaccagggcctacaacaaccgtatctcgcatggtataaaagaccttgttattctactataatggatctgctgggaccggcgctagcgtgcgctctgcaccagtatccgaatattatggctgggagaaacttcacaaatatgttggttgcccgccaggacggcagcccttgtgccagtctgaactccgtgagcttgcatgcgtggggagttcacctcctctcgaagacccttcctgtgaaaagacattcaattaataagtgttgttgtccatttcaaaatgttcagggatgacacgagaaattccaaattcaacacattcgaattcatccccatgaaggccatgatgacgaaatgaatagaactagtaacctgctatatgaaattgaacttaccaaaacacactaatggaaaccagcccacctaatggcaattggaggctattctactccctccaatgtcttgcccagaatcccttttttctcgtgaaatcggtttctgagactgaccgaggcggtcgagacccaatggaaaaaatgtctcctcaaaaacgggcgactgaatgggaccttcatgcttgagcttgtacctaacctgggc

SEQ ID NO: 63935 - DNA, 2054 bp, Zea mays
  Clone ID: MRT4577_158308C.1
gtatcaaacacacttatttgaaaacatcaatgtttctgcacccgtacaagacaaaacacacaccacgttctccgttcacaggtccttctctagcatcccgctgtccttggtcaagctttatgcagaaggttctacatgttactaaggcatgccgactattaaacacaattacgcctccatattaaatattacttgcaagataccatccctatccagggaccaagtgagatcttcacacagccatagagtggtatgatccatcaattgtctgtgccgaagtagcggtcgccatattctcccagtcctgggatcaccctgaattcctcgttcagaccataatcgatttcagatgtaacaatcttcagcgaaggaaatcgcttgcagatacactgaatcccttcaggagccgagatgagattgagaaaaatgatccgatcctcaggaacaccttttcttataagaaggtcaattgcttgggctactgagttgcctgtaccaagcaccggatccaaaagtagaacatgtcgttcagcaatatccatgggcagtttgtgataaacaagctgttgtccattgtctccaacacgatgaattagaattttcccaatttttattcctttacaacaagcacgcaatgcgttctccatactctcaccacttcgcacaatagagactccacagagcttcttacaaaagtcaactcccatataaacagatcctgttggggtaataacctgcttttctgtaaatggcaaatgtccaagaccatgctccactaccaaacggatcaatcgatctgaataaaatacaaagtcaggtgtggtgatgtccctatcacggataagagtatgcattcctcggatctgaaaagttgattgaacaacatgaacatttggatagattttgcacaagtcatgctgaccaagttttgtacggatatgttgaacaatcagatcaactgctacatggttatcaccacctcgaggaatgatcacgtcagcatacttctttgaaggcaaaacaaaatcatcgaacgctggcttcacaaacctcccatattggtcaagcacggagctgatatctcttcctctttcaactgtatcacgtctgattcgtcgagcaagcctaatgtcagcatctgtgtctacaaaaattttcatgtccatcagattgcgaactctctggtcatggaacactaaaatgccctccaaaataatgacatctgatgcattgacctccaattttgttgtcttactatagattcccctctagggaagataaggacagaccccgtaccaggggtctgaggaagggataaactgaggcaagccttcccccatcaaatgtggagaggctgcttcgaatccgtgacccggtgacttagtgagacagctttcaccactgcaccaggcctacccttctcctccggggcagataaggagggatcaaaaataaagttgcaaatgctctttctaaagctttcagaacaccgtcgatgcttcttgaaatcatatataggaacatttacaggttgagcacatttcagctgccccatgcattctagaagttgctctgtatcaaatgcatcagggtgatcaaaattatagtcttgtgcatgtgcggactcgtcagcagtaaggccacggtaaaacgaatcctggttaacgagcacgacacggtggtcgtgcagctgctggatgatcatgtcgcacaccgtcgtcttccccgacgccgtccctccagaaaccccgatgacgaatggctgccgggcagcggcaggagagggaagctcggtggtgccgttggcgtagacggctccgttggagtgcgtgtgcgccgcggcggcgggggaggaggaaggggaagagggcgcagaggtggggaggcgcagcgcctcgaggcggaggccgctgaagtgggcccccaccgcggcctccatgacgtcgtccaccgccttgtccggcatcgcctcccgcgccgccggtcgatcgggattcgggattgattcgcgggtttctggtgcgaggcgagcttgtgtacgcggccggtcccgg

SEQ ID NO: 63936 - DNA, 2592 bp, Zea mays
  Clone ID: MRT4577_158309C.1
ccggaagtgggtggccggagcagttccgtttccgctctcagccaggcacagcgccaaagcggcgaccgggactccgagacacattcccatccgcaccgggttttgtacccgcacaggatagccacactgcccttctctccccttcctctctcctctgcgtcgcttccacctctcaatctcaccccacgcctgccccgagctccaaccctaaaggaacacacccctgcttgcggcggcggggagcggtcttgggcgtccgccgttgctgtggcccagccgtgacagatccgggccccgcgccgttaggtcggtgtttcttcggcgacggtgcagccgctggatgttagtctggcggatcggggctcgttgttcgcgtgattcgaggcggtgttgagttgtgacatttgtatcacatgaatgaactcagagcatctcattgttaaaactgtgagcatatcaattcccctcctttaagcaatatgggagccaattgctgcattgctgcaaaggagaggacacaaccatgcattactccattagaagtatcagcgtacaggaatgtgagacattcaccatcatggagctttcggtgggacaatcgcacacatatagaagacataatggaaatccctactctgttttccaaccatagtagtggaagcattcggcctgatacaaagagtggttccattgccccgatcgaagggttttctaatggaaatagccttggaactagcccttccaatgatgtctcacgagaacaaagtggcacaaatctgacaaaaaaatggaagcatctaaggttacaaaggctgatcctcgagctgaccaccccactgcaagtaactcttcccttgaggcaaagctttccaggaaatcgctggacatgtcaagtgttgcttcagatttgaagacataagggtctgttccttcaacaccacccttagtatccagagcagattcatcatcctctagggggcattcttaacctatgattcaagattctatgatgaaattacagcggtcaccatggtatcaattatacggagcagtttcggacagcaaaattccatctctcatatctctcaaggagacaagctcccctgaactaaggccttcgtcttagatcttatcattctgtagcaatgacttgtcagcagcattggcctctgctgactgctctgaagaaatgtcaatgctcacatttttcgtactggtgctaaacatcaaaagtcctgagatcacgcctaatagcgaacttttgtgaaacattcctagtaaagtggcaagaacttgagattcaaattctacaacacctcccctagaacatgaagtgtacatgttgccctcgaatctgctaaagtagacatcaacatggagttgtcaggagctggcctttggtgctgttcggtgttgtgaacatgtgtaccattatgactgtcgggacagcataactatggaagctgacaaatacgatccgtcttgccctctatgcacgcatggagagaaatgtatactgaagctatttcggaagctggaatccaaggttaagaccaagatgccaaaatatgtagcagctgatatcaatatagatctggacagtactaggaaacaacatactgtaaggatagtcgcgaggttaggtagaagctcaagcatgaaggtcccattcagtcgcccgtttttgaggaggcatttctccattgggtctcgaccgcctcggtcagtctcagaaactgattcgacgagaaagaagggattctgggcaagacactggagggagtagaatagcctccaattgccattaggtgtgctggtttccattagtgtgttttggaagggtcttcgagaggaggtgcactctccagcatgcaagctcacggagttcagactggcacaagggcagccgtcctggcgggcaaccaacatatttggagagtttctcccagccataatattcggatactggtgcagagcgcacgctagcgccggtcccagcagatccattatagtagaataacaaggttttttataccaatgcgagatacggttgttgtaggccctggttgcagcttagtaatagtagcaatctaacagaaacggtgtggccttcatggatgtaaggcccaacgctgggttacacaaccagcttgctagattatttattgtactcgatgtattttttaatgacgattgactaaggtacttagtcttgttggggcagggtcgttgtaggccccgcttgcatctaagtaatagtagtatcgatctaacagaaacggtgtggccttcctggatttaaggcacaatgctgggttataagattacacaaccagcatgctagattattcgccttcctggatttaaggcccaatgctgggttataagattacacaaccagcatgctagattatttactgtacctgcagtttttttaatgattggctaaggtatttgttgttgatttaaggaatgcgtttaagttcaaggcttcagtggtactgtagaacttttcgatcagattggctgaactgatcatccgtccgttcccatatactaaatataaacccatttacagggtgcttggttttt

SEQ ID NO: 63937 - DNA, 726 bp, Zea mays
  Clone ID: MRT4577_15830C.1
cccacgcccggccagatcatactagtacacaccacactcccccggctagcaccgtgctctctatagctagctaagctactactgccctctcctttccaggcgactctgcaaccctagctagcaagagcattttcgccatgtctcccactatggcttcgtcgttgtgcgtatttgcagcgatgtctggcgccagcggcaggccgtcggccggtggctcggcggtaccgagccgtctgtccagcagcacacaggggggcaagggaaagcgggccgtggtgcagccgctcgcggctagcgtggtgacggagacgccagcgccggccgtagctccggctcggcccgtcgtcgacgccccgccgcgccgccgtgggggccgcggcaccgtcgagcacgcggcgtggaagagcgtccggcaggagaggtgggagggggcgctggagctggagggagagctgccgctctggctggatggcacctacctgaggaacgggccgggcctgtggaacctgggcgactacggcttccggcacctgttcgacggctacgccacgctggtccgcgtgtcgttccgcgacgggcaggcggtgggcgcgcaccggcagatcgagtcggaggcgtacaaggcggcgcgcgcgcacggcaaggtgtgctaccgcgagttctcggaggtgcccaaggggggaggggttccctctcccacgtgggccagctccgcaccctcttctc

SEQ ID NO: 63938 - DNA, 2468 bp, Zea mays
  Clone ID: MRT4577_158310C.1
gggtaccctccctgtgcggccggggtccgcaccgggttttgtacccgcacaggcacatcgacactgcccttctctccccttcctctctcctctgcgtcgcttccacctctcaatctcaccccacgcctgccccgagctccaaccctaaaggaacacacccctgcttgcggcggcggggagcggtcttgggcgtccgccgttgctgtggcccagccgtgacagatccgggccccgcgccgttaggtcggtgtttcttcggcgacggtgcagccgctggatgttagtctggcggatcggggctcgttgttcgcgtgattcgagctaggcggtgttgagttgtgacatttgtatcacatgaatgaactcagagcatctcattgttaaaactgtgagcatatcaattcccctcctttaagcaatatgggagctaattgctgcattgctgcaaaggagaggacacaaccatgcattactccattagaagtatcagcgtacaggaatgtgagacattcaccatcatggagctttcggtgggacaatcgcacacatatagaagacataatggaaatccctactctgttttccaaccatagtagtggaagcattcggcctgatacaaagagtggttccattgccagccgtgcatcactcctatagaagtatcggcatataggaatgtgaggcgctcgccatcatggaacattcgatgggacaatcgcacacatatagaagacataatggacattcctactctgttctccaatcatagtagtggaagcattcatcctcatacaaagagtggttccgttgctccaactgaagggttctctaatgggaatagccttggaactagcccttccaatgtgttccatggagcaaagtggcacaaatctgataaaaaaatggaagcacgcaaggttacaaagtctgattctcgagctaaccgctccacagcaagtaactcttctcctgagacaaagctttccaggaaatcactggacatatcaagtgttgcttcagatttgaagacttcagtgtctgttccttcaacgccacccttagtatccagagcagatccatcatcctccaaggggcattctcaacctacagattcagattcgatgaagaaagcatggcggtcaccagggtatcaattatacagacaggtttcggacagtaaaattccatctctcagatctcttaatgagataaggtctcctgaaggaaggcctccctcttccatgttatcagcctgcagcaatgacttgtcagcagcaggatcctatggtgagtcatccgatggttggtcaatgcgcacattttctgaaatggtctcaacatcccaaagagagaggtggtcacttgacagtgagctcgcgggatccatttctagtaaaatgacaagatcaagtgcttggagttctactacatgcccccctgaccaagacgggtgcaagctgtgtttaaagctgctaaaggagagatcgacatggaacgctcaggagctggctgttgttgctgttttgttgtgtggacatgcataccatgctgactgtctggacagcataactacagaagctgacaaatatgatcctccatgccctgtgtgcacgcatggtgagaaatgtacagtgaagctatttgggaagctggaatcaaagatcaagaacaagataccaaaaaatgtggcagttgatattaatctagatgggaatagtagtaataagcaccagaagaaaggtagaagagagcccaggttaggtacaagttcaagcatgaaggtgccatttagtcgtccatttttgaggagacatttctccattggatctcgaccacctcggtcggtctcagaaactgattccacgagaaagaagggattctgggcaaggcactgggagagagtagaatagaatccaattgtcgttaggtgggttggtctcaattattatgttttggaaggatctttaagaagagttgaactccccagcatacaagggctgccgagcaaccaacatatttggaagtttctctcagccatcgtattctgatactggtgcagagcgcacaacaaggtttcttataccatgcgaggcagggtcgttgtaggccccgcttgcatctaagtaatagtagtatcgatctaacagaaacggtgtggccttcctggatttaaggcacaatgctgggttataagattacacaaccagcatgctagattattcgccttcctggatttaaggcccaatgctgggttataagattacacaaccagcatgctagattatttactgtacctgcagtttttttaatgattggctaaggtatttgttgttgattgatggaatgcgtttaagttgaaggcttcagtggtactgtagaacttttcgatcagattggctgaactgatcatccttccgttcacatatactaaatatagacacatttacagggtgtttggtttgaggagt

SEQ ID NO: 63939 - DNA, 376 bp, Zea mays
  Clone ID: MRT4577_158311C.1
cccacgcgtccgcccacgcgtccgtccacgcgtccgagaatacaacactcggcaaagccttggattccggtagtgcatattacaaccatttgtgtgtaaattgcttatttgagaccctaaacgaattctaataaaaaagttgtcaactacaaagataaataacttttgaagttctacaacttttattttgacacttttttcatcatccgatgtagtttgcaaaatttgaattttaaatgtgacatacttatattcaatttttgagaaccgaaatgagttcaataaaaaagttgtcaactacaaagcttcataacttttagagatctacatcttctattttggtggttttgtcatacgaggcccgttgataaactcg

SEQ ID NO: 63940 - DNA, 2555 bp, Zea mays
  Clone ID: MRT4577_158312C.1
tccgctcgcagccaggcacagcgccaagcggcgaccgagagtccgagacccattcccatccacgcgaccacgctgccgttctctcccctccctccccgtcgcttccattcccgtccctcacaatctcacccccgccagccgagccccaaccctaacgaaatttacacctgcttcgttggcgtgagcggtcttaggcgtcgggcgtcgctgctgtccagcggtgtcggatccgggtcccgcgccgttaggtcgaggtttcttcggcgacggtgcagccgctggatgttagtctggcagatcggggccgaggtaatttccacgaacttagggggcaccttttcgcgttggtgctcaaaatggagaatttcggtgccgttcgggcaggtagctcctgatgaattctaggcagtgttgggttgtaaaatttgtatcgcgtgaatgaactcagagcatctcaatgttaaaactgtaaaaggggcagacctggtgccagaggctcccacatgagtgggttctagggaagggataatccgaagcaagcctcccccctgcaaatgcagagatgtggctttgaacccgtgacctggtgactcagtgagacacctctcaccactgcaacgggcgtgtccttcctcagcgttaaaactgagcatattaattcccctgcttaagcaatatgggagctaattgctgcgttgctgcaaaggagaggacacagccgtgcatcactcctatagaagtatcgacatacaggaatgtgaggcgctcgccatcatggaacattcgatgggacaatcgcacacatatagaagacataatggatattcctactctgttctccaaccatagtagtggaagcattcatcctgatacaaagagtggttccattgctccaactgaagggttctctaatggaaatagccttggaactagcccttccaatgtgttccatggagcaaagtggcacaaatctgataaaaaaatggaagcacgcaaggttacaaagtctgattctcgagctgatcgctccacagcaagtaactcttctcctgagacaaagctttccaggaaatcactggacatatcaagtgttgcttcagatttgaagacttcagtgtctgttccttcaacgccacccttagtatccagagcagatccgtcatcctccaaggggcattctcaacctacagattcagatttgatgaagaaagcatggcggtcaccagggtatcaattatacagacaggtttcggacagtaaaattccatctctcagatctctcaatgagataaggtctcctgaaggaaggcctccctcttccatgttatcagcctgcagcaacgacttgtcagcagcaggatcctatggtgagtcatccgatggttggtcaatgcgcacattttctgaaatggtctcaacatcccaaagagagaggtggtcacttgacagtgagctcttgggatccatttctagtaaaatgacaagatcaagtgcttcgagttctactacacgcccccctgaccaagacgtgtgcaagctgtgtttaaagctgctaaaggagagatcgacatggaacgcgcaggagctggctgttgttgctgttttgttgtgtggacatgcataccatgctgactgtctggacagcataactacagaagctgacaaatatgatcctccatgccctgtgtgcacgcacggtgagaaattttcagtgaagctatttgggaagctggaatcaaagatcaagaacaagataccaaaaaatgtgtcagttgatattaatctagatgggaatagtagtaataagcaccagaagaaaggtagaagagagcccaggttaggtacaagttcaagcatgaaggtcccatttagtcgtccatttttgaggagacatttctccattggatctcgaccacctcggtcggtctcagaaactgattccacaagaaagaagggattctgggcaagacactgggagagagtagaatagaatccaattgtcgttaggtgggttggtctcaattattatgttttggtaagttcaatttcatatagcagattactagtcctattccttttgtcatcatggaacagtttaaagcaggttactaaaattcaaactagtgtcgaatttggaatgtcatgtcatctctgaacagtttaaagccgacaatagcatgattaattgaatttgtgttctttccacaggaaggatctttaagaagaggtgaactcctcagcatgcaagctagtggaggtgaactccccagtatacaagggctgccgagcaaccaacatatttggaagtttctctcagccatcgtattctgatactggtgcagagcgcacaacaaggtttcttataccatgcgaggcagggtcgttgtaggccccgcttgcatctaagtaatagtagtatcgatctaacagaaacggtgtggccttcctggatttaaggcccaatgctgggttataagattacacaaccagcatgctagattatttactgtacccgcagtttttttaattattggctaaggtatttgttggtggtt

SEQ ID NO: 63941 - DNA, 501 bp, Zea mays
  unsure (1)..(501): unsure at all n locations
  Clone ID: MRT4577_158313C.1
ctgcttttttcggcacgaggctgaaggggggggggggtgagctnanaaaaaagagagcgagggcgccgccggggncgcggcggggggctaacgngcgcgnganggccggcaccatcctcggnggcgnactnggattctacgtcatgcaccgcgtcttgattttgtacaaggcgagaatggggggggggggcggaaattttttttttttcngcnngccaaagccaangagncgcagcaggggcgggacgaggcacagcgccccgacaaagcccagnnccngcccgacncgngacaccgacanncnnccccncnngcgccagcacganaccaagcggggagaanaacanagggcacnggggccaaggagnccgnccacncggnnnnncagaagnagagacanaagaacgacangaacnnnnngcnngnngcngncnncnnnnnnnggnancaagaaaaangcaccanncgagcgcaagggngggggcaagggangaacgccaa

SEQ ID NO: 63942 - DNA, 1049 bp, Zea mays
  Clone ID: MRT4577_158314C.1
catcattggctccctcgaggccggccgggatcccactttttgttgctcctcccctccgactaccttctgcctcgtcgttgactcgaccgtgggtgaagctttccgtcgttgctcgagctttcttgctcacccccggagcccggactatctttttttgagccgctagtcgtctctcctcccccccatcacttcattcgctttccctacacaccaccttaccgctacatccttcaacatgccctctcaccagcctactgctggcatgatggctgtcgaccccgactacgtcaagcagccctcctcaatggcaagcacctcggagcccaaccgcaaccccaagtacgaccccaagaagccacacatcaccgatacccccattacaaagtccaactggtacaagcacgtcaactggctcaacgttaccttcattatcggaatccccctcgccggttgcatcgctgccttctggacaccgctcaagtggcagactgccctctgggccgtcatctactacttctggaccggtctcggtatcacggctggctaccatcgtctctgggcacacaagtcatacaatgccagtcttcctctgagcgtcttcctcgctctcgttggcggcggtgctgtcgagggctccatccgctggtggagccgtgaccaccgtgcccaccaccgctacaccgacaccaacaaggacccctacagcgtccgcaagggacttctctacagtcaccttggctggatggtcatgaagcagaaccccaagcgcattggccgtaccgacatcaccgacttgaacgaggacccctgtcgttgtctggcagcacaagaattacatcaaggttgtcatcttcatgggtctcatcttcccctctgctgtcgctggtctcctctggaacgactggaagggtggcttcatctacgctggtatcctccgcatcttcttcgtccagcaggccaccttctgcgtcaactcactcgcccactggctcggtgaccagccctttgacgaccgcaacagccccaggggacacgtcatcactgctctc

SEQ ID NO: 63943 - DNA, 778 bp, Zea mays
  unsure (1)..(778): unsure at all n locations
  Clone ID: MRT4577_158315C.1
tgaatactccgccgagtgaaactttcccccactcgtcctaaaccctaaccccggaacctcggatcgatcagacacagctccgccgcagcaatggccgccatcttctccgcctccggccgccgcctgctctccaccgccgctgcggctgccgagttccccgtcccgatggcccgcatccgcaacctcgcccgcgtgggccgcctcgacgacatcgacgccgccgtcgcgccgctcgtgccgaccaaccccaaagccgtgatctccgccctctccgtggtcggcctctccgaccgggcctccgccatcctctccaccatcccgtcgcccaccgccgagcatctcaacgccctcctggccccgctcctccgccgccgccgcctcgccgagcgcgtgcctgctctgctggacgcgcacccctcagcgccgcgcgacgcctttacgtggtccatcctcgccaagtccctctgcatcaccaaaggcgccgaccacgcggtgtacctcctccacggggaggagccgccttccctccacctctacacggccatcatcgactcctactacaagcaaaagaagccccaccgcgccgaggagctgtggcgcgagatggtcgaggaacgcggcatcgcgcccgactctgccgcttacaatgtcaggatcacctacaagtcgtcaaccggcacggtggaggaggtgcaggagcttatccgagccatgggcgaggagttcgggtttgcgcccggatgtcatctcctacaatgggnttgatccgggtgcttgg

SEQ ID NO: 63944 - DNA, 244 bp, Zea mays
  Clone ID: MRT4577_158316C.1
attcggctcgaggacacgccgggtgcccgcgtcttgtttgttgtggctcgtggggacagctgcgcgaccgcctgtcccctacgccaggggcggaactctttgtcagtacctggtgacagcgactaactatcaactacaggaagacgcaacagccaaccggtggcgatggatcataacacataaacaagctgttccatgttaactgctacgacaacatgcgcaccgaaatgaaccaggtctacac

SEQ ID NO: 63945 - DNA, 260 bp, Zea mays
  Clone ID: MRT4577_158317C.1
cgtatggcccaaagaatagcacctccacgttgaatttctgcaggatttagatcaaccggaataccaagtgcgcgagcaacacttctgtcgactttccagagatgggcggtcggagcttgtgtactctcggggacaaggcgcgtatctagcgcacacgtccgttgcctctcggtgggctgcattgagccatttcgccggcaacgatgcacgcttcaccgtcaagtaaatgctcgttcatgaatgtcgctgctgctgccgct

SEQ ID NO: 63946 - DNA, 105 bp, Zea mays
  Clone ID: MRT4577_158318C.1
gtttcatcagcctctaccaaagagcctaggggttgtaatgtctttatatttaaaccactaaagtgcagtttctcctgcactcttgttactccaccctctcttccc

SEQ ID NO: 63947 - DNA, 1759 bp, Zea mays
  Clone ID: MRT4577_158319C.1
gcacagcactccacctcactgctccagtcgcgagccgcagctgcgcgtcgcgtcgcatcgcacgcatctctcctgccctccagctccaaagcttcgtcgtctgcgtcgccccgcgccccgtcttgctcgctccaagctagacaccataccacccagatcccgaggcccctctccctcgatcgccgcctcccggtagcggatccggcgccggctcgcgccccccgacaggttttgttttatgcttgttcatttgtctatggacaatggactagttgctgcactgcttttgtgagtcaccatgggaagcagtggagcagatacatcgtctaagccaaacaaggcatccgccccacaggagcagcaacaacctgctacctcaggtgctgcaacaccggctgtttatccagactggtccagcttccaggcatatcctccaatcccaccacatgggttcttcccctcacctgtggcatcaagtccacagggtcatccttacatgtggggagctcagcctatgattccaccatatggagcaccgccatatgtcatgtaccctcctggagtgtatgcacacccatctatggcctcgggtgcacatccatttactccttatgccattacttctccaaatggcaatgctgatgctactggaactactgctgtagcttgtgatactgatggcaagccctctgaaggcaaagataaaagtccaactaagagacccaaaggaactttgggcagcttgaacatgcttactggaaagaaccccagtgaacatggtaagacctcaggtgcatcagctaatggagccacttctcaaagtggcgaaagtggcagtgacagttcaagcgaagggagtgaaggaaattctcataatgattcatacaagcatagtggacaggaacaagatggagacgtacgaagttcccagaatggtgcatcacgttctccatctgagggaaaatttaaccaagctatggcaatcatgcccatgccatcaagtggcccagtaactggtccaactacaaacctgaatattgggatggactattgggccaacacagcaagctctgctcctgtaattcatggcaaagtgaccccaacaacagttccaggggctgtggtcccagcagagcaatggatacaggatgaacgtgaactcaaaaggcaaaaaagaaaacagtctaatagggagtctgcacgcagatctaggttgcgtaaacaggctgaatgtgaggagttggctcaacgtgctgatgttttaaagcaggaaaatgcttcacttagagatgaagtaaaccgtatcagaaaagagtatgaggaacttctatcaaagaataattcactaaaggaaaaacttgaaggcaaacaacacaaaactgatgaggcaggacttaacaacaagctgcaacattctggcaatgacatccagaaaaaaggaaactaatcgagctatcatgcaatgcttgcatagcatggccctaactagattattgggaggcgcaattgtagtatgcgtgttaactccttactttattgcagttaattgttaccaggttgtgataatgttgatgccaaccttgtgtgtgggtgtttcctgtttcagatctatcttggcttatcttttagaagtcaagatgtgactgaagatgtaggctgtgacccagttcactgtatctgaaatagtggataaactcaaatttacaatttgtattgctgactaatattgttatgtatacctggcaaaaggttttctttg

SEQ ID NO: 63948 - DNA, 320 bp, Zea mays
  Clone ID: MRT4577_15831C.1
aaaaaaaaaaggcccttttttcaaaaaaggggggaggggcacaatcccctttcccggggaaagggccttttccaaggaaaacacccggttttttctaaatttggggggggggcaggtttaacccccatttaaaatccgtgcccaaattgggccccaccccaccgggaaatataatttttcacgggtgggaaaaccccaagcaatatcacatgccccttttttaaaaacccaatgggggggcaaatttatgggcccaaggcccaaatttgtttttcgacaaactttaaaaccccttgttgatggggaaatgaggagccttt

SEQ ID NO: 63949 - DNA, 326 bp, Zea mays
  Clone ID: MRT4577_158320C.1
cgcccctggactgcactgcactggtcgaggctccagctaaagccgcctgtatctgtagcaacagcgacagagcttactctggattccttcgcgccatcaacgggctgcagcattaggggcacacactaatactagacgcattctcaggtccgtatgttccacagggcacaacaacacaatgggagcctgcaccttcttacaggccacggacggggaaaaccctccggggtccccagttacccgatgcgaaggtaggtgctgcttgaccgcgcgctgcggaagttccctggccgcacgcgggcgtcccatgccaagaaagcgtcagc

SEQ ID NO: 63950 - DNA, 846 bp, Zea mays
  unsure (1)..(846): unsure at all n locations
  Clone ID: MRT4577_158321C.1
atgggtaggttccattgcagggcacagcactccaccgcactgctccagtcgcgagccgcagctgcgcgtcgcgtcgcatcgcacgcatctctcctgccctccagctccaaagcttcgtcgtctgcgtcgccccgcgccccgtcttgctcgctccaagctagacaccataccacccaggttttgttttgtgcttgttcatttgtctatggacaatggactagttgctgcactgcttttgtgagtcaccatgggaagcagtggagcagatacatcgtctaagccaaacgaggcatccgccccacaggagcagcaacaacctgctacctcaggtgctgcaacaccggctgtttatccagactggtccagcttccaggcatatcctccaatcccaccacatgggttcttcccctcacctgtggcatcaagtccacagggtcatccttacatgtggggggctcagcctatgattccaccatatggagcaccgccatatgtcatgtaccctcctggagtgtatgcacacccatctatggcctcgggtgcacatccatttactccttatgccattacttctccaaatggcaatgctgatgctactggaactactgctgtagcttgtgatactgatggcaagccctctgaaggcaaagataaaagtccaactaagagacccaaaggaactttgggcagcttgaacatgcttactggaaagaacccagtgaacatgataagatctcaggtgcatctgctaatggagccacttctcaagtggcgaaagtggcagtgacagttcaagcgaagggagtgaaggaaattctcataatgatttatacnagcatagtggac

SEQ ID NO: 63951 - DNA, 458 bp, Zea mays
  Clone ID: MRT4577_158322C.1
attcggctcgagggagcgttatactcagtttttgttgcgatgcatttaacagctggtgtgccaggtcttatgtcggtactcgctttggcatacattgcaaacctctatggagcactaacacactatagtagcgggcactctgcaatatactcaggagcggggtatgctgaccttccggatgtatacaagctgggctttataacagccgcgattgatgctgcaatttggagagttgctggtgcactatggtgcaaatttttggggctttattgagtgtacaggcagtgtgagtacgtgaaaatcgtgccatatgactcacacaagtggttcatgatccatcatccgaggcggacaaatgggatcgctgtgattaccagggactatgaatgcatcataacagaggaacgctcatctattgaagtgtttgagcatgatcatcaacctagaaagcagatatg

SEQ ID NO: 63952 - DNA, 1878 bp, Zea mays
  Clone ID: MRT4577_158323C.1
cgcagagcacagcactccacctcactgctccagtcgcgagccgcagctgcgcgtcgcgtcgcatcgcacgcatctctcctgccctccagctccaaagcttcgtcgtctgcgtcgccccgcgccccgtcttgctcgctccaagctagacaccataccacccaggtgacttcgcgcgccactccttccttccctccctttccccacagctttactctcccctcccgcgtccagatcccgaggcccctctccctcgatcgccgcctcccggtagcggatccggcgccggctcgcgccccccgacaggttttgttttatgcttgttcatttgtctatggacaatggactagttgctgcactgcttttgtgagtcaccatgggaagcagtggagcagatacatcgtctaagccaaacaaggcatccgccccacaggagcagcaacaacctgctacctcaggtgctgcaacaccggctgtttatccagactggtccagcttccaggcatatcctccaatcccaccacatgggttcttcccctcacctgtggcatcaagtccacagggtcatccttacatgtggggagctcagcctatgattccaccatatggagcaccgccatatgtcatgtaccctcctggagtgtatgcacacccatctatggcctcgggtgcacatccatttactccttatgccattacttctccaaatggcaatgctgatgctactggaactactgctgtagcttgtgatactgatggcaagccctctgaaggcaaagataaaagtccaactaagagacccaaaggaactttgggcagcttgaacatgcttactggaaagaaccccagtgaacatggtaagacctcaggtgcatcagctaatggagccacttctcaaagtggcgaaagtggcagtgacagttcaagcgaagggagtgaaggaaattctcataatgattcatacaagcatagtggacaggaacaagatggagacgtacgaagttcccagaatggtgcatcacgttctccatctgagggaaaatttaaccaagctatggcaatcatgcccatgccatcaagtggcccagtaactggtccaactacaaacctgaatattgggatggactattgggccaacacagcaagctctgctcctgtaattcatggcaaagtgaccccaacaacagttccaggggctgtggtcccagcagagcaatggatacaggatgaacgtgaactcaaaaggcaaaaaagaaaacagtctaatagggagtctgcacgcagatctaggttgcgcaaacaggctgaatgtgaggagttggctcaacgtgctgatgttttaaagcaggaaaatgcttcacttagagatgaagtaaaccgtatcagaaaagagtatgaggaacttctatcaaagaataattcactaaaggaaaaacttgaaggcaaacaacacaaaactgatgaggcaggacttaacaacaagctgcaacattctggcaatgacatccagaaaaaaggaaactaatcgagctatcatgcaatgcttgcatagcatggccctaactagattattgggaggcgcaattgtagtatgcgtattaactccttactttattgcagttaattgttaccaggttgtgataatgttgatgccaaccttgtgtgtgggtgtttcctgtttcagatctatcttggcttatcttttagaagtcaagatgtgactgaagatgtaggctgtgacccagttcactgtatctgaaatagtggataaactcaaatttacaatttgtattgctgactaatattgttatgtatacctggcaaaaggttttctttgaattcagtctctggttgaacaaaaaaaaaaaaaaaaaagcggcc

SEQ ID NO: 63953 - DNA, 1921 bp, Zea mays
  Clone ID: MRT4577_158324C.1
gggccggggtcttcttcgccccgccacccgtcctgcacactcacaactagacatcgtaccacccaggtgatctcgcgcgccactccctccttccatcccttagccccagctttactctcccctcccgcgcccagatcccgaggctcctacccctcgatcgccgccttccagcggccgatccggcgctggctcgcggcccccgacaggcaccctacccaccgaccggatctagccgccgcgtggtttttgaattgagctcccctcgcgtcgcatggcgctggcgcgggccgcgcgggttcctctctgggctgctgccggatcgacggcgatgctagggtttaggtgtggttcgtgtctagttagctgagtggcgcgtacgcgtttcgttttgtcttggggagccaagcgtggcccgaaatttatctggagcaggttttgctttatgctggttcatttgtctacggacaatggactagttgctgcactgtttctgtgattcaccatgggaagcagtggagcagatacaccgtctaaggagcagcagccacctgctacctcaggtgctgcaataccacctgtttatccagattggtctagcttccaggcatatcccccaatcccaccacatggattcttcccctcacctgtggcatcaagtccacagggtcatcctttcatgtagggagctcaagctatgattccaccttatggaacaccgccaccatatgtcatgtacccccctggagtatatgcccacccatctatgcccccgggtgcacatccatttactccttatgccattacttctccaaatggcaatgctgatgctactggaactactgttgcagctggtaatactgatggcaagccctctgaaggcaaagataaaagtccaacaaagcgatccaaaggaagtttgggcagcttgaacatgcttactggaaagaatcccagtgaacatggtaagtcctcaggtgcatcgggtaatggagtcacttctcaaagtggcgaaagtggcagtgacagttcaagcgaagggagtgaaggaaattctcacaatgattcacatcacaaggaaagtggacaggaacacgatggggatgttcgaagttcccggaatggtgtatcacgtttgcaatctgagggaaaattgaaccaagctatggcaatcttgcccataccatcaagtggcccagcaactgatccaactacaaacctaaatattgggatggactattgggccaacacagcaagctctgctcctgcaattcatggcaaagcgacgtcaacaacagttccaggggctgtggtcccagcagagcagtggacacaggatgaacatgaactcaaaaagcaaagaagaaagcagtccaatagggagtctgcacgtagatctaggttacgtaaacaggctgaatgtgaggaattggctcaacgtgctgatgttttaaagcaggaaaatgcttcacttagagatgaagtaaaccgtatcagaaaagagtacgaggaacttctatcaaggaataactcactaaaggaaaaacttgaaggcaaacaacacaaaactgatgaggcaggacttaacaacaagctgcaacattctggtgatgacagccagaaaaaaggaaactaatgctatcatgcaatgcttgcctacattggtcctaactagattattgggaggtgcaattgtagtatgcacattaactccttactttattgcagttaattgttaccaggttgtgataatgttgatgccaaccttttgtgtgggtgtttcctgtttcagatctatcttggcttatcttttagaagccaagatgtgactgaagctataggctgtgacccaattcactatatctgttggaaatagtggataaagtcaaactttcaaatttgaagtgctgactaatattgttgt

SEQ ID NO: 63954 - DNA, 270 bp, Zea mays
  Clone ID: MRT4577_158325C.1
ggaacgagcgcgcgggcgaggaggacccttttatttaggatggcggcggcggctagggtgttccgcgggtccctcgtgcgggtgtccccagcggcgggcgccaaggccttggtagccaagaaggcgggcacggtggcggctgcggcggcggcggccaaaaataccgaggcgggcactacgaagccgagactgccgaccgggatcacgaaaccgatgccggtcttcgatgagttctatatgttcttctggcgcacgcccgaagtcgcacgc

SEQ ID NO: 63955 - DNA, 3372 bp, Zea mays
  Clone ID: MRT4577_158326C.1
ccacgcgtccggcctcgtcgtcttcttcgccccgccacccgtcctgcacactcacaactagacatcgtaccacccaggtgatctcgcgcgccactgcctccttccatcccttagccccagctttactctcccctcccgcgcccagatcccgaggctcctacccctcgatcgccgccttccagcggccgatccggcgctggctcgcggcccccgacaggggttttgctttatgctggttcatttgtctacggacaatggactagttgctgcactgtttctgtgattcaccatgggaagcagtggagcagatacaccgtctaaggagcagcagccacctgctacctcaggtgctgcaataccacctgtttatccagattggtctagcttccaggcatatcccccaatcccaccacatggattcttcccctcacctgtggcatcaagtccacagggtcatcctttcatgtggggagctcaagctatgattccaccttatggaacaccgccaccatatgtcatgtacccccctggagtatatgcccacccatctatgcccccgggtgcacatccatttactccttatgccattacttctccaaatggcaatgctgatgctactggaactactgctgcagctggtaatactgatggcaagccctctgaaggcaaagataaaagtccaacaaagcgatccaaaggaagtttgggcagcttgaacatgcttactggaaagaatcccagtgaacatggtaagtcctcaggtgcatcgggtaatggagtcacttctcaaagtggcgaaagtggcagtgacagttcaagcgaagggagtgaaggaaattctcacaatgattcacatcacagggaaagtggacaggaacacgatggggatgttcgaagttcccggaatggtgtatcacgtttgcaatctgagggaaaattgaaccaagctatggcaatcttgcccataccatcaagtggcccagcaactgatccaactacaaacctaaatattgggatggactattgggccaacacagcaagctctgctcctgcaattcatggcaaagcgacgtcaacaacagttccaggggctgtggtcccagcagagcagtggacacaggatgaacatgaactcaaaaagcaaagaagaaagcagtccaatagggagtctgcacgtagatctaggttacgtaaacaggctgaatgtgaggaattggctcaacgtgctgatgttttaaagcaggaaaatgcttcacttagagatgaagtaaaccgtatcagaaaagagtacgaggaacttctatcaaggaataactcactaaaggaaaaacttgaaggcaaacaacacaaaactgatgaggcaggacttaacaacaagctgcaacattctggtgatgacagccagaaaaaaggaaactaatgctatcatgcaatgcttgcctacattggtcctaactagattattgggaggtgcaattgtagtatgcacattaactccttactttattgcagttaattgttaccaggttgtgataatgttgatgccaacctcttgtgtgggtgtttcctgtttcagatctatcttggcttatcttttagaagccaagatgtgactgaagctataggctgtgacccaattcactatatctgttagaaatagtggataaagtcaaacttacaaatttgaagtgctgactaatattgttatgtatacctggcaaaagactggttttcttttaattcagtctggttgaacattttgctgggctttcactactgcctagtttgtgtacattttttttcatgtcggttgttcctagttattttttgtaataattaacaaatagatgagggacactgtctcaacctctgcaccaatatatatatggacacacacacacacacacacctcttttttgcgtctattttctgttttacttcaaagtttgcaggtttgtttcagccctgtttgattgtgagccttggcgctggcggtattttttctaagtttaaatgatccacctgctgtaggtaagtttggttaaaagacattcctatttttctgtttagtgatactgatattagtaatccttttttttcatccatctatttaagtgtcagcagaatcgtttgttaaacttgctttcctgaacttgctcttgattctggtaagtttttgggctcctggcactttacttttatgatcttattttgatttgctttttacaggaaaatggttctggactatgtcttagatgggaagcatagttcattagtatgtctgccttacaggttcttaagcagggatcgtggaagaacctgtgttgggaggtggtagagaagatgtgccaatgattggtttttggtcaatgtcttctctggtgccgcagaagttggagcggcatagcgagtgcatgttgccgcttttactctgtgttgctgtttgctttatgattccttttattccatggcacctgaataactcccccaagtggtagagatcaggacttgtgagctcgatgccggtgaagtagaacttttgacgcttgatgttggttacggtgatcgtgtcacccaagtggtgggtgggaactggggactatggttccattgggaagcctgatgaggtagttgaacacgaggggcacagtgatggaatgcctggataggaactccagcacctggctcagaaatggacgtgacagcagcctgtcgctgggcatcaggaaggtggtgttacggggtatcttctcctgcaccattctgatgagcatgacgaaggtgaagtagcgcactcgctgcatctcctatgccatggtggcaatgccacagctaaccatctttgtgtaagcaggcggcacacatgtttaaactacatggacacccttattatgaaaataaaaatatagaaaaaaccctctacctggatactgtttacagtctgagcacagtgacaggcttttttgtctactcttcgaccagttcggctctatcttaaggtgctggctgcagaaaatgagcttcatggcttcaataactagctgtatgatcttcagattcttggactgttgaactgtttaacggcagatattaacagttgcagccttacaggtgcttcgtcaaatgttgaggcattgctgcttaataactgtttgggggatagagtttgggttatacactgtaggtgaatcttcacgttgataccacaaacaatgtgtggaagtttcaaaaccattatcatatcaagtgtgcagtgaatcttaacgttgatgccagaaaccatgtgtggaagtttcaaatccttacaaaggaaaggtggttgaaaataacataatttacaaacgtgcttcgcaacgaattctattcctcatc

SEQ ID NO: 63956 - DNA, 259 bp, Zea mays
  unsure (1)..(259): unsure at all n locations
  Clone ID: MRT4577_158327C.1
aagatgtccatggactttgcacgtgccgctctggctgagcgccgcccttccttcttcctctcactggcanccactacttcatcttcctacccacagcccgacagacggccttcagtcaccgagagccccagttagacccgacggtgcctcatcagctcncanacanggcttcgagttctgaagctcagccncgtctactacggcgagcacattggnccagacaaggacgacttttatgacgntcgcgctgctccggaga

SEQ ID NO: 63957 - DNA, 555 bp, Zea mays
  Clone ID: MRT4577_158328C.1
tcgagccggccgggaacctctctcaagttcaggtatctcattgcctccttgcaaagagtgaggagatagggtaccgacccgcctctcgcgctggaccgctgctgcctcttgatggcatactgcgcccacgcccgaggggtcgacgaacgcgagccttttggccgcgtgagcacggagcgcgccgtctccgcgacaacgagtctttcagcagacggaacgaccccgctgacccgcgaccactcgtcccggctcacacgggactccgacctgcccgccggccatcggaacctcgacgaccacgtccaaccacacccgtgggtggcacctactacccgcgttcgccatacatcggaacttccgccaccacaccgacagctccaggggatatcggtggatacgatgctcccccgtcaccgggcagagatacctccccgacgacgcctggaggaggatactacggccccccctcggcatcatctgacacctccccggtgacgcctcctggcggtggcggcgctcgatacagtactcctccttcgccgtgcagtgatacct

SEQ ID NO: 63958 - DNA, 246 bp, Zea mays
  Clone ID: MRT4577_158329C.1
gaaaagggttgcggggcggggcaagaaatatcatttctacttggcggtttcttctggcgccacttcaaccctctccgtctccctcctcctgacgtcgttatccggacgagcagcgaggaggagaaagatcccctcccccactccctccttttcctcccctcccctgcgtccccgtccccgtcccgtctcctcccccgccgcggtgcggaatacgggctagattaatcagtcagcgctcatgatccg

SEQ ID NO: 63959 - DNA, 124 bp, Zea mays
  Clone ID: MRT4577_15832C.1
gccgagctccagctcccgaagttcgtccccatcgtcgccgcctccgaacagagacttgatctgctaccagcgtcttgccgctggtctccggcacaaacctgtgcacaaagagcacccgagaggg

SEQ ID NO: 63960 - DNA, 257 bp, Zea mays
  Clone ID: MRT4577_158330C.1
gttattttttttatgtctgttggtagcggtggagacaccggtgctctgctggcgtcggacaggaggcttctgctctacgaggcgcctgcggcggctgagggagacagtcaggaggaggagcagggacagttacccaagcgttgggccatcgccttactctgcttctccgcatttgtactatgcaacatggaccggggaaaatgagcattgatactctggctaggaacgaaagtttggttagaacccacaccactgtt

SEQ ID NO: 63961 - DNA, 1058 bp, Zea mays
  unsure (1)..(1058): unsure at all n locations
  Clone ID: MRT4577_158331C.1
ccggccgggctagctcattttctcctcaccctcacttaacactttcccctccccgaaccctctcttcctccatcccatcccaaatccggcgagagtgagggagagagcatggcagagtggtggcgcggcccacacgacatctcatcggtgcagacacacttatgagggtgggcgcactactatcaagcagtctcgtggtggtgtcctaaagacccgtgggggcatgcacccgcgagaccggtagccacaccgcctctttccatggtcgtcaacgtgctcgacaatcaaaataatgtcattgagcctcttcatttgtttgcttgggtgagtgcggtttgaggatcttagggctaggatttggggattcgagggaatttgagatttctgacttgagggtaaaatttgggttggaatttattacatcatccctttcatccaaataaaaaaaaaaaattccaaaaccgaagacattaaaaatgttgaataggttccatcactatatggcattaaatccgatcaaattctccgtcactgtgtcattaaaaatgttgaagagttagttgaactacaagggactgttccgattggattgagtgtcccccatgatgtatacctgtttgatcaaacagaataagtctaggttccatccacctcgctccaataatttcgtaaataaaggcccaaacgatatatacccatcttcaatcatgaaggcaaataataatccatgtatccctcatccagaattttactatagcttagggtgtatgctatctaaaattacatatccatttgatcaaactacaagacaattagcacaatattgtttctatgttgaacattgttagattctttttaaatttctttctataaaagaacgaatatattgctatcgagtttgtcacgtccgttgatgatagaacaaaaggctttcgccacacaagtgcactgcagaaaaaagcgatagatcccaatgcatgcatggaattttgtgtngtcgtgcatatcagtgtatggnccgtctagaggaccaagttacgacgcggcaggacgtcata

SEQ ID NO: 63962 - DNA, 514 bp, Zea mays
  Clone ID: MRT4577_158332C.1
ttgatgcaaaagaccacagaccacaacacaagtacacaaccactcagccagcatctaagagagtaagagactaagtccagtagtgagtagtccagtccattgtcctgagtcctctcctgaccagtgaccagactccagagcaccatgcgacagccatccaaggctccaagcagcaagcagcgagtgaatgtcatgtcgacagacgacagtacttgcagcaaacagccaaacacaacacaagaaaaaatgctaagctttgagggcttatttcagtttcatctttgcaggtccaatcatagataaaatatcacatgcttaaactatttattcataacgcatgatctcttactagttgctttccaccaaactttttggaaaccaaacattctcgacatcatcctcaccatcttgttccacataagtcatacttccatcatgtgcacctcaaatccagctagaggagcatatcaatgcctccaccatagaagggcttagagaactacggtaatcatct

SEQ ID NO: 63963 - DNA, 546 bp, Zea mays
  Clone ID: MRT4577_158333C.1
acacgttgatcagagagtagctagaggaatataattctgttacatttcataaccctctctctcatgcactcacgcctttatgcagccaggcaacacgccggcatctcacctcccataggccacgcacacgttacatggagttcacccactccgggcccaacagcctctggttcaacttacgctcacgtgtacctctccttggcccagctggctcctctttctcctttgaacggcccacattgtccagtttagctcccgcgccttcaggttcagcagcttgtggcgccctgctggtaacatccccccggcgacgagaacctgcttgcccccaagcaggtgcattgggaaatgtttgcttcaatgtctcaagatcttcccaagttgccaacgacgatgacaatcctgaccacttgataagcccttgagccacaccactggtattcatccgacgttgtaacacttgtacagggatttgtagaccttggtggtgttggggagcaggctgcggagcttggcgaggtggccgttgatgcgctggcggcggct

SEQ ID NO: 63964 - DNA, 508 bp, Zea mays
  Clone ID: MRT4577_158334C.1
gaaagagcgcctgttttccgcccaaacggggccgggggcccccaacctgaacccggtgtttttaaaatctggaacgggcggcttataacaacccaaagcccccggtcctgaggggccatggcgctcgtccaggtgacgtttttccaattacacaggccaccctggtgttcccatttacgagagggcccccccccgaaccgaatgggaccctggcgaatttttgctgctttctgaaaaaggctttaattttcctgggccccttcaccaccccggggggggggagggggggttttctttttctttacagcctccggtggcccttcccttggttttttttcgggcggggtggtggtcggggcctttttggcctcggggggggcctcactggttccaggggctgtgcttgcggcccttttggggtttttaacggggactttttttggggcagtcccccccttcaccgccttggcttaggaacttggtttccccgggcctggggggggttttg

SEQ ID NO: 63965 - DNA, 477 bp, Zea mays
  Clone ID: MRT4577_158335C.1
gggaaccacagcttctaacattaaaaaaaatcaacccccccctttaactttttttaacaactttgcttttcccatctaccggggggggccccccccattaggtcccgggggtttatattggggatccggcggaacccgggaagagccgccccgcttttaaagccacccggggcccaaacagggcgggtcccatcccgaaattcaaacccccctggcccttgctggaaacaaccctccggataaaaaggccggccctcaacttggggggacccccctggcccccgctgcccgatcccggccccctatcccaaaagggttctagggccccacaagccggtggtgggccttctgggtcccggaatgaaaacccccccccgggtggttccagggcccccaacacttccttgaagggaacccacggatcccctgggggctctggggggggccaggaaacacaaacataggggcccctcaacc

SEQ ID NO: 63966 - DNA, 1390 bp, Zea mays
  unsure (1)..(1390): unsure at all n locations
  Clone ID: MRT4577_158336C.1
ggctttactacctgcgccagcgtgaccgtaaaaaggcttatacctgccaaaattgtggtgctattacagatgtggcttagataactactttgagaagccaaatactacagatattgcttaaagcatcctcatttctttcatcacgaaatatggctgcaccaggttctatctacaagataatcgaacagttaaagagaaatctgtaccatgctttactcaactactttgctgcacacatacgaaacactatgaaagatatctctggaattacaagattggtggactgcattgacatactggagatcgacaatgcctgttcatgatccacgcgtccgggcacatcggcgagtcagcaagatgaaagacgttccctacaagctcggcctcaacaagaacaaaaggaaagttgagaagattgaaaatgactatgccaaatgcaagttcgttgcccaatgttttatatatggtgatagtttcagctctggaatttagctgaagttgaatgcttcatatgtttagactgaaattttggtactaaactggtagattattgttatttaaatatataaaaaaaatcatcttctacgattcagagaaattatgtgaagcttcaatttgactccatgcaacaggtttagctattgacaacctcgattacattttcacagtgggagctccttcgattattaaccacagttgtgtaccaaatgcagttttgatatttgatggtaggacagcatatgttcgtgcattgcaaccgataaataaagatgaagaggtatctataagctacattgagactgcggcagtcaccaagaagagaaacaatgatctgaaacagtacttcttcacctgcacatgtccacgctgtgtaaagggttttgatgaggatgcactacttgaggggttcaggtgcaagagccaagcatgtgatggctttctgctgcccaactcaggaaataaggctgaagcaggttctatctacaagataatcaaacagttagagagaaatctgtaccatgctttctcaactactttgctgcacacgtgcgaaacactattgaagatatatctggaattacaagattggtggactgcgttgacatactgtagattgacaattcctgtttatgaaagagtttatccaccttttcatccgatgattggattacaattctatacttgtggaaagcttgaatgggactggttcggagggagacggnccctcactctctgccctcctgctgcctgcctactgctatactggtctcttgtgttcatgttcatataaaattcagtttcatgttcatattttcataactgtatatgttcatcttatcatacagntttgggtcctttgaactttggagcactggatccctactactct

SEQ ID NO: 63967 - DNA, 482 bp, Zea mays
  unsure (1)..(482): unsure at all n locations
  Clone ID: MRT4577_158337C.1
ggnctacatcccctgcctcgtcaacgtgaaggcggtcaaggcactcaagtcgctgcggcacatggaagcaccgggagaggcactgcccgacagatccgaggccgaggtgccttgtgccgctgcccagagagtaccgatgtccggtgccgatggccacacagaccttgacatggtttggctcaatgatgttcctcatccaaagtaagtggaatacaacacagaggccacactgtgtcagagaacactatgaactatactgattggcctggcagtggtgctcaactcataaatgaattgtgttgatacattatattcataggtacaaattttaccactcttttagtagctaatccatctcaaccacctggcttgactagtctatgaagaacaccgcaggtctgcacattatgggctattactcaaggcaattaccatgcggtgcagatacccaataatccacttgccgcggaaatacaggaact

SEQ ID NO: 63968 - DNA, 220 bp, Zea mays
  unsure (1)..(220): unsure at all n locations
  Clone ID: MRT4577_158339C.1
cgtcgcggacctgggcggacctggtcgacggnntcaacagtaccgagcgtccagcttatttaaggctaaattaagaatgggatactgtgtcaaaacttacaactattacaaccactataagggtgcaatgtaatttcttgatatgtgtactaaaaatattttataaaaaaaaactgtttatgaaattttacacattctatctcggtgagaatagtattaa

SEQ ID NO: 63969 - DNA, 284 bp, Zea mays
  Clone ID: MRT4577_15833C.1
ggggacgcttgaattcagttggactcaaatggcctgagaaacatctttcagaactaggcggggccgattgtcggttgggtttattgaagcctggaccttgagcacaccaacaacttcccagtccacctggagagcgccctgtcaatcagcacgaccagattttgagcccggaaacaaccgaaccagtattgctcctgccggtggatggtgcccagcacagctaaggcctgtcgacctttgtcaggtaaactatcttccctgcaggggtgccaagaggagagggc

SEQ ID NO: 63970 - DNA, 362 bp, Zea mays
  Clone ID: MRT4577_158340C.1
ccggccgtgacatcctccgaaccatccgctccatggcctccaacatgctcagggtatacgactggcacatcaccgactgccagaccttccccatcgttctgccctcggtccccaatctcgccaacttcggctcctactccgacgacatgcgctacaccgaccaggacgtacgacgcatcgtccgatacgccgaggcctttggcattcgcgtcatccctgaaatcgacatgccccgagagtgagagctgattccacagtactgtactggatcctgcactatgctacagctgcaatcttcaatgcaaagacttcagggcacacggggtcgtgggcggacgcgtacccggagatcgtgacttgcg

SEQ ID NO: 63971 - DNA, 274 bp, Zea mays
  Clone ID: MRT4577_158341C.1
atataaataagcggaggagaagaaacttacgaggattcctctagtaacggcgagcgaaccgggagctgcccagcttgagaatcgggcggcctctcctgccgaattgtcttttgcttaggtcttctcagtcacttaccggatgcaccttctgttggaggggactcctgcttggatgcgagccccgatcatcccggacactgtcgctccacgcggctcccttttcaaccaagctcgattgccaatgcagtccatatacggcgtttaatttcctaca

SEQ ID NO: 63972 - DNA, 869 bp, Zea mays
  Clone ID: MRT4577_158342C.1
accagcagcatatgacccaacctttgctcacagagacacattgggaagttggtgagaaaattcttacctttcttgaactgttttatgactggactgttgctctatctggtgtttactatccaacatctcctatgatgctacaccatatcattgagattgctgaacatttgaataactttgagaatgacattatgttaagagacactgtagttccaatgaaatctaaatttctcaaatattggaaaagcattcctattttgtattcctttgcatttgtgttggatcctagagccaagataagaggtttcagtaatgctcttcaagttctgtctagatatgttactactgattactctgattacttcaatgtcattagatctgaattgactaacatgttttccaagtatgagataaagtttggtgcagcaaaattgcagagaccaacccacaccacaagtactagcaggaagaaaacagcttggggcaaaatttatgcatcgcctgaggtaagtgaggttgattgaggagagaagacggtctctaacaagtgaaatggtggagattctgacttgcttaaaggattggcagctaggagagagtcgggagcagcacaacattgcaaacaacgacatggaagaacactacaagaatatgtacttggatgaagaacgcgaagctggcattggtcgtagttagatgtttcttgtgatgtaattttacttttgttctgtacttggacaatgaactttgaacttatgaactattgaactgcatctagagctggctgcactctttttcccttctgaccaaagggttttttaatgaggcagccattgcacagctctaataatattaagtttgttttggtc

SEQ ID NO: 63973 - DNA, 698 bp, Zea mays
  unsure (1)..(698): unsure at all n locations
  Clone ID: MRT4577_158343C.1
cctanttaccccgcttgtagccgccgcgtctgacccaagccttccacttccacccagccgcccgccccccatgccgctcccgatgcgccgcctcgccgccgctccctccctcccagccgtgcacccgcacgactcccccgcgccgccctccgttcgcctccggcgacagcatggccgggtgtcgatggagaggtcctcgacgacgacggcccgaggtgttagttgtgtgatggcaagtggtaaggagcatgcagcaactactagtggtgatgaaaagaaaggtggactgcgtggcaaactgaaaaaagttgttctagcttacagtggtggcttggatacatcagtaattgttccatggcttagggagaactatggctgtgaagtcgtctgtttcactgctgatgttggtcagggtgacgttgaattggaaggattggagaaaaaggcaaaagctagcggtgcaagccagcttgttgtgaaggacttgacagaaaaatttgttggtgaatatatatacccctgcttgcgtgctggtgcagtttacgaaagaaagtatctgcttgggacttccatggctaggcctgttattgctaaggcaatggttgatgttgccaaggaagttggcgcagatgcagttgctcatgggtgcactgggaagggcaatgatcaggttcgctttgagcttacattttatgcct

SEQ ID NO: 63974 - DNA, 996 bp, Zea mays
  unsure (1)..(996): unsure at all n locations
  Clone ID: MRT4577_158344C.1
gaaaaaaaaaaaaaaaaaaaaaaaaaaaaggagccgatctcaaaaacagaacagtgtccgcatttcaaactgggctccataaagttctgtcgcctcgcctgtgacctgtagggttagcagcaggcagcggaggggagagagagagagaggggatggattctcaagcgccgcttcgtcctcctctagctttcgcctgcttcatcttcctttgctcatccttctgcgcagcaaatgggatgtacgacagggttggtgcggcggcgtcagatggggagagcaggaggatgcggctgcacaccgacgggagccgcggcgacgcgcacgcgtggcctgggtacctctacacccgagcagttgggagatgcacaccccaattctggagcagcggagccgagccctggcccaacatcgtcccacaggaagcggcggtggcgaaggtgttcgggtctaggtccgtggagcgctacgggccgcgcctcaccctgctggaagctaccatgaggaccgacgatgccggtggcagcgcgttcgtgaagctcgtgaagcaagggagcgccgccctcctcaacgcctacgcgaggagagggttccctttcgactcctgggaggtgaaggccctgctgctggaggcgctggtgtccgaggatgccgctgtggtccaggcggagcggtttgagcaggccaacgagtcctgcgtttgatcttcgatggatgaagatgcaacgatggtgcctctgtacggtcggannnnntggggtaatatcgtgttcctggttggtcaccacttctgtgactttggcgttgaggtttctgaagccgcaactctgtccaagtcggcatgtttctctagatgccgggctttgtgtaatgctgtgtgcactgatgtgtagtaggttgtaatctacggaccgtattttttttttactatttcaatggtaatggaagttctatgttgtcgcaaaaaaaaaaaaaaaaagcggccgccaccgcggtgga

SEQ ID NO: 63975 - DNA, 415 bp, Zea mays
  Clone ID: MRT4577_158345C.1
cccctctcttccttctgtctcagtacattcattgcgtattctgtatggatattacttttccagaaaatctatggaaaattccgggttattttcccccccaataggtgtgaccaagggacgtcttggtacgtacagcgtttagcacactgtcctggagtagtaacttgatgtgaccgtggggtgtaatcataacgtccgagcatttgaccttggtccaaatggtgtcgtgttacacgaagcggtcgctgttgcccgactcattttcaggcggcttgaattgcttattgaatacttgcgattgtttctcgagcgtggtaggaagtggacggtcacttccggtctttttaaatagcctgcttccaccgttgttctcttcacttatcctttgttcattcggtactttcttatcccttta

SEQ ID NO: 63976 - DNA, 2279 bp, Zea mays
  unsure (1)..(2279): unsure at all n locations
  Clone ID: MRT4577_158346C.1
gnttggtnggaagtggnaatggaccgnaatnactctaggnaagcacacgagacggcgtgnccgtgtgggattcctttttctgggnnatttctncnngcagccctgcctgnngtggtcccccctgcattctcaactccgcgtngttggcgtacgctgagctcggaatcgggggaggtttgggtatggactgaagaggcccattggctaccgtcgagcccaacaccaaatgcagccgagtccaacagagtcatcctcatacatcgttcactctcgtcgttctccccgatcggttccggcctcgcgttcgtcgtctccttccccctcgccggccgcgtgatctgcctgccgcgcggacgccgcgggcgcgacgatgcacgacccgtcggagatccgcaacctccccatcgacatcgcctttggccgcctccaggagtggctcgtggaccgcaagcgagtgccgcacgactggcggaagcgcctcgccggtattcgcgcccgcatcgcgcccgctttctccgccctgccgcggaacctgcacccctcactcctcgccctcgatccagaagaaattggctaccttgaagcaaagaagatatacagcattctcctagaatccaacaccgagagtcgcaacatatttggccgcctgacgggatccgcgggtgaatgggagtcaattattaaagcttacgagaaggaccatgtcttccttggagaggcagcgcagatcatggttcaaaatgttaactatgacattccatatcagaggaagcagatgcagaagactcagcagcagcttgcagagcttgatcgaagggaggctgacatcaagcgtcttgcggcattgtcagcgactagatatgtagaagcctgccaggaactcggtttacagggaataaatgtgagggaagaactaatagagtccgcaaaaacactcccatctacttttagcaaaatcttggaggtcctgaacagtgatcctgtctcaaatgctatggagtactacacaacttttgttaaggactgccatactgaggacaagagaaatagtgattctgtgctacccaaactgaaagacttgcaggccaatcctccttctttgcatgtctcagtatataatgagatcaagagttctcttggagaggcatcaaaatctcctgggtttactgtgatcgcgggagaaattgactcaaatgttgctgctgctgatgatattgattgggacatttctgtggatactaatgaaattgattgggacattggtgctgtggaacaacctggtgaagaatctggcgatggctttggatcgtatgaaattattgatgctaatatagagctggccggttctgaaaattataatgttggtgtctcagacaaatcaatgaacaaagaagatcttgcatcatctgagtctggtatttgctgggacatcactgctgatagttctgaagaaattgctagtatacagaatgcttcatctgtattagagcaatctcagtctcaaatgatagctgaagatagaagtttgttgctggagaaagaatataggaataatattctggatgatttactcgaggtaaaatcatttttgactcaacgcttaggggagatgaggaatgcagacacatcatctctacagcatcaagtgcaagctgtctcaccttttgttctccagcagcatgctcctgacagtttggagaacatgcttgtagagatctcgtcagcaatctcattgctaactaatcagaagactcttgaccttataatgatccttaactctaaaaggtttctggatagattagtttcaagcttagaagagaagaagcatcacgaagtaaaactacgggaaggtttaggtgatttatctgttaagcgtatggagctgcaaaacgcactgtcatcatcatggccaaagcaagaggcagcaattacaaaaacaagggaactaaagaagctgtgtgagtcgacactgtcgtctgtttttgatggaagaccagtgtatataattggagagatcaatactttactgagctcaagtgttagtcaattagctggatgactgtatttccgttcctggaccaaataagattgcaaaaatattatcttatggtatatacttctgaatatttatggtttcctaaaaaaaaaaaaaaaaaaaaaaaaaaaaaaaaaatacgaaaaaaaagtaaaaagtaactatcatctaagaccccgctcacaatacaggagccacatgacaacgaaattgcgttatatcaagtagaccactaatttaggat

SEQ ID NO: 63977 - DNA, 1368 bp, Zea mays
  Clone ID: MRT4577_158347C.1
acatttttgtgaattttaaccactttgttcttctgaacttcagagaaatagtgattctgtgctacccaaactgaaagacttgcaggccaatcctccttctttgcatgtctcagtatataatgagatcaagagttctcttggagaggcatcaaaatctcctgggtttactgtgatcgcgggagaaattgactcaaatgttgctgctgctgatgatattgattgggacatttctgtggatactaatgaaattgattgggacattggtgctgtggaacaacctggtgaagaatctggcgatggctttggatcgtatgaaattattgatgctaatatagagctggccggttctgaaaattataatgttggtgtctcagacaaatcaatgaacaaagaagatcttgcatcatctgagtctggtatttgctgggacatcactgctgatagttctgaagaaattgctagtatacagaatgcttcatctgtattagagcaatctcagtctcaaatgatagctgaagatagaagtttgttgctggaaaaagaatataggaataatattctggatgatttactcgaggtatgttgaccattcccactccctccccatcttttctagttcagatgctattgcataatctttcttattacctttccctttcatcttgtttgtactgaagaataatgttatttttagaaattcagttggtgactagtgtttgcgttgtatggtgagacaaggctgctttctggatgcaccctctcattgccattgtactgtatagttcattaatttatggtaactgaaacaggtaaaatcatttttgactcaacgcttaggggagatgaggaatgcagacacatcatctctacagcatcaagtgcaagctgtctcaccttttgttctccagcagcatgctcctgacagtttggagaacatgcttgtagagatctcgtcagcaatctcattgctaactaatcagaagactcttgaccttataatgatccttaactctaaaaggtttctggatagattagtttcaagcttagaagagaagaagcatcacgaagtaaaactacgggaaggtttaggtgatttatctgttaagcgtatggagctgcaaaacgcactgtcatcatcatggccaaagcaagaggcagcaattacaaaaacaagggaactaaagaagctgtgtgagtcgacactgtcgtctgtttttgatggaagaccagtgtatataattggagagatcaatactttactgagctcaagtgttagtcaattagctggatgactgtatttccgttcctggaccaaataagattgcaaaaatattatcttatggtatatacttctgaatatttatgggt

SEQ ID NO: 63978 - DNA, 1032 bp, Zea mays
  Clone ID: MRT4577_158348C.1
ggccgggccggagatcggttccggcctcgcgttcgtcgtctccttccccctcgccggccgcgtgatctgcctgccgcgcggacgccgcgggcgcgacgatgcacgacccgtcggagatccgcaacctccccatcgacatcgcctttggccgcctccaggagaggctcgtggaccgcaagcgagtgccgcacgactggcggaagcgcctcgccggtattcgcgcccgcatcgcgcccgctttctccgccctgccgcggaacctgcacccctcactcctcgccctcgatccagaaggtagtagagttgttcctccctctcagcgggtcatcagtgtaagaatttctccatgctcttgtaaaccctaccctcccgccgaaccccgccactttcttccttatcttgctttcttaggtcgctcgattctattttcctactctatttgctgtgtggaatgtaatcctttccttctggttccttgccttggtttagaaattggctaccttgaagcaaagaagatatacagcattctcctagaatccaacaccgagagtcgcaacatatttggccgcctgacgggatccgcgggtgaatgggagtcaattattaaagcttacgagaaggaccatgtcttccttggagaggcagcgcagatcatggttcaaaatgtggcaccttcaagtccatatcagaggaagcagatgcagaagactcagcagcagcttgcagagcttgatcgaagggaggctgacatcaagcgtcttgcggcattgtcagcgactagatatgtagaagcctgccaggaactcggtttacagggaataaatgtgagggaagaactaatagagtccgcaaaaacactcccatctacttttagcaaaatcttggaggtcctgaacagtgatcctgtctcaaatgctatggagtactacacaacttttgttaaggactgccatactgaggacaaggtgcaatcaggactatgtagaacacatcacttactgaatacacaattttcggctgctagaaacattt

SEQ ID NO: 63979 - DNA, 213 bp, Zea mays
  Clone ID: MRT4577_158349C.1
aggtggccggaacttcttgactgattccatgacgggcggtgtttcagatgctgttaagaacactgcagctgcccccataggacgcgcgatgccggttactaagagtcaggatgagaggcccacttctgcgagggtatcacaagccgccatgggtctaggtgatgggggcaaacgtcccctcatggatgagggcttctgtggcttgtggagggg

SEQ ID NO: 63980 - DNA, 241 bp, Zea mays
  Clone ID: MRT4577_15834C.1
ccactggcctggcgagatggacgggggaaattttaacaatgcgcgggcgtcattttctgcgaggtccgtctaaatcgctactgtaggcgctggggctgatggcactacagccggcgctacagctgggtgtgcggcactggtaactacgggcgatggcactgtggatacaacacggctcgttgccatggcgactaccgttggagcagatgtgatgtggactgcaggtccaggggcgacgacg

SEQ ID NO: 63981 - DNA, 337 bp, Zea mays
  Clone ID: MRT4577_158350C.1
gcgcgggcgattactcccaacaccacctcgcctgcgatctccgtatcctccgtctcgtcaagcatctatcatgtccgcctactgaaaaaaggagcaaggattatctcataaataatgctgcctacattagcacccctggcaaggctatccttgctcctaatgaatccactggcaccattcacaagccccttttcaatattaatatttaaaaccttcaacaaaaccccctcactctccatgatctactattctgctcacctcctgctcaccagtacatcatcgttataatcctcttccaggataccctataccataagaccaatgatggcaaaccttt

SEQ ID NO: 63982 - DNA, 587 bp, Zea mays
  Clone ID: MRT4577_158351C.1
attgggtacctcgaggccggccgggatagcgcccgctcgcccatcagcccacgctgtcacgcccaagtatggcgctctccgtctcctccctcggcgacgccctctcccacctctccctcccatcgaccttcgcacccccaagcctcacccggccccgatcctgtgtctgctctccaactaccgccgcgctgatatactcacactccgcgactccgccgcccaatctctcgaagaggacctgcccgcggacgaggtgatgggtgacaaggaggaagcggaggaggatgcgctgactcaaatcacgctgcaaaagaatgtgaatcaccgattgccaggcgggttcgcggaacaacgaatcaccgccacgggacatcgcaagactgacatcgcccgcgacacgctccaggagggaaccgggaaggccgtcatcaactaccgcgacgataatgagtatctggagggaaatccaatgtggatgtagtactgcaaggagcccttgatgactctatggaatgagaacaactatgacgtctatgtgaaagcacaccgtggtggcctctcaagccaggcccagcacatttgccttg

SEQ ID NO: 63983 - DNA, 250 bp, Zea mays
  Clone ID: MRT4577_158352C.1
aagccaacaactacaggcaggcgcggcacaccggacaccgtaccggcctagacacttggagaaaggagaagcacgcaggcatgggcaccagtccgtcatccctgcgacgatgctctctcgtctcctgtcgcatagtactgtctgttggcgcacgcacgaaccgaacgcgggcatcgctccagagtcgtgtgtgcacgtggtgtgacagtcaagacgttaagcgccgtgctgacatgtgaatgtccgtcaa

SEQ ID NO: 63984 - DNA, 159 bp, Zea mays
  Clone ID: MRT4577_158353C.1
aagtatatttccaacttatactttgaacgcgcttcgagaggaatatacataggccactgggaatcagagcagttcatggctctcacatgcaaactgtgcgcacagatcgtttctcggacactggacagctgaacctatttgacagagtgcccagcagca

SEQ ID NO: 63985 - DNA, 452 bp, Zea mays
  Clone ID: MRT4577_158354C.1
tcctatctaatctagtatgatctaatctagtgagggttacttaatgctagtacaaaggataagtccatacacttaagcctaaattggtgacctagatcaactcggccatacccaacaacttgacctacataacagatatatcttagcctcttgtcccaattccagatggagacaccaaagagcaagaaggaggagatcaacctcgacatggaagaataggagtcaaatcagatctcgagatgattcaagatttaccaccttggatggagccttcccttaccaagttcttcttaccatcagctaacctcactctgaccatctctcctcttgcctaattgtgtgtctaaacataaaagatacccatgcatttctaattacttgctaaatagtattaaaaagagagatagagactcttaatttttgaatcaattagaaactacaatctcaattac

SEQ ID NO: 63986 - DNA, 267 bp, Zea mays
  Clone ID: MRT4577_158356C.1
agtggccatgtagatgatgggtgcccaggcatcacattccacattgctgataatcctgcatcaacagcttggaccacatgactagcttttcggtggtgggaatgacctctactgcctgcgattctatgttggggtacctcacttgcgtgatggtgaaggtcttgtggctctcgaagatgctctcgtttccagcactttgcctcacggccacttgcgtgctcaaggcactcagtcgctctgcctcagctgtccagtccaccgtgatat

SEQ ID NO: 63987 - DNA, 836 bp, Zea mays
  unsure (1)..(836): unsure at all n locations
  Clone ID: MRT4577_158357C.1
cctcgaggccggccggggcacagagtggtaagcatggcgagcaccacagacaaccgtggcctcctcctcgtcgtggccgccgccaccgtcgtcctcgccgtggccgcggccccggcgcatacaccggggggcaatactgctacccctccgccgccgttccggacggtgtacgcgttcggcgactcgttcacggacacggggaacacgcggtcgacgacggggccctactcgttcggctacgtgtccagcccgccctacggcgccaccttcttccaccgctccaccaaccgctactccgacggccgcctggtggtggacttcctggccgaggcgctggcgctgccgtcctacctcccgccctacctcgccgtctccgtctccaacgccaacgccaacgccacgngcggcggagccgcganaaccttctgcggtggccggcgccacggccatcgagcacgacttcttcgcgcggaacaactccagcatcgacgtccacgccgcagtccatcattgacgcagctggggctggttcgacgcgcaccttgctccggtcctcctcctcctcctccgccgccgccgccgccgacgcgctctttctggggtgggcgagatcggcgccaacgactacgcctacacagtcgtcgcccgcgacaccatccctcccaagctcgtccgcaccatggnncgtccagagggtcaccgcccttcgtcgagggcctggctggagcgaggcgcctacaacttcgacctcttcgccactgggggctcgccgcaggtcaccacggcctgcgcgcgccccgccgagtacgtcaactgggacgggtccacatgacgga

SEQ ID NO: 63988 - DNA, 978 bp, Zea mays
  unsure (1)..(978): unsure at all n locations
  Clone ID: MRT4577_158358C.1
atacttacctggacggggtcgactggggatcaagaagtcctgtggcctaggtcagtggcccgcattgcacatggcgggtgcgctggcttaccatctccccaagtgggagagtggacgtcataatttgtggtagagggggtacgcgttcgcgcggcccctgccgcacagagtggtaagcatggcgagcaccacagacaaccgcctcgacctcggcctcctcctcctcctcgtggcctccgccaccgtcgtcctcgccgtggccgcggccccggcgcatacaccggggggcaatactgctacccctccgccgccgttccggacggtgtacgcgttcggcgactcgttcacggacacggggaacacgcggtcgacgacggggccctactcgttcggctacgtgtccagcccgccctacggcgccaccttcttccaccgctccaccaaccgctactccgacggccgcctggttgtcgacttcctggccgaggcgctggcgctgccgtcctacctcccgccctacctcgccgtgtccgtctccaacgccaacgccacggcggccggagccggcgtcaacttcgcggtggccggcgccacggccatcgagcacgacttcttcgcgcggaacaacctcagcatcgacgtcacgccgcagtccatcatgacgcagctgggctggttcgacgcgcacctgctccggtcctcctcctcctcctccgtcaaccgccagagctacgcgccacggcttcgccgagccctttcgcacctgctgcggctccggcggcggcgcctacaacttcgacctcttcgccacctgcgggntcgccgcaggtcaccacggcctgcgcgcgccccgccgagtacgtcaactgggacggcgtccacatgacggaggccatgtacaaggtcgtcgccgccatgttcttcagcgccgacggctactggcgcccagcgttcaaggacctgctggcccatgaagcc

SEQ ID NO: 63989 - DNA, 469 bp, Zea mays
  unsure (1)..(469): unsure at all n locations
  Clone ID: MRT4577_158359C.1
tcgaggccggccgggccgggacttacctggacggggtcgactggggatcaagaagtcctgtggcctaggtcagtggcccgcattgcacatggcgggtgcgctggcttaccatctccccaagtgggagagtggacgtcataatttgtggtagagggggtacgcgttcgcgcggcccctgccaaatctgaaaaatttaatttaggtcctttgtcagttaaaagttgattgtttctcgaattgttgtttactgtactgtaagagtttgaaatctgttaaatttaaattaggtcctttgtcagttgaaagtttggtcgcgacttgcattattgttcactgtactgtttaaagagtttgaatagagaatatctactcataataataaaaaaaaaaaaaaaaaaggcccctaaggacaaaaaaaccgatattcatttcggctgtgtgattcagcgctttcattntcaggagatcc

SEQ ID NO: 63990 - DNA, 623 bp, Zea mays
  unsure (1)..(623): unsure at all n locations
  Clone ID: MRT4577_15835C.1
cactacctgccagggaagcccgccgggccagctcattacacagagagatgattcagctgcacggcgatcaacgagaatgcgcagaaggttatcaatgncaggaaggggaagaatatctccaccaggcctccgccaaccacgtcgaccctccccatctccaagatattccaggataaccagacggatcaagcatcactgcatgacagagttcattcatcttactcacacaatcgacgcacatggttcaatgtacgaacgaggaaacacaacggtcaattgatgtctgataactttaatcatcaccgacaaaagatagaccagacaacactggatcacgacacccaaggatttgagctcatcactccatgatgacactgagccacacccaagcgagaggttgagcagatctatcaccttgcttggcccgcttcaccaatcttctacaagcaccataactgttaagaccatcaagaccatatgttattgataccctgaacatgctccgacttgtaaagagagttggagtataatcattttgttaacaaaaacatcttgatcctacatagtcgacacacttgagcatccctagaaccgaaacctacctgagtgcaatgttaacccaa

SEQ ID NO: 63991 - DNA, 223 bp, Zea mays
  Clone ID: MRT4577_158360C.1
gccggccgggccgggatacttacctggacggggtcgactggggatcaagaagccccgtggcctaggtcagtggcccgcattgcacatggcaggtgcgctggcttaccatctccccaagtgggagagtggacgtcataatttatggtagaggggtacgcgttcgcgcggcccctgtgttgactaaaaaaaaaaaaaaaaaaaaaaaaaaaaacaaaaaaaatta

SEQ ID NO: 63992 - DNA, 1452 bp, Zea mays
  Clone ID: MRT4577_158361C.1
atggcttattacctagaagcggttgatctaggtgtttggagagtcactcatgatgggatgaaaccacataagaatcccaagaagcttaccacgagtgacaaaaaagaaattcattcgaatactagagccaaaaattgcttatatgaatctcttagcatgggaattttcaatcaagtatttaccttgaaaactgctaatgagatttggctaaaattgcatgaactccatgacagcacatctaatgttcgtgagcaaaaacattgcatagtcttaaatgagtataattattttgctatgaaagaaaatgatcttgttagaggcatgtattctcgcttaaaccttgtgattaatgtgctcaactctattggaattaatatgcttggtgatgcgaacattgtgaggaagatcatctcccttctaccacaacaaagatatgggagcatcatcaccatccttcacaatcttgaggacttgagtcaaatgatcccgacaattgtgatcgaaaagattgcagcatttgagatgtcgaggaaaatgggtcaagaagaggaaccaacttcgtcaaagccatatgcttttgcatgtgatgagcacaaaagggtgaaacacaaaaagaaggctccaagctcaagttcctcaagtgaagaagagaaagaagaagatgaaaatgatgatgaagaaaatgatcaagcctcaacatcatcctctgaggatgaagaaatagtccgacacatcggaaaggtcaaagatcttctctttaatattgacaggaaaaggcaaaaaaagaggatgcttcgcatgtggggagaagggtcacttcagggacaactatccaaatatgaccgaacctacaaagaagaggagaaaaggcaaggcactcacaaccttgttaaaaagaatgaaaaacttaaggttaagttagctagctctcaagaagccattgaaaacttgctagagaaaatggaaattcttaggatacataataatgagctaactagtaagctagagagcatcgatagcaccctaggagcgtctttagttgaaatttatgaaattattaagaaaggtgcttctacttctagtttttatttaattgatgattctaatccctgcaatcaagttcttgttaagaatgttgttatagaaacatgttcgaatgagattgcaatggagggtgagcaattaaggcaagaggtggctcgcctaggcaaagctttgtatgacaagaaaggcaaagctaaacaaacccaacctcctcaggataacaccactgcgggagtgaacaagcgtgtggagggagaaatcgtggtttgtaggctatgccacaaggaagaccacaagtcttatcaatgcaaggtgaagcctagggagagcaaaagaaaaagacaacaaacaatatcaccaacacctacatcaacaaggtggacaaaaaggccgctacaccatatttga

SEQ ID NO: 63993 - DNA, 1804 bp, Zea mays
  Clone ID: MRT4577_158362C.1
cccaggagacggcggttgtgcgcgtagctatggcggttgacggaggcggcgcagcccacggcgtggcggtcgtcggcgcgcaccagagtcatggccagcggcaagcaccccgtcagcggcagcccctgcacgatctcgtgtttggcgcctcgctgcagcaggtcctcgaagaaggcggtgcccctctggacgcatcatggtgcggactagcttgggagggatggtgtcgcggccgacgactgtgtaggagccggcccccggccgggattattcgttgccgtacaccgacaggtttagcagccagagctcgccatgcatgtagttcgttaccatcccatttctttttacagtttcttggtccaggagctccaggtccagctagctagctagctagctagtatataaggacaagataccaccgcggtagcccggggccacagagtggtaagcatggcgagcaccacagacaaccgcctcgacctcggcctcctcctcctcctcgtggccgccgccaccgtcgtcctcgccgtggccgcggccccggcgcatacaccggggggcaatactgctacccctccgccgccgttccggacggtgtacgcgttcggcgactcgttcacggacacggggaacacgcggtcgacgacggggccctactcgttcggctacgtgtccagcccgccctacggcgccaccttcttccaccgctccaccaaccgctactccgacggccgcctggttgtcgacttcctggccgaggcgctggcgctgccgtcctacctcccgccctacctcgccgtgtccgtggccaacgccaacgccaacgccacggcggccggagccggcgtcaacttcgcggtggccggcgccacggccatcgagcacgacttcttcgcgcggaacaacctcagcatcgacgtcacgccgcagtccatcatgacgcagctgggctggttcgacgcgcacctgctccggtcctcctcctcctcctccgccgccgccgccgccgacgcgctcttctgggtgggcgagatcggcgccaacgactacgcctacacagtcgtcgcccgcgacaccatccctcccaagctcgtccgcaccatggccgtccagagggtcaccgccttcgtcgagggcctgctggagcgaggcgccaagtacgtgatcgtgcaggggctgccgctgacggggtgcttgccgctggccatgacgctggcgcgcgccgacgaccgcgacgccgtgggctgcgccgcctccgtcaaccgccagagctacgcgcacaaccgccgcctcctggcggccctccgcgcgctgcgccgccgccacccggccgccgtcctcgcgtacgccgactactacgccgcgcacctcgccgtgatgcggagccccgcgcgccacggcttcgccgagcccttccgcacctgctgcggctccggcggcggcgcctacaacttcgacctcttcgccacctgcggctcgccgcaggtcaccacggcctgcgcgcgccccgccgagtacgtcaactgggacggcgtccacatgacggaggccatgtacaaggtcgtcgccggcatgttcttcagtggcgacggctactgccgcccagcgttcaaggacctgctggccatgaaagcccgccaggggaagccgtgattttgagacaatcagaatgcacgttccaattacaataagtagagctgcatgcgtgacgaatccatgtcatcttcatcgtgaacccttaaccatttatcaggcatttataattggatccacatacgaaaaaaaaaaaaaaaaagcggcccta

SEQ ID NO: 63994 - DNA, 1350 bp, Zea mays
  Clone ID: MRT4577_158363C.1
cccggtgattcttacagctgcgagacgacggcgaagcgaatcgagaagttcgaggtgcgtcatgactccacctacatgctgcggattatcaacgctgcgctcaacacggcgttcttcctcaaggtggcagggcacacgttcaccgtcgtggcggcggacgccagctacaccacgcagtacgagacggacgtgatcgtcatcgcgccgggacagaccgtcgacgcgctcatggtggccaacgcgtcccctggccctggccgctactacatggcgatctcctcgtaccagagcgcggcccccctgcgcccagggagctacaacgctaacatcaccacggccgtcgtggagtacgtcggagcggcggcgtcggccggccagcaggcgccgacgccggcgctgcccgagatgccggaggtgaacgacacggccacggccaaccggttctacaccggcatgacggcgctcgtccgcccaggcaggcggaccgtgccgctcgccgtcgacacccgcatgttcgtcacgatcgggctgggcttcgtctcctgcgaccaggaccaggctccgtgcccggtcgtcgcgagcatgaacaaccagtctttcaagctcccagacgcagacaccatgtcgatgctggacgcgcggtaccgggacacgccggacggcgtgtacacgagggacttccccgaccagccgcccgtggcgttcgactacacgaaccagacggagcggctgctgctgggcggcgtcgccgcggcgctgctgttcccgggaccgcagtccacgaaggtgaggacgctggcgtacaacgcgacggtggaggtggtgctgcagaacacggcgctggtggggcgcgagagccacccgatgcacctgcacgggttcaatttcttcgtcgtcgcgcaggggttcggcaactacgacacggccgcgaagcagcacttcaacctcgtcaacccgcaggagcggaacaccatcgcggtgccgaccggcgggtgggccgtgatccgcttcgtagcggataacccaggaatgtggttcatgcactgccacatcgacgctcacctttccatcggcctggcgatggtgttcgaggtggaggacgggccgaacacaacgctgccggcgccaccgccggacctcccgcgatgctgatgagcctgtcccggtgtggcgcgcggtgcacgtacgtgtgccgtttatgtttcagccacggaaccaactgcatattatcacgatttgagtttgcgattgttcgagtgatgaaagtgtaaactacagccagtacgatgttcttttgcagcaccttttgttttctattaattgaatgtgaaaaaaataaaaaagaaaatg

SEQ ID NO: 63995 - DNA, 538 bp, Zea mays
  unsure (1)..(538): unsure at all n locations
  Clone ID: MRT4577_158364C.1
ncaggcgggagaagatgctggacaagctgtgggacgacgtggtggccgggcctcgcccggagacgggcctcgagaagctccgcaaggccaccaccgcccgcccgctcgtcatcaacaaagacgcggacggcggcagctacaagcgggcgcagtcgatgccgtcgaccccgacgacgccggtgacgctgncgntcnccncgcccnccttctctccctctccgctcgggctcatctcgattctgctcacttgcagcttgttctagctgaaacctataacctcgctctacatatatgaacgccgagataattctgcttcatcatcctggactgttgactactctatgctgcccaatgtttctcccatcaaaacttttcaagctcattttgttctatttagcaaaatgctacatcttgccctgtgcgctcttccttcttgtcttcatgatcaccatgaataccacaaccttttgaatgaactaactcttcaggatttgctcacttttgtgaggattccctttactgctcctgtgccccaagg

SEQ ID NO: 63996 - DNA, 396 bp, Zea mays
  Clone ID: MRT4577_158365C.1
cagagtgaaatgaagcaagacatacttggcacataagtataccaataccatgctaaaatcctggaagaaaaacacagctaccgattatagtgctggattaagcgccaatcacagcttcgtgttaaatgctcacctttacagaaaattaatagaggggtactagtggagaccggatttgcattttcccaatggtatcggtagccgacaaacaaattaacaaagggccaaacccccaaaaaatccccaaatcccatcccttggtacacggggggccatgggcttcagtgggacgggttaacttgctgatttgggctcgttttcaaccccccaggtgtttttaacaacggacataaattttggcccttggaatatcgttccgagcttttttaacccttt

SEQ ID NO: 63997 - DNA, 300 bp, Zea mays
  Clone ID: MRT4577_158366C.1
gcgccgagcggatgggcatctctcgggacaactggcacaagcgccgcaaaaccgggggcaagagaaagccctaccacaagaagcggaagtatgagttggggcgcccagctgccaacaccaagattggcccccgccgcatccacacagtccgtgtgcggggaggtaacaagaaataccgtgccctgaggttggacgtggggaatttctcctggggctcagagtgttgtactcgtaaaacaaggatcatcgatgttgtctacaatgcatctaataacgagctggttcgtaccaagacccggg

SEQ ID NO: 63998 - DNA, 261 bp, Zea mays
  Clone ID: MRT4577_158367C.1
ttttttttttttttttttcggatggctcataccgcgcgaagcataaatcgttaaagaaagttgcataaatatatacctcgtacatcataattaatgaaaaaaaattgtgtgggttcaaccaacaactgcatgcgtaaacaaaggattggaggaggttgtcgtcggagaacaccaccgaatcgaaggagttggtcatttaaggacgccagacgccatcaccggagacaaccacgcctcgcgccaccgccgaagccacccatg

SEQ ID NO: 63999 - DNA, 257 bp, Zea mays
  Clone ID: MRT4577_158368C.1
cagctcaccacggcgcagaatacgcagcccacgaaggcgacgaaaagctgccgcaccaccagcagaagagagcgacgctccgcgcgaccgagcgactccctagtccgtcgttatcagtctctctatctctcttcgcctccggatctcgcatgcgcggctaccaccgccgcgcccgacggtgaatggtgaggagttagcgaactgcctggaccctgagtgctggacgtcggcgatgtggcgagatcgcactggtgggg

SEQ ID NO: 64000 - DNA, 397 bp, Zea mays
  Clone ID: MRT4577_158369C.1
ggggatcaaaaaagccgggtaaccccctaagggggcccccaaattccctcaggaaggttccaaaaccctggtccctaaaaaaaaagggattttggccacccggaccctagatccccatccctgagttcaaaaaggcccccctcccaaatttctggaaccaattgaacccctgtttaggacaaccagacccttaatccccatccctgagttcaaaaaggccccccttccaaatttctggaaacaaatgaacccccaacttggagccggaaatttacatgacaaagtttcatgccccaaaaacccctacttaacatgtcccaaaaggcatcgggccaaaaccccaagcttccaaaataattcttatctgttcaggaaaaggcttaaccaaaaaccctgg

SEQ ID NO: 64001 - DNA, 596 bp, Zea mays
  unsure (1)..(596): unsure at all n locations
  Clone ID: MRT4577_15836C.1
ttggtgttttcyggtktttgcdggtgctgttggtgctgctgtckctctgctcttgcttttggtgtgcktagtgtttgatgttgttgttcktggcgattgtggtbtgkgtgttttctgakgtgcgagttgtatgtgtgatggtgtgtgtcgagttgcttcgatgtctgtcttttgtgncakcgggtgatgtsactgtgtgtngagggtgtggkatggcggtggagtkggcggtkgtgttggctgkagtgtggtkcgttttgttgtktgcgttgtgctggtgctgtcggttkgtkgtgtgygktgctgttggctcayggttgcgccngtkgtgcggtggagakntgatgtggtggtggcgtgctatgngcgttcatatattgtggttgtatgtgcgttgtgtgtggctgtgtgtgtgtgtgtgtgtagtgtgctgtgtgtgtgttggtgtgtgttgtgtgtgkcgtcgtgtgtgtgkagcgctgtcgcgcgcgtgtgcgtgtcgtgcgtgtgtgttctgcgttgtgtagcagctcgctgtggcgaggtggtngctgcgcgctacgggntttgtgttgtgtngcgtgctgtgtcgtgtg

SEQ ID NO: 64002 - DNA, 248 bp, Zea mays
  Clone ID: MRT4577_158370C.1
gtttgttctggacgtgagagctcatgctcatggcagggcccttttggaacataggggttacacctcccaatactacaaccgggggcagactgttggaagtatgcgcgtctagtgtagatagtcacgctgagatactcggatacgactcactggctggtgggaggctggactgccaacacggggtggttccttgggatcctgcgggggtggaagcggactaagctggtgtttttggtcatcctggtggt

SEQ ID NO: 64003 - DNA, 356 bp, Zea mays
  Clone ID: MRT4577_158371C.1
gcggcggtatcgtcctcggcggcggcggcggccctggtgctggcgctggtggcgctcgtcgtggtgccggccgtggcgctgctggtgcggggccgctggcgccgggccgcggcgcggagggaggaggtgcgccgcctcgcgcgcctggctgccgaggagtccgagctggcggagcgcgagtccgcgcttgcctactactccgagctgttcccgggcgtcgtgcacgccgcgggggcgcccgagtggggcccaccgccggtggcgatcccggtcccggcgcagcaggagttcgacgcgcagccgcagccgcagccgcagccgtccgtcggggcaaagggggtctgtgcggtgtgctt

SEQ ID NO: 64004 - DNA, 459 bp, Zea mays
  Clone ID: MRT4577_158372C.1
ccgggaggcgtagatactagatccgtggccgccatatatcccattcccttacctgccctcgagccccgccggatctgcaacgagccgtatctgccgagatccaagagatatgccttgctatgaccatcgctgtggaggcacgcgcttgattgttgacaagttggccgcacgaactctaactggtgatttagaatatctgctttagcagatatggaagactactataagcggagttgaagggcgactatgcctttattgagttcagagaacatggagacggcgaagaagctcgggaccagctaaatgacagggatgccaatggaagattcattgatgaagagacagctaaaggcgtcccacgtggcccatgcgtatcacgcaaatatatggtaagaggccctccgccacgcacaggaagaggtgtcacctgaggaaaggatggtcactgaacaagagact

SEQ ID NO: 64005 - DNA, 343 bp, Zea mays
  Clone ID: MRT4577_158373C.1
tttcggatagttcattgttcaccttgcaacttctgccgcatcgctggcgtctgtctgcttgttgtccttttcctttctctgcttctgttgtagcaccgcaaagagctggtctctgcgtatttatgcgtgactaagaacctcgagaaaacacagcgtcggcgctgatttctatgtacatgagactcgctggactggaaacggctcttggtcactattccttctctcttgtcctgtgattgacacgaacgactattcgctctctatttctatttgaacagatcccccttgcgactgcgaggttgatctccctgatgtcgaaaaatcatgagcactgtgttttttt

SEQ ID NO: 64006 - DNA, 1840 bp, Zea mays
  Clone ID: MRT4577_158374C.1
cccacgcgtccgggtacggcctcgtcggccccaacggcatgggcaagtccaccctgctcaagctgctggcctggcgccaggtccccgtgccacggaacatcgacgtcctgctcgtcgagcaggagatcatcggcgatgaccgctcggcccttgaggcggtggtcgccgctgacgaggagctcactgccctccgagccgagcaggccaggcttgaggtctctaatgacgctgatgacaacgagcggctcttggaggtgtacgagaagctgaatctccgggactctgatgccgcccgggcccgagcgtccaagattctcgcggggctggggttcgatcaggcgatgcaggccagatccacgaagtccttcagtggtggctggaggatgcggatttcgctcgcccgtgcgctcttcatgcagccaacgctgctgctccttgacgagccgactaaccacctggatctgcgagctgtgctgtggctggaggaatacttgtgctcgcagtggaagaagacattgatcgtcgtgtcccacgaccgcgactttctgaacacagtgtgcaatgagatcatacacttgcatgataaaagcctgcatgtctaccgtggaaactttgatgattttgaaagtgggtatgagcagaagaggaaggaaatgaaccgaaagttcgaggtgtatgagaagcagatgaaagcggccaggaagtctgggagcaaggccgcacaggataaggttaagggccaggcgctatcaaaggctgctaaagaggccgccaagaacaaggggaaagggaagagtgctgcagatgacgatgatgaccagaaacaggtggctgtgccgcggaagtggcgtgactacagtgttgagttccatttcccagagcctacagagctcacaccacctctccttcagctcattgaggtagggttcagctaccctggtaggccagacttcaagctctcaggtgttgatgttggcattgatatgggaacacgtgtagctattgttgggcccaatggagctgggaagtctaccatacttaatttacttgccggtgatcttacccctactgaaggcgaggtaaggaggagccagaagctgaggattggacgatactcgcagcattttgttgacctactgacaatggaggaaaatgcagttcaatatttgttgaggcttcacccggaccaggagggaatgagcaaagcagaggctgtccgcgctaagctcgggaagtttgggttacctggacacaaccatctcactccaattgttaaattatctggcgggcagaaggcccgagttgtgttcacttctatatcaatgtctcaacctcacatactcctgcttgacgagccaacgaatcacttggacatgcaaagtatcgatgcattggcagacgcgctggatgaattcactggaggtgtcgtcttggttagccatgactcacgattaatatctcgtgtttgtgaggatgagcaaaggagcgagatatgggttgtggaggatgggactgtgaacagatatgatggcacgtttgaggattacaaggatgaactcatggaagaaataaagaaggaagttgaagaataatgctgctccaagttagttgtgctttgctgtttatttatataacaggctgttttcttgaactgaaattgcatgtactattaccgagttctctttactctggtttgcagagtattcatatatggttacaactttgtaaaaatggggcatgcttgttttatgttatacaagaggaacctgagaatatggtattatttgtttgtatcttttgttctgacatatatgtgactggacaggagcagtacttctcg

SEQ ID NO: 64007 - DNA, 374 bp, Zea mays
  unsure (1)..(374): unsure at all n locations
  Clone ID: MRT4577_158375C.1
ctcacgcgtccgaggagcgcgtgcgccaactgtcactgccaggagcctatcagatcaagactgcgattcttcgattccaaacagaatcatggtggcgtttatggtctgcagtggtgccatgaaggtgtctagctggaccacctacttcagctctggcagcttcttttactggggcaatagctctagataaaacgctactcgggcaccggagctggagttgtcctaccacgacctgataccaccgaatcacatgtctctcgaaggagaacgcacctgcaaaacctgaagctcaagtgctgctattaagacagcgtgtacggattcaacgctaatgacttccaccggcggngctactttaagggcccctgcatgtg

SEQ ID NO: 64008 - DNA, 486 bp, Zea mays
  Clone ID: MRT4577_158376C.1
ccctctacatttgccgcccgtgttgggggtttttttctaaactgcgcatattaattaaggtgcgcacgaacccaacatcaacatataggatatacagagatgtcctcaaccgttacagtgaacaatcttgtttttctcttgaacgagtgtacactataactaagaacaagcattttttttatacggtgttttttggcacgacaacaaaccatgttttttccacgccagattaaatgaacaaaccgggaaccatgatatgactttatcaggaaggcacagcagcacaattcacttgcgagctcaagcggctgccgccagctgccgaagcgcgtgcctgaagcatcattggcaaactacgccgatgcggaccggggccccggcatgacctccttggctacgtacgagcgcggcaaagcgctccgcccacctggccagccgcgggacccggcccgagtccaacaaattgacgcccaccaccttgtccca

SEQ ID NO: 64009 - DNA, 562 bp, Zea mays
  Clone ID: MRT4577_158377C.1
ggggggtgggggggttttaaaaaaatttttttttttttttttttttttttttttttttttttttttttttttaaaaaacaaaaaccccaaatttacaaccccataaaaatggccaacgtggccccaaacccctcccccttaaaggtcccatgcggggggggcctataaaaaaattttttttaccccccctttaataatccaccccccataataccccaatcttttaaccctttcccaattcgtccacccttttcccccttttacacattttttaaaacaacccaacttttttaatacaaaaaaatgagtcccttccaccccccggtatatcccccctatttacattatcccctttcccacaatgaaacaaaaatatccctttattttccttttcaaaacttttgttcgaaccattcttcctaaacccttttttcacccccttgtgcattttcaaaggaaatctccacaagaaaaaaatttattgcccttgaattaaaaaaaaatccccctaacaaaacaaagccccattcatatggggataaaaaattcctcaagggggcct

SEQ ID NO: 64010 - DNA, 384 bp, Zea mays
  Clone ID: MRT4577_158378C.1
tatcttatcacaattatgctgaccacgaaacttacccacactagcactatagacgcccaagaaattgaaacaatttgaaccgttttaccagctatcatcctcattctaattgccctcccatcccttcgaattttatatataatggacgaaattaacaacccgtctttaactgtaaaaacaataggccaccaatgatattgaagttacgagtatacagattatgaagaacttaattttgactcttatatagtgcctacaatagacttaaagcccggggaacttcgactacttgaagtagacaatcgagttgtattaccaatagaaacaccaattcgtatattaatttcatcagaagatgtactccattcatgagctgtcccatca

SEQ ID NO: 64011 - DNA, 259 bp, Zea mays
  Clone ID: MRT4577_158379C.1
cccactcttcctgtccaaacatattagatgctgctcttaaccaacctatccagcggagggttttcttctatattacagatattcaatctatactatagactctacaataatgaccaatacactaagcagacagaatttaaaaatagaattctcagatatacaactgtgcctcctattccatgaacccccatatctcagcaactcattctatagtcttaccactgtaaagacaactattcataacaccaatttcatatat

SEQ ID NO: 64012 - DNA, 365 bp, Zea mays
  Clone ID: MRT4577_15837C.1
ggcaggcctaggcgtcttatgatagctctaggaaatgggggggttcaccatcatgattctgctctcgatgagcaatattgatgttagaaagagcggggtgtaatcagctgaaggcacgaactaacgccgaaatctcagtattactggagtgatggaaaatgattaatgatcctgcagctactgctgtattggacccataatattaataaagaatggaaaaaatggaggccaaaaaatgtcaaatggtgctattagacaaaaagactaagaatctggtaatgatttataagacggaacctaaggtcattaaaccttataatatgaaagacttataataggctgtctaattatgcggatacgtctac

SEQ ID NO: 64013 - DNA, 171 bp, Zea mays
  Clone ID: MRT4577_158380C.1
gttgaaagcagatgtgacagccgttttaacgttcgtcttcactccagatccaattgcaaacgcgaactatcatgggggtgctcctctgcatgatattgcaaagcaaattgctacatacaatgctaccagcccatcatcactgcaacacaaggcacggacgacaactactac

SEQ ID NO: 64014 - DNA, 608 bp, Zea mays
  Clone ID: MRT4577_158381C.1
gaataacttccaccgaccacccctattcaacagacttgtctaccccccacttctttgtaccgaagtcgttcctcctctcgcctcacaacaacacgatcttgtgggcacgtgctgccgcgtcctcgtatgcgggtataatctccgacaagcagggaaccagtgctaagctcgccgacgatgtacgcctgtgccaagtcgtcgtcgtccatcgcgatggaggtctttatcgccgttcacattttgtgctcggcgaccggaggttcgcgtatgagattgcgatccgtttttgagtttcgagggatcgacgatcaggcttctacgaccaaatgattacgatcttcaagttttacaaggttgaaaaccctgagcatctgtttggtgaaggttgcctttggtgcaatctatgctcaggtaaagaagaaggcatcgaggcggatctccaggagttccaggacttcgatgagttcgaggattaggctagcgacctcccccagtcagctgcctgtggagggttaatttacgttggctacgtttctattatgtgcactttgatttatattatgtaaatgactctggtctttaatattattaattactctttactggcg

SEQ ID NO: 64015 - DNA, 224 bp, Zea mays
  Clone ID: MRT4577_158382C.1
atttagggtcgtttcgagatactctctgtctgggtcgtttcttcaatcagataacagtggccatcacagtcgaactggtgggcctgctagcgtccccaatggttgtgtcctggttcgtgtggtagtgttgtcggacttttgatagctgattcgccagtacagatcatagtggaagcatcatggatgtttaatattgcagtccaaggtaagaaagtattgcagaa

SEQ ID NO: 64016 - DNA, 744 bp, Zea mays
  unsure (1)..(744): unsure at all n locations
  Clone ID: MRT4577_158383C.1
aattcggcacgaggcccattacacccttgtggtagcactgttttctcgagtggtcgctccatgttccaattaacactataatcttatcatgaataataattaaaccaacaataataatggaacatgatcataatttagatataatattaattccaaaactaggtagagcaataacaagactatccaataattcatttgtttgaaggtgtagggtgaacaaaactagggtaacctattaggtctcatcaaattaacttgggcatgtcacggtgattatagagaacattttaggtaaagaaaagtgatcaagggccacttgcttttctggtgcaattccaggtatttctccaattggagctttagattcctcgtaacctcgcttctacacatagcaatacatatagacagacaaagaataggtaaaaataacattacaccaaagatggaaacaaaccactcaacaatattctacacgttgctatgagatcgaggttcgagaaccactacaattggagctagaacgaagaagttattgattttatgaactttctagaattattcttatatgcaaaaatcattttcagattttattttatattaattaaaaattccttggacgatgggttaggtattctaaaagtctanggttctatttctaaaaagtattgtattttgtatttcggncttctactgaccttgttcatcttaatatagtttaaggcgcagttcccctgcgctgtcgag

SEQ ID NO: 64017 - DNA, 939 bp, Zea mays
  Clone ID: MRT4577_158384C.1
ggccgcttttttttttttttttttcgcaaaaaaaactcatctcttgattttttttcaaatatatatatcccttgagcgcttggtcagaccttgtcacctagtggtcgaccagacgatgattaattgttgatcaggttgcccttacataacataaccagttaacaattatccacgatcagcagcactacaataacaccattaacccaggcaaggagaagatagagcccatttagtaacagcacaagcattaatccagtcagatataactgctacggctaacttatacatcataacttgcttagtgttaacataggtataagttatacaaaagcatgctaactacactagctagttttttcagcgatgccattctcggtaggcccctcgttcttcacttcaagtgcctgatgagttacctcgctcattggttgaggaactggcaggcttccgaaatcttgtgggaagaactcaaaatctggcccgaagttgaacttgactacacagtttggctcgttaggcatcgtatacagtgacgcggctgggaaatacctccctccaggaatgtccttgaaggcgctgccttggcatactccattcttgaagtagcatatctcacttccagggacaggatccggcgtcttctgctcctccttggggacttggacgtgaaaaggcattcccttgtactgaatcaggtcaggctgcttcggttcataccgctccccatcaggcagagaaatgtagaaccccaggacatctccttccccgtacccttcatcagcatacttgtccctccaagccttagtcaccttggcgccatcgacgtcacggtacccaaacccataggcgtcgaagccgacgggcgtctggaggtcagccttgttggtggcccatccaaggcgggtgtggccggtggggccgaggtgcacgaccttgacc

SEQ ID NO: 64018 - DNA, 2209 bp, Zea mays
  Clone ID: MRT4577_158385C.1
tggttgttgatcaggatcccctgctgctccctccactcaccacccccggccgagcgaattgaagaagctccccctctgaactgaagcaatggcagacggcaatgccggtggcgccgctcgagtcctgttctccatcctcggcctggcgctggcgctgccgctgccgctgctcgtggccggcgacgacccgtaccggttcttcacgtggacggtgacctacggcgacatctacccgctgggcgtcaagcagcaggggatcctgatcaacaaccagttcccggggccgcagatcgaggccgtcaccaacgacaacctcatcatcaacgtcttcaacaagctcaacgagccgttcctcctctcctggagcgggctccagcagcggcggaactcgttcgaggacggcgtggccgggacgacgtgcccgatcccgccgggctccaacttcacctacatcatgcaggccaaggaccagatcggcacctactactacttcccctcgctggccttccacaaggccgccggcgggttcggcggcatccgcgtgctcagccgcccgcagatccccgtcccgttcccgccgccggccgccgactacaccgtcctcatcggcgactggtacaaggccaaccacaccgacttgcggtacgtgctcgacagcggcgtggcgctcgggttccctgacgggctgctcatcaacggccggggcttgaatggctacacctttaacgttcagcccggccggacgtaccggttccggatcaccaacgtggggctggccacgtccctgaacatccggttccaggggcacaccatgaagctggtggaggtggagggctcgcacaccatgcagaccacctactcgtccctggacgtgcacctgggccagtcctactccgtgctgctcaccgccgaccagccgggctacgactacgccgtcgtcgtctccacgcgcttcacgagccggatcatctccaccacggcggtcctgcgctacgccaactccgccggcagggcgccgggtcccctccccggtggccccaccatccagatcgactggtcgctcaaccaggcccgctcggtccggtggaacctgacggccagcgggccgcggcccaacccgcaggggtcgtaccactacggcctggtgccggtgacccggaccatccgcctggccaactcggcggcgaccatcggcgggaagcggcgctacgcggtgaacggcgcgtcgtacgtgggccccgacaccccgctcaaggtcgcagactactacaagatcggcggcgtcttctccgtgggcaccatcgccgacagcccccccgcctacggcggcgccgcctacctgcggacgtcggtcatgggcgccagctacagggactacgtcgaggtcgtgttcgagaacggcgaggacgaggtgcagtcgtggcacatcgacggatacgccttctgggtcgtcgggatggatggagggaaatggtcgtcggcaagcaggcagggctacaacctgagggacggcgtttcgcggtacactgttcaggtgtaccccagatcgtggacggcgatctacatgcccctggacaacgtgggcatgtggaacgtccggtcggagaactgggccaggcagtacctggggcagcagttctacctccgcgtctggacgccgtccacgtcgttgcgcgacgagtaccccatccccaagaacgcgctcctgtgcggccgggcggccgggcgccggaccaggccgctgtgagagtgagactgccgccggatcattcacagcttttgtcatgagaggatgacacggtattggtttggtctttggagaagagcagggacatacacaagtttatataccctcaactgaagggaggttcagaggaacgaaagtgttgcttgccgattttttttcattttagtttttttttcctttaaaatttcatatttacgtctccgctgaactaaaaccgtgttggaatttatgggtcaacactataactcatactcccttcatcccaacatagtatttgttttagagtgttaacgaaaaaatacaatatttgatgtatgtgtatcatacatgtgtctagatttaccgttatctatttaaatctccgctgaactaaaaccgtgttggaatttatgggtcaacactataactcataaattccaacacggttttagttcagcgcggacgcgtgggcggacgcgtggg

SEQ ID NO: 64019 - DNA, 474 bp, Zea mays
  unsure (1)..(474): unsure at all n locations
  Clone ID: MRT4577_158386C.1
gaaagactattctaagcgcgagcgacgacgacagcctcccctaggtgcgagcggtggtggaccccagagacgagggtgtgtttggttaaggagttgaggagaatgggggcttcattctagtttctggatgtttggttttgtcggcgtttcggacccgcgaggaccatcaaccgactagtgaatttattgctgcgtgcccctgcccagatgggttgatgcaagatggaacacaagcgggggaatgaggcttatattatcttgcaccggggtgctcgtagtaggggttacaagcgtcgcgagagagcgagggcgggagcaagagagagacagagagtccctacgtgtgtccgtctctgcctgtctcgtctgccaaggtgcgtccacctgccttaggaaggccctggacatccccttttatagatacaaggagatngccagctgtatatgggnggtgtagctatgtgataacgtggc

SEQ ID NO: 64020 - DNA, 410 bp, Zea mays
  Clone ID: MRT4577_158387C.1
agaaccaaaactctaattatttttatataataggggaaaaaaaaagaaagaaaaattcttccataaggggtagattagcttttagtacctgggatcacccctaacctctgggaataatacatggagaagatttaaccagttacacaattacccaagattacaggaaaaacataattatgttttatgaaacataaagactatatgctcttggcacttattttacctccaagctgaagcaacggtttagcttttcttctcccagcaaaaatggaggccacccctttctttttttagcttggacttattggaatattgttggtttatcagggtttggatattggggggtactttaacacccattgggtttggagtggatccagccaccatcatccttggtcttcattttcccg

SEQ ID NO: 64021 - DNA, 173 bp, Zea mays
  Clone ID: MRT4577_158388C.1
tcccacattaaacacattttttaaagcacaggccccagttgtggtctcctatcaatttgcttattgcggggttctaacttttttggccaaatcaaccccattgtgaacagtattgcgggcggggccacccccttgggtaacaggggccttttcagccagggtccttttcccct

SEQ ID NO: 64022 - DNA, 281 bp, Zea mays
  unsure (1)..(281): unsure at all n locations
  Clone ID: MRT4577_158389C.1
aaagcggccagttcggggggctgatgccggctcacttagcccagcaactgacggcgatgtggggcgtgcagcatacaactacatgcccgtacgctgtttccgacggtgtcccccactgaagaaactatgtgccgcnaaataaccgctggctagctagctagttgagtcatttagcggcgatgattgagtaataatgtgccacgcatcaccatgggcggcagtgccagcgtgagcaatgacctgaatgaccaattgaaatgaaatgaaaaacgtattgttcc

SEQ ID NO: 64023 - DNA, 735 bp, Zea mays
  Clone ID: MRT4577_15838C.1
ggaggatccacgcgtacgatatgttcatgaaatgatcaatgagatttaaaatgaaagataacataagcttactcaacatcggcggttgtcgtgccgtactggcacatcggaccgagtccgacctgtcgcggacgctcgtcgccccacggtccgatgcctaggcagtggtggcggggtggacctcacaggagtcaagtgggagatcaagcggcagttcgacgtgtgctggggctcaccgcgctgtaggcttgccacgaaccacatcaccagtttctatgaggtgacaaagtatgtgtttagccagagcctgaccactctggatttggtggagttttatctagcaaaattacaaatcaatggaaaagaaggcaaacaatggaagcaggggaaggatcggtacatatggttctaatgacgaagtttctgcatgtacaatcagagaggaaggccttgattatccaatatgttgagaatccttccactttgtggagaatgttccctatgtcttgtgcagtgcccatgcaatgtgcggaaacttgtttatattttttacatttgaagcggtgataatgtaaaatttatttataaagtttatgtgtgaatagttgagttcttaatcctttgcaattgccttagtattcaaatgtttgcaacataaatgtattgaataatgtgtatggtacttcatggtcaagatttgggcgtgtttgaacacttaccctctttttcataaaa

SEQ ID NO: 64024 - DNA, 198 bp, Zea mays
  Clone ID: MRT4577_158390C.1
aaaagatgcgaattgtgtttaaagacaacaaaaataattttttaacaaaaaacgttttgggacaaaagggcctacacgaactaacgcgcaaaatacactttaaagccgtttaaacactattaaatgccccacgccgattaaaagccaacgcgtccgcccaaaagtccacccacgcgtccacccatgcgtccacggaat

SEQ ID NO: 64025 - DNA, 1894 bp, Zea mays
  Clone ID: MRT4577_158391C.1
ccggccggggaggaacattcccttcgcacaatcgtactgttcccctcaaaccccagccagccatggcgatcgcggcggattctgccgccgatcaagacccaaaccctatacccaacgaggccgcgggcgaatccgtcgagctacccgcgtacactgaccacggggaacccaatgcggatcttgctgacgtggactacgaggatgaagaggagctggacggggtgacggcggaagcggcggcgagagacaaggtgcaggcggtgttccagcggctgtcggaagcccccgttggcatccgcgtccacgacattatcatcaaaggcaacaccaagacccgcgacgcgctcatcgaggcggaggtcgtggggctcatccgctccgccgtcaccgtgcaggacctggtgcgcaccgccaacatcgccgccgtgcggctcaggctcctcgacgtgtttgactccgtccacgtcctcctggatgctggccctcccgagctgcctggcaccactaacgttataatcgaagtcgtcgaggctgctaaccccatcgatggaagcgtcggctgcttctccaagccggaggcaaggtcatggacagttgaaggatcagtcagatggaggaacatatttggttatggtgacatctgggatgcttcgggagcatatgggtgggaccagtcatcagagataagcattggagtatccttaccaagatttagatcgataccaaccccctcgactgctcgggcatcactcttgtctcatgactggctgaaattttcatcatacaaggaacgtctgcttggcctatcctttggtttgctttcggacatgcaccatgatttatcttacaatctgacttggcgtaccttgactgatccttcacaatcggcatcaaaatccataacaagacagttaggacataaccttctttctgcattaagatatacatatacaatagatcaaagggattcccatctcaggccaaccaaaggatatgcatttgtctcaacttcccaagttagtggtctatggggcagcaaaggattgagattcttccgccaggagtttgatattcgcggggctgttccattgggcttttacaatgctgccctaaatgctggcatctcagcaggggtgattttaccgttggggagggggtttatggaatcaccttcatctgtacctgatagatttttcctgggagggcattcttctccagtaatcagtctttgtagtttaacttccctactgggtttcaaaacaagaggagttgggccaacagaactacggagaattgtcccaagtgaatctgtgacaaatgaatccacagcctctccaggatgggactatttgggaggtgatttcgcagtttctgcatttgctgatctatcctttgatttgcccttaaagttattccaggatgctggcatacatggccatgcattcctatctgctggaaatctcgccaagttgtccgagggtgagttcagaaatttctcgttttccaagttcgggcgcacatttaggagctcagctggtgttggcattatcttacccactaagcttcttcgtgcggagataaactaccgttatatactgaagcagtttgagcgtgatcgtggaaagactgggattcagttcagtttttcgtctccaatgtagatgtcatgtttgtggttctccctgactatgaacaatgcaatgcttaatcgtgctgagcatttccgctcgttctattttggttctggctgaatcatctttttaactaactaggagtccagcaaatccatatccagatgattgatcttttgtatcatgctcgttgttgaccattagaactggaagagttgccttgctgacggttattgtgaactgtgatggtttcatggtcgact

SEQ ID NO: 64026 - DNA, 326 bp, Zea mays
  unsure (1)..(326): unsure at all n locations
  Clone ID: MRT4577_158392C.1
ccgccctcctaagagagaggaggacagctgggatgtgtgacgctgagactgcgtcgcatgtacctcgcgagtgattgttcgcgtgtagagaggtggtggtggtcgttgangcatgnangatgccggccgtcggcagctcgttagcatgctcgaggagattagttcctcactaggccataagctatatacatggcaatccctgatgctgaaagtatactaacgcatccatgctgtctggtgtagagattgctatccaagatgtacggctagcgagtatgcatgcactagctagtagtgcagcaagcgtgtagtagcgatagagactt

SEQ ID NO: 64027 - DNA, 356 bp, Zea mays
  Clone ID: MRT4577_158393C.1
cagtgtttccaaccagggacggcgccaattattattggcagagacctgaacgacatggcaatttacatatggctccctgcgaacaactaccaaacgaaaacctgcaaggcgaccacaccgctgggcgaggggcaaactgtagcctatgcagcggacactggatacaaaatgcatgacccaccatccacatcgtaagtgtggatgtagggcaccgccattggaccctgaaccaccacaaggaaagacatcggctcatgaagaccacatcgcacatgggaggcagtgttactgacagcattgcatgctttaagcgtggaccccggcatgtcgcacgagtcatgaaacttatgcacctg

SEQ ID NO: 64028 - DNA, 535 bp, Zea mays
  Clone ID: MRT4577_158394C.1
cctcgagccggccgggacatgacacagactataacatgggcgtctctgtctccaccgcttccgctctctccggagtctcccgtggcgcagacagccgccgcgccgtcgcagcagcttaaatcccgatggcctcgcgcgccgagcgccagctctagatgataatcctctggaatagtagaggtaggaacaactgcatggatgaaccactgatgactgacatagaagagcaacaagaacgacaacggtaccatcgtcatggattgcatgcaagcaggcgcagttccaggaaaggatcttcactctgtcaatatggtacactgctgcacaataaaggattaagagtctcactgccgcattctaccggccagcaccattgcagtgtcgtatgctatgatggaaattctatgagatcatgtgacaacctgaacaactggcgaaaagagtatctaattcaagctaccccatcatatcctgataatttcccttttgatatattgtgtaacatagctgatgcagatggaggcaacagccgcgt

SEQ ID NO: 64029 - DNA, 416 bp, Zea mays
  Clone ID: MRT4577_158395C.1
attcggctcgtggttcatgatcaacgactcgtaataccagacacggtggcccttaacgtaaagtcaatggacaatgcttatgccttgtttcgtcataaagcagccactgtccggatcagatgcggtgtctgatcagaatagagagtgtttctcaaggtctggtgtggctcggccatgatgcgactgcaagatggttgcttgattcagcaggtgaactctcacaagctcttgctattgcaacacatagagctcatatacccagggattagaagatccagatggctcgagtttaaaagccctctacatcattaccggtgatcttatgcggcattggaggttcgaagctcggagtagacagggcagcgagcggagcgctccaggacatgaccttcctagtgggggtgcaagctacgatg

SEQ ID NO: 64030 - DNA, 719 bp, Zea mays
  Clone ID: MRT4577_158396C.1
gtggtacgcctgcaggttccggtccggaattcccgggtcgacccacgcgtccggatttagaatttattaaaaacaacagacatctcaactgcagcttttatgttttccatcttcgagttttgcttattttctcatcctctgagactttctgcttaggagcctgtcactgaagaattatctgatgtttagaacattgttgtacttatgaactaattctggaaatatctttgctgtgggaatctcccatctgcctaagtggttggaattgctttctatagtccatatatacacaagtagatcttgcattccaataaactggtacttttgcttaagcttacagccatatttaatatagtgtgaggaattttaagctttaaacatgctatcctacagtgtagtactcaacttgattgtttaaaatatttttcaaagaacaataacaaaggcaaaattatttatttggacatctcatattatcatcttttaaaacctaaattaatgcttagctataaccttaatttatataattttctaagtgagctaaccaggatttgcatgtatatcatttgctgaaagcgtcaaatctagacgcttaaatcatccttctaaaatgaatatgctattatggatattggttgataaacagcgatgtttgtaagtgtctgctatcttgatcagttgaaggcagtcacctaaccctgtagagatttctctgtaca

SEQ ID NO: 64031 - DNA, 326 bp, Zea mays
  Clone ID: MRT4577_158397C.1
atcataccaagaagttatacatgtattacactcaataacaagtgacagctacacgcaaagacagatttaaagaacatgtttctcatatgctcatgcttgcctggggtggttatggccccccaaaacagctatctgaggagctattttacacactgagagaaaacagggatgaccactagacactgtatggatgatgctatacagattgaccaagaggaggtgtcaaaaatttcatgatcaaagcaataccatctactaatcaaactatcccaccgttctggctgcaaaccgcactaaacaagcaccaagtgtcagaacctgcattc

SEQ ID NO: 64032 - DNA, 221 bp, Zea mays
  Clone ID: MRT4577_158399C.1
gtcttccttttgtgtcgtggcgaccactgggggggctttctcatatgcgacctagggcaagttgccaggtcgtattaaggcactttgcccgcgaccaataccacaagttttcaagcagtggacactttctttggtatcaaaaggtcaatggccaattattaatatgacctccatgacattgaccagattgtagatgattattatattgattatcccatttt

SEQ ID NO: 64033 - DNA, 644 bp, Zea mays
  Clone ID: MRT4577_15839C.1
cattgggtacctcgaggccggccggggcgcacatgcaagagcgcgagaggttccattccatggcggcgccgcgcggccttctcgcattgttcgcggtggctgccgccgctacggcggcggcgacgggcgtggacgcgctcggggtgaactggggcaccatgtccgcgcgccggctcccgcccaaggtgatggcgcgcctgctcacggacaacgggttcacgaaggtgaagatcttcgacgccgacgagcggaccatgaagggcctcgccgggacgagcatcgagacgatgatcgccgtgcccaacgacatgctcgcggccgtcgccgactacgaccgggcccggcggtgggttagggacaatgtcaccaagtacaccttcgacggcggcgtcaacaccaagttcgtggccgtcggcaacgagccgttcctcagggcgtacaacggctcgttcgaccacgtgacggtgccggcgctcaggaacatccagcgcgcgctggacgaggccgggcacggcgcggcggtcaaggcaacggtccccgtcaacgcggacgtgtacgattcgccggcgagcaacccggtgccgtcggtagggagggtccccagcgacgtggggcggttcatggtagaaaaggtccgcttcctc

SEQ ID NO: 64034 - DNA, 378 bp, Zea mays
  Clone ID: MRT4577_1583C.1
atccactcacacgcgatccctagcagtggctctccctatcagccccgctactcagcttggttcggcgctgtagaagcatctgcgatgccatccgccgccacttgaggccatcatctccggattctgcagccggattcagagatcctctagatgtcttggtcccgctcccgacgacatcctcgtctgcacctacttcgacagcttcttggacacaaatgctgctctttaagatgcttgtgaacaagtgatcgctggggaacaatattgtgatgttcctattgggctgcacgtaatccgtggagagaacgatgctttactcggagaatcagatcgcgaaaaggatcaactccctggtcacatgacctgcggttcagaagc

SEQ ID NO: 64035 - DNA, 1187 bp, Zea mays
  Clone ID: MRT4577_158400C.1
ttgtctgtctaccgtagtttccatttggtctggtcgtggggtgtgttaatttgttgtcccggcacatttgtgaggtcctgggcagtgctcgctggttcatgccagccgcatttgttgcgtggaataaacgcctgcccatattgttcatctttcatcagagttcaatgcaatgtttcgttgtctgtctcaaaaaaaaaaaaaaaaaaaactctgtttttctctctcctgccaatcccctcatcgcctccgctcccacgccgccgaatccgagacctgatctcggattcaccgcagcgacgcgaccaaaccctcaggcgatccccggcacctcctccccgacgcttcagccatggcaggaatggcaccggaaggttcccagtttgacgctaagaactatgattctaagatgcaggagctgctgaaccaaggtgagactgaggagttcttcacctcttatgatgaagttcatgagagctttgatgacatgggtctccaagagaacctcctcagaggaatttatgcttatggttttgagaagccttctgccatccagcaaaggggaatcgttcctttctgcaaggggcttgatgttatccagcaagcacaatctggaacaggaaagactgctactttctgttctggaatcctccaacagcttgactatggtttggttgagtgccaggccttggtccttgctcccacccgtgagcttgcacagcaaattgagaaggtcatgcgtgcacttggtgactacttgggtgtgaaggttcatgcatgtgttggaggaacctcagttcgtgaggaccaaaggattcttgcaagtggagtgcatgtcgttgttggtactcctggtcgtgtgtttgacatgctccgcaggcagtctctgcgccctgacaacatcaagatgtttgtcctcgatgaagctgatgagatgctttcccgtgggtttcaaggatcagatttatgacatcttccagctgctcccagggaaagattcaagttggtgtcttctctgctaccatgccccctgaagcccttgagattacccgcaagttcatgaataagccagtgaggattcttgtcaagagggacgagctcacccttgagggtatcaagcagttctatgtcaatgtggagaaggaagagtggaagctcgacacactgtgtgaactgtacgagactcttgc

SEQ ID NO: 64036 - DNA, 1389 bp, Zea mays
  Clone ID: MRT4577_158401C.1
gccatgtacttctgcgtgtttggtttcctaaagaggcacatcatcaagcaaataggctcacggaggatacggaaaccgtttcagattgttggagaagatagatcaacagcagctgcagacgactacatatatgaagatgattctgtgaaaagatcaatcttgagctcaccattagttgagttcagcagtgtttattcagcaacaaacaatttcagcgaaaagcttggcgaaggtggatttggcccagttttcaaggggatactacctgacggccaagagatcgctattaagaggctatctaagacctccgcgcagggactggaggagttcaagaacgaggtgacggtgctatccaagctgcagcaccggaacttggtgaggcttttcggttgttgtgttcatggagaggagaagatgatggtgtacgaatacatgcccaacaagagtctggactcatttattttcaacgaaagtaagaggctcgtgttaggctggagtctgcgatacaagatcattcagggaatcgggagagggttactgtacctccaccaggattccaggctgaaaattattcacagggatctcaaggcgagcaacgttctgctagacgatgatttcagccccaagatctcggactttggcatggctaggattttcggtgaacaccagcttcaagaccttacccgtcgaatcgtcggaacctatggctacatctccccggagtacgcaatggagggcaaattctctgacaaatctgacgtattcagtttcggcgtgctggtcctagagatcgtgagtggccgcaggaacagctccctcctcgacgatgagtggtcaatgaacctcttgggctatgcatggaccctgtggaaggaaggcagcgtctcggagctcatcgacccgctcatgggagcaacgtacgcttacgatgaagcctgcagatgcgttcaggtgggtctcctgtgcgtgcaggaggtaccagccgagaggccagccatgcccctggtgctcaggatgctgagtggtgacgccgcgatcccgtccccgaagcaagctgcgtttttcgttgggagggcacctcgtcttcctcctgcggatgacagtagtaatactgaatcggggaatcaattgacgtgcacggatcttcagggcagatagtctcagtctcagtctcagggtgcacaagcttattcacgccgtatgtcgtagccgtacgtggacatggccttgtgttacacagattatattgctgctagtgctcgtgttgtaatttcgctgtatatatatcgtacccgtatgtgtgttgtcgtttgacactgtaaattgtaaatgtgatgctagaactgttcattcctcaaaaaaaaaaaaaaaaaaaaaaaaaaaggtgac

SEQ ID NO: 64037 - DNA, 317 bp, Zea mays
  Clone ID: MRT4577_158402C.1
tcgatgacaatcgatgatgcggatcgtagagttaacaacgattcaatgagaaccgattatgctgatagctgatcatgaaaagttaagtgacggacaagtgttgtaataagggaactttggggccattgtgtctctgcggaggtgtccaggatgaaagaagatactcgttgtccgcactccggttgatgggtgaacaactcgacacgcgatggcagctctgaccgagaccaaagaagagactggctcttcgtgtggcgtacttaaaagcggagctagatgacacaagggggaggcttggcactggccgacctttacaa

SEQ ID NO: 64038 - DNA, 735 bp, Zea mays
  Clone ID: MRT4577_158403C.1
ggacttgcttgcctcgcccggcctctctccccgccacacgctccgacgaggcgacgacgccgccacgccaccaccacctcctcctcctcctctacaacccccgccgccacgctctccccgctcccgccctccagcgcgtccctctccctccgcggcgttgagtttccaggctgaggccggcatccgcgttgctctgaacagatgagggggctggggtttgcggcgttatcgttacatgttctgttgtgcctggttagcggtgcctactctcgccgcacgagctcctatgtgcgctcggagttcccgtccaccgatatgcctctggacagcgagtggtttgcgactcccaagggctacaatgctccacagcaggttcatatcacgcaaggtgactatgatggaaaggctgttataatatcatgggtcactccgtcagaacctgcgccgagtcaagtgttttacagtaaagaagagaaccgctatgatcagaaagcccaagggacgatgacaaattatacattttacgactataaatctggatacatacaccattgccttgttgatggccttgagtacaacactaaatattattacaagataggtactggagattcagctcgagaatttttgtttcaaacacctccagcaattgacgtagatgcaccatacacatttggcatcataggtgatctggggcaaacatttaattctctcgccactcttcagcttatttga

SEQ ID NO: 64039 - DNA, 923 bp, Zea mays
  Clone ID: MRT4577_158404C.1
ggtaccggcccccttctcgggtttttttttttttttttttttttttttttttttttttttttttttttttttttgggaattaagtactagtattgcataatttgcatttgaagaaaaaggagaagtagaaaagttatgccatgtaggatttggatcatggtctagctaaaccttatgaacacagggtacaaagagtagacagggtacttacgaataagataccactttaccagcgggcaacttgcagctcataattgaaacggtttgggaaaaaaacttgggaagttgacaaacattcatggggattcgtcatattggatggcttccatggtttatgacccaccgtttaaccaacagtgctacgaccatggggcttcaccagccctttattttgcaaaacgctcctaacttgggccacaccactccacatgtctttgtatgcataaaggtttgctgcagttacataataaccgctatttccaggctccaaatgtagcaaatgttttgcgatggattcgcccatcttgagttcactcctgctactgcaagcatttaacagtgcgccccaaattccgtgtgtttgttgagacggcaagctctccacaaacttgggcgcttcctggagccgaccagcccgcccaagcatgtctacaatgcagacatggtgctctggggctggtgtgatcccaaacttttctgacataaggcaataatacttccacccttcatcaacaagtccagagtgactgcaagctgacagtagagcaataaatgtgcttttcgtggctttcattccagaatcatgcatcttccagaaaagatctatagatttcatcccatggccatggaatccaaaagctgatatcaaggagttccacccggcaatcgatttttcggcagaagcttcaacctcgtgccgaatt

SEQ ID NO: 64040 - DNA, 256 bp, Zea mays
  Clone ID: MRT4577_158405C.1
acctcttccacatcggccatgatgaccacggcaaaggagaacaagaatagggagaaagtggctgaactgcaggcagagagtttatgttggaggcttaggtaggtagaattgtccccaaaattttggctctctggcctccacagccagataatgtctagcagtatgctggttctgccaagtgccaatgggtaatagtatttagcattgtacacaagtccttgttgtatggaactgatgtactattgcctgttttagc

SEQ ID NO: 64041 - DNA, 367 bp, Zea mays
  Clone ID: MRT4577_158406C.1
tgctggcagataatgcttggactgaccgggggggattttgaccgggtacaggggggacaaagactccgggcacgctaggagggtcagggcggaactcctggactccattgcaccagtggaccgtggcgccaatgccacgccccaagacaaggactgcgctgggcaaattgacccgcgactctatgcatataaccacgtgaatgagccgttcaagtgccatctacttaactgctaaggggagcttctctataccacctccacatgtatactggaggacagatgcgcaaagtatcctgatactgttggagaggacataccggtcgatgatctcctgccagctgggagcccaacacacggaaactcggac

SEQ ID NO: 64042 - DNA, 454 bp, Zea mays
  Clone ID: MRT4577_158407C.1
aagcacccaaaaactcccccctttgacaggttctttaggagggaattacatcaaaattgagggggccttggccccccaaaaggaagcccttgggggaaaaatataaaactcgccccccggggaaaaaaaatcccggccaacacactgggcttttaaaacccccggggggggaaaacttttggaaggtaaaaccaccccgggggggaaaaaaccgggttcctttccaaattccccatcaatacataataaacccccaaaaacttggggggggtaaacccgccccaccactttcgttttaaaaaggggggggaagacttgttgccattgccgagcttgttaaagaaaacctttgtttcccttaaccggccactgaaaatttttttccacgaggggaagttttggtttaacccccggagctccatgtttgggtttagggggggggccccctgcccaa

SEQ ID NO: 64043 - DNA, 816 bp, Zea mays
  Clone ID: MRT4577_158408C.1
actttcgtcccggtcacgccacctcccgaccccccaaatcgcgagaccacccgcggcggctggccggccggcgggataggcgacgaggcgaagtaactcgagacggcgcgggcggaccgctccgtgtggctcatgaagcgctcccccatcgtctcccaggcccggcagggcgcctccgcctcctccagcgaagctaaccctaacccggccgtcgccaaggtcgtgctgtccctcgaccccctcagctccgctgagccctccctccagctcaagatggagatgcctcaaactagggaaactagcacttgcaacttaccaaagagttgccccttgaatatgttcttcctcctccgtctcttcgctatcgccatcctgccttgctctgccaacaacgccacccaactggtctatgacacagaaggcaacgagctaaatagcaagtcaaattactacatcctcccagccaaacctgcaagcggtggcggcctcaaagccatcccaaccggtctacggtgcctacattttgtggtcgaggagcgcagcgagacgactctcctcgacacgcccatgcgattcatgccgttgccagaacacgcttctaccactgagccgatccgcctttcgagtgacatatggatccgcctttcgagtgacatatggatcgagtttcacgacttgagaagcttttgctccgaaaggctagattggcaccttaccgaacaggtgccggagtcgtcatcaggagagcctaaacacatggctgccggcagtgaagagggcctaagatcatttggagtgttccgggacggatctctc

SEQ ID NO: 64044 - DNA, 798 bp, Zea mays
  Clone ID: MRT4577_158409C.1
gtcagcaaacttccgtcgatctctctcgatggtcatgacgcttacgagacacgactcgggagagagcaaggagatggagggcctccgtgcgcactccgaggccgcgctgctcacgctgtcgtcgacgacgacgggcggcaccggcaccggcaccggcaccggcacggccgcggcggcggagggcgcgttcgagtgcaagacgtgcagcaagcggttcccgtcgttccaggcgctgggcgggcaccgcaccagccacacgcggctgcaggcgcggacgctcgtcggcgacccggccgagcggtacgacgacaggccggcggcgcgggtgcacgagtgcgccgtctgcggcctcgagttctccatgggccaggcgctcggcggccacatgcgccgccacaggggcgagggcccgccgccaccggccgcgcacgacgacgacggcgacggccccgcccagccggaccgggacatgcccgacctcaacctgccgccgttggacgacgacgatggcagccaagcaggttcacggcagtcgggcggtggtcgcggctccgggcctcagctgctcaacctgctcgtatagcgtgcgtggcgtgcacagattgtggttcggatcgagatgtaaatgaatcgtggcttagattttggaacctactacacgtgagatggaattcttcgatgacgagcttatttagttccataggttgttcctggttttagttggtttgctccttcgtgtaatgcctattgttcggttcaattcatttgttgtgagtaaaatatactctcacattagac

SEQ ID NO: 64045 - DNA, 352 bp, Zea mays
  Clone ID: MRT4577_15840C.1
gggttccaaactggcccttaaattttgaccaattttttttttcaccaaacagaagcccaattcagtgcaatgcgagcagggcattcttcacttacatacaataccaacctttgtttttgagggccaattttacattttgaacctggccgttgcgccacttgcacatgggggaactggaaagtgaacaccgcttattccttattgattcgtatgggtcccgaaagcccagagaaatcaaaaaaaataagacttggggactccccccagcttaaatgaacaaaaacttttatggggatcaaacctttagtcggggattcaaaaatatttttgggtccaacccttcaacaattcc

SEQ ID NO: 64046 - DNA, 1041 bp, Zea mays
  Clone ID: MRT4577_158410C.1
agggggcgccttttttttttttttttttcacactgaatttgacagtttatcttcttcgaaaccaatttcgtcgtatcacgatttacaaatgaaacacggtacacatttcagtgttcatgaaaactcaaaagaacttcagcggaaacggaactctatttatgaacactgctggaacatttactgagagcgtacagatgaacaagagctatcaactcttcagtttattatgtactgttgggctttctggaggcagttgcgctcccctttgtcgttgagcagggttgcaattctgaagcaaaactctaaaccatgaatgggaaatttagaattttgatatcactgtatgtatgaacatatgtgtgattcccatgctgtctgaacaagaacaatagcatgcgaggaatcaacttatctgttcaccaattagatcgaggccaacggcaaggaatgacatcccctggaacagaaggaagtagaaatgaatcccctgagcagacaagaggctccgagtcgcagcggtgagcaggagcagagaaagagcaagctctttcttgtagatcttgttaccccttttggcgtcatttggcaccttctctcgctgttcctttcgcacattgatctcgaccagctcactgttttcaggcaattgattctggagctgaggaagtgtggtgcacttcctattcttttcttccgatgtcaagagatccaattcagatgatcggccagacttcttggtgacaacccattcgtaggagctcccgagtttgaacagcccggacaccattgcgttgaatttggtaacagacatggtgttctcgaagaggaggtatggtacaatgaagggaaatgatcttggggatggcagaatattcaagaaggacatgcaaatcggcacataacagatgacccacacaggcaactcggcctcgggaacaaacatggttaatggaagaatgacacaaaataatgtgaaagaatagaaaggaagtatcaaccggacgcgtggcggacgcgtgggcggacgcgggggtctacccg

SEQ ID NO: 64047 - DNA, 277 bp, Zea mays
  unsure (1)..(277): unsure at all n locations
  Clone ID: MRT4577_158411C.1
caaggacctggccaacaaggccgctacncaagtgcagcagcagcagctcgtataacgctcttcctctccctcctcacccgtgtacttgattattaaagatgcaactgcagacctctctgctgtctgcggtgatgagtcagaactgcgtcctggtcagcatcttcacgacgtccaggtctatctggtgggccgtcgaggggtgcatgcttccaaaggtccagcgtgcatagactgtagtccacgagctgatcccgtttctgtggtccagtcctgaaat

SEQ ID NO: 64048 - DNA, 360 bp, Zea mays
  Clone ID: MRT4577_158412C.1
aacaacagacgaggtaaaaaaaaaaaaaaaaaaaaaaagcttgtccaagactaaaattttattttttttttttttaataaaaaaaaaaaaaaaaaagggttggccagcctttatttttttttttttttttttcccaacacagcatgcaattttgaggggtttttttcctgttttgtcgttctttttaaggggtttgttttgtttatttccatgacacagcggggcccgtcgcaccctccatttaaacatcccactccccccgtgggggctttcttttacaatacactggccccccttccccggcgtaatctctgttcaaaacctttttctttcccaacttattagtcttgtaccgcatct

SEQ ID NO: 64049 - DNA, 237 bp, Zea mays
  Clone ID: MRT4577_158413C.1
ttatttttattgtcgcattaaacttgtctttgcgggcttttttataagccatggaggcaaccacacgacaccaggagcttcccacctgtgcctaggggtaaccaactaagaaacacccaccgtccgggggatagatgggtacataacccaaaagggatacagtgacaagccgactcagcgcacaacacggaagcgtaaacggctaaacctagcgtggcccatgagggaacgtaccta

SEQ ID NO: 64050 - DNA, 289 bp, Zea mays
  unsure (1)..(289): unsure at all n locations
  Clone ID: MRT4577_158414C.1
tatcctatcattccanaanttattcttttttctaaaaatttacttcataaatcttnatgtctccatattactagaggataagtcccatcatatccctttcctcataacatctttttattttttctatttttcctattcctaactaatcttacactactactaatcattttttttccattcttattttatctattctatcccacaaatatcacaactattactaacatattacaccttatatatttttttcttatcattccaaaatatctcttatttttttccttatttt

SEQ ID NO: 64051 - DNA, 468 bp, Zea mays
  Clone ID: MRT4577_158415C.1
cgatctgggatgagcaggacgaggacctaaatgtttcacaacctgttttgaatgaaaaacgcatggggggtctctctggggagaactttcgctgcttgaacaggaatcacttccagattgattatagagtattgggcttgtgcaacaatactcacttacagaatcttgacaagcaaaacaccaaggggaacctgcctatcagaccccctgcatcgaagaaaacaataaatgggcactggaatcacagcgcgcgaagccccagcctgaatatgcgaaagctattctccgatcgagacccccacacgttcaatgaatgcttgcacaggtatcaggaatacctacactgatagaaggaatttagactgaagcacgacttttcatagaaacgcacctaagagactgcatcatcaaacgtcacaagtggtgaagcttggctcctgaattcaaccttgcatcgccaacctttaa

SEQ ID NO: 64052 - DNA, 1546 bp, Zea mays
  Clone ID: MRT4577_158416C.1
ggagagaagctaaagctgctgcttcagaagaaaaggagcggtctgtaaatgaacgactgtcgcaaagtttatcccgcataactgttcttgagacccagattacaattcttaggacagagcaaacacagctgagccgatctcttgaaaaggagaggcagagagcatctgaaagtagacaggagtacctagcaattaaagaggaggcagcaatacaagaagggcgagctaagcagcttgaagaagagataaaggagcttagagctaggcacaaggaggagctgcaagaagcagcagaacacagggacctgcttgagaaggaccttgaaagggaaaaggctgccagggcagaaattgagaaaacatcttcccgtgaagcgcctaaagctccacttcccgatcaaacaagaaatgcccctctcagaaagctgtctagttctggcagtataaatagtctagaagaaagccattttcttcaagcatcgttggatttatctgacaatgcttcattagagaggcgaatgtcttcagaaagtaatatgtcatattatctgaagaccatgactccaagtgcttttgaatcagcacttcgtcaaaaggatggagagctggcttcttacatgtcacgcttggcctcattggaatctattcggaattcactagcagaggagttggtaaaactgacagaacaatgtgaaaagttacggactgaagccactgctgtgcctggcttaagggctgaattggaagctctgaaacaaaggcactttcaagctctagaactcatgggggaacgtgatgaagagttggaggagctaagaaatgatattgttgacttaaaagagatgtacagagagcaggtggatcttcttgttagccagctccaggcattgggtgctcgtgtatagcgctgcctgcgctggtatgaatttgtcataccatctaattcttgtccagtgcatcgcggccaggccaagataccaggtccgtgacttgagcatgttttgtttcaaattttgtaacaccatacaacggcactgaatgttttcgtttgtatacatcggaacacagttgttgggtttaggaggatacgttgttgtatactagtaggttgagtagtttcacagctttacgtgtattctttgtgatttgtttccgttgaaatgtatcaaatttgaatccatttgcaagtgtacctcagaggaatgcaatcaataatatcgagagctccttttgtccccatcgggcaaggcaagacaggtctgagacttgagcatgttttccttttttattttgtaaccgtacaacggcactgaaaatattcgtttgtacacatcaaaaacaccttcggcgttgggtttaggaggatacgttgttgtatactagatcaagtagtttcacagttttacgtgcattctttttttttcatctgtgttcattgaaatgtatcaaatttgaatccatttgcatgtgtacctcagaggaatgcaatcaatcaataatatcgagagctctaaaaaaaaaaaaaaaaccacaataaaaaacccca

SEQ ID NO: 64053 - DNA, 376 bp, Zea mays
  Clone ID: MRT4577_158417C.1
cggcccaggcggttcgaataacactccgttttttatttgcgtcaagcggatctgatctgcttgtcctcgtgagggccacgcgccggtcgttacgtctggattttgtccacgtcaaccgaaaagctccttgctcttggtttttggggtacatccctccttgccaaaattagcgcccgggtactaggggtggtggcccccaccgggtcgtattactcaccacccggtttgtgatgtataaacgcctgctgaagttatcatgttatggcttatggatcgtttaagaatgggaaaaacctggatggactttgactcactataaaggtaaaaacaaaaaaattgggcggccggtgtaggggacccaagcttacgaacgcgt

SEQ ID NO: 64054 - DNA, 423 bp, Zea mays
  Clone ID: MRT4577_158418C.1
caagttgtagttggtcctcgctagttgcggccatttgcgagagttgccagactccctgacgacacgctcaatcacgacatcccatggacaacgtgtgtcatgggttcgcgagtggcaggcgttgtgggtccatgcgacacgacaacgaacggcttggcgatggtgtgcgtggtagggtcttgtcatcggagccatcacctttgctagatgtacccgtcttgtctgtgccggtggcgtccggctatggctctgacttggtgacaccatggtggcgcaaggtcctcacatacagctccaatgcgagttgttaggcctcgacccgacgttatatgcaggcggcgaggacgagagctcaatgaatagcgagttcaacgccacaccaacacaagctagaacacttggaacacgaacgggtttggtgct

SEQ ID NO: 64055 - DNA, 1184 bp, Zea mays
  unsure (1)..(1184): unsure at all n locations
  Clone ID: MRT4577_158419C.1
cggggcggaggaataaattcttcgaccctgccgcaaggaaggcacctcccttccccctctcttcaccgccgccgggaaggccgcagcttccactccaatccttgtctccacttgcccgcgattcctctcaccctcgactcactcactcacccttttctccacttgtgtatccgcggcggcggcggcggcctccactccactccgtccggtccactccctgtccctgggcccgacgtttcgtcggtgaatcctcgagctgctgccgtcacgtatgaggaactggagcgtcggggccgttgcggccttcgaatttgcgctctggagctccgtctggtgcttcctggtcgtctccgtcaccagtttctgagccgggatcctactcctcttctcgcgctactatcagtgcagtgcagtaggccactggactgctgtcgtgccggggtagttgcggccaaaggaacaagccaccttctccgagttggaattaggtgcggccctccgcatcaaaagggctcgtttggtgggaactttcgcttgcctactcgctgctgcctgcttcggtggtcctccgtgacggggattgctggaattggggttggaaggacattctgactgaattgctcgagtgaggggtggggtttcggcacccgttgcttgaggatggaggagaggccatcgtccgaggcaggcgcgggcaactcgagggccgaggacgacttcaggagctgctgcggggacgaggaagagtgggaggacacggaggagtcgttcacggccggtgtcgccaagggggagctggacgaggcctcggtgcgactcttcttcaagggcgtgtcgagccctgaggcggaggggaagaagctgtctgggatcggagtcgtcatggagaggtcgcccggggtgcctgttcttaaggtgcagaagaagctggatttctatgtggaggagctcgtggctgatcacctcgccctcatggatgggctgcttgtcgctctgcagaatgggatcacgaagatcttcgcctttactaattcggagaagctctactttcagatagcagaagctgaaattcttgaagatccgcgttgtgttagctctaggacacagtcttctngaactgatggattagttggaagccttttgatttgctattggtccctagctttgaactattgaggcccttg

SEQ ID NO: 64056 - DNA, 284 bp, Zea mays
  Clone ID: MRT4577_15841C.1
gtttcttccatcccatccgttccagctgacggttcccgggttccatgcccagctgccagcgccttgtgacctgatccgctgctcgtccattcctccctccgtgaatggctcctccagcagggtctggtgcagcgacggagggagggccggctcgctgcgcggcaccggcaccggtaccatccccggccgctccaaagtgttggtcgatccgccgggcaagatccaccaccagatcccggcgctgtctctgctcccgctctctcccccggtcccgtcggtggcgg

SEQ ID NO: 64057 - DNA, 1193 bp, Zea mays
  Clone ID: MRT4577_158420C.1
gtcgttgtagtatagtggtgagtattcccaaaaaaaaatcctccggcgccttccctccatttcgtccttccgccatggccgcgtgcctcccggctccagtccgcccactcctcacggtgcccttcctctatctcctccctgttcctctgccccagttcgagctgctcccatggcgccgttggccagatctccctggccgtgtgcctctgcgcacggtcgcctctccctgcagctcgctctctcctccctccatctctctcaagcgctagccgtcgtggttccctccctgttaacaatacaggagggatctagagatgaaggaagaagaggattgaggaacgaggtagttgtattcagagttcagaatctccacaatgttcataaccgaaatacatgcgaggaagaagagtagaagtagtagagaagagagatgaacttggaaaacaagtgagtgagttctcgtaatagtaatttttcctccctttggtgtgtacagttttcccttttgtagatgaaggtatcccacttgccaacctgtcaagagccctatctgtcagtgtgctgacattccccaccgcttgaaatgcggcttgcccccaagccgcagctgcagttggctcgcttgctgtagtatttgttgcatactgggaggcagctgcaagactgttgtttggcccaacatgaattgtataagtcatgtgttaattggtataaaaactgctctccatcttcatcttgatagcagctcaaactaaaagagggccaaggtgttggtcgcagcttaattccatgacccataacctccaattggcacgcacatgcaaacatccctgtgagacctaatgaatcaatggcttctccattttctgaagtcaaactaagttggttgaaaagtccatgagctaatgaactcggcacaagaagaaaaatgctctcagacaactgctccacttgcgcaaggcacacaagagatgaccaatatcggtatgatttcggtgcagcaaagtagaacccaaactcaagaatatatactgggtgccaaaatcgtgccctctgatatgtttgcaaagtaatcgctggcagtggtgaataaatccaaagctgttcatgtacttcccgactgaataagcaatggatagtgtaaccacacttctgtcgcgttagttgcaatgatggccctggttgcctctccg

SEQ ID NO: 64058 - DNA, 505 bp, Zea mays
  Clone ID: MRT4577_158421C.1
cagaacgcggcccaagcgtgttttttttctttgttctttatcctttttctgcgtgagagtatgtatacaggatctgaaacattaccctcatgcagatgcgaaagctaagcttgtagtgaacaggagcgatccaaacctccatctttaaacatcggggtgcaattgaaaaattcgcgacggtcaccaccaagagcatttgcccctagatttcccaaggcaaaacaagaagcgggggggctggtcctgcggaatgctacaagtgcaaagctgtctggtctgaaaagaacaaaatttgcagagggggtgattggtactcgcaccgaaacgccacacaccccccctgtgcaggagacgaaactgctcttggggtggggtggcgaccaaaagattgcctcggagaatactcttgggcacctcaccacaggaagagcgctttcttcacagctgcatggggggggtgattttttatggggggagaaaccacctcccccccaaaagaattttt

SEQ ID NO: 64059 - DNA, 404 bp, Zea mays
  Clone ID: MRT4577_158422C.1
ccttgatcctgttcaggatagagggatcactgttgtaaaactaccaaggagcttggtaccgagatgcaccctccattgaacaagaaccctaccgaggcagagctgcaatacaagaacaacaaggtctatgcatatgagaatggaaccatctacttctcggagttcctgaacctgatggtctaggcacaatgaaggacactgactaggggtggagctcaaggaggccttaagcactcttctacaacgaccaggacggtatcatgttggctgacgaactccacactgtgatgaccaagcttggcgagaaagctgaccgagaaagaggtcgacgagaagatccgcaaggccaagatatactgctacagcacagattaactaccaggagttctacacgtggttctgat

SEQ ID NO: 64060 - DNA, 450 bp, Zea mays
  Clone ID: MRT4577_158423C.1
acaagcttttttttttttttttttttttttttcttttttttttttttttttttttttttttttttttttttttttttttttttttttaccccgccccccaccccgctaagggcaaaacccagcccaccggcggccggggcaaggggacccgaccccggcccccagcatgggggaaccaaggccaaagccgggcccggggggaaaccggtaaccggtcacaaccccacacaaaaaacgagccggaagcaaaaagccaaaagcccggggggcccaaggagagagccaacccacaggaagggcgaagggcccaccgccccccatcaaaacgggaaaccccaccggccacctgcaaaaaggaaacccccaacgcccggggggagggggaaagggaaaagggcccctttccgggtccctgaccactggccccctgcccccgggccttcggcaggg

SEQ ID NO: 64061 - DNA, 194 bp, Zea mays
  Clone ID: MRT4577_158424C.1
cttcaagatctgtaacagggacaggggatcatgtctgaactccggtaacactatatcacatttctgttccctatcttgtaacaaaaatgagagtgtgcttcttagctaacactgatttacacattaactatctaactcttaatgaagctcacattattgtgttaaaatgtatctaactatatggccattaccta

SEQ ID NO: 64062 - DNA, 559 bp, Zea mays
  Clone ID: MRT4577_158425C.1
agcgcccaggagaccgtaaaacacggacggctgtttctgcttctctacccgggacgaagtgctgaccgtatcaatgctacacctgcacgattatcgatctgatggcgctatgatccgcttcatcctgctgcacaaccggaaggtcacgactcaactgctgacgtattactctccgctcaaggactcggaaaagcgcaaggttgaatacaatacacaccgtgtcgtggtcaatcggcaccctgaagtcaccaagttcagccagtctcacacacaccaaggtatctgtaggacatatgctggactgttctttgccatactgtgcggacataactgataatgaagtgtgatacgtggaatgcattcacttgattgactggatattgtaccgtctctttagtactgattgggagctcgatttaaggaatacttatcacgaggcgtacctgatactaaaggacatttattcttgctggagagctcgcaagaaacgagcaaagacgcaaaaattgactcaatgtctggactcggaaactgccatgacgaacaccagaagatgctg

SEQ ID NO: 64063 - DNA, 554 bp, Zea mays
  Clone ID: MRT4577_158426C.1
gcccaatgctgcaatatgagatagcaagaatgggatgtggtggtactggtaagcttttctgtggtggtagtgcccatcctaattcacgaagagttgagaacctaatagccccaagattaacttcaagaatattggctggaaataaattaagcccttgagatgactaacaaatggacatttaacggaattcttttggtatagctgaccaggtggtgtttgagctggaaatggaaacaaggggaacagacagcagcctgtaacgcctttccctcttcttttctcaacgtatagaccgagttctttgagcagtatgagacctgcttggggacttgatttgtaaatggaacggttagaaagcttagttaaataactgttactttttggcaccattggctgtggttgctgtcagacaacccagctggtacacatgagcgatcttggtggacaagaattttgctgtgtaacttctcttaacatggtcataatttatgatttgatcagttggtggatgtaaaaaaacagaaaacacaaaactccagggggggcccggtacc

SEQ ID NO: 64064 - DNA, 195 bp, Zea mays
  Clone ID: MRT4577_158427C.1
cgtatttgatcgaactcctgagcactttctcctcgcccctataagcaaatgggaggcgatatacggccatggactccaccggcaccggagcagggggtaaggggaagaaagggatgcgtgttgggccgcaatgggtctggctgggctcataggaaagaaggtctggttgtctgatgggtcccgtgaaaggctcgg

SEQ ID NO: 64065 - DNA, 2437 bp, Zea mays
  Clone ID: MRT4577_158428C.1
aggcggcgatcagttccatggtgtcggtgacggatgtgctgactgtgatgtcccacccccccaacgccgagctgcccctctaccatttcaagtgagcgagggcatcagtctggtcgttattcctagagtgtttttgaaacagcagaagattcttcttcatggctgccggtcttttttttatttgggtgagaattaagcactgggttgtaccaataaacactgaaacagtacttgatactgaactgaatcgcgtgctagttgtattattggtggcagtattccagttttcaagaaaaaaaaaaaaaaaaaaaaaaaaaaaaaaaaaaaaaaaaaaaaaaaaaaaaaaaaaaaaaaaaaaaaaaaaaaaaaaaaaaaaaaaaaaaaaaaaaaaaaaaaaaaaaaaaaaaaaagggggcgccagtgacgcacaaggggcgcggtaccatggggggcggacggcagcccacacacaacaccacaggaagttgactttcctctgctgctgttgtgctcagtgtggatgacattgtgctgcctcaggtattagcttattgattttaaattggttattaaatgtctggcatggatctcctccctgctcacgggcctcaccatcctcaatggcgagggtaaaacttcgcaccaacacactcgacaagcttgatggcgacccctacgtcaacatccgcatgggcaagggagtggacacaatcaggctcttgcgcaagtatcccctgaatttactacctgtagtttcgaaatggacttaccaaaaaaaatatttgtactaagaatatttatgtttgtttagttggtctggacaaaccacaagatcagtttaagcattgcttccaaatgccattaaatatttatcttgactgaaaattcgcacacaagaatagtaatattctatgaccaagtgactgtagtatgaagaagcatgtgtcattttcctgattaatttagctggttcaactctgttggggtcccaagtcttggccagaacttgatgtaattaaactcctttagacaattgagtacctttctatgtggatttacatatccttttgcttatttaataacttctgcaaaatttgaatcctaggcaatgtcaacctcaacaccttgatgaacatgttcagtgtgcttggtgctggtggtggccttggtggtcgaaatgcttctaatggctctggaccgccatgcttgcgtctgccgcgggacgtccacgctgccatcgcccgtgagcagctccgacagcctcatcgccgtattgcacctgctcttgtgtcgcaggctcgggttaccgttggtgctcacgctgaggaaggcatgatccatgcggagcagcccaaggcgcgatgccacctccgctgtcacacatgatgagctgcttcgcctctggcaccgccttgttccttcgcgatctcacattgacatggatgcacccgattttccctgccctgttctatgcctgtgaaagagtcatcaggaaatttcatgagaacgactaccattcaggtattgtgagaaagaaggaaggtacaagggaaggaagttcagttcagtatgtcatttctttggatatcaggctcgatgatctacaccatcaaatttcgactgtgactatgcttatgctcttggacgtatctccctgcatatgattgcagttggattgactggctacatgacaactgtggctaatctgaaagaccctgttgacaaatggagatgtgctgctgctcctttaattgcgatgatgattgtgatgaggcatttacatggccctggagcaatccctatagggaggccttccattcacccttctccaattgatctgaaagggaaggcttatgagttgctgcgagagaaggcttcaagcttcctccttgatgacttctataggactccaggaggcattcagttcgaagggcctggttcagatgcaaagcccatcacgctgaccattgagaaccaggactacatgggtgacattgagatactgaaatagtaccttggcaaggttaggaccatggtgaagccagggtgctcccgggagatcctgaaggcggcgatcagttccatggtgtcggtgacggatgtgctgactgtgatgtcccaccccctcaacgccgagctgcccctctaccatttcaagctgcatatattcaacattatgaatgcatggtaactattttgcatgcctatgacgagaatcatcacttttggagcatgggtgttttgtgtacatataaccaaactgctaaaatatttgcagttatgtatatgtttaagcgatccctgaccaactcttcaattatgccactaatgtactaaataaatatgtacgaccatatcggttgactcaacagcttctgttagcgctagaattatcatctctgtacactatgagttttttaaacgctaaagttttgtt

SEQ ID NO: 64066 - DNA, 261 bp, Zea mays
  Clone ID: MRT4577_158429C.1
ggaggacgagccgtgaccattcagccttcacctcacccccccatcgcccgggttcgtgccaccatccactcctgcttcccggccttcctacttcatcccaacaaccgctacttcttacaggcctgccgaccgttgctcttcgcaactaaacccttggcagcttccgcccgttaccttgccttcctaccgcttgctttccgaataaaaaccgcccaaccctggccaccgaaaccttgtccggcctaacctcttcccgggttt

SEQ ID NO: 64067 - DNA, 536 bp, Zea mays
  Clone ID: MRT4577_15842C.1
aaaacaagaatcacgtctatttattctcttgtacttacaacaccttacttagacggttgctggaatacaaaggcttcgaatagcccccacctagttaaaatcatggttctacactacacgtctacatacaccgaacaggaactaacttattttttttttgatgctgtctggctcgaccaacatacagcgccatgtatctggcacaccggcctgacatggccatggtgctaaggaacgcctgctctagctcggcagatgctcctctcctgagcaaacacatggtgtactccatgaccgccgagtcacaggccagcgtgaccctgccagggccatcgtcgccagcaaagccgaactcctcctgtgacatctgccagagctccctgaatacggggtgctaaggcaggccatcgatacctacaaccgtgccccgtctgccgagtacaccgaacaatggcccttgctccccacagagcccatccactcggacacttgctttaccaccgccttccttaagagaggagctttctcacttgcac

SEQ ID NO: 64068 - DNA, 229 bp, Zea mays
  Clone ID: MRT4577_158430C.1
tttcgctcacgcgtccacctggggcaaggttttctactatttttttgcgtgttacacacgtcgcagacatgagtgtttgtggggtctgtcacggttataaatattggaaggccaaggcagttcaaaatccgaccttagctcaattggcagagccgaggactgtagcgcgccgtaaagaaatccttagggcggtggtttagatccaggagggcggttttgacctttaaaa

SEQ ID NO: 64069 - DNA, 435 bp, Zea mays
  Clone ID: MRT4577_158431C.1
cttgactgaaaattcgcacacaagaatagtaatattctatgaccaagtgactgtagtatgaagaagcatgtgtcattttcctgattaatttagctggttcaactttgttggggtcccaagtcttggccagaacttgatgtaattaaactcctttagacaattgagtacctttctatgtggatttacatatccctttgcttatttagtaacttctgcaaaatttgaatcctaggcaatgtcaacctcaacaccttgatgaacatgttcagtgtgcttggtgctggtggtggccttggtggtcgaaatgcttctaatggtccctttatgtggcacacatgaatacctacaactccataatgttgctgaatgattaattatggaatgtggacaatgcaagatacattttgagtacccttttgatctaggctctggacc

SEQ ID NO: 64070 - DNA, 1071 bp, Zea mays
  unsure (1)..(1071): unsure at all n locations
  Clone ID: MRT4577_158432C.1
actacctgtagtttcgaaatggacttacccaaaaaatatttgcactaagaatatttatgtttgtttagttggtctggacaaaccacaagatcagtttaagcattgcttccaaatgccattaaatatttatcttgactgaaaattcgcacacaagaatagtaatattctatggccaagacttgggaccccaacagagttgaaccagctaaattaatgtaattaaactcctttagacaattgagtacctttctatgtggatttacatatccttttgcttatttaataacttctgcaaaatttgaatccgcaccaatgtcaacctcaacaccttgatgaacatgttcagtgtgcttggtgctggtggtggccttggtggtcgaaatgcttctaatggctctggaccgccatgcttgcgtcggacgcgggacgtccacgccgccatcgcccgtgagcagctccgacagcctcatcgccgcgttgcacctgctcttgtgtcgcaggctcgggttaccgtcggtgctgacaccgaggaaggcatgatccatgcggagcagcccaaggcgcgatgccacctccgctgtcacgcatgatgagctgcttcgcctctggcaccgccttgttccttcgcgatctcacattggacggtggatgaacttgggcttccaagatccgtaatacaaggtaaattgagtaccttttgtgacctcttctgtatttctaggcctttgtataacagctgtggacaaaacctgtaaacatgttggatgaactggagcagctattgaaaggtaactctatggtgaaagagctaacgcctaggacaaatgactaccttgtttcatttcgagaatgtatgtccaccaggattttatctgttaatttgaacaaaattcatatcaaagcacgacaggtacttcttgatatttccttgatttgcacagtgattgagtgagcttttaagggtacgaatgtagcagcctagaataattctatatttacttactactataaagagcgggagcaaaatatagctatacaattgatgtatatttagcatatcanacaatgcta

SEQ ID NO: 64071 - DNA, 293 bp, Zea mays
  Clone ID: MRT4577_158433C.1
ggaccaggtaagcagcagcaggaaccctagcaccgccgcatccgcagccatgggtatcgacctcgttgtgggtaggaggacaaagaagaccaagcgcacagcgctgaagtccgacgatgtttatctcaagctccttgtcaagctctatggtttcttggtcacgaggactaagaccaacttcaatgctgtcattctcaacagggtcttcatgagcaaaaccactcgcccaccaatctccatgcgccgccttgtcaacttcatggtaggaaaggtgaagaacattgctgtgattg

SEQ ID NO: 64072 - DNA, 255 bp, Zea mays
  Clone ID: MRT4577_158434C.1
aattcggcacgaggcacccctgccctccctccgccccacgcgcctgcgcatcgtcgatcggcgcccgggccgcgcgctccctccgcccttgcgcccccgtggactgaggcctcccgctccgctcaggccgtacgccgcggggtttgccactccgcgttcaacgacagtgaatatggcgcgcgatggtactgaagtgctcttaagcgcgcagtctggtgatggcgcagaaaggaagcgtgctgaagaaagcctccc

SEQ ID NO: 64073 - DNA, 1170 bp, Zea mays
  Clone ID: MRT4577_158435C.1
cggtactgcagctgctgctccaccaagaatcaaataactctgcgcagttgtcccaaatttgtgattctaaatgcccaacaacaactcaatcaaaacaatgtaattattggtgttatagtgtcctattgttttcagattgacacggagcaactgctggcccatctagtagaaacagaaatgataaagagaacgataatttccattgttgttgttatttcttgttttttttcttctctgaacctctgtccatagtgattggggatgtttgatatttcagaaagaaggaaggtacaagggaaggaagttcagttcagtatgtcatttctttggatatcaggcttgaggatctacaccatcaaatttcgactgtgactatgcttatgctcttggacgtatctccctgcatatgattgcagttggattgactggctacatggcaactgtggctaatctgaaagaccctgttgacaaatggagatgtgctgctgctcctttaactataataagatgcgatgatgagtgtgaagaggcatttacgtggccctggagcaatccctatagggaggccttccattcacccttctccaattgacttgaaagggaaggcttatgagttgctgcgagagaaggcttcaagcttcctccttgacgacttctacaggactccaggaggcattcagttcgaagggcctggttcagatgcaaagcccatcacgctgaccattgagaaccaggactacatgggtgacattgagatactgaaagagtaccttggcaaggttaggaccatggtgaagccagggtgctctcgggagatcctgaaggcggtgatcagttccatggtgtctgtgacggatgtgctgactgtgatgtcccaccccctcaacgccgagctgcccctctaccatttcaagctgcatatattcaacattatgaatgcatggttgacgactaactttcagatcagcctaagaaaccagccaactccacgaacaacaataaggttctacggaccctagacccataactgttagatcatcgtcgttgccaccaaggtaactattttgcatgcctatgacgagaatcatcacttttggagcatgggtgttttgtgtacatataaccaaactgctaaaatatttgcagttatgtatatgtttaagcgatccc

SEQ ID NO: 64074 - DNA, 452 bp, Zea mays
  Clone ID: MRT4577_158436C.1
tcggcaagcaagcaagcagcgtgtatttacatactaggcagccaggcagccagggcgcccaccttgatggtggcctcgtctgccaccgccgtcgctcctgtccagggtctcaagtccaccttcagccttcccatctcccgccgctccttcagaatcctttgcttcttcttcatctgcatattttatccttttcattcattttttttctttttttctttaatttttatttatttataatttcattttttattatttttttatttttttttatttattttatttattttatttattttatttttgttgtgattttatttatttttttattttattattatattattttattctatttatttattttatttttatattatttatttatattttttattttctattctattttttataattttttttattatcttttttattttatttttttttat

SEQ ID NO: 64075 - DNA, 416 bp, Zea mays
  unsure (1)..(416): unsure at all n locations
  Clone ID: MRT4577_158437C.1
cttcgctattctccttacagcatatgcatctattcttgtatcttcatgtaccgggggctagcgggaatatactaccctgccaagcagacaggtcgcaacgcccccgaaggaaggctcccacgaacacgctgacaccaaaggaggccccaattctgcccccacacactggccgacggacagaaccccaccgataaccgcctcataccgggggggggggcacaaccccntgcgcccaaacatcccactcctgccgatccaaaccctaggcttgcagagacgctccctgctgcaggagcactccttgaaagccctgctgcgagtaccgagagaagcctttactcccgctaatatgctcggtggcacgctcacagaactccgcccaccncgacaagcctgccccgccaggtgcacagcat

SEQ ID NO: 64076 - DNA, 173 bp, Zea mays
  Clone ID: MRT4577_158438C.1
acgcgctcgccgtccttcggtaggtggattgcttcggtggtccaccatggctcagcgagcggtggccacgatgacgattgtgaagcccatcctcgtcctcacggtggcgtctgcgctccatggcacggcgccggccgcggcgaatgcgcccggcggggcgttcagcaactggg

SEQ ID NO: 64077 - DNA, 371 bp, Zea mays
  Clone ID: MRT4577_158439C.1
cgactactcctctatctctagttctcctcaaccaaattctaagtcacagcgtgcgaaactctcggcgatgtctggactgcggcacaggcgcgcggaagggtctgggcaaggagcggcgctcaagcgccaccgcatggtgatgcgtgacaacctaccagtgcatcaccagagccgtggatccgcacggtgtggaggacgggcggcgccttgcgaatctgcggagtcatctacgaggagacccgaggcgtgctcaagatgcttcctcgagaacgtcatccgcgacgccgccagctactccgagcacatccgccgcaagactgtgaccggcatggacgtggactacgctctcatgcgacagcgccgcaccctct

SEQ ID NO: 64078 - DNA, 437 bp, Zea mays
  Clone ID: MRT4577_15843C.1
caaacatagaagcaggatcaactgcgtgtgagcctcagccaaaaaaagtaaaaaataataataatgtttgtgcttcaatttctgaattctgataaaaaatatatcgactagtgcatatagaagtactcactcagtcctaaaataaaattagttttatcttttagttgatttatacataattaatgtatttgttttacgtacatgtctagatttattatcgtctatttgaacatagaaataaaaatcgaaagctaaaacgactaatattttgggataatattttgggacgggtgaagtatcaaatatttactgcaagatttgagtttgggaggaggcgtcgatgagaaaccgtccaaagtggaatagattttactataatctgacagtcaacttaattcatttcttcgagggcatctgcacgttagaaattgatgtta

SEQ ID NO: 64079 - DNA, 442 bp, Zea mays
  Clone ID: MRT4577_158440C.1
ggccggggactagctcccccaaccggcaaggagaatcgggacatgatgcacactgtagacgaacgacggccggagcagcatcaggtcgttcgacctccgagcatctacccgccgcgatggataagggacagggcctcgctcgtagctgagcggtggagctccccgaagcctcctactcctcccccgacgtcttcgacccgcactgtcttcgccgacgcgctcccgatgtctacgacatcgttggagggtgcaacatcaaggactacgaggcgagctggacggcccagaaagcacgggaagtagcgcaggctaccgctcaacaacctgatgctgatggaatccatgatgagtacgcaaggctgaactggccacctctagagcatcgcaattaccttcgacagagctctgcccaaccccctacgtgcttgacgatctgaatggg

SEQ ID NO: 64080 - DNA, 127 bp, Zea mays
  Clone ID: MRT4577_158441C.1
gcgtgtaccgcaatcttaatgcgcctcgcagcacatcctcctgatgtgacagctggtgaaatagcaaggaggccgcgtacctgatcgcctcttccacaacagttgagctgcctgaatggctaaagga

SEQ ID NO: 64081 - DNA, 223 bp, Zea mays
  Clone ID: MRT4577_158442C.1
cctccttttttttttttgttttttttgttgaaaaccccatttaagccctttctcacagactcgaagaacattggacacagacccgaccgagggagggccgaacgtttttgaaatcccccagatgcgctaagcgcactgtgcacaaacgctgaaaatctatcatacatccaaggatagcttcaagcagcttctaaggccacactgactatgatttaagacccta

SEQ ID NO: 64082 - DNA, 558 bp, Zea mays
  Clone ID: MRT4577_158443C.1
tcgagcggccgcctgggcaggtcaagctttttttttttttttttttttttttttttgatttttttttttttttttttttttttttttttttttttttttttttttttttttttttttttaaaaaaaaccccaaacacccctttccccaaaaaaaaaacccctcccattaaaagggtccaaccaggccattgcccacccccccccccagggggagggggaaccccccctaacccaaccccccaaaacaaagaaaccacccaaaggaagcaaaccagcgcccccataacataaaaaccacagccccccggccccaacccccccaagggcaaatcccaaccccctggcgccccttacaaaggaaccccaccccggacccaaacttggcgaaaacaaggccaaaaccgttccccgggaaaaaatgtaacccccccacaatcccacacaaaaaacaacccgaaaacaaaaagggaaaaccccggggcccccaaagagggacccaacccacaaaaattgcgttgcccccacccccccctttccaagcgaaaaacccggcggccc

SEQ ID NO: 64083 - DNA, 622 bp, Zea mays
  Clone ID: MRT4577_158444C.1
ttttttttttttgaaaacaacaacacttgtcgatttagcgtgtggtcccgtctgtttgtttccttctgatgctgattgagatttcagagagagagagcagagaacggctacgggacagcagtggataatggtacaatgatgcagctcatcgtgcggtgggggggagagaaaaatcatcatcagcgctggcactttggctgcgcaactgaaaaaggtattaataaacaattaattaagccactactaaccaggagtttagtggtagtagtactagtaggcagtggtacttgcttcagatgcagaattggctgctgcttccccgccttcttgactgcctgcctttctccctcctctgacctctctctctctctatttagctgttttgctgaaccccatgtcagctgcagtctgggggaatctgagcctgctgctcacctgagagagcctgtgggtggggaggcaaagcgctgcagaggctgcagcagagaggagcgagcgagggagggagaccacgagccctgtcgagctgttccgattttgcccccccgaatacgtcgctgcccctgctttggagggatctgaagctgctgctgcctgccaaagcccgaggtgagtgactgac

SEQ ID NO: 64084 - DNA, 261 bp, Zea mays
  Clone ID: MRT4577_158445C.1
agtctgagcatcgaaactcgctcccagcgacgcgcactagtgacgaactagctgcaatggctaagaagactttagctgttgaagcgcgtcttgtacttacagcgagtgcaatataggcggttattagtgcacaatgctcacacgctcctagtgccattattgcagaggtacttcgaaccggtacttcaatgggctgctgacacctagctgggcgagtcaatatgccacaacctgcgcttgcagcgagcgtcttacaacaac

SEQ ID NO: 64085 - DNA, 289 bp, Zea mays
  unsure (1)..(289): unsure at all n locations
  Clone ID: MRT4577_158446C.1
tttgaatggcatatggccaaccncacgctccgggtggtcttctttcccgacgggcagggccttcccaccatcttcacctccctaggactcgagtacgacgacaaagtgctaccctccatcggcaacgaggtgaacaaggacagcaatcataccaactaaatgacctccttagttttttaacttaaccttcttagactattaacgcccgtacttcctctaacttacttataaacattcagaaccctttacaagttatctaaccaataactaatctggttaatcttactta

SEQ ID NO: 64086 - DNA, 311 bp, Zea mays
  Clone ID: MRT4577_158447C.1
acgtaagctcggaattcggctcgaggaaccaactgctggggttttttctggctctgcttcagaggtcacctgcgtcgtcaggacattcatagttggaagcacaagcgaactgttatgtgatgggccctcgagagatacatatgccgtctgttgccacggtggcacacatagtacgcggcgggcacttgaacttggtattgttctggaggtcatattatacagcggtgtgataatgactgtacattgcttgtatgggcatgctctttacctatactaactctgtgctcgtctactaggaacggtggatactc

SEQ ID NO: 64087 - DNA, 379 bp, Zea mays
  Clone ID: MRT4577_158448C.1
aatgaacacgagcgccggcgctgcccgtccaaacccgcagggatcattccactacggatcgatcaacgtcacgcagaccttcgtcctcaagaacgagcagcccctgagcatcagcgggaagcgccggaggacgatcaacagggtgtcgtactcgcctccggagacgccgctgaggctggccgacctccacaacctgaccggagtctacgcagccgacttccccgcgacgcccagcgacgacgacgcgccgccgagggtagcttcgtccgcgctcaacgcgtcctacaaggggttcctggagatcgtgttccagaacaacgacaccgacgtgcagacctaccatctcgatggctactccttctttgttgtcgggtacgta

SEQ ID NO: 64088 - DNA, 141 bp, Zea mays
  Clone ID: MRT4577_158449C.1
ccccccggggggaaaaattattggtaccccccgggtaaaaaaacggaaagggggcttgaaaagaagttgttgattccatcattgtcgagggttttaggtgccctgaagacactggtaacttatctggtacaccttggctaa

SEQ ID NO: 64089 - DNA, 1743 bp, Zea mays
  Clone ID: MRT4577_15844C.1
gctcgacttaccgatggtttctttgtggacgaatgaacagatcctcgcccctcttccaatcgggtttgccgtgttcctcgtccacctggccaccatccctatcaccggcaccggcatcaaccccgcgcggagccttggcgccgccgtaatttacaaccagcaccatgcctgggctgaccacgtgagtggaaaacaactttcttctaccttcatgttgctaactagtttcactgttaaaagtagtatgaagagtctaaaattaaatagtgaaataaagcctaaatagttgatataaaaaaaaaaagtaattacaaaatataaaaagtttttctatctacttggatacagatagcaaaaacattagttatatgtaggaaaaaatcatgtatctaaaaagacaaaaaacgtcttatctgaaggtcaaagcacgatatggtaggacacaatctctttattagtaagcatttgctggttaataattcgatttgattatggaagcctgcccttatccgaaagggtgatgctgctttattgtagtgttgtagtggcagccactcgctaccttccaggacaaggacctgcaataacgtctccctcgcatgctattgctgaccctctcaccgatttgtgccttggcagtggatcttctgggtcggccccttcatcggcgctgcgctggctgccatctaccaccaggtgatcatcagggcgatcccgttcaagagtaggtcttaaaggagccgatgctgctgcttcgagatgctgccggtcttgaaaggatggattcgtggctgtttcaaatgatcccctactatgttacgtgcagttccattccattcctctttcaaagttcggagctgcttttatccgaacccagacttgtaattcatctgtaccaattgtgtaatatgccgcgcctctgttatgtgcaattcaaaattatgagacagcgagtcaagctttaagagttcatccattcagccgctgctaccctcctcctgcaatgtggccaacccccctactgtgccacggccagcaagcagcggcgtctcggcacaagctacagcgccgtgacaacggctacgcagcgcaatagactctggccgctgaagcgatctgctctcaagttggggttggtgccggcgaaaaggacggcgatgagtcacccaccccacatccgcagcagcgtgcctgacagccagggtggaagactggtccttcccatcccgaattcccgatcccagcgcgatactacaaaaaaaccagcgcggcttacaccgtggctgagattgttgtttcttgtggcggaccgcgcagccagaggcccctttcagttccagctaccaccaccaaggaccatatgagattggtctggtcccccagccccggagcatccaaggtaggagtgaggagcgcaactcggcgaggtgcatcctcgggagggcaaggccacaccagccatgaccagacaggcagacaccaccacgaccctggcagcgatcgcgacctcggacacacgacaacagatcgccataaaccgcaaggaccagcccagcggggggctggaccatggcctgaaacttgtgagcagccgagggcatgccagtaactgcccccgatgcaaggtaacagcccagggcagaaatttcctgacgaatgccatcacccagacaggtaaacacttgactgcatatcacctaatctgtactacattttgcttccgccatcaagcagcaaaacccg

SEQ ID NO: 64090 - DNA, 233 bp, Zea mays
  Clone ID: MRT4577_158450C.1
attcattgtgggcgcaacaacccgcaacactgttcgctttctgggccaaaacagacaaaagtgtgctttgaacacaagtaaacatttggacctcccggttgacaagacccaccctaaagccctgggggccgcggggggaacacctcaccatttacgattcgcccccgctcgcctcaggttcggggacacggtaagattcacatttcacaattcgcaaagccgcaggggcacgg

SEQ ID NO: 64091 - DNA, 181 bp, Zea mays
  Clone ID: MRT4577_158451C.1
cccacgcgtccgcagagaatcactgcacaaaaacctcggcaaactcttatctatgatctgcagactgcagtgcaaaatattgttttgcattgtagacaacactattatagagtggattttgaaattagatacagagataaataagctgctggagtaagttagcctcaaactgattcgctac

SEQ ID NO: 64092 - DNA, 575 bp, Zea mays
  unsure (1)..(575): unsure at all n locations
  Clone ID: MRT4577_158452C.1
attatagagagagctggcaactctcagcattaatacnnnnnnnnttgttcaatatcaatacatttcgctagggaaccgaaagctccctctgctttgtgacaatctttcttctactttcaggggcatacatacaattacgagtataagaagatacaataggtgatcactggtaaccagcaatatattctgcacttggtctgccaagtttaggacagtgccttgtgtccacgcctcctgatgatctatgaccccatctcgtcttgaaattacgttcctcgtagcttgcgtgctcctcacgagtcatcatactcctggaaccgtttcgatcaccaccgatttgtctaccatcatactaacttcgggagaaaacgggcatccgcttcctagtagaatgaacctcaaggaagtcaactgaggccctgtcagtatgccccataagaatgcccatggtcccttctatctgagtttgaccttgttccatgagaggagaccagccgtcgcttgggccggtcactcctctcacggtgctttgaaggtgctctggcagccgcagtgctcccacgacgcatgggctc

SEQ ID NO: 64093 - DNA, 274 bp, Zea mays
  Clone ID: MRT4577_158453C.1
agccttcaagccgaccatcgcgcggcgacgacacacacagacacaggccacactagggcacctttcgctctcggggagcgcgcctaaacccacgcttactccatcatgctatccatccgatacgatcataacgtccaagatcttggtgacatctactccacaggtctgagaacacgaagctgcgcaagcctatatggctacaaacagcgattgccgccagcgccatactataaccaattgccaaattgctacaacaatcctgtgcacatctaac

SEQ ID NO: 64094 - DNA, 1622 bp, Zea mays
  Clone ID: MRT4577_158454C.1
ggccgcttttttttttttttttttagcgaaattatttggagggttcgcattatagagagagctggcaactctcaagcattaatacaaaaaaaattgttcaatatcaatacatttcgctagggaaccgaaagctccctctgctttgtgacaatctttcttctactttcaggggcatacatacaattacgagtataaagaagacaataggtgagcactggtaaccagcaatatattgctgcacttggtctgccaagtttaggacagtgccttgtgtccacgcctcctgatgatctatgaccccatctcgtcttgaaattacgttcctcgtagcttgcgtcctcctcacgagtcatcatactcctggaaccgtttcgatctccaccgatctaccatcatactaacttcgggagaaaacgggcatccgcttcctagtagaatgatcctcaaggaagtcaactgaggccctgtcagtatgccccataagaatgcccatggtcccttctatctgagtttgaccttgttccatgagaggagaccagccgtcgcttgtgctctgttgactggggctgaagacgagtgtccttgggccggtcactcctctcacgatgctttgaaggtgctctggcagccgcagtgctcccacgacgcatgggctcagtttcaggcctttggtagcttgctggatagccttgcatcgaatttacacaatatggatccattggattcacacaatatggatccattggatttgcacaatatggatccatcggataaccagcgtacggcatccccattgagctatacatgtaaggttcagttgcccaaggatgtccactaacgaagggattgtaatatgcagggtcaaatgaaacattgtaaccatagccaacattgttaggctgaacgttcttggttaagtctgccttcttccgcttcttctttggttgatctgtccttgtgacatcatattctcgggaccctgaaacagtggtggccttcgaactcgtttcacttccatccttcactttgagggcttcagcatttgctaccgccttctctgctgacacttctgcagaattgctaaggaattcagcagtggctgctaatttctctagaggctggttcaccagatcaccttctgtggcaacctgaagcacataatcaggtgcagataccgctggtagctgatggtctatagactgcttcacctcccttgctgacgcagcagaagcagtgtggctctgtatttttgggtgagggttgctgcctgacgaacttctgtgtcttgttgtaccactaccaccactgcttgtctgtgttcccaacatattgctgattgtgctccgaagtgtttgatttggaatgaggtcatctgccagtgtctcgactccacagatgcacttcgactctttaataatataatcccgaatgcctctatcacaaaaactgtcaaaacagcacttgcttgtcaatactgcatctctcatcacttttttacatagtcggcagtggagctctgctggcaagtcatcaacagtcccggctggggcagatgggacaagtaaatccaaaatgccatcgacaaatgtaactactgggacaagagaccgactcatttattc

SEQ ID NO: 64095 - DNA, 245 bp, Zea mays
  Clone ID: MRT4577_158455C.1
gaccatttttagcatcattacttgccaggtcgggcaattcgcaacgtgttgtattcatttgacaagccaaatgatgagactgcactaaggctgatgaatgaatctgcatctttgagcaggagcacaaccctgacattgtctctggctatggctgtaacaatgagtatatctgatgggaccacgagaagattctactatccccgaaacgggaacacataacgcgcctatagatgctcccacatctc

SEQ ID NO: 64096 - DNA, 514 bp, Zea mays
  Clone ID: MRT4577_158456C.1
gagggcaccaaaaaaacagcgccctaaaacaaattttgaggaaaatgagaaagcaaacaatttgcggaccgaagccccataacccagataaatttgtgaaaaaaaaaacttttgcttactctatttttcgcccgaaagaacaaaactaacctgccgcaaaaagaggttataaactgtacacgagccgggggttggagaaaaaaaagtacagccttttcaaaaactggctaaaaatttttaggaattctgactggcaaccgaggccctattttatgcacactttaaaagaggggctggaggccttcccacactattgccctttacattgatagatgctcgcgcaaattgaaacagaagagggggttaacaaacctggccccggggcttgttcatgaacttaaaccgcggggtctcaggccccggcacccattgacgactgacaccttggaggcggaggaaacacattacggtctcctgcacgggagccccgcatgaccagaccttgaacattcaa

SEQ ID NO: 64097 - DNA, 266 bp, Zea mays
  Clone ID: MRT4577_158457C.1
tggacccacccgttcgatcgatttcatttccaccccctgtcttcttcgatcggacggaccaccgggccagcaactgggcggatcgcgtcagcagccatggcgaaggcctacctcactgtgaactaggactacctcaaggctgtcgacaaggccaagcgttatttccgtggccttatcttcttaaaagaattgcgccccgttcatgctccgtctaacatggcactccatgggcaccttcaatgtggccaccaaaaacgggggcccct

SEQ ID NO: 64098 - DNA, 309 bp, Zea mays
  Clone ID: MRT4577_158458C.1
gttaacacaaatgggaggaagctcacattgacgggaccatgggaaagcatgcaaagggcagatcacaaactgcaactgcaaaccacgtgacacattaacgcatgactggtcggtctctgattaacacaactggtgctactgcatcccctaggaacacgtgagggggaccccacctgtgctttgaatatctgatgtccggcttttccgcccccatggaaaaaaagggatcctttggtgatcagatcattcgcgggagaatctaatggtgcggaggaacgtaccggcttgcctggaacttgaacggatggg

SEQ ID NO: 64099 - DNA, 591 bp, Zea mays
  Clone ID: MRT4577_158459C.1
ttaaatgaatatgagtcttttgtgcctgtatataggctatttcgtgcctcacggtccgtgctaatgatcgcccgtgggctgtgatctcgatccaagccctcataatttcagaccagcctggtttgaaattattttcgatccaagcactcatctccatgattaaacagattgtgttttttcgtgtttgggccagcccactaggtccggcctaaatttacaagcattggcaacggtaactgacgcctgtttggcgcgaccgaggacctcagtctcctcaggtgcgcgggtgacgagctgtaacggtggagctaggcgagcgattgtgggagcccaccctctgtagaagatgaacagtagaagccgagctcctcttgtgtgcgaccgagaagccctgcctcctttggtgcacggtcgacgagctgctacgggggagttaggtgagcagttgccggagctctccctctggagaagacgaatggagatccgccggctcaggcgcacgacgaggtatacgtaagaaaaataaaagaggaatccattcatgttgcttatacttccgaaaacattaatcaacgcaaataagaaaaacaa

SEQ ID NO: 64100 - DNA, 784 bp, Zea mays
  Clone ID: MRT4577_15845C.1
gccgctggacgcatgcgtctctcctccctgttgccatcgctcagctcgccccatctcccatggccgcgccctgctcggcttctctagtgcacgcgcggttcgccggccaagtcccctcaccggcatccaccatagctcgctcgcggctgttgctctgccaggccgcgtccacctcgtccgcccacgcccccttccccagcttcaaatgcctcctcctcagcgccatgatgaggaacccggactcctccctcccctgcgaccttccccgcctccctttctctgtctcccatgccatcggtggcggcgccgtcgtccctgttgaccacatcggacgccgctgctcactgccctgtaccagttcaccatggcctactcctactagagacccggcaagcacctcgaccgtgcagtctttaatttctatccagtgcttgacccgtccctctacctggtggcctcggtgagctcccctgcaagctccatcgcgccgtcgccttggtccgtgctcgacctccctatcacttcggtgttgagctcctagccccttccgacggtgtggtcaagcatttgggcgccgttccttctcagaccccctctgctcggtcatggcacctggccgccgcgcccctgtttcctgttcccagctccctactgggccagcgcccctcatcctccctcgttgttgaccgtcgaaccctgtgctcccctgctcggccacacccagcagctcgatccttggccccttgccatggccacagtttcctctccccatctgccaaatcgc

SEQ ID NO: 64101 - DNA, 1001 bp, Zea mays
  unsure (1)..(1001): unsure at all n locations
  Clone ID: MRT4577_158460C.1
ccggccgggacaaaacttctgaaaacctgtcgaatcgacgtactcctggcatccttaggcaatacaaatactacctggggaggtgtggcaagcagcggcttcgagaggctcgaatacaaggtgttgactatctcatacttggccttgccggtatatgtctgggcacactcgctaaagtgagcgatgagacatttggagcgcttggctacacgtacactgtcattgctgtgtctctgctgtgcaagattggggccttgagatcgttctcgctggagaagatacactactggagggagagagcgtccggcatgagctcgctggcatacttcctgtccaaagacacgatagatcacttcaacacgataatcaagcccatcgtctacctctccatgttttacttcttcaacaacccaaggtcatcgatctgggagaactatgtcgtccttcttgcgctcgtctactgcgtgacggggattggatacaccttcgccatcttcttccagccaagttctgcgcagctgtggtcggcgctccttccggttgttctaaccctgatagcaacccagcaaaaggacaccttcttcgcaaacctgtgctacacaaagtgggctctggaagcatttgtgattgcaaatgcgcagaagtattccggcgtctggctcataacacgctgcggctcgctgttgaatagtggctacgacatcaacgacagaatcctctgcatagtggttcttgttgccaatggtgtgatattccggtgcgtggcattcttctgcatggtcatcttccagaaagactgatggatgagcgctgatgtacttgtttgtaatgacatgttacaagtagaatgagcaccgtcgtccttgtagataggctcacaagcaactttgatcgtaagaagaaacaaaaatgatagaagtattcttcggtggttatgtgtagtcagaaaaattnttctatttttacagaaaggggagctatatgggagggtacagcgggat

SEQ ID NO: 64102 - DNA, 214 bp, Zea mays
  Clone ID: MRT4577_158461C.1
gcttggcccacaaacttagagtaccacgtggtaaatgtttctacagctggtgcacagagccaggcgggagaacggttggtctagcttgcgagcaagatcaatgccatttagaacttcaggaactcgtaccggcatcagttctgtaacctgtagaatcgtatccagctcctcgagcccatgctggaggaggccaatgaagcgcccactccactta

SEQ ID NO: 64103 - DNA, 346 bp, Zea mays
  Clone ID: MRT4577_158462C.1
ggagcgcctgctgcacgcgcccgcggacggaattaaccgggtggacgagcgatgttatctggcggccgcccgcccttttttttttttttgcaggtaaagcactaaacagtaaagctacggaaccaaacaagtcaaggctctggatgtttaacaccaaacacatgcccagaagggggcctgaaggcacggcaacgcgacagcccactaactgcaaccgacccatgaagccacaagggtcacacggtggagactaacatacccagttcgggggggggggcaaaggaatccccccctaatgaagaccctaccaacggcgccctgacaaacgacggtaacaagagggccg

SEQ ID NO: 64104 - DNA, 276 bp, Zea mays
  Clone ID: MRT4577_158463C.1
tgtctgggcgccctttttttttttttttttcgctaaaaccttgactatttacttgttgggtcacaagccagaatacaatgattgccgccttggatctataacacccaggcagccgttcagatgtacatttacattcgtactcaggttgcaggaagcataccgactctctattataccgatcaagaaggaaggctatatacctgctagccactgcttacacacatatcattgcccaatggagatacgcagtaagacccacaacaccatcatgtatag

SEQ ID NO: 64105 - DNA, 418 bp, Zea mays
  Clone ID: MRT4577_158464C.1
tcgcgatctagttttttttttttttgcatctcaaatggtaaaacaataaaatacaaatggcaatttaaaagttcagccacacaatattatgtacataacaatagtgaaagttagccgcacctaaataagtagtacaactgaatattgtgacactccaacgacatgtaaatacatttaacaattcaacataatagtggagagtgaacactgtttcaataataatcaacctagtcaccgatttaagagtgcacatataacttaaaacagtggataaacatacatggtgcatgaagatattatcttaaaatacgcattttggttcaattgaatctgttttttgcttcatgagttccatcaactgaagggcaagtaccagggcaagggagaatctttagcaagaacacatcagaacatgtgc

SEQ ID NO: 64106 - DNA, 407 bp, Zea mays
  Clone ID: MRT4577_158465C.1
gttagacgcaagcgtacggtctggactatacaaacttatgtactcttgccttccaacatgtcaacggtttatcgggtgagcctaaatgcatgaactggacgacgaaatacaacaatatgactcggactaccgtatcttcacacaacttaataacatgtgctaacatgtatactatgacacctagagtaatcacctataggttacgaccagttgccacatcacaatgaagctcaggatgaatggcactgcttatataccctgtattggccctatttgacaagaacattctgtggtttcactcagagggaccagtgctattgacagacccctagcgagatatcgtatcattctaggaactctatattctgcaccagtgacgaattgtcaacaagggcgttataaatatg

SEQ ID NO: 64107 - DNA, 1348 bp, Zea mays
  Clone ID: MRT4577_158466C.1
aggaggcggggtcacgtccgctacctcccctctccatctctgcgtgatggacgcccgcgcctcggcttcttcctcctcctcgcggccgcggcgttcgcgccgctggtctccgcgcagctctctgcggatttctacaagacgtcgtgccccgacgccgagaagatcatcttggacgtcgtccagaagcggttcaaagctgaccccggcaccgccgccggcctcctccgcctcgtcttccacgactgcttcgcaaacggctgcgacgcgtccatcctgatcgacccgatgtcgaaccaggcctccgagaaggaggccggccccaacgtctccgtgaagggctacgacgtgatcgaggagatcaagacggagctggagaagaagtgcccgaacgtggtgtcgtgcgcggacatcatctcggtgagcgcccgcgactcggtgaagctgacgggcgggcccgagtacgcggtgcccctgggacggcgcgactcgctcgtgtccaaccgcgaggacgccgacaacctgccgggcccggacatcgcggtgcccaagctcatcgacgagttcgacaagcagggcttcaacgtcgaggagatggtcgcgatgctgggcggcggccacagcatcggcgtctgcaggtgcttcttcatcgagaccgacgcggcgcccatcgaccccaagtacaagaagacgatcagcgacgcgtgcgacggcaaggactcgggctccgtccccatggactccacctcgcccaacgacctggacgggagctacttcggcctggtgctggagaagaagatgccgctcaccatcgaccgcctgatggggatggacaagaagacggagcccatagtgaaggccatgtcggacaagaccaccgacttcgtcccgatcttcgccaaggccatggagaagctcagcgtcctcaaggttctcacggggaaggaaggcgagatcaggaagacgtgctccgagttcaacaacccgcagaacagcagcggcagcacgtcggtgatacggatcagctccatcgaccccgacctagttggtgtccccggtcggtccagggtgagaagtcctgtggaggcatgcctccggttagtatatcgcttttgcttaataattgtctgcgtgcaaaactacgtgaggatgtggtaatgaatcgttaatgtaataaagtatttaaatttgacattatttcaaaaaaaaaaaaaaaaaactggggggggggccgggccgcggcagcggggtacctgtagtgaacccggtcccggcggcgcccggcggcgccgaggaagctgccaagcagcaggaggtgacggacctggaggagaagaagaagaggaacatg

SEQ ID NO: 64108 - DNA, 238 bp, Zea mays
  Clone ID: MRT4577_158467C.1
tacgattggggcattgcatgcatggtttgacctaacctaactcaaaagatacccaattacgtatactaccaagaaatacaaaaagaaagaatgaaaaccaaccaagaggaaagactcattatccagaattcatgtagtgctcgtgtcattaccatagaaaaaaaggggtatcgaaccatctcatcaaataaacaatttgttggtcattaagagtgattcttctcccctgagggagcac

SEQ ID NO: 64109 - DNA, 609 bp, Zea mays
  Clone ID: MRT4577_158468C.1
tcctctagagcggccgccaaggttcctggcggggtggtcgtcagcgccggagaccaggataggtccggctccggcccgaagctccgcggcagcgtgggacctgtagtgaacccggtcccggcggcgcccggcggcgccgaggaagctgccaagcaggaggcggtgacggccctggaggagaagaagaagaggaacatggccaagctccgcgcccccggtcaggcccccacgcgtctggatcatcgtcggagtaggtgttcgggccttcgggctgccactgccactgtgccaggtcacccaagtcattttttttcctcactgtctctttcgtttgtgcaagaagggacgagcaaagtacctaccgcagcggattactaaattgtataattacgcaattgtcgtgtcgagtttactaaagatgaccacaggtaccttcttggtgtccccggtcggtcaggagaagtcctgtcgaggcatgctcaagtttagtatatcgcttttgcttaataattgtctgcgtgcaaaactacgtgagaatgtggtgatgaatcgttaatgtaataaagtatctaaatttgacattatttcataaaaaaaaaaaaaaaataa

SEQ ID NO: 64110 - DNA, 1782 bp, Zea mays
  Clone ID: MRT4577_158469C.1
cgtgatggacgcccgtctccgcctcggcttcttcctcctcctcgtggccgcggcgttcgcgccgctggtctccgcgcagctctctgcagatttctacaagacgtcgtgccccgacgccgagaagatcatcttgggcgtcgtcgagaagcggttcaaggcggaccccggcaccgccgccggcctcctccgcctcgtcttccacgactgcttcgcaaacggctgcgacgcgtccatcttgatcgaccccatgtcgaaccaggcctccgagaaggaggcgggccccaacatctccgtcaagggctacgacgtgatcgaggagatcaagacggagctggagaaggagtgccccaacgtggtgtcgtgcgcggacatcatctcggtgagcgcccgcgactcggtgaagctgtcgggagggcccgaatacgcggtgctccttgggcggcgcgactcgctcgtgtccaaccgcgaggacgccgacaacctgccgggcccggacatcgcggtgcccaagctcatcgacgagttcgacaagcagggcttcaacacggaggagatgatcgcgatgctgggcggcggccacagcatcggcgtctgcaggtgcttcttcatcgagaccgacgccgcgcccatcgacgaggcgttcaagaagaagatcagcgacgcctgcgacggcaaggactcgggctccgtccccatggactccacctcgcccaacgacatggacgggagctacttcggcctggtgctggagaagaagatgcccctcaccatcgaccgcctgctggggatggacaagacgaccgagcccatagtgaaggccatgtcggacaagactaccgacttcgtccccatcttcgccaaggccatggagaagctcagcgccctcaaggttctcacggggaaggacggcgagatcaggaagacgtgctccgagttcaacaacccgcagaacaccagcggcagcacgtcggtgatacggatcagctccatcgacgccgaccagatggccggcctgtcgcagccagggtcgacgtccaggaaggtgggcggccgcgcggatgtcagcactcccgccgcggtggaaacgcccgccatggcggccactgaggcggccgccaaggttcctggcggggtggtcgtcagcgccggagaccaggataggtccggctccggctccggcccgaagctccgcggcagcggggaacctgtagtgaacccggtcccggcggcgcccggcggcgccgaggaagctgccaagcagcaggaggtgacggacctggaggagaagaagaagaggaacatggccaagctccgcggcgccggtcaggccaagcagtagatggatcatcggagtaggtgttccggccttcggggtgccactgccactgtgccaggccgcgccgtttcgctgtgcgcgtgctcccctcatcatcttgtcacccaagtcattttttttcctcactgtctctttcgtttgtgcaagaagggacgagcaaagtacctaccgcagcggattactaaattgtctaattacgcagttgtcgtgtcgagtttactaaagatgaccacaggtaccttcttggtgtccccggtcggtcaggagaagtcctgtggaggcatgctcaagtttagaatatcgcttttgcttaataattgtctgcgtgcaaaactacgtgagaatgtggtaatgaatcgttaatgtaataaagtatttaaatttgacattatttcatacatgtgtttgaatatcttggatactttgttttgttatacaaaatataa

SEQ ID NO: 64111 - DNA, 1431 bp, Zea mays
  Clone ID: MRT4577_15846C.1
agcctgatgactccgccaagggcgccacggcgtcgactggcaatcagccccggagatcttccgcggcatcaagctgtgccaggggtacgtggtggtgggcacgacggtgggcctgttcctgccgctggcgcacgtgctgggcgggttcgcgcgcggcgacgatgcggcggtgcggtcggcgacgccgcacctgttcctgctgtcgagccacatcctgacggagaacgtggtggggtcactgcagcagctgctcgggctccccgaccttcaattcccctgcctgttgccgtacgtgcctagctagcttcctcgtctcgttgcacgtacgtagtagctagacagccgaatcggctctctagctagctcctcccttccgatcgatatcatcgccatgtcggggatctcgctggcggtggcgccaaggtccgacccggaccacgggtcggagcggcagccgacggcgatgctgggcggcgtgatgggctcgctccgcgtcatcgagctgcagctggtggccttcatcatggtgttctcggcgtcgggcctcgtcccgctcatcgacctcgtgttccccgtcgccaccaccgtctacctcctcgccatctcccgcctcgccttcccgccgctgcacgccaccaagtcgtccaagcctgatgacgccgccggctcgcccgccgcctcctcccagtcgtccccagagatcttccgcggcagcaacttggagcctggctgccgcaggctgttccaggcgtacgtggtggtgggcacgacggtgggcctgttcctgccgctggcgcacgtgctgggcgggttcgcgcggggcgacgacgccggcggtgcggtcggcgacgccgcacctgttcctgctgtcgtgccagatcctgacggagaacgtggtggggtcactgggcgccttctcgcctcccgtcagggcgctggtgccgctgctctacaccgtgcgccgcgtcttcgtcatcctcgactgggcctacgacgcgtgggcctccaccgcgcaggacgccgcctgggtgtggttcggcaggtgcctcgccgccgccaacctgctctacttctccgccaacctcttcgtcttcctcatcccgaggttcctgccccgcgccttcgagaagtacttccgcatgcgcgacgagctgtgcgccaagacggccgaggacaagcacgcgcgcgagggtgtcgtcggtgcggccaagttggaggtgtcgtccaagaaggcggactgagagctctcggctctcgcagtcgcagactcgcagtcgcagggcggggtgtaatttaaattcggtagcctgtggtgggcctgctgtaatttctccctgcgttatgtttaattgtcatcggtttgaccaatagtcgttagtcggcaggagacctaatcgacctcagttttcgggtagggcagtggctcgcata

SEQ ID NO: 64112 - DNA, 546 bp, Zea mays
  Clone ID: MRT4577_158470C.1
cggcgcgcgcgggctgggatcctatagagcggccgccctttttgatttatcaaattttgtcgagagcgatttatagttttatgcggaggggcaacgcggccttttttttagacgggatcttattgctaaccgtgacgctagatggtgccccaattgatatcggaggcaagaaacgaagtgagttttcactgacgccgtccaggaaaagagggtgcggtgcacctgtaagatcaacgctgggcgagggccaaaagggccagggcctgggggcgagcaaggagtcctgcgacctcgtaacagagctacaacctggtgttgaacggcaaatatccagtgcgcggtcaagggtactgagcaggatgtcttaggcgcgccacaaatgaatgtgtgccgggatgcgggcgacatggactacgtggctaaagcggttgaagtgaccaaggcctgcaaaaccacctgcgccaaggggaagcagcctctgataagcgagaactgtaggaggaaatgcacctcttcccattaatgaacgcagagcacgcacgccgg

SEQ ID NO: 64113 - DNA, 793 bp, Zea mays
  Clone ID: MRT4577_158471C.1
gctcgccgccggccgagcagaagacacaaaccattccccctagctcctcacttttcgccgtcgcccctgcccccacagacatccgacagtctcatcagcgtctccccgctttagggcggccaaggtcaccggctccaccacagcaaggcggctggtagcggccatggagaggctgaacacgaagctgtacctgcagaactgctacatcatgaaggagaacgagcggctgcgcaaggcggccctgctgctgaaccaggagaaccaggcgctgctctccgagctcaagcaccgcctcgccaagtccgccaccgccaccggtggcggtggcagcaacagcaacgcggcagcggcgagccgcgcctcgcccaagcccggcgccgacgccgacgccgctgctccgccgtctcatcatcaggccggcggcatgcctgcccccaagcccaagcccaagtaggctgcggctgcagtccgtcgcacacggctgctgctgtcggatagtggtgggctgccttcatggtgtttgttttagcgaccactttaattagctccggatgttacttagtttcaggaatgtttgtctagttttagttgatgggcactcatgtgtggcaatgatcttgcgatgaatggataactagctagatggatcgatcggtcgatcgtcggggggtatagagaggtgtgcgtttctgaactctgatgagagcggagcttcttcagtcttcgattcgcaaatggtttgaggagagtggcttcctctgaaaaaaaaaaaaaaaaagcggccctcgaggct

SEQ ID NO: 64114 - DNA, 389 bp, Zea mays
  Clone ID: MRT4577_158472C.1
gtttgacaacctcattttttttaaaggatcttaagacctggaacggaaattacttcatcgtctctttgagaaaatgagaggcccttggaggaatggatttcctaagttactccttatacgctatttacctttgtttgccttcaggggctatcttcatactaaggtgtaatacgctaactgacttccactatacgaatcctaaagattgagtggacattgactaatattgtactcattccccgcaatcctctaagttccgcaactagcctttaatggactatatctatcttcacttataccgagtcgtgaactgttgaactttagatctgtgtatctgatacaacacctagcactaacgaacatgaatactctataggatttacacttag

SEQ ID NO: 64115 - DNA, 336 bp, Zea mays
  Clone ID: MRT4577_158473C.1
aatgccaccaacttgatctactgcaagccgcataataacccgaccgacaccatcaaggtgttgcgccttcgtatgcttctcgtggcttttgctgcgagcgctaccgcgaccaatacaaccggatgctggcagggtcatacacctgcgcttgttcatctacacctgtcagcacatgtgtcatctgcatgtgaactgccaactcttgaacattacacgatgccagaggaaatggcagctggggtccaacttttatcaccggtgcatgtgccaccatcatttgatctattaccaccaccatgtctgtagcctactttggcgcacaagattaaggctcat

SEQ ID NO: 64116 - DNA, 405 bp, Zea mays
  Clone ID: MRT4577_158474C.1
cttccctggagccgcccgcttgcccttcggtcgctagctcgctcggagcgcgtcgggccggtccatggcgctcttcgggcgggtgctggctctcgccctggctctggccctgggccccgccgcgaccctggcgggtcccgccaagtcgccctaccagctggtgctgcagcacagcaggctccggggccgccagcacggccccaacgtgtgtgctgtgcagaacgttattggcactaataggaagtacttcaccaactgcaagcagcggtaccaaaggaaaatctgtggcaaatcaacagtcatcagctacgagtgctgtcctggatatgacatggtccatggggagaacggctgtccagcatccctaccactgtcaaacctttacgagaccctgggagtcgttgg

SEQ ID NO: 64117 - DNA, 242 bp, Zea mays
  unsure (1)..(242): unsure at all n locations
  Clone ID: MRT4577_158475C.1
ctggnactccaccgcggtggcggccgccctttttttttttttgtggtgaaatgaacaaactgtattgcttgcataggcataacctttatggttggttacatcactcatgttaccaagcatagagaaaccaacatccagttacaaaatgctttgagctgctgcagccttgcaaccttttgtttctaatacccacttctccatatcagaattccaaaacatctgtgcaagcaaacccactctat

SEQ ID NO: 64118 - DNA, 257 bp, Zea mays
  Clone ID: MRT4577_158476C.1
tgggtacagctaacaattggggctagtaccatttggcgtccacacatttgggggctagggatcacgagggggggggatccataggggaggaatccccttggtaacgggatggggcccttccaccccctggaacaaccattggtgaccctccttaatgacaaaatccttatgggagggcgatgcgggtgatcctgagctccgggggcccgctgtccctggtccccagcaggcgcagcagttttgccccggacgcgtgg

SEQ ID NO: 64119 - DNA, 222 bp, Zea mays
  unsure (1)..(222): unsure at all n locations
  Clone ID: MRT4577_158477C.1
ncngccggggnaaaanctactcagagtggtacgagggcgtccacagcatcgccatgcccccgtcgccccacccctgcgcgcgtcttcctccggcatgcgccagcccccccgagctcgcccgcgcaccagtctcgccgtcggntntcccgcccgcgggcccgcgcgccgcggtccttccccgtgtcgggctctctcccccgcgtcgcgtcttcctcctcggcc

SEQ ID NO: 64120 - DNA, 351 bp, Zea mays
  unsure (1)..(351): unsure at all n locations
  Clone ID: MRT4577_158478C.1
agctaataagatacagagtggaataactcgaccacctgaagagcgacgatcggataccattgattttctggtgcttattctgagcgctctctctacatgaagctgctaactctgacatgtcagactccatgctcacatgcanctattgctttctatatgtcgncatacctttatttaattatagattaagaatgtgaaaactgagatattcaaacttataagctgtaactagcactgtgcacaaagcatcatatcttgatgggccttgatgtgtgaaaaatcgtcagtggtatatttggtgcagtcattgatgcacaacatcagggcacaagagatgcactaactcttgct

SEQ ID NO: 64121 - DNA, 657 bp, Zea mays
  unsure (1)..(657): unsure at all n locations
  Clone ID: MRT4577_158479C.1
ttttttttttctttttttttttttttttttttttttttttttttttttttttttttttnnnnnnnnnnnnnaaccaaaaaaaccccatttttgggggcaaaaaacccatccggggttaaacaaaccccctttttggggggactggtttaaatccccttaaaaaaaattctttggaccccagaaaaagcttttgggggcttttaaccccaaacccagggaggggcctaatggaacccaaccagggcctttttgccccccaattttcctttcccccacccaattttagccccatccggattccccaaactcctttggggttttctttggggcccagggaaaaaaacccaggtttccggagcccaaaacctgggggccaaccaaccgggcccccagggggcccccccaaagttttttttttagaaaaaaaaggtaaataaaaggccccgcaaaaaaaaaagaaacccttttaatgggggggggccgggggaaccagaaaaaccccccgccccttggggggggcccggaaaacttaaaggtccttttttttccctggggggtgtccattgtttaaggggttttaaaggttaaatgggttctcaaagaaacccaaaaaggggaggcctttttgcccctagggctggccgaaattttggaagg

SEQ ID NO: 64122 - DNA, 474 bp, Zea mays
  Clone ID: MRT4577_15847C.1
cccctcgagttttttttttttttttttttttttttttttttttttttttttttttttttttttttttttttttttttttttttaaaaaaacaaaatatttttttaattaaactttacccaaactgattttttaaaattgttgcccgatgaaaacaaaaaggaaaacagtattttaggaaaaagcaggcccttttgttggttggaaggggggaccccccaaaaaccccccaaaccagggggaaaacccccccccgggggcccaaaagaggagcgttttcctttttaccccgaaaaaagaaaaaaaaaaacttcccgggggggggggaaactgaaaaattttagaccagggatatgggctttttttttggaacccccagggggccttgggaaccccttcctttgtgggaaaaaacacggccctttgtttaaaggagctccataactggaaataatttcctggggccaaattcttgg

SEQ ID NO: 64123 - DNA, 461 bp, Zea mays
  Clone ID: MRT4577_158480C.1
aaccacacataaaccatcattccacgagcagacgggacagtgcagagcttccctgtagagaagtttaggagcaacgatgaagagtagcacactcgtggtcatcctggttctccaggccgtcctggtcatggggatcctctcacaggccaacgccgagttcccaaagtgctgcgacagctgcaggttcttctcgggggccgtggtctgcgacgacgccggccccaagtgccgcgacggctgcgtgaactgccgcgtcgtgcagacgagccctaagaagacgttccgatgcgccgatgcacgcgtcgacgatggcacgccctgcaagccctgcaagaagtactgatcgctcatgctcagaacatcagatgttgcgccgaaaataaaagctgggatgagttgagcagagccgttatggctgtacgtgcacgtgttccacgcccaacaacaattgttgttatcat

SEQ ID NO: 64124 - DNA, 283 bp, Zea mays
  Clone ID: MRT4577_158481C.1
tccgggcctacatttcttcatcggctcgtaaactcctcacctaggagacctgatgcgggggggtttacgaccgggcgggggcggaattcatgcctccggatttacaagggccgtcggtgagcgcacccgacactgcgctgattgctgtgctcgttcagcactagaccttacctactgctaaaccaactacatcggcggcgtgcctgcaaccatataacatatgtctttccgaggcctctggcgacgtcctcggaattcctaacactgaccgtatgccttcacg

SEQ ID NO: 64125 - DNA, 472 bp, Zea mays
  Clone ID: MRT4577_158482C.1
atgaataccaaacaacaatactgggaatctttcagcagtttcagtacaaagtccaaaagggggggaaaaagaaagaaaggaagatttcggcccaccaaactagtaaaagataaccgatcagcccataataatgctgggtggtgccaagccaaattatacccaatcactaaacccgcatggcatgggttgcaattgcagcggggattgccaaaacccttaataatccttttttccgttcattttctatggagcagcagccagtcactgatcaaacacacacatccagcaacagcaatgcttgcaggtaacaacaaaaccagaggaagggagtcctcatgtccacagggaacactcccaaccttaagcccatgccttgtcaaacttgagggggttcaccacctcccaagggaaatcggcgtcctcaccgcccaaaggccctaaacggggggcttgaaaaacctgttgccgccct

SEQ ID NO: 64126 - DNA, 510 bp, Zea mays
  Clone ID: MRT4577_158483C.1
cttcatggggcgaagagcgatgagtcaagaagaatggtggagaagaaagtcgaggccgccgctggcgaacttgcgatgggccaacacagagaccatggcgtgctgctcagggggtttgccgggggtcgggaagggtgtattcgtgaaggccgatgggttggagcgctctgtggtggcatgattcctcgacggacttggtggtcaccatggaatcgcgctccgtcgccgagaggactccctgcgcaaccatcctcgaagcgaggttgcgaggcacctacattctacattggagaagtacctggagttgcaccaaaaaggtcaagaacaggtaccactggaggaacatgaaggatgctacgatgagttcggagaggtctaggtcgtcgtctcctagtcaactatggttgcggaggatcgttgttgccatatggtgtattttatttagttattttttatagaactcttatatataataaaaatgtgacatcgatttatgtgccatgagtcgca

SEQ ID NO: 64127 - DNA, 398 bp, Zea mays
  unsure (1)..(398): unsure at all n locations
  Clone ID: MRT4577_158484C.1
cccagcgtccgtctcttactgctgtaagtcttactctggtacaaggnatttaacattgtgttgactgcagagaagttcccgtggatatttgctactcatcaaaaaaaaaaaaaaaaaaaaaaaaaaaaaaaaaaaaaaaaaaaaaaaaaaaaaaaaaaaaaaaaaaaaaaaaaaaaaaaaagaaaaaaaaaaaaaaaaaaaaaaaaaaaaaaaaaaaaaaaaaaaaggaaaaaaaaattaaaaaaaataaaaaaaatgttaaaaaatgaaaaaaaaaggggaaaaccctgtaaaaaagtaaatttaatttaaattgattgggatgggaaattaaaaacagtttgggttgagagaacaaaagggcaaaaacaaatggatttttttaaaagttttgcaat

SEQ ID NO: 64128 - DNA, 461 bp, Zea mays
  Clone ID: MRT4577_158485C.1
agaaaggaacttaccttttattccaaatctgaaaggccatagtaacgtggtcacttcttgacacaacgaaaacacgtctatcttcacataaatttagtatgttgcggcccctaaatgagacaataccaataggaaggcaacaatgcatcgcgaggtacattgcaaccatagaaattgctatacaagtaacacgatgttatctactaggtataattgaagatgcttagggactctgaactatggccttgggtcctcattggctctttagctttgagaagctacaaaattatcggattcaaaggatagtcatctggtgagagtgaattagcacgtttctttaccttttagagactatagttttgcatgagtgttagaaggcataaataacttttttggatatgaaggtaatgtcttgggctgtagaagaaggaattctattcatcacaattgtttagaatgga

SEQ ID NO: 64129 - DNA, 489 bp, Zea mays
  unsure (1)..(489): unsure at all n locations
  Clone ID: MRT4577_158486C.1
gttgttttttttttttttttttcgtgttttttctccttccgtgtcctgcctatgggttgggttctcttgtcggtttgggggctccgtgtgccgggtcggtcgccgccggttttttccgtggggtttcctccgcccggncgcgtgggttggggtgggggattccggtccggttcctgcgggcggnccttctttccgtgtggggggtcccgcccctgcctggcgtggttttggctctcgctcggtcctgcgcgcccttgcggtccgctcttcttttggggcgctttgggggggggtgcctggcgggcgtctcgtcggggtgtctggtgggcgggctggctgccccttttggcgtgggtgggcctgcctccctggccgggcggggtcttgttcggcgggttgcgtttgtgccgccccgcgggcttgttgtgggggggggtcctcttttgtctgcgccggttggggctcctccttggggggggggggcccttt

SEQ ID NO: 64130 - DNA, 808 bp, Zea mays
  unsure (1)..(808): unsure at all n locations
  Clone ID: MRT4577_158487C.1
agccgccaccttcctctctcctctctccacccggctgtctctctctctctctcctcgcttctctctcccaggcagcgccccgcaggacccgacgcccagctcgccaggcgccatcccgtccgtgccaggccgccgcgcccagagacccgcccctgcagccgaggacgacgcaccaggagcgcctgacgccacgaagccccagccgcgcacactgccctgcgcactgcgcactgcaactgcctcgactcgccgagcagcccgcgtgcacccgagccgcccgcgaccgtgcccagctgcgacgcctcgaagcccttgcgcgcagcgcccgaccgaagccgccacccgcgccgtccgcgtgaatggagccatttctttggcgttaatggagctttaacacgtgcgtttctctcccattactctcatccataaagtcccggccgccattgatggagccgccgaccgttcacttcctcccctcggcgtctctctctccccgtccgctctacaagaccgccggatctctcctctctctccttacccgaacctctctcacgctttctctctcccttgctcgccgttcgccatcgtgctggagcccgtccgtgcagcaccccggcactcgcagcagcgccacgcacccgccacacaaagccctcctctgctctcgccgtgcccaccccgttcgtcgatcgtccgccatccgtggagcctcaccagaactcacgccccaccgtccaaacgcatcgccggagttacgccgtncgtcgtcgacgtgaccgtgcagcatgacgaccacgctcgtttcctg

SEQ ID NO: 64131 - DNA, 1581 bp, Zea mays
  Clone ID: MRT4577_158488C.1
ccggccgggacccattcacttgcaaggcgggcctgccccctcaatctccagcgtgcgcggcgtcccgatcgcttcgtaaccgcctgattgatccgcctgtcctccgagccaggctttcaccgcgcggctttaatcccgattgggttggctggaccgcaacccaattgggggttaattgggattgctactccgcggctgcctgtccctcgcgttcctggattggcgaggccaatcgactggtttgctgcagcctcctgggtagaatcatgaagctgaaaaatagcacagtggagacttttaaggagaacaatatgattttcacttctgaaggaaatctccactctaaaaaaatgagagaagattatgttgctagtccaaaccaacctggtgttgtccagacaagatgcaaatggataattggagatgtaactgaggtctttgatcgcagcacatggaagcttggaaagatcttaaagatgctaaagaacaactactttgttatcaggcttgctgattgcatccagctcaaagagttccacatatctagtttgagaatcccacgtggtctggaagctcctcaaagcaagccctttcatgcagcagataaggccaccggacgcggtaatcgtcgacctgctgatggcgccttgcccggcgcaagggctgcggatcaaatgggtcaccgagcctacgagctggggagcagcggcaagaagcggaaagcaaccgcagacgcctctcaccatctgggcagagcagcagcagacactcccggaaggtcgccgcagcctccaacccgaacggcggcagctacccgcacaactctccacaggccataggagacgcccaatgctcggtggccagctgcagcgtcaacgacctgtaccgcctcggcaatggcggcaacgccaagcgtcgccccgccgccgcagtgtgcctccctgacgacgccatgtccgcgtgcccgtgcacgcccggtgccagggacggggaggaggacgacgcggcgggcgtgcacgggctggagctggaggcgtacgggtcgactatgcgggcgctgtacgcgtcggggccgctgacgtgggagcaggaggcgctgctgacgaacctgcgcctgtcgctcaacatctccaacgaggagcatctgctccagctcaggcgcctactgtcctcgtgattattggcacttggcattggcgcattgccagccaccacccttctggccttctctttcgtacgtctccagcgtcgtcgtcggccaacggccatgcacgtcggcttggctcgcggaacgccgcgttcagcgagcctcttgcttttactcttgttgctaattgctattacatggttctctgtctagtctaggtagaaagaatcctatgttcataccagtgtcgagacatgtcatgccttttgtatcctggatatagtcttgcttgtaaatgcaaacaagttttcctttgagggaccatatttacaagtttttcttcgaaattaaatgaattttctaaaaaaaaaaaaaaaaagaaaaaaaacttttttttttttttttttttttgcgggaatggagctctccttagt

SEQ ID NO: 64132 - DNA, 575 bp, Zea mays
  unsure (1)..(575): unsure at all n locations
  Clone ID: MRT4577_158489C.1
cgtacaagagatgaagttgtggcttgggtgctgtgcactgtacaaagcaggtacacttgagtgagatgatacacacacaattgaacttgaatcaggacacattcgttagaagaagatacaaggatngtggtggtggtggtggtggagggttgaagaacgagaggagtacaattaattaattgtaattaattaaaaacatcaagtaagcgtagtttctttctaaactgaagtcaatacaaactgattaattaatcgaaataattaattgattaaaatgtgaacaaatgaatggatttttaacaatattttaattacactccaagttatcaaaagtaacaagaagaagaagaagaaggtttttaaatgtaacaattgttgaagtaatcgatcgatttctttcggttatgaacaaacctcgatttactatttatatataaggtttttcttttcatgaaagatcatcttgtaggaatgagccgaagtgttggtcaaatcgattgtgttgttttgaaaagttggattaaataacaagcaatcaatggctttcgatggtttgatggttttgattggtttga

SEQ ID NO: 64133 - DNA, 396 bp, Zea mays
  Clone ID: MRT4577_158490C.1
cacaaaaaaagggtctaaaatgatctcttttgacactacccctaaggaaaacaacagactccccactttctgggttggaagctccctaggattcccctaacaaatagggggctgccctccaaaaaaaattaaacccagggaaacctcccccaaataaaaacttttcccccttgtcctaaaagggaggaggggctttgttaattttaaaaaaaccgtctggcgaaatttaaaacaaaacacattccccccctccccatgcaagatcatatttttgaaaccccccccctctgggttcataggcatcaccttcccctggtgggggacaattttttccaaaaggttcgcgccctgaatttcgaacattttttttatcgttagccgaatttttattttttt

SEQ ID NO: 64134 - DNA, 490 bp, Zea mays
  unsure (1)..(490): unsure at all n locations
  Clone ID: MRT4577_158491C.1
ccctctagcacgcgcccccggnnnnnttttttttttaaaacagggaatgtgcaatatatatttctatgattgggctgaaaaatattggtggattaaacaaaatcacacgagttataacaagaaattttgaagaaaaaaacctagctgagtaaactgctactgtatatccacttaggaaattatcgatgtaacggccgtgactaaccctatgggcatatctccactaactattaagaggacagtgtagactgcccccgcctcaacagcccacgccagcccctccgccgcgattcaccgctcgcccgcccgcggatccagcacttccttcaaccttggctgtggcagcagatcccttttcagctgaagcaccctcaattttgggggttgtcccactgatctcagtattcctcaactggacggccttggcaaacgcatctgatatgtcggccacaacatcttgagccttgatatccaccaggggtcgggtatc

SEQ ID NO: 64135 - DNA, 995 bp, Zea mays
  Clone ID: MRT4577_158492C.1
cggacgcgtgggcggacgcgtgggcggacgcgtgggcggacgcgtgggcggacgcgtgggcggacgcgtgggccaggctgtgctgcgagcccggggaggcggtggcagtcaacctcgccttcgcactctcccacgtgcccgacgagagcgtctctccggccaacccccgcgacgagctgctccggcgcgtgcgcgcgctgggcccgcaggtggtgaccctcgtcgagcaggaactgaacaccaacacggccccgctggcggcgcgcttcacggacgcgtgcgcgcactacggcgccatcctcgagtcgctggacgcgacgctggggcgggagactgcggagaaggccagggccgaggcggccctgtcgaggaaggcggcgaacgcggtcggccgggatggccccgaccggctggagcgtgcgaggtcttcggcaagtggcgcgccaggttcggcatggcgggcttccgcccggtgtcgctcggctcgagcattgcggaacagatggtcgccccccgcgtcggcccggtgcctcccgggttcacagtcaaggcggagaacggcgtgctccgcctctgttggatggggcgcgtggtgaccgtcgcctccgcgtggcgctagaccaccaccgggacggcgggcggccgggcgcgccattattgccgtcactaaatcgagaagatgacattctctctgattcattcatggtgatcctattcctggtgctggtaggaggagtatgtgctttgtacagtcgcggtgctgcctaactagtgggcgcggcgcgaaatgtgcagctgggcccgactcctttcttgtcgattaatgtttgtctgccacgtaggtagatgagggtttctttgtggcgtacaagtgtaaggtaggtggaggtgaatagcggttacggaaattgccacttggaagtagtttgtggttcggtgagttctttctttgcatccttggtggaatcgatccgttaaataaatattttgggatt

SEQ ID NO: 64136 - DNA, 2398 bp, Zea mays
  Clone ID: MRT4577_158493C.1
gaccctcgggctcattcctccctccctccctccctcctcggtagattcgtctcgtcaccttcctcctcctcctctctttctgctctccctgccccgacctgccccgccctgcatggagccaggcgcgccgtggcgcgatccgcgccagggttactcctacggggtcggatcggcgatgcagctccagctccagctgcagcagcgggccgacgcggcagccggtggaggagtgctcaagaggagcctcggcgagctggagaggtggcagcaccaccagcagcagcaggtggccgcgcaacaggcgctgtacctgcgcgccgtgaggcagcgcacggctgcggcggtcgatatcgccgccttgctgggaggcaccccggctcagcctctggttctacccgggtccagctttggagggggcctagcgtcgccttcgtcgacgctctcgtcgtcgctcaccaccgcgtccagggcggcggtgccgctgatgcagccgcagctgcagcggcaggtgccgctcacgacgtcctcaccgcagacgcagcccttcgggctgtcgacggcgccgctgcctcagccgtcggtttcgagcgagctgttcattttgcaggagctcgagaagcagctgctggacgacgacgacgacgacgagccggttgcggcgatgagcggcaccggttccgccgtcaccaactccgagtgggaggagacgatacagcagctcagctccatcgcagccgcgccgtcgcccgggccccctgcagcggcgaccccaaccaacaacaacaacaataacgtggggatgacgaggtcaccttcaaactcctcctcctccaccgcgtcttcatccgcgtcctgctcgccgccgacccccggggccgcgtcgaggcagctattgtctgaagccgcggtcgctatcgcggacggccgcgcacaggctcgggatgacgaggtcaccgtcaaactccttcacggcgtacttgatatcgtcctgctcgccgccgaccccaggggccgcgtcgagctggttatcccctggtctagctctggctatcgcggatctcattcatgaagcgtcggccagccatctggccgccctgaagcgcgcggctaaccagcacggcgatgcggaacagcggctgattgccatgatggtggccgccctgtcctcccgcattgctccggccgcctccgccccatctcaactcctcgccgacctctgcagcgtcgagcagcgcgccgggtcccaactcctacaggacctctccccgtgcttccgcgtcgccctccacgccgccagcgccgccatcgtcgaagcggtgggcgaccaccgcgccatccacctcgtcgacttcgacgtcagcttcccgcagcacgcggctctcatccagtacctcgccgaccgacgcgtgcagggcaggtccctgaaggtcaccgccgtcaccgacccgagctcgccgttcacgcagtctctaaccgcatcgctaccagccatcgaggagcggctgaagaagctcgccgagcgagctggcgtggagtaccgctttacagtggtcagctgcagagcagcagagctggatgcgtccaggctgtgctgcgagccgggggaggcggtcgcggtcaacctcgccttcgcactctcccacgtgcccgacgagagcgtctctccggccaacccccgcgacgagctgctccgccgcgtgcgcgcgctgggcccgcaggtggtgaccctcgtcgagcaggaactgaacaccaatacggcaccgctggcggcgcgcttcactgacgcgtgcgcgcactacggcgccatcctggagtcgctggacgcgacgctggcgcgggagattgcggagaaggccagggccgaggcggccctgtcgaagaaggcggcgaacgcggtcggccgggatggccccgaccggctggagcggtgcgaggtcttcggcaagtggcgcgccaggttcggcatggcgggcttccgcccggtgtcgctcggctcgagcattgccgaagagctggtcggcgcccgcgtcggccatgtaccgcccgggttcacagtcaaggcggagaacggcgtgctccggttctgttggatggggcgcgcggtgaccgtcgcctccgcgtggcgctagaccacggcgggcggccgaccgcccgcccgggccattattgccgtcactaaattgtcagttacataattcgagctattgctttcctcgttctcccttcttcctttttttttaccttgattgggtgaggagtgatgagtttgccatgatctggtaaaaatccttcctagctgtagcgactcataattcttataactgctcatagtagtatatggaaaagagtaagttatatcgcaatctcctcctaattttgtgtggcatgttggtagaag

SEQ ID NO: 64137 - DNA, 646 bp, Zea mays
  Clone ID: MRT4577_158494C.1
gctattcttgtcctggcatccgcagagatgttgttctgttctgctgaccatttagctgttgccccgccgcgcatgaggaagaagagagcagaggaggatggctcgtacgaatcataccgcccgcttgtccgcgggaggcaatgccccccgcttgctgctcgtcaccaaggcggcgaggaagtcggcgtcgactaccggcggagtgtagaaggcccacaggtacaggcccgtgaaccgtggcgctgctcgagatccgcatgtaccataatagcactgagctgctgatccgcaagctgcccttccatggcctggtgcgcgagatcgcgcaagacttctagacagacctcgcggttccatgagcctagctctgttatggtgctccaggaggccgtcgaggcctacctcgtcggtctcttcgaggacatcaacctctgtgtcatccacgctaagcgtgtctccagtcatgcccataggacattgagttcgtccgccgcatccgtgttgagcgcgcgtagacatcatctccggtgatctgatgaatgtctagttaccaatacaatgtatgctgtattagcgtctctgttctgtattcgatattttggattcggatgcagtgaacaactgctttacctatgaaaaagaagaa

SEQ ID NO: 64138 - DNA, 175 bp, Zea mays
  unsure (1)..(175): unsure at all n locations
  Clone ID: MRT4577_158495C.1
tgtagttactatccactataattctcgccgctantcccctgtcctactgctactgctactagtggtattgtctccccaaacccaaccctccctaatcccctcaaataccttatatacagcaatccttcctcgccgtcttgattgctttaaccgcaactatccatggattaatgtc

SEQ ID NO: 64139 - DNA, 557 bp, Zea mays
  Clone ID: MRT4577_158496C.1
gctagtatctacctgatttggcgtgtaatgatgcttatcattgttgcgctctggttccacatctctggcgcatatattgtttaggactactgatgagtgttctgggtgatcgccacccacatgggagaatgatcacccccactatgctcgttcggttaagggtctacgatactgcaagtcttctgaaaacaaagtgctggccttcctgctgggataattttacaacaatcacgtttacaagttaggttcagcgcagagatacttggacatactccggttctttaattatgctgaacttctagaggaactgggccagatgtacagcattaaaggtcaggtggacgaccctggtaaatcaagctgaccagcttaactttgtagacagaaagaacgatgggctcctgctgtggagacgacccatgggagtcatttgtgaatactagatagtacatctagcatactttcaccttgcgatgtgcttaatatgggaaaggcacacaaacgatccacgctacctatcttagctacctatcttaaatctatacatgacagctctt

SEQ ID NO: 64140 - DNA, 206 bp, Zea mays
  Clone ID: MRT4577_158497C.1
cttatattatgctttattgttactaatccattatttacttttttttttcgagagaaaaaaacaaccccggctacattttaacactggtggtaattctacataccaaaaaaaacccccataggggggcctttttcatacaaaattcgctcatcacaacacttgtttctttaaaaattgaggcgaggcttccttttattttagggaat

SEQ ID NO: 64141 - DNA, 303 bp, Zea mays
  Clone ID: MRT4577_158498C.1
acacaacaattttttgcattattcccaaacctaaaggggaaatgggtctataaaatggggaaaaaaatggttgtatcagttataaaaaaataatgaccgtggtagttcaatggttaacttggctgggggccgacacttattttttggatgaccctggttggcattactgctcccagggggttttttgttctggcccttgggactagccaattttgctgaatccgctccatgacgtggcacccggacattggtgccatgggagcggaaaaaggacccaaaaaaggcgccccggcccccctcctt

SEQ ID NO: 64142 - DNA, 711 bp, Zea mays
  Clone ID: MRT4577_158499C.1
ggccgcttcgaggcccggccggttcccgggaaaaaaaaaaaaaaaaaaaaaaaaaaataaaaaaaaaaaaaaaaaaaaaaaaaaaaaaaaaaaaaaaaaaaaaaaaaaagaagaaaagggtgggcttccaaaaacaaaacctggaatccgggcccggcccccagccgaaaaagggcccaaagggccccggtccctggcccggctacgggaagggtccgggtctggcccaaaaattttggagcccccagggccctggggagcagcccttccgtttccgcattgggccgggttccggggtccaagggtgggaccagggagtttttaccctgccagggggggaaattgctcctatcccagggccccctgattatgcttatggaaccggggggttccccgcctggggaattccacccaaccccggggttggggtccaaattgaaatcccccagggcccgaaattcccatttggcaactatggaaaccttggccctggttccccaggaatggaaaaattccggtggccccccctggtacctaccgcaaattgggggtaccagttaaatcccgggaaactttaacattctggaacccgggaaggccaggttatggagttccttggggggggccccaagtccaggtccccgcaaaagatggaatccggaggcttcccttgggaactggaaggcggctgccataaacttacttggtggc

SEQ ID NO: 64143 - DNA, 423 bp, Zea mays
  Clone ID: MRT4577_15849C.1
ggcgtgtgcgaggcgccagcagccgattgctacgccggccgctcgccgtcagcatccggcgacggggacacggtgaaacggtcgctcgtccggacatggcgacggcatccgactagatccagcccgtcgatctatagtcaccatatgagctaccaaagctggttcggactgcggtccgcatcaagagcttgaccaagtaccatgtcgcctgcaagcaacaaacttctgatctacaaagtctcttgatgtggcctcaagccggtgtgctctctccagggcaccgcatcgtagcagcatctggcaagctcggagagcatcaccagaacaacgataagccgtttgacaagtgcaaggttaaggataacattgtaagcctgaaagccaaaggacctgagcagtacgaatctgaactgaatgaaaagc

SEQ ID NO: 64144 - DNA, 432 bp, Zea mays
  Clone ID: MRT4577_1584C.1
tttttttttttttttttttttaaatattttttattttttaacttattgtggggaaaggggttttttcatactttcatgcccattttttgttttacggagaaaccccctattgttgggggaaaaaaataaagactggtccaggacgaatcaccaaaggttgtttacaaacatgcggaagattatttgaaataaattttaaatgaaaaacatggggcctccaatgacaaatcattaccttgcgaagggggggccccccaccttaaactttcgaggaggaaatagaccttgccaaatgggcccaggcaggaattaattaagacataatacttcttggaagccccaaactactgggggccaataagattaacccttttgtaaacctaccccatgggggggggaacactctccattgtgtagaaggccacgcacccg

SEQ ID NO: 64145 - DNA, 426 bp, Zea mays
  Clone ID: MRT4577_158500C.1
agggtgcgagagagagggttagaccgtcaacctcgagctcgtgtcacaagcacaacctcactcggagctccgcagaaggttaggaggggtatcctgcaaccaaggaaggtgcacggatgatctatcgggcgtgaagaaccgccagtcgaatgcaatttctcgctggacctcgcggatcctctatgggccgctgcgtaccgtgggcgtctatgtcgacatcgtccctatctccggagaagaacaggtggtccaggaggagctctacaacgaaaagtacgagctcatctaggtggcgtctcctagttagctttaggacgccaaggttaatgtttagtttgctttattgctctcatttatttttggtaagacttctgctatgtaataatgatatttgcgacatttatctctatacacattgtcattaaa

SEQ ID NO: 64146 - DNA, 319 bp, Zea mays
  Clone ID: MRT4577_158501C.1
ggcgggtacgcggggcggtgggtgagctcaacctcgagccaaacaagcaacggattgagcaactagcgctaggcgcatcctcttgctccttaacgaccgagggatgaaatctttcgacgactatggaggcccgagaccgattcctgtggatcactatggaggggtgctggaagcaagctaggctaccttctggctagctctgccatcttagaaaaattcctccgcgcttagcttactaagctaggttggtaagctaaacaagcctggttctgcgggcactatgcgaggacggggatcgatcgtgacgagaatgaacttc

SEQ ID NO: 64147 - DNA, 188 bp, Zea mays
  Clone ID: MRT4577_158502C.1
gacgattgagatctgcaggggcgagccagtacggcactcccacctttatagaaccgcggtccggggcatgcagggggaatggtgggctgggaaccatctgaggcggcaaacgctcggcgcgagctgcatgttatcgagaggtcaagctggttttgtagcgctctgtcgcgtgatgcctggcgcgttgg

SEQ ID NO: 64148 - DNA, 415 bp, Zea mays
  unsure (1)..(415): unsure at all n locations
  Clone ID: MRT4577_158503C.1
tggcttgngacctttgggctngtttatgtgcttgggaaagagtccatgtcgtcggggccacgggtgagtttgcctgcgtcttgggtgtgtagtgtgtctagttctaaaggttctattcatgtccatcttgaggagaattctgatgataagagtgagtcctcttctagtcttaattttgcgtctaagaaggcgtttgcgtctacttattatggtaagtttgctcgtgagctttagactactgcgtagcatgctgatgaggtcccttttgttgttgtattcaacccttccttacttgattttcatgattgtgttaccgtctgtcctcgggttcttcatgctgatgataagcctcatagtgtgcggacatttgcgcctaggggtaggaatggtggagaaacggtggaagtggtgaggt

SEQ ID NO: 64149 - DNA, 244 bp, Zea mays
  Clone ID: MRT4577_158504C.1
aaacctattccatttccattgcacaggcgacgtacgctttaattctttggctaaaatgtaacggccgatatacaccggggtttcagctgctcgcaggatatactgcggccgtgcaagtgtcagaccgcagcgcttaggccctgatctaaagcccaatgggcagatgttgagcaaaatagtggtcagcccgctcagatccacacattagtccgataggctgcacacaggccctcaagttcaagat

SEQ ID NO: 64150 - DNA, 293 bp, Zea mays
  Clone ID: MRT4577_158505C.1
aaaaaccgtatcgtctcgcctgttctgtttccttcttctcttctcgcagcccggttagccgtccaggttccaccggtcctgtggaggcaagcgtatcccgtgtgtgggtcgcgcgacggcggtagagctgtcctaccccctgctccagcatgcggtggagtgggtggttttggaggagcacttccagccgaggagggccccgaagctgaaggacctggacttcggccaggaggcggatgtcctgaccgcggcgggcctcgatgggctgttctgcacttgcaaggagcacgccg

SEQ ID NO: 64151 - DNA, 171 bp, Zea mays
  Clone ID: MRT4577_158506C.1
ctctatcatacgcagataccccaacccctaggggtaaccacgcgcgaggagtgtgcttacttttttatccatattatctatatggctagagaagaaaatgtctacatcgccaatctagctgagcacgccgaaaggtctgaataaatggtcgaatacatgcaaaaaagactt

SEQ ID NO: 64152 - DNA, 378 bp, Zea mays
  Clone ID: MRT4577_158507C.1
agcaaaagatgccctgccaaaggggcctaaaacatataaaattttgcccctacactgacttaaggaacttataaagcatttttcacacgcaggacatgccaaacggtcgctggcgatcggattaaaaacacaactattcaatgccacccacacatgggggcttactatttatgcaacatgggaacctcaagccaatgggtgacctgggacctacggtctcgtctcgattgagggccaagacaacctgccatgattcatggcaccaattgcactgctctgcaggttgatgtcaaccatttgtttgcagctttcacgtattgagccggacatccactgaggagggggcaagaactactaaaccctgacggagaaagttgg

SEQ ID NO: 64153 - DNA, 353 bp, Zea mays
  unsure (1)..(353): unsure at all n locations
  Clone ID: MRT4577_158508C.1
gaggatgatgntnaggagggtggggggggagattnnagatatgaagggaaggagaaggnngattgnaattaagaggtaaaggttgaggtggagatagagtaggtgggggagaaggtngagtttgaagagattttgttggatgatttnaagganatttttgagaagttaagntttaaggangttgntgnagaggnggntgaggatgataataaagangagggtgnngntgatgtnanaaagaaggggttantggatgatgatgatgangangaagatgatgagnaggaggnaaanaagaagaaggatggaggtnntattaataagaagaagaagttggaangnaggatgaagat

SEQ ID NO: 64154 - DNA, 613 bp, Zea mays
  Clone ID: MRT4577_158509C.1
cattgggtacctcgaagccggccgcacagcatctcgcatatagaccacagctcctacctgtagacgacggtagccgacctagaccgcctaataataactcatcacgaatgcagaacgacaacaccacaatcacgaaaaccacctgtggcattgctacgaaggcatgaagtcgtggctcctgcggctgatcctcatcgtggccttcgtctctgtgaagcggtacctgcggctgctcccatctaagccactcttctacctgcaggacctgcagctgtcacaggcccatatcactggaagacccgtctgtaacggcggcggctcatgtgactgtggcctcccgaaaacccaacgaccgtctgggcatcttctacaaacttctgcacacgttacccatctactattgacagttctggatcgtgcccgagtatctggctgcgaatgaccaccacctcatcgacgtaaacactggcagcccttggctgaaggtcaagtctgtgtccgatgtaaccataggaggctaccttgaggatgaggatcaaaccgatggtgttcgtcttgctgcacagaaaggtggaccgtcatcttaatggaaatgtcagaaggatgatactcc

SEQ ID NO: 64155 - DNA, 253 bp, Zea mays
  Clone ID: MRT4577_15850C.1
ttttaacaagagcctcaacctcgcctacctggggtggctctcaggggctcacacgatcgacaacccccactggaaatccttcagctgagcgcctgtctagcttcacggggagaggggggcccgaccacttggacccatcgatggacccaatgtaccccgagaacctgcgggtgaagtgcaagacgctgaagcaaaacacgcctatcggggagagggaccccggcagctatcgcaccttcgacctgagctactt

SEQ ID NO: 64156 - DNA, 128 bp, Zea mays
  Clone ID: MRT4577_158510C.1
ccctgcagcgtggttaggatacaatatgactttgcttgaacgccatccgattagtttgtcaaaccaaacattttggcaggtgtgacttttgctcctgccgcctgccgccaaaaacgcctcttcacccc

SEQ ID NO: 64157 - DNA, 221 bp, Zea mays
  Clone ID: MRT4577_158511C.1
acgcattcctccccaaaacacatcctgccatcctctaagcctccaccaagcatcaatcaggtgtgcctactgcagcaagtacgcgaactaactcatcaagaatgctgcctacatccgcacccctagcaaatatatccttgctgctaatcaatcaactcccaccattagcaaacgcctttccagcatcaatgtcaagaacatgaaagacaaccggctctctc

SEQ ID NO: 64158 - DNA, 552 bp, Zea mays
  unsure (1)..(552): unsure at all n locations
  Clone ID: MRT4577_158512C.1
ccccttgctgcaacttgccttgcgcgcccccccaactaccaaggggnatggaccatgnnatgttgaacgacagnaatctcgcagtcttcaagtgcttctgcaaggtgctgctttgaggaaggtctgaggtagcactctgtcctacccttacaagnnctgataccccatacttctgnaatnnttcaccacaggtttgggagggaacgttgnngtctggagaaagggttnnnggggtgatttcgcttaagctgtgtcacaggagnactttatccacctcctcttttggaccttcctggnaggccnnccagatccgtcctaccctggnagnnaagttccttttggaacgtatcccctatgnngtgttcaatggtcgtttattccttttcccctttatgggttactgtcgcttcaagctaatgtcgttgggttacccntgacaccggtagaccaggttgtttacatttgtggatcaagtgcgcgctatgagagaatgaaatgttgtttgaggatcaagcagtgtggttttgaaataactcctgaagatccttattg

SEQ ID NO: 64159 - DNA, 367 bp, Zea mays
  unsure (1)..(367): unsure at all n locations
  Clone ID: MRT4577_158513C.1
aattcggcacgaggcatctatttgggctctttgacagcgaagttgaggcggcaagggccactgactgcttccacatctattttctaaggacatgctgattcttcatagctttgtgctgtcctggtgattcttttttgcgcctctgcgcttgttgggggggggctgccttgccgccgcgccgtccggcgctcttgccttcctgttgctcgcncgtccctgtggtgtgtcggggtggcgtctcctgtgcggttggggtccgtctcctgggtgggcgccgcnccgtgggtgggtgggctcgtgggtttcggttcgccctgcgggtgccggccgtcgggcggtcttgccggtgcgtgcgctgctgttggct

SEQ ID NO: 64160 - DNA, 548 bp, Zea mays
  Clone ID: MRT4577_158514C.1
ccggccgggcaacccaagcacacatttcataataacacacagtgacacaaaaaatgatatctctccactataacagcatgccaggggctgcatcctactggaaactcgtatgctgggtgccatgcttgcccccgaatggggcaccagcccgcatcatttccaccaactacaacgaataacaaggctcgcccaccatgatcatcatcgccacaatgcagccccaatatgtcacgtgtacagacaacagcacggcgggcatgacttctaatttacacttgacaacgtaccgaccgatacctggagtgtcaacaccaacgatcctcatcgagcacccacctttgcatcctcattgttatgtacaaggacatgcgaagtacacaacttgacgagctacgtcataccagtcaatttgaacgtcactgacatctactacaacacatatcagcttcctaccacttctattatgatgaataatatcttaaaatacctgacctaggcgctcactctacgacagacaatattcactgctatgatctatttacgtgcgc

SEQ ID NO: 64161 - DNA, 342 bp, Zea mays
  unsure (1)..(342): unsure at all n locations
  Clone ID: MRT4577_158515C.1
gttcctccatgtaccaccttgtataatacagctatgagcacgtttcatttaatttttacaccacaagaacctgcaaaactaaacaattacagcagagagagttaagaaacccatggctccctagagagcagtaaaaccgttgccgcggcgagcctcttagctgtccgatcgccctcacttcttccacatgccgctgatcctcctcagcacgttgccgttcttcctggcggccgcgtcgtcgtccaattcctcgcagaggcccgcgtacttgccgncctcccacgactcgctccgctccacgaccttgccgttcccgcccttgccaacggtcagcagcgccat

SEQ ID NO: 64162 - DNA, 149 bp, Zea mays
  Clone ID: MRT4577_158516C.1
attcggcatacgaggtggttcgaccagcttacttttcaggggaccccctatctttgtagtgtggggcttactattagagcaggccgcgtggcccatactttcccaaaaactatggtggtgtacatatcagagcctcgacagctgtattg

SEQ ID NO: 64163 - DNA, 649 bp, Zea mays
  Clone ID: MRT4577_158517C.1
cgccgcgcatccacctccagtccccgcagactgccgtgccgacgcgggcggtcgagcctgggcggacgcgccgcatcaccgtggccgcgcccccgctcccaccggccgcgctgcagcggcgcactcgcgtggtgctctactaccgcgcggacgccgctggcgcggacggccgggcctcggtgcggctgtgggaggaggcgatgtgggcgaaggagtcgctgagcgaggccgtggccgaccacccggagatgggcggccggctccggcgccacgccgacgggtcgtgggaggtaaagctgaacgacgccggcgtgagattcacagaggccacggcagaggcgaccctcgacgagttcctggcgaccgcccaggacaaggaccgggcgcctagctgggaggccgccctggcgccgtgggccgacgtgaacgcggaggaccccgacgtgagcgcgctcgtctacgtgcagctgacacggttccagggagacggaggcttcgccgtgggcgtaagctgcagcctgatgctgtccgacccgctgtcactggcgaggttcctggcgtcgtgggcgcgcacgcacgccaggatgaaggctcagaacgacgccgccggccacccgctgatgcagtacgcgagctactttcggcgccc

SEQ ID NO: 64164 - DNA, 423 bp, Zea mays
  Clone ID: MRT4577_158518C.1
ccaaccgacatcaaaattctgaaattgaaaaaaggcggtaaaccaacttcaccaggcaaaaccaggaaaagggcagggcggggaaaccaagtccggaccaggaaccaaacggaggagtccatcacgggcatcccccctttcatcggattaaaaccattttccccaccaaaaacgggcaaacccccccacggctcaaaaaaaaaaagtggcaacaacataaacgggtcccaacacataaaaacaaaaacttggtttccaggtccaaaaaccaaccatttattggaaaaccccaacccacccgaaaaaggatgggaccggaacctggaaaaaccacccaaaaatgggagggtggaggccccatttttccccaacggggcggccccccccaaaatttggcgggggcccaattttttggcggccccc

SEQ ID NO: 64165 - DNA, 289 bp, Zea mays
  Clone ID: MRT4577_158519C.1
gtggtgggcgagagcttggctgttcacctcgcgatgcggtgaacgagggcgaccccgaccagctgtgctaccaggtgtcgtgacgacgtgcttgacccatgcctcgcgcacgacccccacagcgaggtggcctgcgagacctgcaccaggaccaacatgctgatggtgttcggcgagatcaccacccatgcgaccgtggactacgagaagatcgtgcgcgatagctgccgcgagatcgggttcacctccgacgacgtgggactcgacgccaactcgctgcaaggtgctg

SEQ ID NO: 64166 - DNA, 2484 bp, Zea mays
  unsure (1)..(2484): unsure at all n locations
  Clone ID: MRT4577_15851C.1
aattcggcacgaggcgcttcccctcctccctttgcctccaccgcccctcccccaacgtcatcgctaccgccgcgccactcgctcccgcgggatctagatccggtggacataaagcaaccgcagtgggagacatgcccccttgcacaggggttggggctggggctggggctgtgccgcgccgagtagtaggagccgggaggcagtgacggacggaacagaaggcgcgggtcctgttgggcggccgcggctgggcgggccatccatcattgcctcctccgcgtgggtgttggctgcctccgtcgtcgtccatcgcgggtcacgcggccgaggtggagtgaagaccgtcaacttgtactcttccggcgctcgctggcggtggaggggacgaaagtagatagcgtacggaagcatcggcattgtgtcgcgtaggggatggaccgtcggagctggctgtggcggcgcaagtcgacggacaagagccccggggagaccgagacctcggcgtccgagaggatcactgatgaacagtgaagttcatttccccccgcgattccggcgcgtctagccagattcagatatactgatgaactcagggaggcgagaggtgtagatcagacaacaatagcagtcttggctcttggcattgaagaataataatccccagtgtaggagtgaaccacaagcaagcaagcatcgcgctgcagggcgttcatttgactttcccgatttaatttttcgtggaaggaacagagggagtattattcaataaacaacaaatttatagacatttatattttcttggctcctggactatggtgctgctgttgatctatggagtgccggttgcattcttgctgagttgctatcagggaagcctatcatgccaggatgaactgagatgatcaatatggtcaaggtgcggcacaacaatgtggttccaaccatggccttgggaatgcagcagctgaagaaggagctgggccgatcaaggaaggttccattcgagttcgatgagatccacgagttccttgaccggttctacatgtcaaggattggcatccacatgctgatagggtagcatgtggctttgcatgaccctaaaccggagcctggtgtcataggcctcatcaatacaagattatccccaatccaggtggctcgagctgcttgtgcagctgcacgttctgtctgtttaccgctctatgtaagaacttccattcgaaacatcgatgagaatcgacgatttacccttgccccgctcctcccgcgtcacaagatcgggcatcgaacattgactgatagggcagcatggtggctttgctatgaccctaaaccggagcctggtgtcataggcctgggtggtacaggattatccccaatccaggtggctcangctgnttgcgaggatgcccgttctgtctgtttaagggaatatggatcagtttctgttnttaacatttatggtgatccaaattttacgtttccgtacgttccttcacacctacacctgatgttatttgaattggtgaagaactctctccgcgcggtgcaagaacggtatatgaacgccgataaagatgttcccccagttagaattatagttgctgatggagaagaggatgttactatcaaggttagcgatgaaggtggcgggataccaagaagcggcctcccaagaattttcacgtatctgtacagcactgcaaagaatcctcctgagctagatagacctaatactgaaggggtaactatggctgggtatggtttcgggctcccgatcagccgactctacgctcggtattttggcggcgacctgcaaatcatctcgatggaaggatacggtaccgatgcttacctccacttgtcgcggctgggagattcagaggagcccttgccttgacgacatatttttgtggacctccagagtaccactcttctcctgtaactatgtggctcgatcttcttcttgtaatccagtgctggcctcgacctatatatatatactaggtaggtgcccgtgcgttgccacgagagttaaaaattagtataaaacataagatatagaacgacaaacatcattataatatgcaaaatttggaccgttacattttgtttttctagatggcataacagtatcattacaggtcaaaataagtatttgatcaatcctccaaaataaaatgaagtcatattcaaaaaaaaaaaaaaaaaggcccctaccctttcttggtcctttttttgatggtntcattttgtgttgncttcttgatgtcgtnnnntgttttttggnttngntttggntgttttttattgntcacatggtttgtntgtgttcgttttttttgngcttnttttgttagtccttttatttggcttggttttggtttttgtggagctggtgtttctttgtttgggtttggactgtgacttttgttttcttttttgggttttgtgtgttgtggtttctgtgcttttacaatctac

SEQ ID NO: 64167 - DNA, 208 bp, Zea mays
  Clone ID: MRT4577_158520C.1
gccacgctttcgacgacgcgtcagtctgcatgccaaaggggacacttacttagtacgggggggaatcgacctaatatccttcacacgttaccacctacgaactaaaggaaactctcctctgcttctagcatagatagtgcggatatttctatgcaagagtcatcaccatctaacatactgcttctgagacaaaatcgcaaccttgggt

SEQ ID NO: 64168 - DNA, 349 bp, Zea mays
  Clone ID: MRT4577_158521C.1
tttttgcgtccggtggtgacactctccattggtactaaatgcacgagagtgcaggtgctatctgggacgtcgcaagctgggcatgcacataactgatcataggcggggtcgtgcagtttgaccacaatgacaagggtgcagcttctccacctaatgataaatttgtacttataacctaggttaatgaagatagacagctattagtgaagcatacatggaacgagcatgaaaggtgagtcatgaccactgaattacatgaagataattttcagctgatgacatgtagatccagatgaaggcattggacgcttggaaaaggaaaatggtgaatgtaaaaatgacaatgaac

SEQ ID NO: 64169 - DNA, 685 bp, Zea mays
  Clone ID: MRT4577_158522C.1
cccccttctccccacccaccccgccccgctctccccccctctgcgggtgtgttgtggaggggaggaggagcaagaaccacgagctgctgctgctgccgctgctgctgccaacgctgcacagcctgggctcgccgatcattgattgcgcatctattaccttcctcttatgtgctaaacaatcccatctatcccttatatatatcctcctggtccttgccaatctctcctcacttctagatttccgggcctcagcccctccctaccgtagcgttgctaagtagttgcttcttcttcttggtttcttttcttgattgctttgggtctccgattttttgggtcctcggtttcttggtcctcccctgaatcttgtagagtccgttcctttcgccgccggtagccatgggcgacaggattccgccgccgtctcacctgcagcagtactcgcagtcccctgtccattcttcgcctcatcaccaccacctcaattccatgaggtactctgcctcctctgatagagaaaggtatctggctgagttgcttgctgagaggcagaagctaggcccattcattcaagttcttccctactgtaccaggctcttgaaccaagagattttgcgggcatcttctttgccacctaaccataattttgttgatgctgagagaattgagcacggtagcccgttaa

SEQ ID NO: 64170 - DNA, 353 bp, Zea mays
  Clone ID: MRT4577_158523C.1
acttcctgagaaggatgatttcattcagctcaccatcgatacagatattcattagcagatactcaaaaaaaaaaaaaattagaccggaattttcaaaacccatgacacagcaacagtcgcctaagcttaaaacgtggggttgtccctgaagaggcagctgtcgtcgaagttccacatgggtatgccctgttccgccgcggtggaggctttgctttgcatggtgttggcgctgaaaaggtcgttcatcgactcgaacgcttggttgttgaagaaggcgtactggtcgtcgtagaggtccaagttgaaaaactcgtctgaatcggagtagtagtcctggagagaaggctcgtccg

SEQ ID NO: 64171 - DNA, 206 bp, Zea mays
  Clone ID: MRT4577_158524C.1
cttaattctaaactagtcggcgcctacggtctcgccggctccaggggcgtgcggcagaaaaagcacggcttgccggggcttctgacgacatgtgtgtgccgcagcaggcccgtccgcaaagctcggattaccggccggtgcttcaacaatgcatgttcctccttcaacggacctaacgccgagcaagatgagatcagttcctttct

SEQ ID NO: 64172 - DNA, 1409 bp, Zea mays
  Clone ID: MRT4577_158525C.1
cctcgaggccggccgggccgggcgtgagcttgggcagcgactacatgagaaagaaattgagggcagggaattgctcaaggcccatttggaaaagaaggcagctgctgaggctgcagtggattcatccttagcatcctcatccaactccttagaaaagactccccaggttctgaaggggccagagcaatcctcggtaattgttgatgatgcaaaaattaatgcaccacttccaaaggctgtacctgtagccataagtgacgacaacaatggagttattccagcaacggcaacatacaccataaacaccaaacctgtgcttgtcagtcccactccaagtaaacttgagccagttttgtgtgaagaacatgtatcaagttcaatccagcaaacaaataaagctatcctgatgccttcaagatcaccactagttgataatgaggctaatccaactcccccaaaatcacccgtgccacaggctgatacagttgctaaagctactccagctccacccaaatcaccaatgctacagattgatacaattgctaaagctacagcagctcctacaaaatcttctacttcacagcttgataaagttgctaacatccaagctgcccccaaatcacctgcaccccagcctgatgaagttgcctcacatcataactcagtatcgggacagattctgtccacatctatctccaagcctcgagaagatacggtttctaagagggctgcagtcgttactgtacctggaactcctacaccaatgtcaaggcctacaagtgcacctctgctacaggtaccaaaatcaactatgctacctacaccgtcagtccaagtttctccaatgctttcacgttcttggactatgtcagcccaagttcctccaatgctttcacgttcgcggactgtgtctgaacggccgaacaatgagccttcatccgtaagtagttctgtccggtttgacatgaccgacccttactatggcgagggttaccggagggcctataatacacagaatgctctgcataggttggatggttaccccaacgaaaggttggattcaactgcaccgccgaagcgttgggcatatagccatccaaatccagctgtgaaccttgcatacaattctaatgtatttccacagcagatgggagactactaatttagctagtgggagggatattcagactatatgtatcgccgtggcaatgggcaatggtgatgcctgtatactaataataatactttgtaaacaaaccatggtgccaagtctaaagttcgccatgttctttaatttgaattaatttaagttcaaaataggaaagaaagaatcccctatgtaagcttttacatgcaaacagcctaaaaaagggcggccgctcgcgatctagaactagacccaccgtccg

SEQ ID NO: 64173 - DNA, 1308 bp, Zea mays
  Clone ID: MRT4577_158526C.1
ttgaaattgcctcacatcataactcagtatcgggacagattctgttcacatctatctccaagcctcgagaagatacggtttctaagagggctgcagtcgttactgtacctggaactcctacgccaatgtcaaggcctacaagtgcacctctgctacaggtaccaaaatcaactatgctacctacaccgtcagtccaagtttctccaatgctttcacgttcgcggactatgtcagcccaagtttctccaatgctttcacgttcgcggactgtgtctgaacggcctaacaatgagccttcacctaccgccccaatgtatgtaacgcagacatatcgaaatgcaattcttggtaagggccatcttgatacaaccccagcaagtcttgagcaatcaacttctgtttcgccgaatactgcagcttcacagccatggtcagcatatgcgatgacaacatcggtcatggcccctccattcgaaaggaatggccagttaccaggtaagcaaggcttcatgtttgggcctagcagggcagaaacccttgataactggcattcatggaaaggtaacactgatgttaacagaaatacgtggaaacatgattttcctaaccagcaaatgaccaattgtgatgctcatttacaccacttgaaagatatttcttatcagcaattgagcagcattgggacggaacagcacagattgggtggactacagtgtagggagttcctccagagggagatacctgctgcaacctttgtttcacgccagcagtatgggtcagtgggcgaagaattcccccacattgatattataaatgacttgcttgatgaagaccaaaacagtgcccatatgacagtctctcctcttcatgagtatcatacgtttggtttgccattttcttcaggaggcaatgtggctgactcagaaataccatccgtaagtagttctgtccggtttgacatgaccgacccttactatggcgagggttaccggagggcctataatacacagaatgctctgcataggttggatggttaccccaacgaaaggttggattcaactgcaccgccgaagcgttgggcatatagccatccaaatccagctgtgaaccttgcatacaattctaatgtatttccacagcagatgggagactactaatttagctagtgggagggatattcagactatatgtatcgccgtggcaatgggcaatggtgatgcctgtatactaataataatactttgtaaacaaaccatggtgccaagtctaaagttcgccatgttctttaatttgaattaatttaagttc

SEQ ID NO: 64174 - DNA, 1062 bp, Zea mays
  Clone ID: MRT4577_158527C.1
tcgcccacgcgtccgacgtgccaaacccccaacgccatcctctataaacggcttcctcgcgggctccccctccccatcgccgccctccgatccttcatggccgctgccacagccgccgccgccgccgccgcgctcgcctccccggcggccctctccacatcgctggcgcgccgcggcctcgtcagcttcgcccccgcgctccgccccggccctgaccgcagctctcgcgccgtctccctcctcggtgtgcgaactcatgttgcggctgttgatcaagccattgtaaaaggtgatacgaagttggaaggtcctgtggttgttgttactggtgcttccagggggattggaaaagccactgcattggctcttggaaaagcaggctgcaaggtcttggtgaattatgctcgatcttcaaaggaggctgaagaagtctccaaggagattgaagcatttggaggccaggccattacctttggaggagatgtttccaaagaggctgatgttgaatctatgataaaagtggtaggcaagttgctgttgatacatggggaacgattgatgtactagtaaataatgcaggctgcaacaaaagtaatgatgaagaagaaaaagggaagaattatcaatatagcatcggttgttggtcttactggtaatgctggacaagctaattatgctgctgccaaggctggggttattgggttcacaaaaacagttgctagggagtatgccagcagaaatattaatgcaaacgttatcgctcctggatttattgcttcagatatgactgctgaacttggtgaagagttagagaagaaaattctgtcaactattcctttagggcgctatggtcggccagaggatgtagcaggcctggtggaattcttagccctcagccctgctgcaagctacatcactggacaggtcctcaccatcgatggaggaatggtaatgtaatgcttcaaatctgtgccgctgccctctaaatgtgtcgcagaaaaaaatgtaattcagttttgagggcagtggcggacccagctgctatgttagaggtgtgccatg

SEQ ID NO: 64175 - DNA, 275 bp, Zea mays
  Clone ID: MRT4577_158528C.1
gggtggtctattttttttttttgtttcatttttttttttttccaaaccaacttggatgtaaacccccttccttgggcacaaagcctgcccccaaacatgcaggggggggtagcaacttgaaaaattttttttttttttttttaaaacacaccccaaaaaatccttttttttggaacccagttgggctcttttttttttggtcaacccccccccacaggctaaagggaaataaatcatatcctgggccatcgatcgatgtaacaagcatttgaagg

SEQ ID NO: 64176 - DNA, 673 bp, Zea mays
  unsure (1)..(673): unsure at all n locations
  Clone ID: MRT4577_158529C.1
cgcgggnnnnnnnnnnnnnnnnnnnnnnnnnnnnnnnnnnnnnngagcgttccaataacatgtttggagcaatcggccaatcgcaaagaaattaagctaactatacgtgtgcaaatttctagtatcaactctcccttcgaaacaaactgtactataccacaaaccgattaccattcctccatcgatggtgaggacctgtccagtgatgtagcttgcagcagggctgagggctaagaattccaccaggcctgctacatcctctggccgaccatagcgccctaaaggaatagttgacagaattttcttctctaactcttcaccaagttcagcagtcatatctgaagcaataaatccaggagcgataacgtttgcattaatatttctgctggcatactccctagcaactgnnnnngtgaacccaataaccccagccttggcagcagcataattagcttgtccagcattaccagtaagaccaacaaccgatgctatattnnnnnnnnnnnnnnnnnnnnnnnnnnnnnnnnnnnnnnttgcagcctgcgtgcaaaggaaaacgcctgtaagattcaaatcaatcacatcttgccactgtgatttcttcattctcatcaacaatgtgtcccgtgtgattcctgcattatttactagtacatcaatcgttccccatgta

SEQ ID NO: 64177 - DNA, 298 bp, Zea mays
  unsure (1)..(298): unsure at all n locations
  Clone ID: MRT4577_15852C.1
ggggggggaaaataaaaatttattggccgtttttaatttttgatacccttgcactggggttggttaaaacttttggtacaaaaatttggccccttgttttgggaacgctgaaaaaatttaaggggccctttttcagggttgggtgttaaaccctcataaaggtttttggggcatgttttttaaccaaaagggttaccccttggggggttcttcaagcttgggggtgcttaaatcnacctaaacaattccaaacttgggcgggtaacctggctggcactcgaaggtggggggggggggc

SEQ ID NO: 64178 - DNA, 1549 bp, Zea mays
  Clone ID: MRT4577_158530C.1
gattgtgttcctcgaggcgggccggggtaggcaaccgttctcacccgtttccctgatctgccatccaccgtcgtggcgttccgccagaagccgtggcaagatgtgggtgatttgaatcttacaggcgttttcccttgcacgcccggtgtgccaaacccccaacgccatcctctataaacggcttcctcgcgggctccccctccccctccccgactcctccccatcgcccatcgccgccctccgatccttcatggccgctgccacagccgccgccgccgcgctcgcctccccggcgggcctctccacatcgctggcgcgccgcggcctcgtcagcttcgcacccgcgctccgccccggccctgaccgcagctctcgcgccgtcgccctcctcggtgtacgaactcatgtcacggctgttgatcaagccattgtaaaaggtgatacaaagttggaaggtcctgtggttgttgttactggtgcttccagggggattggaaaagccactgcattggctcttggaaaagcaggctgcaaggtcttggtgaattatgctcgatcttcaaaggaggctgaagaagtctccaaggagattgaagcatctggaggccaggccattacctttggaggagatgtttccaaagaggctgatgttgaatctatgataaaagtggctgttgatacatggggaacgattgatgtactagtaaataatgcaggaatcacacgggacacattgttgatgagaatgaagaaatcacagtggcaagatgtgattgatttgaatcttacaggcgttttcctttgcacgcaggctgcaacaaaagtaatgatgaagaagaaaaagggaagaattatcaatatagcatcggttgttggtcttactggtaatgctggacaagctaattatgctgctgccaaggctggggttattgggttcacaaaaacagttgctagggagtatgccagcagaaatattaatgcaaacgttatcgctcctggatttattgcttcagatatgactgctgaacttggtgaagagttagagaagaaaattctgtcaactattcctttagggcgctatggtcggccagaggatgtagcaggcctggtggaattcttagccctcagccctgctgcaagctacatcactggacaggtcctcaccatcgatggaggaatggtaatgtaatgcttcaaatctgtgccgctgccctctaaatgtgtcgcagaaaaaaatgtaattcagttttttgagtgtcatttttaaggggtggttttttgagcagcggtttgtggtatagtatagtttgattcgaagggagagttgatactagaaatttgcacacgtatagttagcttgctttcttaggattggccgagtgctccaaacatgttattggaacgctccttccctgagtgttcggtccccttactgtcgagcctcggctcatcttctgtttctacgtttttatttcgacctgtgtttatagttttacgaaaactgaaaacctgacgagattcgtagtcagagttcggttggatctaaaca

SEQ ID NO: 64179 - DNA, 298 bp, Zea mays
  Clone ID: MRT4577_158531C.1
tatgtccagaattaggccttatcgtgaaaaaaaaacaaagtacaaagctttttttttaattttaaaaaaaaaaaaaaaaaaaatttaaaaaaaaaaaaataatttattttttaaattttaaaaaaaaaaaaaaaaaaaaaattttttttttttggccgtaaccattcttggggggagttttggaaattcccataacactggggggggttttggcttgcttttggggggcccaattggccttatggggggtggtttaacaattaactggccctgtttttaaactgttgtagttggaaaa

SEQ ID NO: 64180 - DNA, 323 bp, Zea mays
  Clone ID: MRT4577_158532C.1
actatactataacttgacgtgcctgctcccttacctaagcattcgattcgagtcgaggccacaccttgaccaactgtcctcacctgaatggcggggtgccttggagacccgatggacacctgctcaacgacttcagcacctacggcgaggtcctcgagtccaacatcatcctccatcgggagacacagaggtccctcggcttcggcttcgtcaccttctccacggaggaggcgatgcggaacgccatcgagggcatgaacggcaaggagctggactgccgcaacatcaccgtcaacgaggcccattcccgcggctgccgtgga

SEQ ID NO: 64181 - DNA, 152 bp, Zea mays
  unsure (1)..(152): unsure at all n locations
  Clone ID: MRT4577_158533C.1
cgtccgcggacgatctaccacacctgcttttgcatttatgtagacgacaaacctacacggggcggatatggggtggggggcatgatacatnaaatacaataacaccttctacagtggggcatttagtccagatgatgacacactaagagcca

SEQ ID NO: 64182 - DNA, 287 bp, Zea mays
  unsure (1)..(287): unsure at all n locations
  Clone ID: MRT4577_158534C.1
acaacggngngnnngaggngccggccaaccaaggngacacccancnnggaggngaggaccccgaccagaggaccaaggagnaccccancaaggngaccaagaagaagnacagcaaggacancagcaaggacaaccgngcccngggaaagccgaggagggaagccgagcgcgccaagagagcccncagcaaccagcaccaggnccgggnngagaacgagncccncnnngacgggaccgannncncggagccgcggacccgggccaggnnngaggagcggaacaacgac

SEQ ID NO: 64183 - DNA, 306 bp, Zea mays
  Clone ID: MRT4577_158535C.1
aacctaccaccatgggttgccaagacttaatccctcctggcccttttggccctttttgtgagggcaccaaaggcgttcataattcaacaaggctaactggctccaagggccattattccaaagtgcctccttccagtaacttaaatgggcttcaaacacccagttgtgcaagcctataggctacaacaagcgctggcggcaagcgtcttagaacaaccaattgcccaattacaacaccaatccttggcacatctaaccatacaaaccatcgcaacgcaggagcaacaagcactgagccacctagcc

SEQ ID NO: 64184 - DNA, 286 bp, Zea mays
  Clone ID: MRT4577_158536C.1
aatgtgcaacaacaacataatttttttggtttattctaccttctttgtgtggagaccagtgaagctagttgttgggacgtgggatacgagggtgtacatcttttccttggcgtcttcgtcgtcatttctgactctcttgatcaaaacacgaacgcgcttggggacgtttctgacgcctctggaccacatgaacttgttcaaagaagcatcgattctcacatcttcggtgtgtgtgatcttttgagcgaactccttgatggccttgacggcgcgtggagctctcttt

SEQ ID NO: 64185 - DNA, 346 bp, Zea mays
  Clone ID: MRT4577_158537C.1
aaaaggaaaaaacccgggctggaatttttgcccaatcaatgggggaactggcccaaaacggggtgtttggtgtccccggatcgaccaggggggggctcgttaagcataaaggaccccaggaagctcttgttgggccccatcgggaccggggggtcaggcctcactcggaggcaccccaaatttgggtcccccctgggccggggggcgttttaaacgggcaggggttttttgtaaagctgggggagcaggggggagcaaaccaccctccccgacgggggaacccttcttgccccggggagccaagggggcaaccggttgcccccaaaagggaaccggacccccgggg

SEQ ID NO: 64186 - DNA, 158 bp, Zea mays
  Clone ID: MRT4577_158538C.1
cctatttttttaacacacacacccaaggggacaaaaagggagatggggaacaacaacaggggaacacgaaacgaaacaaaagggcacgagacgaccaccgacgaagataaaccccctctagactagggggaacacggcagcagaagcgaacaagaaaa

SEQ ID NO: 64187 - DNA, 674 bp, Zea mays
  Clone ID: MRT4577_158539C.1
ggtaccggcccccctctcctcgagtttttttttttttttttttttttttttttttttttttggtttttttttttttttttttttttttcaaaacccaatcaaaaccacatgatttcatccacacatttgcctgcccgacacttatttactttatttttttcctctaaggttcatggatcctgattcacaagaccacagctcccattgctacctggttttttgtacatcaaagctaacacatgtaagcttggcatgtcatgctgttcagggttttacacagacctattaagctctttcaccatgggcggggcacctgctggatctatgctttggcaggggttgttggtccggcaggggacatgctttccaggtacctttccacaacatccaggccgaaaagctccttgacgatgggcatcgtcgccggcacgtccatttcgaacgtgatggcaaagtttgctggaccagtgcaaaccgagaattccttcctggcagctctgatggcctccctcattgcgcagtgcaccgaggcagctagaagaagcggaggctcgccggatgctttggaagaaaggacacgcttttggtcacgggcgctgttgatcagctcaacgttcaactgctttgggatggtgtcgaccggggggatcttggacgtcctggggccttcgggg

SEQ ID NO: 64188 - DNA, 253 bp, Zea mays
  unsure (1)..(253): unsure at all n locations
  Clone ID: MRT4577_15853C.1
ggacccaaaaccctaaacccatttacctnaacgccacctctcgncgccgcgatgcagtggatggggcgcacctntacctaactcccggtggggggcccggttccccgccgtcgcctacagcgcgtccgtgccgtcgtggtctgcgacgagcccaaactcaacaagtacatgtgcgcgcatnattggagcccaatgttgcagggcagcctcgtagtgggggggggggagggggttgtgtcttatttgacgccga

SEQ ID NO: 64189 - DNA, 692 bp, Zea mays
  Clone ID: MRT4577_158540C.1
gcttctagaaatcctttcaggacgtcgtcctattgaggcaaggaggggtcccaacagaaaaggattacagtgagatgggccttctataagtacaacagaggaaatgttagggacatactggatccaatgttaacagaagcagtgaacgagaatatactgaatagaatctttgatctggcgttccagtgtgtcgctcctacccgcgaagacagaccatccatgaaaaaagttgtggagaggctgtggaagataagaagggatcatacaaaaatacaaaggatagcagaattgactctctgaatccttgaaccagctgatcccggttgccgtttttgcttgagggaacatggatcagttcctagtgaagaccaaaggtcaccacataaaaataatgcaaattttgtggttgtgaacaactggaactttgtacagggttgcaaaattgttgttgtattatgttgtattgtacatggctctatgttcaagagatcaaggtgccgaacaatggcctgtgatcgatgatttccctgtgtagccactagcccgtttatcaacataagctgttcagtgatctgtaaggcacaatgtagcttctgtgtaacacctgcattgttggatgaggcttttaaaacagttagatatgaataaaatctttggctagtttcttctgtaaaaaaaaaaaaaagcggccg

SEQ ID NO: 64190 - DNA, 157 bp, Zea mays
  Clone ID: MRT4577_158541C.1
tgcggttcgagatgtcgtcttctgattttgattaccgatgcttcatcaactgcgtgggctgtttcacggacgacgcgctccctccacaactccttcatcacctactgcgaggtcctcgagttcaagatcattctatgatcggtagacgcataggttc

SEQ ID NO: 64191 - DNA, 109 bp, Zea mays
  Clone ID: MRT4577_158542C.1
ctcgagcttacgattggtacttgacgattagtcaacgattagtccattagcaggaatgcgcatctctaccaggccgataagtagacgagaaacagagcttacgatatgc

SEQ ID NO: 64192 - DNA, 550 bp, Zea mays
  Clone ID: MRT4577_158543C.1
gccttcgtggcgcccagctcccgcatcttcgggcgcggcgagctggtgagggaccccgaccagatcgccatccggtacctgaagaacgacttcatcatcgacctggcagccatgctcccgataccgcagatgatcatctggtttgttataccagctgtgagtacatcctcggccaatcacagcaccaacaacacgctctccatgatcgtgctgatccagtacataccaagagtctatctcataatatccttgaactccaagatcgtcaaggcaagtggagtggtgacgagaactgcctgggcgggggcggcgtacaacctgcttctctacacgctggcaagccatgtcctcggtgctctctggtatctgctctccgtcgagcgccagtactcgtgctggaaggaggtgtgcacgagcgagaacggcaccacggcggagatgcctaccaggtgcttggtgagctttctggactgcaagagcagggacaaccccatacgccagaccttgcataaccacagcgcgatccaaaagcagtgcatgctttcggacg

SEQ ID NO: 64193 - DNA, 564 bp, Zea mays
  Clone ID: MRT4577_158544C.1
ggccgcttttttttttttttttttgggctgagtaacgtgtctgcgcttgctataatcgtccatctccgaacaaccatacactgacctagagatccagcatgtgatattgccaggggtacataacacaaaactaaaaatacaccataccagtgcctacacattcaacgtttcctgttggtgcttatgcctttgctacacttacaggctagatgattatcttctaaataacagagcttacccttgcttacagggcctgcacgctggcaattgctgcatgtgcgaggccccagtactcggtatgcacatgtgcatctgctgacaatatcatggcactgcactagagcttgtgcgggacattataaggacgagccggaacatccaatgcacgtgccattgtgatccacccgtagcagatacagtcggcaaaggcagaaacaccgagcgcggacccgattgccttgggaggcgcaggacatgtgaccacattctagctgatacctgctaccatatcgatagagtgtacctggctacatcatgtgcgaggcgatgtggagactaggaaag

SEQ ID NO: 64194 - DNA, 278 bp, Zea mays
  Clone ID: MRT4577_158545C.1
gtttcacgcttccttatcacgaagccgcggtccggcgccgcgacgcttcgagaatcgagacccctctctcctcttcacacttctccgtcgccgcctctctcccaccgctcggccattccccgccagtgcttgcgagtctcgagtcaatcaccgcgctcccctgcgacgacgtcctctctttgagcacatcctccgccacctctcctccccgtccaataaatacctcacgcatcgtcaccctcgacgacctcaagaccggcaccctgccctgctgctgc

SEQ ID NO: 64195 - DNA, 225 bp, Zea mays
  Clone ID: MRT4577_158546C.1
ctgggcgacagagggagttagcggcgcggtggtcgcgctggaggaggagaacgcgcggctgcgacgcgagaatgcgaggctggcgcgggagctggcccgcgcgcggcgcctctgcgacggcgtgcgccagctcatggctcggtacgacgacgaccaaggcagaggcggagatgaggatccggcggacggcgacgaggggcatggcggcagtggggaaggtcccag

SEQ ID NO: 64196 - DNA, 285 bp, Zea mays
  Clone ID: MRT4577_158547C.1
tttattattcagacccggggactcgtattgtctttatcaattactacaacatcgaacaggcgatcatgaacgagactaactatacgatgtggagtcgaatagtctgtaaaaaaaagggtggaaaatatatgcttcgctgttaacaaaaaatgacaggaggttttttttcacagaaaaggcccttttgctgggattgcagaagctgctacaagaatcggattgtctaagtcaggaatggatataaaagcgcccaggcttatggggaggaaaatttgtgtgcaaacg

SEQ ID NO: 64197 - DNA, 154 bp, Zea mays
  Clone ID: MRT4577_158548C.1
cttcttatgggtcaaaaattccatttaacggccccaaaaggagaaatacacgttttaggggccttcttggttataaagtcacctttccacccaccccttataagggcggcgtttcccttcccaaacaaaccggggaccccgtaaaaaacaagcc

SEQ ID NO: 64198 - DNA, 608 bp, Zea mays
  unsure (1)..(608): unsure at all n locations
  Clone ID: MRT4577_158549C.1
ccactaaaggncggncgggaagnggnctttcattttttngtggtctggaatctcgattccatgggagaagcacaatgaggcctctcggctacgtgactctcctggncatttttttcgctatccacctacacctctgtgtgtcctcgcgcctcctcgccgaacgtccggcgactccaaatggccaggaatcaccggcggcggcggcgccggtgccttccgccgttgggtcgttgccggagaacaccccggcgagcaacgacgtcccggtgaacatgcccgccaaggccaacgcaccgacaggtgcagcggcgccggtcccttccgccgccgggtcgttgtcggagaacactccggcgagcaacgtcccggtgaacatgcccgccaacgccaatgcagcgataggtgcagcggcgccggtccctcccgccgctgggtcgttgttggaatacaccccagcgaccaacgtctcggtgaccatgcccgccaacgcccaacgcaacgacaggtgcagcggcgccagtcccttccaccgtcgggacgttgccggagaacactccggcgagcaacgtcccggtgaaatatgcccgccaacaccaacacagcgacag

SEQ ID NO: 64199 - DNA, 431 bp, Zea mays
  Clone ID: MRT4577_15854C.1
agcaaaaattctagtatcagggggggggtatatatggggggcccagttgggaagaaaaattccccagagaacaagagccttgacaggggccatttccgaaatcaaaacaaaacatttgaaccccaggggtttggtcttcaactaaacccaattttttttgggctagcccctaacaattggtttccaggcgtttgtttgccggccccatcaaaggaccctgatccttgctggggaaaaaaaacttccaataaaacaactcattccacgtgtcccgcaccccggggaggcaccaatgcgggcaatcggggtaactcctgggggcggggccctttttggcccttggttccacccactggtttttggagggctgcgggggcccctcccggggggactcggacagccccgtgatattgaccagcccgacgggcacc

SEQ ID NO: 64200 - DNA, 420 bp, Zea mays
  Clone ID: MRT4577_158550C.1
ggggtgcaattccatctgaatgcccctcgtgacctaccgctaccaggccctcaaggaattcgtcgccggcgccatcacctcctccccgcacgccggcgaccctcgacgaccccacgcgctcgccgtcggttatggtctcgacggcaatggctacctcgcgtccctcctcgacgaccggtacgcccgcctccgcgaacccgaagccgcgcgcgggggcgttgatgacgccgtctcctccccctacgcgacggcgcccaaggcgctactctacaacgccatggagcgtggctacatatctctggggctcccccgcgaggccggtgcgctcctacgagccatgcgtgagtccggctcctgcgcgcccgaccgccacacgaaccacctcaggcgccacggcctgcgcgcgcagcccggaccttg

SEQ ID NO: 64201 - DNA, 166 bp, Zea mays
  Clone ID: MRT4577_158551C.1
atagatagtagtgtgaatgatgagtgtctaccttagagaaggtagctcagcataactagtagtgagcaaatagatgtataacagaaggcttctaatagatgagcctgtgatgcacaggaactctgttctatcgttgggatgtgtcaaaataagcataaataattta

SEQ ID NO: 64202 - DNA, 370 bp, Zea mays
  Clone ID: MRT4577_158552C.1
aatcaacatatgcaagttgcagactgagtatgcaagattaggcaatcgacctccacacatcagttttggtctagcattagttctgatcgtggtgctttccttgagggttttgaattgcttggttcaagaaaagcaaaaaatatatttctcctttctacttcaacatctagcgatgtatctgcatgtaagctcttcgttggtatcgaggctacatccagatacatcactagatgttgaattataaaggagaaatatatttttggtagtttcgtcaatcctaaagaagatggtaagaattgcaatgcaaatgcaggatccacagataaagaacgtgttcaattgcttcatttgaatttattaacttttgggc

SEQ ID NO: 64203 - DNA, 469 bp, Zea mays
  Clone ID: MRT4577_158553C.1
acaagctttttttttttttttttttatttttttctattggtcgtatctcccttggggggaatcccccaaagggggtaggcccttactagggggccccagcccgggaccaaccttggagaaaacaagggcagaggtaacaccccggggggaaaagttccccggaaaaaatgccacacaaaaaaaaacccggaaaaaaaaaaagccaagccgggggagccaaaagggggggccacccaaaaaaaagggcaacgggcaaaaaggccgctacccaaaagggaaaccgggaaggggggaaaccttaaggaacccaccaactgggggaaagaagaaggtgggggaaggggcccttttccctttgccccctcaaaaacttgctgggccagggactttgggggccgggaccggtttctggtaaaacaaaggggggaaaacgggaatccacaaaatccggggatcacccaagaaagaa

SEQ ID NO: 64204 - DNA, 381 bp, Zea mays
  Clone ID: MRT4577_158554C.1
ttattattcaaagcaggacctagatgaagtaggcgatgtttacaacagaggtgaggccaattaaactcatcgggcacacgatgatcttgttcacggagtcttccatttaattttctccggcaggggttgtttagatattttcttttttatagtatccttatttagttctggtttgctttttgtcttttttatctttttttttttatttttttttttctttttttatttatttttttttttcattttaattttttttttttatttatatttttttttactttgatgtcttgttcttttttttataaattactttcttatctttatttatctttattttatttttgtttttttttcgttgttttatttttttttttcttattt

SEQ ID NO: 64205 - DNA, 370 bp, Zea mays
  Clone ID: MRT4577_158555C.1
cctcgagccggccgggaagccagacagagacaacccgtcagcccctctcgtttttcatccgccttcgcctccaagcgcgtgcgctccacgactcctccagcaaagcgagagcttctgcataatcaaccgccgcgcccgaggcgcgaccacgaccgtggtggcctactccgcggccacgtgcgggggggggtggctgccgtccgtgaggccggtcaagaacaccgcggcggggcatgccatgcgctgagactacatcgggtccggcaccaacctgattgtggtgacgaccaccactgtagtgctgttcgcgcaggggttcgggctgccgccgttacggaagcacatggcgacgctgcacctgaaggtgcac

SEQ ID NO: 64206 - DNA, 201 bp, Zea mays
  unsure (1)..(201): unsure at all n locations
  Clone ID: MRT4577_158556C.1
gggggatactncccctccgccgctttgtctccctttaccttcttgcaagatgaaaaccatcctggcgtcgtagacttttgacatcccttagggcctcaccgtcacggtggccgccaagctggtcacggtggaggggccccgcggcatgctcacccttaacttcaagcactctaacctcgactttcagctgcatgaggccgg

SEQ ID NO: 64207 - DNA, 525 bp, Zea mays
  unsure (1)..(525): unsure at all n locations
  Clone ID: MRT4577_158557C.1
attatcaacttatttttatttgcgttactgtatcaacaataacaaattataaatgtaccttcggctcgaaggaaagcaagggtacaagcgtgacgcgaaagcgaatgccaagtcagcgtgaaccgtacgggaaattacatccaggccttttgcttttgacaataactctatagtaatctatctgggtctagatagtcttttcctctttaagtcggtttcctcctttctgccatcatgccgaagctcccttgcgcacagcttcggctctgttccatccttcgtactgtttctgtgcttcttcataccgtgggttcttgttcgaagatccctgtccatacattatactccagaggcattgttaaatcatgtttttgaggaccttcagaagccgaaggcccccaacagtgttcaaatgaatttgaaatttgtgtgtntgttgtactcgaagaaaattgctagggnnagcggtagtgtcgcttaaaccaagcagccaaaatgggtacctttctgctatggctagtcttt

SEQ ID NO: 64208 - DNA, 482 bp, Zea mays
  unsure (1)..(482): unsure at all n locations
  Clone ID: MRT4577_158558C.1
aaaacaacaacaaaatcttggttatgggggccgggggatttattttattccatctggggggggggggggcccccaatcaaactttcaaaacaacaacaggggctggctttttgggggggctgcctgcttgtagcaggggggccgggcgggggaacatggaagggtccatcggttgggccgttggggcgcgcggccatgggggaattggatgagtttttaggggatcttgcagccccagttttcggggaggaagtcggggcacctgtacttgatggcccccttgtccggggacacggggacccattttttgcaggggggggggcacttgggggggagggcgtcncaggtccacacccccgaccaggtggggcactcgccgaaccagaactgtttttttgtcggcggccctgcaggtcctttggccacggccgcaaagaccaaaagggcctggaaaactaggatcgccaacagaggggtgtttt

SEQ ID NO: 64209 - DNA, 862 bp, Zea mays
  Clone ID: MRT4577_158559C.1
tgttgatctggctaatgacgaccagagaatctccatacacagtggcggatgcaggacaaaattcatggggggccaaaaagaccacatgagagctatggttttctagttcgtcaagcctgccgaccccaggggaagtcatatcgttgcaacgagggagatctatcttgtcgagtggattgacatcacgataaaaacaggacaggggacagaggcgtcaggaagggatggagtcgggtggcgtcgcatcgggaatgggtcaacaacggaaacggggcagcgagcagactggtttaggtggtgtcggaaatgttgggcgccttcggcttccgaaggtcctcaaaaacatgatttaacaatgcctctggagtataatgtgtggacagggatcttcgaacaagagcccacggtatgaagaagcacggaaataatacgaaagatggagcagagccgaagctgcgcagaagggagcttcggcatgatggcagaaaagaggaaaccgacttaaagaggaaaagactatctagacccagataaattactatagagttgttgtcataggcaaagggcctggatgtaattttgcatgggctgcgacccgtgcctataaataggtgaacagtattcccgtactgttcacgctgacttggcatctgctttcgcgtcacgcttgtacccttgctttccttcgagccgaaggtatatttgtaatttgttattgttaatacagtaacgaaaataaaaataaattaataacttcacgctgcccttacatttgcttttgggtcacccctgtactttttaccttctctcaggcccgaaggtacatttgtaatttgaaatcatttctattttcccatgttaa

SEQ ID NO: 64210 - DNA, 472 bp, Zea mays
  unsure (1)..(472): unsure at all n locations
  Clone ID: MRT4577_15855C.1
cggacgcgtggggatcgacaccatgagggagcagaacgttgcccttgctcttctggctgtcgatgcgagcgccagctccacacgacatgcggccgatggggatgccagccaccaccagtcggttaatatacgcggctaaggagcatcatgccacctaacgtatcacctgcctattctagagcatataccaccgtcagtgcacctgacgccgccggtccacctgcgaccgatcggaccatgtgcctgcagacgggtcatctgccgncgacaccatgccaatacgctactcaaccagcccggcctcaggctcattttcaggcacacgcatgcccatgccaacagccacatccaagccaatgccatgtgaacggaacttgcggtgcacgtaccacacctatcgtgaaccatggtgtcgagttactgaggcatgagggcagcccgacggcgacgccctactgctcgcctgagtgcc

SEQ ID NO: 64211 - DNA, 631 bp, Zea mays
  Clone ID: MRT4577_158560C.1
caacatttctccttctgccatgtgtacaggagatgactcacatcaacattgtggtaattgaccatgacgactctggcatgtggaccatcactgcgccacctgatctacagcttggaggtattgacaagcgagcgatagacaggaccaatgaagaagctgccgatatgaacaagcggatattcaagtatgcccgcgcgattgactctgtcatggatgagagtgaaaaaggcattactctggatattgtcgtgggccacttcgagaacaccaagtactactgcgctgctattgatgacacgtaacaccgtgacttcatcaaagatatgatccctgtcacttctcatgctgactgtgctgctcatatcattgtgtcacccaatgatgatgttcatgatgtgatctccaaggatggcctcatcccgtgagcataggtctccgtgctctcacatctagtggcgaatagatgatatgctgctgcaactatatgtatgctactacacccaagtattcgcatgaccgttatgatgatattgagaaggaagtctctctctacctgaacatacgtggatacgacccgtgataagagctacttcgatccaatctctggatctgaaggtgacaacatgattga

SEQ ID NO: 64212 - DNA, 567 bp, Zea mays
  Clone ID: MRT4577_158561C.1
ggggggggttttttttttttttttttttttttttttttttagcaccaactaggtcattaattcaaaataattgatacgtcagacagcggccacagtgcagaattggcacaccttcactacagcctcagggactgcaggatgcgagctgaggcacatgtagtcattgcctgagaaaaggatcagatttccgtccagctcctcttcatgtccactcgcctcaccagctatacaaatcttacaaagaggagtatacattgactacgagtttggcttgtgccacagaggggggatttgattggccctgaccttcggccagccattggtgcagtgtgtcgcggtggagtcggatttcgacagcggcacggtcccagggcccggaccgtcgatggtctgtggggttgccgggggcgcgtccgcgcgtggcgcgtagcagactcctggcctcaagcgtcacgagcgcggcatccaccacagcgtcccactgccacatttcgtcgaacatgctgtgcggataggcaacgcgcgtgcagcgcgcatgcagagaggagagcaaaaaaaacgctgggt

SEQ ID NO: 64213 - DNA, 610 bp, Zea mays
  unsure (1)..(610): unsure at all n locations
  Clone ID: MRT4577_158562C.1
aacaaagcctactacaagtacaacattagtgagaccctgcagctccatcaatggccggaggagacgacctgaagctgctgggtatgtgggcgagcccgtacgtgctgcgggtgaaactcgctctcagcctcaagggcctgagctacgagtacgtcgaggaggatcttagggacaagagcgagctcctcctcaaatccaaccccgtccacagcaaggttcccgtgctcatccacaacggaaaacccgtctgtgagtcgcaggtcatcctgcagtacatcgacgaagctttcgccggcaccggcccgtccctcctccctgctgacccctacgaacgcgccatcgctcgcttctgggccgcctacatcgatgacaagatgacgcccgcttggaacaagtcgacgatgggcaagacggaggaggagaaggctgagggaaaaaagcagtcgctcgtcgcgctggagaccttggagggggcgctgagggactgtggcaaagggaagcccttcttcggcggcgacagcgtcggctacgtcgacgtcgtgctcggcggcatgctccggtgggtgcgcgcggcanatgagatgcacggggtcaagccctttcgacctga

SEQ ID NO: 64214 - DNA, 475 bp, Zea mays
  Clone ID: MRT4577_158563C.1
ctcgtgaagctcttcaaagaactcgaagcttgtggccgtaaacctccaagcaaagacattgtgcggaaagtcgaagatgcgtacgaaacgcttggattactagaagataaaaaggcgttgcttgataaatacaaggatttatacaacaaaccgtctcgggacgattggaagaaaggctccagatccaaaaagatcgagactgataaaccatctgatggtgacagtaaggaaagcaagatggaaacatctgagaaccttgaagaccgctgtttccctgtggatgcgaaatcagatgcctctgcttaggctcatcactgaaccaccgacgtcgccataagatttggccaaaacccggtgctgtcagcattagcgatcagcgtgctctcagtacacgtttgctcccctaaccagcctccggctatgtataatactgtgcgacgttcattactggcagcaatatacacaccccttgttc

SEQ ID NO: 64215 - DNA, 481 bp, Zea mays
  Clone ID: MRT4577_158564C.1
cccacgcgtccgggacgatcggaagaaaggctccagatccaaaaagatcgagactgataaaccatctggttacttttccccattcctggcgcccaaagtcccttcagacaatggtgacagtaaggaaagcaagatggaaacatctgagaaccttgaagaccgctgtttccctgtggatgcaaaaccagatgcctctgcttaggctcatcactgaaccaccgacgtcgccataagatttggccaaaacctggtgctgtcagcattagcgatcggcgtgctctcagtacacgtttgctcccctaaccagttagtgtttttttttcttctctagatatgctacaagggcattcgtatttgctgttttgcactgacatcatttttgcgaaggccctaaacgagtgtttggcataatccaggcctcccgctatgtataatactgtgcgacgttcattactggcagcaatatacacaccccttgttc

SEQ ID NO: 64216 - DNA, 1678 bp, Zea mays
  unsure (1)..(1678): unsure at all n locations
  Clone ID: MRT4577_158565C.1
tcgaagatgcatcgaaacgcttggattactagaagataaaaaggcgttgcttgataaatncaaggatttatacaacaaaccgtctcgggacgatcggaagaaaggctccagatccaaaaagatcgagactgataaaccatctggttacttctccccattcctggcgccccaagcccggcgattcgtggtgttactcagttctgccatctggaccggtaggtgcaccggtcggctgcggcggctttcctcgtcagttgctcttcccgaacgccgccagcaccgctcgtggcatctgcgtctctgccttctccaaccgccagcaccgctcccgatccaggaccaagaagcgtgtgaggagctttcagctgccacccggtgccaccatgctccggcatctccagcgatccctccgtgccattcactactcacccatcatcggacgtgatgcctcctgcaaccccattcccctccaccggtcctgggattcacatatagagcatgccaccagagatttctctacttccacaagacttacaggacatccaatatatcagcagaatgagttagaaccaactacgcctgtgaaggatactgacataataattgatcgcatacgaaagagcacacggaaattggaggaaggccctgttggaaaaaatctgtcttcagcggagaaaaggaaatttcttgtcaacactctccttagccttgaagattcaagagaagctgtttatggcacccttgatgcctgggttgcctttgagcaggattttcctttggcttcactaaagcaagcactttcagttcttgagaaggaggaacagtggcatagaattgtccaggtgatcaaatggatgctgagcaaagggcaaggaaatacaatgagaacatatgagctattggcatgtgcactcgagaaggataatagagctgaggaagcacatagaatctggcagaataaagtgggccacgatctgcattcggttccttggcgtttctgccgtcttatgttggctatctactaccgaaacaataggctagacaggctcgtgaagctcttcaaagaactcgaagcttgtggccgtaaacctccaagcaaagacattgtgcggaaagtcgaagatgcgtacgaaacgcttggattactagaagataaaaaggcgttgcttgataaatacaaggatttatacaacaaaccgtctcgggacgatcggaagaaaggctccaaatccaaaaagatcgagtctgataaaccatctgatggtgacagtaaggaaagcaagatggaaacatctgagaaccttgaagaccgctgtttccctgtggatgcaaaaccagatgcctctgcttaggctcatcactgaaccaccgacgtcgccataagatttggccaaaacccggtgctgtcagcattagcgattggcgtgctctcagtacacgtttgctcccctaaccagttagtgttttttctttctctctagacatgttacaagggcatttgtatttgctgttttgcactgacatcatttttgccaagaccctaagcggtataatactgtgcgacggctatgtataatactgtgcgacgttcattactggcagcaatatacacaccccttgttcgaaataatataaattataaaataataaataataaaaataaataatattataaaat

SEQ ID NO: 64217 - DNA, 268 bp, Zea mays
  Clone ID: MRT4577_158566C.1
gtcgcctcaccgcgtctctcaatctgctcccgcagatccgtcgtccgatgagtgggggtctcacgaacccatggcctccggcgagcttgcctgcacctacgccgctctcatcatcagcggcgatggcatcgccatcaccgccgagaggatccccacgatcgtgcatgcggccaccatcgacgtcgagtcctactggccggccctcttcgccacgctcctggagaagcgcaacgtcgaggagctcatcctctccgttggatctggtggc

SEQ ID NO: 64218 - DNA, 1164 bp, Zea mays
  unsure (1)..(1164): unsure at all n locations
  Clone ID: MRT4577_158567C.1
cccagaactcctcttcgccaacaagtcggaggactcgcagctcaaggtcatcgacttcggtctctccgtcttcttcagcnccggcgatcggttcacggaggtggtggggagcgcgtactacatggcgccggaggtgctgaagcgcaactacgggccggaggtggacgtctggagcgctggcgtcatcctctacatcctcctctgcggcgtcccgccattctggggagacaacgacgagaagatcgcgcaggcggtactccgcggcaacatcgacttcaaccgggagccatggccgagagtgtccgccaacgccaaggacctcatccggcggatgctcgacccaaacccctccacgcgcctcacggcgaggcaggtgcttgagcacccgtggctgaagaacgcggacacggcgccgaacgtgtcgctgggcgaggccgtgcgcgcccggctgcagcagttctccgccatgaacaagttcaagaagaaggcgctgggcgtggtggcgcggaacctgccggtggaggagctggacaagtacgtgcagatgttccacctcatggacaaggaccacaacggcaacctcacgctggaggagctcatggacggcctccacatcaacggccagcccgtgccggagtcggagatcaggatgctgctcgaggccgccgacacggacggcaacggcaccctggactgcgacgagttcgtgacggtgtccctgcacctcaagaagatgagcaacgacgagtacctggcgtcggcgttcaggtacttcgacaaggacggcagcggcttcatcgagcccgaggagctgcgggatgagctgggccccaacgaccaggccatcctcgacatcatccgcgacgtcgacaccgaccgggacggccggatcagctaccaggagttcgagctcatgatgaagtccggcaccgactggaggaacggctcccgccagtactccagggccaacttcagcagcctcagccgcaggctctgcaaggacatgtgatcgggccccgcgcttggcactgactagtgtcggcaaaagggagaaacgcttgcttgtacgcctgctgcggacagaaaatcgtttcgaattagttgggatattagaactgcatttacaaattcagtcaaaacttgcaaaggaacaacggatgcgat

SEQ ID NO: 64219 - DNA, 492 bp, Zea mays
  Clone ID: MRT4577_158568C.1
aacgagtgttcaaccagaataagaattacatttccaaaaaaaaaaattaaaaaaaaatttttataaaaaataatttaataatatattttttttttattttttttttttttttttttttattttttttttttttttttttaaatttttttgattttttttttttattttttttatagagtttttttattcctgtggcaattgatattaaaattaattgttgttaatttttttgcgttttgaatataaatatttttgtttaaattaatttttttgccttgcatttaataaacttttagccaacctccttttattgcttttagagcaatttcgatttatctttgccaaaatttactttcctttaatggggaattaaaactttctttttagatggtttaatcaattgggaattgatacattttacagagagttataaataaaatttacacctttttatttcccatttctttaaattttttccttttttttttttaa

SEQ ID NO: 64220 - DNA, 388 bp, Zea mays
  Clone ID: MRT4577_15856C.1
ctctagggagaacgtggagttccagcgccggatcatcgagcggtcggggctgggcgaggacacgtacctcccggaggcggtgctcaacatcccgcccaacccgtccatggccagcgcgcgggaggaggccgagatggtcatgttcggcgcgctggacgagctgttcgccaagaccggggtgcggcccaaggagatcggcgtgctggtggtgaactgcagcctcttcaacccgacgccgtcgctgtccgccatggtcgtcaaccactacaggctccggggcaacgtcgcgagctacaacctcggcggcatgggctgcagcgcggggatcatcgccgtggacctcgccagggacctgcttcagtgccaccggggcaactaccccggggtg

SEQ ID NO: 64221 - DNA, 507 bp, Zea mays
  Clone ID: MRT4577_158570C.1
accgtaaaacaaaaataccgtatcacttatggtttgccagtagccgtgataacatggaaccgaccgactatcacgaggtccaaaaaaaaaaccaccacaaagttccagcccaccacatataaagtttaggcggacacacctgaccgaccgaatgacaataactcgtggcagctactggaccaaccagcaactgcagcactctcaagtactgacaacaaaccgcttagaccacctcctcaatcttggggccagggccgcactctgtcagctggggcgacctcatccatgccaacaaagacctccatgtattaacccgctccctgttacatattgtcgatcatggggtagcaacaggctcttcagatacttcatcttggcctggaactccaacaactccttgagctggatggtgtccagccagcttatgggctggtttaaggtgatcttaatattctttttgttataggccggctgtttgaacccaatcttatacttcttgagtcggaa

SEQ ID NO: 64222 - DNA, 381 bp, Zea mays
  Clone ID: MRT4577_158571C.1
gtcgatctcacatgcgagcgagagcaggggcagattgaccatatgtgacatgggatgattgcgcttgaattatagggctatcgtgtaaccaaaagaaatgagatcggaattgctcagggaattgcaatgagccattgttaagaaataatgagtcaaaaatgtccatatatgaataccaatgatgtgttgtggtaccagaccaatcctaaagccgaagtaatatgacatcggaattgctcgtggaatgccaattacacatacttaagaatttaggaggcacaaactgtgcatatatgaataggaatcatctgcctacttactagccctattctcaagccaaaagaaatgagatcccgcttggtcggagtacccaactcgaat

SEQ ID NO: 64223 - DNA, 1171 bp, Zea mays
  unsure (1)..(1171): unsure at all n locations
  Clone ID: MRT4577_158572C.1
caattacaggcccagattcctcctctccggccggatcctctcacctctctctctctctccttctgttgcttggtgttgttgttgttcccttcttcccctctctctctctctccctctccatctccctctctgtagctatagggagatgtattccgagccccatctctccctcaaggaaattgcgacgagcccatcgttccatatctccctttaagattgacctgagactgcttcaagagagcggagagagagagagcctggcgaggaagagataacgaaccagcatttgctgcgtcaccagctctctacctagcaagctagctagcggccggtgcgcgcggcggcgatgaacagaggacaattccgggcctcgcctttgcagcagcaggtgatctggagcgccgataccgccacggccagcagcagcagcgtcgtcatgagcgccttcaacttcaattcgtgccatgaggatcaagaggccttctcccccaacaacctgccgtccttgtcttccccgtcgctgctcttctcccacgaccagcagcagtcgtttccgcacaccggtaccacctccacctctccgggccaccaacttcttgccaactgcggcgcagcagcgggcggctgccttccaagtctgcacgacggcggccaggagaaccaccacatgccggagtcgtggagccagatgcttctagcggggctagtcggaggagatcaggaggagcgctgcagcgcagctctcctgtcaaagggcatggacaattggggggatcacgctgcgactgcaagtgcggcgtgcatggtgggtggcggcggtatgaagaaaggatgagggctccgccgccatgcctcaacaacctccgtatagcttctacgggagccacggccacctcggctgctggcggtgatgagcatgagatgccggcgccaccagccagcaaggctcagctcagccagatgctcctggcctcgtctcctcgctcgtgcgtcaccacgagcctcggcagcaacatgcttgacttctccacagcgcgccgccgatggagctgaagcgccaccatcatcactctgataactcatccgagtgcaacagcactgcgactgctgcaggttcggccgtcaagaagnctagggttcaagcggcctcctcttcagcacaatctactct

SEQ ID NO: 64224 - DNA, 119 bp, Zea mays
  Clone ID: MRT4577_158573C.1
gtcgagttctattgcttcttggaatgagcgtcagtcaactcagaactgtacctagagggcaacacagcgtcttggtctagctcgtcactcggcattggactacatcatatacagttgat

SEQ ID NO: 64225 - DNA, 925 bp, Zea mays
  unsure (1)..(925): unsure at all n locations
  Clone ID: MRT4577_158574C.1
aaaccccttccctctccctcgctccccccccccccccaccttctctcttgttcgctagctagctcatctcgccctgccggacgtggttcctgccttggcatatgcatagccacctggcctgcagcggctgcaagcgtctcgtccagtaccgccggggagccgccggcgtccgctgcccaagctgcgacgctttcacggccgccgccaacccatcagggccgccggagatgtctgagctggtgtgcggcggctgcttcaccatgctggtgcactcccgcggcgccgccaacgtgcgctgcccgcactgcggcaggctcaactccacgagatcaggcaaccagatgggccacctgtcgtgcgggcaatgccggaccaccctggcgtacccaccgggcgccaccaccgtcggctgcccgacatgccgcaacgtcaatccggtcagggatgctcgggcggcgccgcagacggtgctggtggagaatcccaggacgctagacgagaagggcaagctggtgagcaatgtcgccgtcggcgtcgcctcgtggaaaagatgaccagcaggcggacggcggaccaagcagacccctccttcccgcgcgctaatcatcgtcccaggggttcgcctacagtactagcagactgaactcttcgtggacttgctactactactactaccgtcgtcgtcagcgattaacggcagctgatgatgtgaaatcaagtgtgttttaaagcttgatgctataatacatatgttttaaaagtgatcgaattagctagctgttgagcagcagcagcaaaagatctgcagcaactacccaaaaaaaatttgtaaatacgctagcctgcccggcggtcgtcgtctgtgggcttcctttgatttgatcctnaaaggaatggaagggagcgaagcgcgttgtctcctgga

SEQ ID NO: 64226 - DNA, 275 bp, Zea mays
  Clone ID: MRT4577_158575C.1
gtcgtgttgatattgacgacgatgatgaaactgtaatggaagatgaagacgttggggaaattgataatgttacagatggtttggatgaggatacagatgatgattctactgatgaagatgacttggatcaacatgatttcaacggaacagtccaccacgagacaaaaggtggaggctgaacagaaactactacagatggggatgaatcccactgctccagatggcatggatgatgatgctatgtcccgcccttgatccttacattgcaaggatat

SEQ ID NO: 64227 - DNA, 382 bp, Zea mays
  Clone ID: MRT4577_158576C.1
gtgcccggacctctccgagtactggcgccagcttcaggccatcggctcggtgacgctagcagagcttatccggtcggaggcctccgagggtcggcccgtgcgcgtgctggtttacgaccctttcctgccatggtcacggcgggtggcgcaagaggctggggtggcggcggtggcgttcctgtcgcaatcatgcgccgtcgacgtcgtgtacggtgaggtgttgtcggggcggctgccgctgccagtggtaaatgggaaggagctctttgcgcgcgggctgctcggtgtcgagctctggcccgacgacgtgccgtcggtcgtggcaaagcctgactggtgccctttgttccttcgggcattcgctgttgcaatcgaggggctt

SEQ ID NO: 64228 - DNA, 567 bp, Zea mays
  Clone ID: MRT4577_158577C.1
cagcgaagaactatattattatacatattagggcagtactcagtactacttgcagcagctaagtttgactaggcagtcaacaaagccatatgcatgcatgcatgcatgcatgggagttcacacacactcactcacaactaacactcgattgactagctatataagtagctataggctatagctaggaacaactcgacgacgacgaccactctcctttaccttattaccttagtaataaacaatatatatgtataaatatagccatagctaccagctgatcggtgcgtgccagagcatctacagataaaactagtccgtcccgtccggccggccggtttgactgagaagtagatcatcgtatcatgcgagctcctggttcttctccaccaccctcacctccttggccgatctcagaacgcttgcctgatcctcggttatctcgacggcgaagccatcgacgatggcgagcgacgacctcttccggtaggagtcaggctggagcagcttggcgagcagcttgtcgtgcttgtggctcaggtacgcgtccagcgtggccgacccctcctt

SEQ ID NO: 64229 - DNA, 378 bp, Zea mays
  Clone ID: MRT4577_158578C.1
aaaacacacataacatcccttttttggggggaaaccagatggcagctttatacacagcacaaacccagaaaatcagtaatccatggattcatggagcagccacaaaaaactaggtgaagccgtctagcctaaaaaatacacataacatcccttttttggttggaaagagtagctaaacaaacaacggctggaaggaaaaaccggcaacaccatctttttgtcgccacaggccatcagggctttatctcctcgtcatcgaagattttgggggccaggaaaaatttaatggaacccatctcaacgattttgtactccaccaccactggaagctcggacaacaggcttataatgactttctcaaaaagagaaaaccccttg

SEQ ID NO: 64230 - DNA, 779 bp, Zea mays
  Clone ID: MRT4577_158579C.1
ctcgaggccggcccatcccaccatgtcctctcctctgttcctctccagcccccttttcaacctttgacgctgtagcttgagagcgagattagtgcctaccatattctcctcctgagcgactgagcgctggtctccgataggctcgccatgcaggtgctctgcgacgtctgcggcggcgcgccggccgccgtgctctgctgcactgacgaggccgcgctctgctccgcctgcgaccgccgcgtctaccgcgccgacaagcgccgccgcatcccgctcgtccagccctgcggcgacgactccgccgccgccgccgccgcgccgctctgcgacgtctgcaaggagcggaggggcctcgtgttctgcgtggaggaccgcgccatcctgtgccccgactgcgacgaccccatccacagcgccaacgacctcaccgccaagcacacccgcttcctcctcgtcggggccaagctctccgccgcgctcgtcgaccaggcgcccccctcccctgacgacgacgacgacgacgtcgccgagcccgacgctgtccccgccgcctgcgcggccaaggcctcgtctcttgagtccggcggcggcagcagcatctccgactacctcaccaacatctgcccgggctggcgcgtcgacgatcttctcttggacgactcgtcgttctcagcgccatctaagaccggctacagcgacggccacgatcaggtgccgtccgtggatgccgacctcttccacgtggtggccagcggccggccaggcaagcgcgtcggcgg

SEQ ID NO: 64231 - DNA, 1075 bp, Zea mays
  Clone ID: MRT4577_15857C.1
cattgatgcacggctaaatgatctgaagctcaccttgggaccagaattgaggattgtttatcctttaattctgaattttgctgtcagtggtgacctagagcttaatgggatggttcatccaaagtatctaagacctaagggcatcttaacatttgaaaatggtgaggtcaacctggtagctacgcaggttagacttaaaaatgatcatttaaatgcagcaaaatttgaacctgatcttggtttggatcctgttcttgatctcgttcttgttggatctgaatggcaattcaaaatccaaagtcgagcaagcatgtggcaagacaatctggtggtaacctcaacacgctctgtggaccaggatgttctgtcacctagtgaggctgcaaaggtttttgaatcgcagcttgcggaatcattattagaaggtgacggacagcttgcgttcaagaagcttgcaactgcaacgctggaaactttgatgccaaggatagaaggcaagggtgagtttggacaggcacggtggcgactggtttatgctccgcagatcccaagtttactctctgtggatccaacagttgatccgctaaaatctctggcaaacaatatctcttttgccacggaggtcgaagtgcagctcggaaaacgccttcaggcctctgtcgtcaggcaaatgaaagattcagaaatggcgatgcagtggacgctgatatatcagctaaccagtaggctccgtgttctcttccagtctactccatccaataggcttctcttcgagtattcagcaacatcacaggaatgattcattttttgttattgcgcacaagaattggttgtagcagctgcgtcgtacaaagattaggtggcctgataatcgttttttttgtagataagcaagctttgataagttgtacgtgtacaatcgctcagttgtattgtatttacattctttctcggaaacaaagtttctgagcctgtaaataataggtagcgattttagcgtcgggtgtagagagaagtataaatgaatgaacgtttcctgtctcttgcgttgctgtccatacgtgaaattggcttt

SEQ ID NO: 64232 - DNA, 454 bp, Zea mays
  Clone ID: MRT4577_158580C.1
attcaacaaactaatatacttctcttccatccggacgatatcacagagagagatacctaatcgcccgtgcatcttctttccttcctatgtccgtcacgatagaatttctgagcttcgactgagccgggttccgatgcgtcgctgcatgcatgatcctcggcgagacgtggtggcggtggaacctgcggtggatgcattgctcacctcttcgtcgccggcttatgcgagcgtaccaaaagtgaaggacttatagatgcctttgcggagcttgccgaagttatacccgtccccgccttcaacatcctcgatctctactgtaataaggaacacagactgatgtgcacctcgaacacctcgcccgcccccgagcgcattcacttccagaaatctatgttcattgcccccagaactgcttttctctacgcctttattccccccccctcccttccccccc

SEQ ID NO: 64233 - DNA, 430 bp, Zea mays
  Clone ID: MRT4577_158581C.1
ggggtccatgagttgagctcagtaggaccgacagagcaagttctaggaccttcgatgacaatgattgacatcatccgcaggacccggagagcacggacccaaccattcattgacacagaccgttcacgcgagtatccaacggcgatccacctggtgtacttcttgtcatacttcgagaggtcattgtcgatgtaatgcagaagagtaaagctagttgctgacacctgcaataacgagaggagcaccagtcactccgtggaagccttaagacgtgtgtctcgattatcctccacgaacgcctctgtaagtcatactcctacacacaagccaggaatgtgttgctgctagtcacaccacctatcacatagaacttgacatccatgaaaactgcacaacacatcgtgcttgacctattaatgcttgggacggg

SEQ ID NO: 64234 - DNA, 217 bp, Zea mays
  Clone ID: MRT4577_158582C.1
gggaacgaacaacaacattcagtctttttccctccccggggccaaacaacagtttttcggtttttacaaaagttccatttccaattgacccacttggcaaaacaagggacatttaactgaatcaatctttttggggaaaacacaacacgtacaacgctgggcacaacgattgtaaaaaaatttagggccacatgtagggcaataacccataatccct

SEQ ID NO: 64235 - DNA, 472 bp, Zea mays
  Clone ID: MRT4577_158583C.1
ctccggtcccgaattcccatatgcgagggaggcgtacgcctactttatattaatataacataataagcgtttttcttcctttacgtgtatttcttcggggtgtggtctcaaggggagggggagagctaatctacttcttttttaataacggacacaatattactgacgttggtctaagcccttaaaggccaccatcacactccactcactactcttttgcacctatattcaccatgctcactatatgcacgtctacacactcgatcaatacacctttgacaaatacgccactttgaacacttaacacttctatgaataacggcattatcaacaataatttgttaagatctcaaactatcttaactgacctatatcctgataagcttcgatcatcactccctaaaacactcaactatttaccgttgcataaattataactttaacttatccattagtcctcctaccttttaat

SEQ ID NO: 64236 - DNA, 650 bp, Zea mays
  Clone ID: MRT4577_158584C.1
ctcgagtttttttttttttttttttttttttttttttttttttttttttttttttttttttttttttttttttttttttttttttttttttttgggggggtaaatttttttaaacaaacccctgaattttggggttgttaacaacccaaaaccccaaaaaaaaattggcccctccccaaagggggaaaaaggttaatttcaggccccattttaggggggggttttttcccaaaggggggcgggaggggaagcaaaggggcaaaaattgtccaaatttaaaatgaccctggggacccaaaggccccccccatccaatttttttttgggaatacccaagcggaacccttccttgaaaaggggggggaaaaaacccctttatggggttttaaaaatgggggggataaggccaacaccccggttgttgaacccccccttgttggcccccccaaaaacaagtttgacaaaggggtctttaaaagggaccccggctttggggtaaaaaaggttccacctgtttcccccaaggaagtgggaaaaaaccaaatcctcttccgaaaaacccaagaaccccttggggggccccttggaggcccccttaaaagttttttggaaacccccaaagggggcccctttttcgattttgcgggggg

SEQ ID NO: 64237 - DNA, 646 bp, Zea mays
  Clone ID: MRT4577_158585C.1
ccctcgggtcgacccacgcgtccgcccgcggtaacgcgacatccacaccgtggctctcgacctccccggccagggcctctctccgtcgccacccgctgcgtccgtgcctgcctggaccagcgcgctccggtagatgcaaggcggtgcctggtgcgacgaccataccgtgagatgcgagacaacggcggcgcgcttcgccgccatctgcttcaacaccgaatccgagggagaatagcttcaccctcctctcgccaaacaacgcaagcgtgtagctgggacagctggggcctccgctccggggctcgatgccgtggacgcgcaccccgtcgaacactcggaacgacgcaacgagcctggcagcgcccacctcgtacaagagcagctgcgatccagtccctgcggccaaatggcgaagggcatggatgttatcacccgcctgatgaggcaagcagagacgacacacgcattccacggcggcgcgggcgagccaggtaggcgcaggagggtgtgcgtcgaggagaggaaggagacgggagcgtaccggcgaggaggagagagtgcggcgaggaggggagcaaggagagcgctgatacgtcccccaggtaggagcccgggcggaggtggccgccggcggccatcggcgagg

SEQ ID NO: 64238 - DNA, 354 bp, Zea mays
  Clone ID: MRT4577_158586C.1
aagctcgaattcggctcgagccacttgcaactcgaccgaccaccagagcagcagtagactcacagctcactcgcaacaagcgcactcaccgtgtctcacactctcacacgtaccgatcgagcggaagcaaacaaagcacacgtacggggtcgtcgagagaggaccggaatcggatggcgttcatgcggtaccgcgcgctgccgcagggggagctgacggtggaggggttccgggcgtggctggcgcagttcgacgcggaccgcgacgggcggatcagcagggaggagctgcagcacgcgctgcgcagcctcaacgtgtggttcgcgttgtggaaggcgcggtgcgccgtgcgcg

SEQ ID NO: 64239 - DNA, 166 bp, Zea mays
  Clone ID: MRT4577_158587C.1
ctctcctctactaacttcccttcatttatatgggtctcggatcatcttaggatcagccatcaacctgcacggtgcatgcccctctgctaaccaaacccgctccagaacgcatcacctcactaccaccaaagaactaggtttcgcacacctccatatccattctaca

SEQ ID NO: 64240 - DNA, 335 bp, Zea mays
  Clone ID: MRT4577_158588C.1
gatacaaaaaaagtaacaaaaaaaaaaaatgttggaaaacgataaaactcagggtttggaagctaacattttttttaaaagacacatttttttttaaagtttttatcaattctggggttaaagacccctttactagtaaaaggctcaaaaaagaaatggggtgaaaaagggtttttgggtccttggcccctattaaaaataatgccaaaactgggaatcccagaaccaccggtcttttttttctttgcccggcttagcccgagaaaaaaaacgggaataaggtgaagcacagggccattttttcttttgtgggttaaaacccagggctggcaaaa

SEQ ID NO: 64241 - DNA, 354 bp, Zea mays
  Clone ID: MRT4577_158589C.1
cgcaaacgggaaacaatattaaagggatacacattggtggaataatggcccatgagaacccatagaacacaatggggtactttaataatgaccacacaataattttcaaacatttgatctggtgaactcccattggtagggcatggctagctagggttgctggaagccattattagttcctggctagaactagaaggccaaaaaagggccccaaggaaaactataaaaaaatcaacgtccgcaaaggaaatgaaaatgaaatagccttttttggcctccagctttgaaaatctgataggaaacttttaagggtggcctttgccgaatccagaaccgggggctttaccggcacca

SEQ ID NO: 64242 - DNA, 232 bp, Zea mays
  Clone ID: MRT4577_15858C.1
ctaagcccgatcgtcgtccttctgtcgctgtctaagagactgcgcggcgaagagcgccgcgaagaagcggaatcgacgtgacgccagacgcgtctagagtcaatcgactcaccgtctcgagcacagagctaggagatgtctacactacagacgcgcacgctctcggacgtacgcagagtacgtctagacacagtgttcagtgtcgacaactacagtcatgctgtctgataca

SEQ ID NO: 64243 - DNA, 430 bp, Zea mays
  Clone ID: MRT4577_158590C.1
tcaggttttaaataggttgtttagacaaaactcccagacaatttcaccggctgacagattccagtacaataactatggcctctgagggggggggggggcgttaaatgtgggctgaaataaccaacttaaattgaagtgcttgactcatccaaaagaattctttgctgattttatggaatcagatgacctagatgtagcgatacccttgtattaggaccctggtctttcatttttgaataatttactactttgcagacaaatgcttctccacaaacttgcaagaagtgccaagtactcagtggctttggagcatcattaaatatttctaatgaggcaagaactttgaaagccatactgattgttgcttgctcaacaaatatgtcgaccactgcaaagctgacagaagttagccaacaaccgggcgcgtggg

SEQ ID NO: 64244 - DNA, 774 bp, Zea mays
  Clone ID: MRT4577_158591C.1
atgtcgtcgtcgcgccgccgcccgcccccgccgccgccggcgtggacgcccgagccgtggagcgacggggagacgtccgcgctgctcgacgcatggggcccgcgccacctccgcgcgtgcggcggcgcgctccgccccgccgactggcgggcctgcgccgacgccgtcacctcccgccgcgccgcggccggccgggccccgcgcaccgtcgaccagtgcaagaaccgcctggattatctcaagaagcgcctcagggccgagcgctccaggcccaagggggccccgccgacgccgccgccggtctcggggtggctcacccgcctccgcgcgctgctgcacctcgccccctccgctcctcccgggttcgcgcaccgtcttggcgccaaaacgcccaaggtggaggaggaggaggaggtgttggacgagaagccgagcggcggggctcctctgccccgctactggccgccggtgccgaagcggccgaggacggcggtgtcgctgtcgccgttgaccgccgcctccggggaccaccctggaggcggtgggaggaattgcacggaagtggcggcggctctggataggcttgccgggacgtacgagcgggtggaggccgccaagcagagggaggccacgcggctggaggagcggcgcctggaggcgatgcgtgatctcgagatcgagcgcatgcggctcctcgtcgacgtcgccgtcaccgcctccgtcgttgtcgatggcgccgccgcgaccgccacaaccgccaccggcgacttctag

SEQ ID NO: 64245 - DNA, 484 bp, Zea mays
  Clone ID: MRT4577_158592C.1
tcgaccagcttgccaaatctctaaccctaggtgcagcgcgtgagatggccctcaagcgctcagctccacctccgccgcctgcgtcaccggatgcctactccgaggagaccgcctctggttcgggctactaggaggacgaggacgatgatgaggaggaggatgaggatttggagaccgaccactcactgactgcggtcgctcacaatagcgtagatccgttgccggatactgtccaggaaccagaagcgtcctacgaggatgactatgacgatgaagatgactagctcgagaaggtccaggaacccaaaacgtccgatgatgatgaagacgactaagaggaggatattgaagaggactacacggccaaccacgtggtcccttcttccgacactcaataacccgcctccgccggcgtagactggtgaggattccgaggctctcgacgaagaataggataaggaggcagacgacgagatgccgcata

SEQ ID NO: 64246 - DNA, 690 bp, Zea mays
  Clone ID: MRT4577_158593C.1
tggagctcccaaactagccctaaaggtttccactcccagaagctccgttttttttgtctcttcctcacagatctgttatccatgtgggccacaggagcagggagagagatctgggtggagaaggtcctgggaggaccagatcgcagagctgaagaggaggagcgtggcgaaggattcagaagagaacctgtcgtggggcgctcgcatgcggagaagggccgaggcgtcagcagcggagtagctgcgacaagcgaccctgccaaatgcagctgtactcgtacgtagcatgtggagcgaagcgaaacggaatatattttctggtgggtacaatttggtctgcaaggtttttaaggcgtggatctaaagatgtccagatggaaaccttcagagacagacctgttacgagaattggacgtgtagctgtagtagctgtagcggtggcatctggccaggattgaggaacagcagcacctggatggagtgtggtggctgctggctgcagaccaacacccttggccctggctacataatagttgagttcctgcctggccacctgggcctggctggctgtatgtaaacgactcaactatgttactccttgagactcctgttacatctgtggcaggtccagtgtaaatgtaaatactacaagcatcaataacgaaggagcaagccagttgttcttccaat

SEQ ID NO: 64247 - DNA, 1253 bp, Zea mays
  unsure (1)..(1253): unsure at all n locations
  Clone ID: MRT4577_158594C.1
tggagctcccaaactagccctaaaggtttccactcccagaagctccgttttttttgtctcttcctcacagatctgttatccatgtgggccattgccgcctcgaggccggccgggcaaaccagcaagcgaagcccagcaagaaaaccacatgccccacctcgccgccactccccccacttcctccgccgccgccgtccccgccgcgggccgcatcgcgttccggcgcccgtggaacacgccacagccggaagcgctgcgcctgcgcctccgcctgcgcgcgcggggcgtccggcgtgaggacggcggcggcgtgcgcacggaggagcaggagcagacagcaccgcggacgttctacgacctgctcgggatctcagcggatgggagccccgatgatgttcgggcgtcctacaggcggctggcgctaaagtaccacccagacgtgtcccctccgggcgccgcggccgagaacacgcgccgcttcatcgaggtgcaggaggcctacgagacgctctccgacccaagccgccgctccagctacgaccgtgcactcgcccgcggcgtctgccgcctcgccttctccgggcgccgttcccaatcccaccacgcctactaccaccaccaggagcagggagagagatctgggtggagaaggtcctgggaggaccagatcgcagagctgaagaggaggagcgtggcgaaggattcagaagagaacctgtcgtggggcgctcgcatgcggagaagggccgaggcgtcagcagcggagtagctgcgacaagcgaccctgccaaatgcagctgtactcgtacgtagcatgtggagcgaagcgaaacggaatatattttctggtgggtacaatttggtctgcaaggtttttaaggcgtggatctaaagatgtccagatggaaaccttcagagacagacctgttacgagaattggacgtgtagcagtagtagctgtagcggtggcatctggccaggattgaggaggaacagcagcacctggatggagtgtggtggctgctggctgcagaccaacacccttggccctggctacataatagttgagttcctgcctggccacctgggcctggctggctgtatgtaaacgactcaactatgttactccttgagactcctgttacatctgtggcaggtccagtgtaaatgtaaatactacaagcatcaataacgaaggagcaagccagttgttcttccaaaaaaaaaaaaactcggccnccccnnnnnnnnnc

SEQ ID NO: 64248 - DNA, 1901 bp, Zea mays
  Clone ID: MRT4577_158595C.1
ttgggtacctcgagccgggaaggtctgcaaacgttaaaaaaaattaactctcttctcgggagagcccaactagactcgcagtcgccagtcgcgtccatggcgatcttggtaggcctcgtcggcgtcctctccgccctcttcgccgccgcgcttcggcgcctcctaatctcttgtcgccaccccgcatacgccgccgggttcttccacccgtacaccaacgatggcggcggaggcgagcgcgtgctctggtgtgcggtgcgcgccgtgcaggagcttcgcccggacctcccctgcgctgtctacaccggcgatgccgatgccgcgcccgaggccctcgccgcacgcgctctcgaccggttcggtgtccgtctcctccgcccgccgcaggttgttcacttgaataagagaaagtggatcgaagcaagcacgtatccccacttcacaatgatcgggcaaagtcttggctctgtttatcttgcatgggaagcccttactaaatttaccccgcagttttactttgatacaagtggctatgcttttgcgtatccactggctcggctctttggttgcaaagtcatctgctatactcattaccctacaatcagttctgatatggttgaacgtgttaagcaccgcagttctatgtacaataacaattctcttatcgcagggagcatttggctatcccgatgtaaaatcctctactataccatattcagttggttatatggtctggtgggttcatgtgcgcatcttgtaatggttaattcctcatgggacaagatcccacattacaaatatttggaagatcccagagcgtactaagagggtgtaccctccatgcgatacttctgctcttcagatgcttcccctggaaagaccaacaacacctcctgttcttatttcagttgcacagttccgcccagaaaaggcccatggccttcagctggaggcatttgcacttgctcttcaaaagctagaccctgattttcctaagccaaagattcaattcgttggtagttgccggaataaagaggatctggacagactacaaaagcttaaggacaggtccactgaactacacatagatgagcttgtggagttccacaaggatatttcttacagggacctggtacaatttcttgggggtgccattgctgggctccattcgatgacagatgaacatttcggaataagtgttgttgagtatatggcagctggagctattccaattgcacataaatcggcaggaccgatgatggacatcgtgctagatgaggatgggcatcaaacaggatttctagcctccgagaaggaggaattcactgaagcgattatcaaggtcttgaggatgccagagtcggagaggcaagaaatggcagctgcggctaggaaacgtgcacaaagattttcagatcagagattccaccaagatttcactgagaccgtccgccctattttgtcagcaagggaaagctgactgacaagctgcagtttccacctaacaatctgaattctctgtcaagtttcacacggtacagtgaaagacttgcaaggggcactgaattggcagatttttgctgctccattttcccagactgcttgtgtattgtgctgcatcgtgtaacgctactgtgcagaaatagatcacagaaagaaaactttcgtcagcgatatagaattcaaaatggtgatcgtggtgcacggttttgaatctttcttgcggcactctagtaccaagttcatctttgtactgagcaaaagcttctgcttgaattgtgccactgactggcggacccatggactttttatactaattcaatctgtcttccactctagaatgttaatacaggaaaaacaaaaggcattactggatctgagaaaaaatcgcaaaacatgat

SEQ ID NO: 64249 - DNA, 275 bp, Zea mays
  Clone ID: MRT4577_158596C.1
cgctggtacttatggccacgggcaaacccaccggtcgctgagtaaggtttgaggggacccgccccatcaaccacaacaactttcaagccagaatcaatacaaaccaagcccactccatccaatgcaccacggttgagaattatacatctgaccagaatgctatacaggctcaccatatgacgaaagctactacgggatcttacatttaggacaagatgaaaatcagctgacaacaccacaacaagatctgcaaccttcgcctactcaagagccac

SEQ ID NO: 64250 - DNA, 384 bp, Zea mays
  Clone ID: MRT4577_158597C.1
aagggaaaaaaaaaaaacctacatgggggtccaaaaagaatttccatttaagcaaataaccaggcagggggggttttattacaccctccaaacaaggaaaaaaaaagatcctaaatctaaccaaaaacaatttttataagatttgggggggggggcccatttttcaaaccaagccaatttttaaggggggaccccttgttgccttagcccgttaaaaaaaaaaaaaaaacctccgggcccggggggtgaaccagaaaaaactccaccagaagggttttaaaggaccgggccccctttgtgcggggagaaactttaatcccttaccgggggaggcactttttggggggggggggggttttttttatgaccccccttaaaattttg

SEQ ID NO: 64251 - DNA, 298 bp, Zea mays
  Clone ID: MRT4577_158598C.1
gttctagatcgcgagcggcccaaaaaaaaaaaaaactaaaaaatataaaaaaaacaaacacacaaagaggtaaaaaaaaaaaacaggaatatcgaccaccctaattagccatctaaaatatatttataatcggcgccgtcctctttaaagttcccatgtttcctcccccgttctttctactttaaatctttcttataggggcacctaaattaatttcactgccctcttttttccaactttattcctggtaaacccctttctttccccaacttattccctttgcagcccattccccttt

SEQ ID NO: 64252 - DNA, 427 bp, Zea mays
  Clone ID: MRT4577_158599C.1
ctcgagtacagccggctcagcggtccagggtctgctaagaggcgcgagctatgaggacgtcgccacccgtgtgcgcgcgttgttcgccggcgacggctgccggccggcactcgggatcggcgggtcaaagatggcgcgctcattcttgacattctgcgaggagcagctcaggcagccattcccagcgcccaacgagacgaacgccccgccgttccggccggtcatcttccacgacgggcgcctcgtgtgccggcccacgccattcatgtccctcgtcatccttctctggctgccgctcggcgtgctggtcgccttcgtccggatcgccgtcgggctcatggtccccatctggaccgtcccctacatcgcgccggtcttcggcggcgccgtgatcacccacgggcgggcgccttcccccggcaagctc

SEQ ID NO: 64253 - DNA, 576 bp, Zea mays
  Clone ID: MRT4577_15859C.1
atgccgtcgaagaaagcttcagggctaggggctgcactgcaaccactggacgtcaaccaggaaacactgcgtgaagctagaaaccaaaaaaggaaggctacaagtccgacgcctcaggaggaggagctggaccaagaaataagggacctcgaagccatccatcagcaggtccaaaggaaggagaagatgcttcgtctttccaatctacagaagaagatcgatgagactgctgaggaaatgtgtcatctcactcaagatgacgaggaccgaagacctcaacgaagagagcttcgtcaggacaattcctacgatgatgatgaatgtttccaagggtttcagatgaagccggtcactgctcaagctttgttccattgcacgcaagaccacgaagaatacctccaggcgtatgtccgaaggttcttacgtcagatagcacaagcacccacagtgcccaatgaaattgtcattgaggccatgaacaaagggcttcagccaggacctatggctcaatactttgccaggaaaccccctcagactctagagaagctgcttcagaagatggatgagtacatctga

SEQ ID NO: 64254 - DNA, 288 bp, Zea mays
  Clone ID: MRT4577_1585C.1
ccagtgtctctgctgctcaaaatttctcttccagagacagaacctcgcctgtttcctcacaaacccacactgtggcagccttgttaatgcagatggccatggtgaagtgtggacagattggaataatatgtccaagtttttccagtatggatggcgatgcaccactaatgagaatacctattcaaaccgtaccctgatgggcaactggaaccaggaaagatatgacctgaggaatatcgtgcagcccaaacccttgccttcccagtttggacactactttgaaacaac

SEQ ID NO: 64255 - DNA, 611 bp, Zea mays
  Clone ID: MRT4577_158600C.1
cttgatctttccttgaagatattgtaggtctgttcaacttgaaacaccaagggatgctgaaatgcatgtacttcgcatgatcgaagacggagagatccatgcatccataaaccaaaaggatggaatggtcagctttcatgaagatcctgaacaatataaaagtgttgagatggtggagcatattgacacctctatccatagattgacggcattgtccaagaagttggcttcaattgatcagaacatgtcatgtgatactgcatatttgatgacgggaagggatcgtggaagattcgactacgacgacttcgactctgttccacacaagtatttttgagttgatctgagccttatgtgattctgaagtacgatcgtcaacgtagcagccattccctaaagttataattagtttgatcggccaatggcttttgaaaattgaaatgctgtaaattctggtttaaagaatgggtctgtgaaggcagagacttagtctggaattgctcgtggctttaatctgcatctgcttgctgttctagcatatttctcccccaactctgagacaagatttcgtttcctaatcaatttgctcggtagagtatgaccaagatttc

SEQ ID NO: 64256 - DNA, 570 bp, Zea mays
  Clone ID: MRT4577_158601C.1
aaaacggaaagatccatgcatccataaaccaaaaggatggaatggtcagctttcattaagatcctgaacaatataaaagtgttgagatggtggagcatatttacccctctatccataggcagagaacccatgtaatttgtgctgcatatttccatctccatccatagattgacggcattgtccaaaaagttggcttcaattgatcagaacatgtcatgtgatactgcatatttgatgacgggaagggatcgtggaagattcgactacgacgacttcgactctgttccccccaagtatttttgagttgatctgagccttatgtgattctgaagtacgatcgtcaacgtagcagccattccctaaagttataattagtttgatcggccaatggcttttgaaaattgaaatgctgtaaattctggtttaaagaatgggtctgtgaaggcagagacttagtctggaattgctcgtggctttaaaaaaaaaaaaaaaaaaaaaaaaaaaaagggcggccgccgactagtgagctcgtcgacccgggaattaattccggaccggtacctgcaggcg

SEQ ID NO: 64257 - DNA, 359 bp, Zea mays
  Clone ID: MRT4577_158602C.1
gggacagaacctgcaccaatcatgagcgtgtacgtgcataacattgactagcattacttgaaagtaccagactgccacactatagaactggaacagttggaccgccttacattatcgctcctataaactaggtcaggagcactatccgactagtaaccaatcaaatattgtgcataatcaacagtacgacactatactgactgcgaaacatatagatcattgagatgggcttggccagctctgaactccaggtatcggtgaggaagcagtggcattgaacatgcacaccatattcaggggtgagcattggcagatgtttgcttcaagaagacctttctgagaatacatgtgggaaacta

SEQ ID NO: 64258 - DNA, 684 bp, Zea mays
  unsure (1)..(684): unsure at all n locations
  Clone ID: MRT4577_158603C.1
aataactgattaggaatcaaagaacaaccctttgaggagagggaatgacagattcgggatctggtggccgaggaagaaggggagggagggaggacgcacctgctcgcctgcggaagaatcgatgacgacgacggtgacatagacggcattgcggcgcatcaccacatggtagagcgcgtcgagaaaacccatggtgaagggtggcagcttcgatgacaagctccgactctgtgaaggagaggaggtggagcaggtcgtcgatggcatgatcatggccatcgtcgggctggtcggtgtccgaggtctcgaactcatgtcgtggcggtgcttgctgcaacgtcgtcgaggtaccggatggagaaggtcgcgacgccgcaaaggaggagagaaggcggcgaggaggttgtggagagcgcgttgtgcgggaggaggttgaggaggaggcttttgcgcgttggcaaagccacgccgcgcgtttctgtttgtgtgggctgcgaagggaattcgatgtgctgcgatggggtgggccggtggcggtgaggcatcaaatcgggtggactgagnggttgatgtgtaaaaatgtaagaagggttttttgcaaaaaaatgacgcacgacgaccgttgaaactagtgctttaagtatagnatatatatattactattagtaagacctaatattacct

SEQ ID NO: 64259 - DNA, 447 bp, Zea mays
  Clone ID: MRT4577_158604C.1
cggccgctcgggccggccgggcctggagatccaacggaagttgtcacccagctccaccaacttcttccaggccagccagctcagctctcccacacacactcgctgtcagatcccgagaatggcggtcgccgctcagccgctgctggcctccgcgctcctcgcgctcctcctcgccgccgcctccgctgccgatactaagaataaccctgccgatgagcttgtgagcttgatcaactccaaccgtaccgccagcaaggcatcaaatcttgctgataatcaaggtcttggatgcattgctctgcagtacataaaagcatataagggtcagtgcgaccaggtgggtggaaacaagaagcccgtggattccagtttcatcgacacatttgccccaaattgtggtgtccaagctgcaagccttgccaagatcactgggaggctcctggcgtg

SEQ ID NO: 64260 - DNA, 259 bp, Zea mays
  unsure (1)..(259): unsure at all n locations
  Clone ID: MRT4577_158605C.1
tagaccccttacacctcnnacnacaagtaaancggggctaattttggggggccgggctcttcctcctccgtctaccaatccctacaccctacctagataggtgtagcagatagagcaagcaaaacaaccaggttgatccaggacaaactgaaactgaagggcgcgggcagtcccggtcgcaacgcaaggtgttcgattggctgccgatgagctccatccaataatggaatttcgacgtcgacgtcaaggcccgaagcct

SEQ ID NO: 64261 - DNA, 152 bp, Zea mays
  Clone ID: MRT4577_158606C.1
ccgtccggaactcagtccgacccacgcgtacccgtacgcgtcccgtccgccccgcgcacgccctctcgtccgaaaataatgtataagcacaaccagaacaattcaaggatcccccatcgctgcacatttctttgatgaacaccattcactat

SEQ ID NO: 64262 - DNA, 244 bp, Zea mays
  Clone ID: MRT4577_158607C.1
gtctgtgtacttattgagacaccaagcacacccggtgaggctcgaagagctgaaagagatgggacaagttatggattcaatgactgtggtctaacagggactactgtacagaacgcgagaactgaacactgcaaaaaccgtttaactcgttaagggggaggtagctaatgaggagcattcggtccaactggccgagcttgagttggtggtcaaaggaatggttgtgcttctgttgccacaagtg

SEQ ID NO: 64263 - DNA, 316 bp, Zea mays
  Clone ID: MRT4577_158608C.1
acttctcaatcacaacagcgagtttttataggtaatacacgaggcgcagaagccaccattatttgaggcatcttatcatgtaactacaagagggcacgctctgtgttggctcgctatactcctcacacaatatttatcatatagaaccgattgtttgagcacatagtgtatctcctgtgggaaagcgaaaaacaatgggttattctatcacagtggctttaataactggaatcggtgttatatgtacccacaagacttacacacaaaaaaacggttcaattgcaaaaggtgatccaaactcgcaacagagcttcaa

SEQ ID NO: 64264 - DNA, 589 bp, Zea mays
  Clone ID: MRT4577_158609C.1
cattgggtacctcgaggccggccgggaactccgtgctttctcagaggtgggttggcttctcctcccccaccgagatcgtgttcaggatctaggatcaagaaaagaaagggaagatacggggccatgcgacgacatatccctttgttccccatccttccgctcctgattgaattaggatgactcctaaagcctggctgcttgagcgactaaattggactcgaatttcacagaaaagtgtgatggggatactctacagggcccggatgttactcccccctgacccctgtcaaaatttgggggaggtctctcttcctcgacggaattttcactcacaagctcttgtaacgatgcatttgcgacggctagggccttgcccggcacgttccactaaaaagagctgaaaatagaatcttcttgtcgcttccacccaggggtctaccttttcttcggtggaagttacggagttgctcggggggattacccttctggggacggatacgatgctgccccccccatattttcctccctttacctcgaggggaactggaaaaactgacttctggccttccttccaccctgttcttctggc

SEQ ID NO: 64265 - DNA, 803 bp, Zea mays
  unsure (1)..(803): unsure at all n locations
  Clone ID: MRT4577_15860C.1
aaagcgcctcctctcgccctcgctccgccgccgccgccgccgccgcatcaagcacccgccccgccgtcgcctgaggtagacaccaatccgccgccatggggcgtatgcacagccgcgggaagggtatctcatcgtcggcgctgccgtacaagaggacgcctcctacctggctcaagaccgctgcctccgacgtggaggagatgatcacaaaggcagcgaagaagggacagatgccgtcgcagatcggcgtcctgctccgtgaccagcacggtatcccccttgtcaagagcgtcaccggcagcaagatcctccgcatcctcaaggcccatggtgagaactacatccctatcgctcgattcacatgttgccagtggcgaagcctgaggtacagtgagtgtgaggctggcaaatctaaaccttcatcaggaaaatataccaagatacggaagcatcctttatagaattgcaaaactaggaggggccatggccctaatgaagctccacctcggcttgtcggtattttgtgatttgcacagtaatcatgtttcatgtgctcgtgtagggctggcaccagaaatccccgaggacctgtacttcctcatcaagaaggcggtggcgataaggaagcaccttgagaggaacaggaaggacaaagactctaaattcaggctcattcttgtggagagcaggatccaccgccttgcccgctactacnagcgcacaaagaagcttccacccacctggaagtatgagtcaaccacagcgagcactctggtgggctaagtgtggtatcctccgacagc

SEQ ID NO: 64266 - DNA, 302 bp, Zea mays
  Clone ID: MRT4577_158610C.1
gccgccaactacccccattctcggaaggatccttccagaagcacaagaggctaaataccgtcaccttgccattcttcctcgacctcaacgtcgactgatatcacatagacaatggtgaaagctgtcgctctgcttattagcagcaatcgcttcaagatcaccatctttttcacccaacagggagatggccctactctctgtcaccggaaacgtctctggcctaaatcctggcctccataggctccatgtacatgcacttggtgacaccaccaatggaagcatgtcaactggaccacactaca

SEQ ID NO: 64267 - DNA, 351 bp, Zea mays
  Clone ID: MRT4577_158611C.1
acgaaagcttccatctccgctccaaaaaaccagcagataacacacttgtgctcggggtcgggggagggggccggctagtgcaaatgaagcagcttcagaagatggctctcctacaactcttgttggaaaatattgttctcttattactgccgctgctcgctctgaccttttcttgctgcgacgcggcaaccctgaagctgcacgcccaccacgcggacggcggcctcagcctcagccgccgggagctgctgcaccgcatggccgcgcgcagcaaggcccgcgccgcgcggctgctctcggcctcggggagcgcccgcgtagacccggggacttacgccaacggcgttcccg

SEQ ID NO: 64268 - DNA, 203 bp, Zea mays
  Clone ID: MRT4577_158612C.1
gtgagaacaacaatagttagaggcagtgactggcagagacaagtattacaaaaaggccttgacgccatttcaacgtgttaccgggaagttacaggctgatattcgaagggcggaaaaagcagcaccatgggtttaggcaaatcctagttctggagggtgccagcgcaactaatagtccccactcttctgacacaaagggcaca

SEQ ID NO: 64269 - DNA, 501 bp, Zea mays
  Clone ID: MRT4577_158613C.1
tttttatactaacacaactctctttattaatgacaaatacaaatacattcagccactccaaatacatgacttaagcatacacaactgattaaggaatctggttccttcaatttcacatttatttaaaaccaggaacagtacttaagcaaccatagggtccttagatagagatactgttgggaattcctctgaaagtcaatccctcctcactagaaggatagagcagagtgtaaggcattttagctggcccatagcggcttctcaatgtctcatctttgttcttctctataagcttcttttcaatctcttcaagcttctttccaaacctcttaaatgcctctaatggaccggcatcagaagttcagtagtcaccaccatctctctgcccaaggtagaactcatcagatgcgtgccttgacaagatttctataactgtaaggtcaatgagggtctccttcttgccagtaataggcttcaaaaactccttctgatggttcttag

SEQ ID NO: 64270 - DNA, 440 bp, Zea mays
  Clone ID: MRT4577_158614C.1
gccacgcaatgcgcaccacccccagcagggggggcgcgggggaagacaaccacacctctgtaccgagagataagaaacagaccggcaccagatgactcttgatcgagataacctcacttctagctctcgaatgatacacaccaacacatagagaacgacaggacaacactgcgctaatgcagagggcatgctaaactggcatgcttgcgaacgatacaacgcaaagcttctatccttgaatccaccgtacaatatagatcagtaaccagcaccttccataaaatgtttgatggctacctagcttattaataatgaataaacatattaatacagatgagcgacgattttgtacctaacaaccaataacacagggctagacactcgacatgatcaaagcgtaaccacacgtgcatggaagataaaatctcttctatagcact

SEQ ID NO: 64271 - DNA, 441 bp, Zea mays
  Clone ID: MRT4577_158615C.1
aaaaataaaaaaagggggaagccctctcgaaacatgcctatatagaaaattatttttcctaagaactcgccggcaaacatacatgcattatctaaaacttcgcaggggggagcccgatcgatttatatgaagactagcatcagaactaaaaaagtattggataagggacacacgtacgggattgaccaaaacaccatgcatgggccatggatcaaataatcattataatggcttcatgggatgggaaaggatcggagtacctgcttaaccatgatcaggacacacgtttttttgggaggggggggggtatcccgggggatggccgggcaaaaaaaaaaaagctggagtttttgaaaaaaattccctccttggccccgggggcctccccggggggaggggtacttgccaaactgccccaaggagttggccttgggccccaaa

SEQ ID NO: 64272 - DNA, 561 bp, Zea mays
  unsure (1)..(561): unsure at all n locations
  Clone ID: MRT4577_158616C.1
tnntttttttttttttttttnttttttttttttttttttttttttttttttttttttttttttttttttttttttttttttttttccccaacgaaaaacggcgggtccacataatacctaaaataaaccacaagaccgttcccgggggaaaaaaaacgggaaaacagatggaaccgatctacagggccacgtcccaggactttaacatcaacaacggagggggcttgtaaggaacccaacaaaaggcaggctggcaactaagggggacgggctcccccccccctggtgccaaagggggatgatatcgggggccgggttgaaaaggatgatcatttgttttggggaaacccacttttttttttccaacttcgttttaagccccccccacgcgtttttccggggccaaaagtagtaggggcttagcgggatgctgccatacccagaaaccaatgggtcaagggctatgccgaggttcttccccatccaaaggaattggagaaccagcatggggtccggtttttaaggcaccaccaccttattctccgcttcccggacgcgggg

SEQ ID NO: 64273 - DNA, 303 bp, Zea mays
  Clone ID: MRT4577_158617C.1
attcggctcgagctccattcttaggccggcctttttttttaccacgagtgccgcgacaccaatggaggcgtcacaacgggcgaactccatcggtattcaagggggatcgcatcacgggctttctgggaaacgaccctgccgaactcgaactccacaaaaaggacattgcagacttcattcaacgaatttcaaatcctgaaataagtacgttacagagatcgatcgataagctgcccataacccacctaaagagacatgaatccctaggggatctcactagctgagttcagaacgtcatccttc

SEQ ID NO: 64274 - DNA, 318 bp, Zea mays
  Clone ID: MRT4577_158618C.1
aagatattggtgacaccatgaatgcctttgatatagtttttaatatgattgagtagcactagctacgaacaagaaaagttgaccttcagataaggggaacaagaaaataggctttatagcttatctgatacattagactgcatctttctttaccttgaacgtggtaatatgccaattagagactggttgcacctggagcttgtgcaaggtgggttagcctttgtgttattccttagcaggagctaatcataaggtgaaggctgaataatggatactaataccagtgcaaactagctaacatttgcttttgaaattcat

SEQ ID NO: 64275 - DNA, 629 bp, Zea mays
  Clone ID: MRT4577_158619C.1
attccaccaagccgacacaccatagcttcccacctcgttagcgccctctctgatcctacggaatggtatacctccttcatcatgatcaagacggacggcttccacaagctcctcgttgttgaaatcatcagccgtctggagaacaaggtcttcgacctcatcgtctcgtgaattgtgaacgctgaaaggtctcttggctaacaagctctacatcgatgtcgcctcctgcccttcttcgacgcctcctgaaataatcatctctggccctgtggaggtcatggactggaaggggaacaccgacagcacaactggccggacgataattgttgcctccaacccccagtcttatgaggccggtaccatccaaggtatctttgctgcggacgttgagaaaaatgacgttcatgaagaagacggcattgtgactgctgataaagatattgccctgcgggtccccgagggccatgctgattgcgagaatagccagcacccctacatctacgaggagtaaatatggaagaggttcacttcgaaaccttgagagccagaggatgaatgtcgccatttgtgctttacaattgattgcaaaaagatcatgatctgtgtcttgaagccttatatcactggac

SEQ ID NO: 64276 - DNA, 324 bp, Zea mays
  Clone ID: MRT4577_15861C.1
taagtttttttagactgggggaccgtctaagctgtgtttttttcatatagcgcccaatagggagcaataattaatacataagatgaatattagtgctgcatcatgcatgtacaaggttacgaatcaatataaccaggcgaggctgttcatgttctcacgctcatatacgtgaatatgtatggtccatgattacccatggcatgcataagtcctggagaagagccaactcgagacgaaaacaccaagtgttaaggcggacactgtcgatgcgatcaccttcttaatgttattgaccgcctccgccaacttgaggccctcctacac

SEQ ID NO: 64277 - DNA, 192 bp, Zea mays
  Clone ID: MRT4577_158620C.1
actgactcactgaaggtgtctagttctgttctgagcagccacacctagctgtgcaagtcaacatgcaacatcaagcgcttgctgtgagcgtcttacaactaccaattggccaattgctacaacagttctttgcacatctaacagtacaagccattacaacgcctcattttttttatgttcctaccagaactg

SEQ ID NO: 64278 - DNA, 220 bp, Zea mays
  Clone ID: MRT4577_158621C.1
cctaacctgtcccgggtgcatcagtgctctcggctagcccggtctacctactcttcaccgctcgcccgccggcccactccccaccgcagccatggacgccatcaagaagaagatgcagatgctgaaactggacaaggagaatgccatcgaccgcgcagagcaggccgatgccgacaagatgcaagctgaagaccgatgcaagctactggaggaagagcag

SEQ ID NO: 64279 - DNA, 605 bp, Zea mays
  Clone ID: MRT4577_158622C.1
tcggccgggaattttaaaatcatttcttggtggttataagaaagttgtagattactttcttatcttgcttgttttcaaatttcataaccataggactgataatctaagagttatgaattttacacactgattgttgtgttcaaatttcttgcttggctgcttgcttgtcttgattttgatcaaacgagtaataatgatagtaactaatataattgaggatatatatactagtacacgtctcacaaagttggtaaactaataaattggttacggtctaataagtaggttagcttaataaacacttagcaagtgcagttatatgttcaaataaacaaaatgactaatgtactctctttagctttatgctagccctgtatactactaagtaaccaacgttcttaaagtagtataatatgtaattgtgattaaactatcttcttctgtgtgttctcttgggtgtatgcttgctgtagaatatcgtgaatgattgcaagacctgattaagtgactattcctttttaactaagtgtgtctatatataagtcatagcgaacttatgtgtccttaaatagtttaatattaagtaaccgaatgaatgattaaat

SEQ ID NO: 64280 - DNA, 318 bp, Zea mays
  Clone ID: MRT4577_158623C.1
attcgtatagagcttgttccaccagctttcatgtcggccgccgcacttttttttaataggggtgttaaatcctagaatagggcctacaaaacctcacttttatactccacctacttggtagatgaccaccatcccccatctttgaagaaggccaatattgcattattttgactagacgaacaatatttaaatataggacgaatgaaacatttctattcaagctttttgctacaataactaagatggacatcacaccatttctggcccaaatcattgccaacctaaatgacgctcaactcttaagaacgaccctcatac

SEQ ID NO: 64281 - DNA, 280 bp, Zea mays
  Clone ID: MRT4577_158624C.1
aaacaccattacaggttcgcttgaatggtgatgcaactttgattgaattcgagtgcttgtctgatgctgggcaagactcgttgtgctttggcataaagtattttaactggaacataccggataattctgatgggacacctcacattgatgctgtaactactggagcgatgcaaggatttatggtggcaactagaattatgactatcgctgagaccattgtagttgttgcatgtcctgatggactcacattggcagtaacactgacgcttgcatattccat

SEQ ID NO: 64282 - DNA, 626 bp, Zea mays
  Clone ID: MRT4577_158625C.1
atgaagcttgtcagcttggaaaatcctgaagtggaaagttgatttaacgtcaccatcttctatcccttttatttatgggagaagaaactgagaaagccacttgagattggtcatggacttcttgctcagatcctccatatcaagtgaatgcaccacctgaatatcaatggatttttcctctactacgaaatggtcatttctcttgttcttacaatgaataattcagaggtgcaagtgcaccagacagatagaagcatatcattgcatgacatacccgaagcagatcatcatggaagacactagaggaactttcagactgtggggttatgcatgagattggttggaactatgatgcaggaatgaccggggttgtataccatattctcatggttgccttcacttggcagccgtggtttggagcgcaccctcatattgggtgcagccttggaagcaaggcaaacatgccccccgtccgcctttgcagtatatgttttggcatgcttcattggatttaccgtgttccttagttttcttttatatatatagctgcggctcatatgttgaacaagtttacagcttttatctgagcacttcatttgtgcactaaaaaaaaaagaacgaccgct

SEQ ID NO: 64283 - DNA, 1152 bp, Zea mays
  Clone ID: MRT4577_158626C.1
ggagctctcgctgaagattgtcagcaagattgaagctggggagcggtttactgtttatgttgtggtgccaatgtggcctgagggtgttccagaaagcgcttctgttcaggcaattcttgactggcaaaggagaacgatggaaatgatgtacactgacatcgcacaagctctcgaagccaacgggattgaagcaaaccccaaggactatctcactttcttctgcttaggtaaccgcgaggtgaagcaggagggagaatatgaaccagaggagcacccagaacctgacactgattacatccgggctcaagaggctaggaggtttatgatctatgttcataccaaaatgatgatagtggacgatgagtacatcatcattgggtctgccaacatcaaccagaggtccatggacggtgccagggactccgagatcgccatgggcgcgtaccagccgtaccacttggcgactaggcagcctgcccggggccagatccatggcttccggatgtctctttggtacgagcacctgggaatgctggaagacgtcttccagcggcccgagagcgtagagtgtgtgcagatggtgaacaaggtcgccgagaagtactgggacctgtactcgagcgacgacctggagcaggacctcccgggccacctcctcagctacccgatcggtgtcactgccgacggcagcgttaccgagctgcccgggatggagaacttccccgacacccgcgcccgcgtcctcggcaacaagtcggattacctttccgccatcctcaccacatagagtgcacactgcaggcagcgccatggctgctttcctgtctggcctcagcttggtgcccctctgtttgtgttttagatactgaaagttcagatagcagtgtttttattatagttattgagtgataataagtgcattgtgcatggtgggacgataggagttaaagttgttcataactaccccagatgacgagattgtgttgccccttgtctggtgtagcttgtgtagctttttgcgttgcagtgctgtttgtaaaggcgacttcagagttcagaattaaaacatggttgctttttccaaaaaaaaaaaaaaaaaaaaaaaaaaaaaaaaaaaaaaaaaaaaaaaaactcgagaagggggccggtacc

SEQ ID NO: 64284 - DNA, 520 bp, Zea mays
  Clone ID: MRT4577_158627C.1
tgtcactactagccaccccgactcctgagggcgtggcatagcgcacctcaatttactggctctcggtgctagctccacctccaggcatgcatacggcggcgtggggctgcaatccacccgatccggtttattatccgccgcagaggcatctgctatgtgcctaccacctggcatctcagctgcatggagcacgggatggacacctgcaagcgcgcggccaactaggacagtggcggcatgtaccgcaaggggttcatttgctacatgaacgatctcgattacttactgaaccatctcaagctcgagatgatccccaagaccaaggatgccactgagccgacaagttgaatcgaatacctgcgccagctccgaggagatccgggccgttctcagacaagggcagcccggggccggggccacggatgagcataagcgtcgccacgcgcgcgaagacctagggctaggacgaggaccggggcaacggaggggatgactgccagcagttcaagctgatggaggc

SEQ ID NO: 64285 - DNA, 184 bp, Zea mays
  Clone ID: MRT4577_158628C.1
cctacattggggcccgaccaggtgtccggtggccaaattttgataacataacatactgtttactattggttgaaagcttttcgcgcaagcaatcttaagaagggtctcccaaattaaaaccatggggggagctagtccattcttattgatttattgtcaagaaatcaatcttttccttttaggg

SEQ ID NO: 64286 - DNA, 1152 bp, Zea mays
  Clone ID: MRT4577_158629C.1
ttgggaccctcgaggccggccggaaaaatcagctcgattgaggctggggagcggttcactgtttatgttgtggtgcccgtgtggcctgagggtgttccagaaagtgcttccgttcaggcaatccttgactggcaaaggagaacaatggatatgatgtacactgacatcacacaagctctcgaagccaatggaatccaaacaaaccccaaggactatctcactttcttctgcttaggtaaccgtgaggtgaagcaggagggagaatatcaacctgaggaacacccagaacctggcactgattacatccgggctcaagaggctaggaggtttatgatctatgttcatgccaaaatgatgatagtggacgatgaatacatcatcattgggtccgccaacatcaaccagaggtccatggacggtgccagggactccgagatcgccatgggcgcgtaccagccgtaccacctggcgactaggcagcctgcccgtggccagatccatggcttccggatgtctctttggtacgaacacctgggaatgctggacgacgtcttccagcaccccgagagcgtagagtgcgtgcagaaggtgaacaagatcgccgagaagtactgggacctgtactcgagtgatgacctggagcaggacctcccgggccacctcctcagctacccgatcggtgtcactgccgacggcaccgttactgagctgcccgggatggagaacttccctgacacccgtgcccgcgtcctcggcaacaagtcggactacctcccgcccatcctcaccacataggctgcaggcagcgccatggcttctctcctgtctggcctcagcttggtgcccctctgtttgtgtttgagatactgaaagttcagatagcagtgtttttattatagttattgagtgataataagtgcattgtgcatggtgggacgataggagttagagttgttcataactacaccagatgacgagattgtgttgccccttgtctggtgtagcttgtgtagctttctgcgttgcagtgctgtttgtaaaggcgacttcagagttcagaattaaaacatggttgctttttcaagtgtgctgctaaaggcctgtatggattcgttgatgtggtgctagtacaacaatatggataatctctcg

SEQ ID NO: 64287 - DNA, 980 bp, Zea mays
  unsure (1)..(980): unsure at all n locations
  Clone ID: MRT4577_15862C.1
ctcgccgggtctaatctctgtagagagaattctataaaaaaaaaaaaaaaaaaaaaaaaaaaaaaaaaaaaaaagagaaaacgcgcttcctctcgccctcgctcctcgcgccgccgccgccgccgccgccgcatcaagcccccgccccgccgtcgcctgaggtagacaccaatccgccgccatggggcgtatgcacagccgcgggaagggtatctcatcgtcggcgcttccctacaagaggacgcctcctacctggctcaagaccgctgcctccgacgtggaggagatgatcacaaaggcagcgaagaagggacagatgccgtcgcagatcggcgtcctgctccgtgaccagcacggtatcccccttgtcaagagcgtcaccggcagcaagatcctccgcatcctcaaggcccatgggctggcaccagaaatccccgaggacctgtacttcctcatcaagaaggcggtggcgataaggaagcaccttgagaggaacaggaaggacaaagactctaaattcaggctcattcttgtggagagcaggatccaccgccttgcccgctactacaagcgcacaaagaagcttccacccacctggaagtatgagtcaaccacagcgagcactctggtggcctaagtgtggtatcctccgacagcttgttctagatatgaatttgtgtaatgcttcttatgtctcgagccggttaaatggacaacggacctcatctttttttatgtttaccttgagaatcccgtaaaccattttgggtttctgaattgtctgttaaacgtaacatgcatatgttttgaagcctagggtgagcttttacttcaccatcacttattaaaaaaaaaaaaaaaaaaaaaaaaaaaaaaaaaaaaaaaaaaaaaaaaaaaaaaaaaaaaaaaaaaaaaaaaaaaaaaggaaaaaaaaaaaaaaaaaaaaaaaagttcctttgtccgtaacaacnttaagggca

SEQ ID NO: 64288 - DNA, 211 bp, Zea mays
  Clone ID: MRT4577_158630C.1
tctcttctattgcttgttgccacactatgggacgaaccttcagatccggggaatcaccctcctcaacaccaaattcttccacctcaacatcttctactgcaaaaacatgctgatcgacaaaattactttcaaagccccctacgtcaaccccaacacggactatatccacatctgctactccattcatcctcaccatcatcagaaccaccat

SEQ ID NO: 64289 - DNA, 508 bp, Zea mays
  Clone ID: MRT4577_158631C.1
tgcctatatgcagtacactggcgaggcgctatctcatggcatcagcatggtgcagcatgtatgtataccgattgcccacacagagagtgctcatgaatgcacaacgttgctgactgaggtatccgtgacggttcaccatggataggtcactaagagctggcacattctgccgcatctggagttgttgctgatgtgcggatgtgttcgccttaccatgaggggtgcatgctagcaggtgatggtgcacgccgtagacgggttcactgccgctaggtggctcagtgcgtacacacactgtggctctaactgtggtgagatggctagcatgggtagatgtgcctatgattgctgtcgttattggccaaacggccgttgttacacgctcagcgctagcgcttgttgtaccctataggctcccacttagggtgttcgatgcccattgctgtaactgatgggaggaactgaggaataacccgcggacctgcccgggcggtcgaccggtcaggga

SEQ ID NO: 64290 - DNA, 754 bp, Zea mays
  Clone ID: MRT4577_158632C.1
gccggccgggcctcggccgggaaaaggcccatgtaagcacgtccgtcgccccctggacggcagcctcgagagtggccgggggtttcccgactcaaaaaatctaaaaaaaaaaaaagcctccgaaaaaaaaaaaaaaaccggccgggacgcagccggcagcccagagccggagagcccagtgaaacagagccggtgaacgcagcccagtcagtgagccccccgatcccgactccggcgatctccccaaccccatggcctccgccggcgaggcccccagcacgctcctccgcttcctctacttcgtcggcgccggagtaatctgcaccaaggccatcaacacctatcgcgactacgagcacaagaaggagtccaccgccgccctcgccgccgccgaatcggcgttggctgctgccgcggcggccgagcccgctcctgcaaccgccgccgcgaagccctgattgtggacgagggcctgtcttcggcggttagggttctcggaatgttgctctccataggggagatagatattttcttttgtttctgatgtttcagctacgtgtatgtgctcttttggcttgaatcaatcagtaataatacttctcttcctgtctcgtgatcatggtactgctggcttgaaatttgttactacatagtttccctatgatgattaatgttattgcacttctgttagcaattaaaaaaaaaaaaaaaaaaaaaacttgcggccgaaaaaaaaaaaaaaaaaaggcgccta

SEQ ID NO: 64291 - DNA, 314 bp, Zea mays
  Clone ID: MRT4577_158633C.1
cagctaatgaacacaaggaacccacatataatgacttagcatcaatactgactgcagttcaggtggcaccaatcttgtcccagcaccgcaaacatgcgctgcttactggagagctcagggcagtcatttgagatgtcagacccctatatatggtttcatttcaaaatacaaaacacctccccagtcatttttttaggaacagggatctaaattcgttttgctccctattccatttattactttatagattatttagcagatagaatttcaatcacgaaaaaaacaaatccgcagaggctaggacaaaattgggg

SEQ ID NO: 64292 - DNA, 585 bp, Zea mays
  unsure (1)..(585): unsure at all n locations
  Clone ID: MRT4577_158634C.1
actccatagggcgattgggatcctcgaggccggccgggacgcagccggcagcccagagccggagagcccagtgaaacagagccggtgaacgcagcccagtcagtgagccccccgatcccgactccggcgatctccccaaccccatggcctccgccggcgaggcccccagcacgctcctccgcttcctctacttcgtcggcgccggagtaatctgcaccaaggccatcaacacctatcgcgactacgagcacaagaaggagtccaccgccgccctcgccgccgccgaatcggcgttggctgctgccgcggcggccgagcccgctcctgcaaccgccgccgcgaagccctgattgtggacgagggcctgtcttcggcggttagggttctcgggatgttgctctctagaggggagatagatattttcttttgtttctgatgtttcagctacgtgtatgtgctcttttggcttgaatcaatcagtaataatacttctcttcctgtctgaaaaaaaaaaaaaaaaaagcggccaatttgttactacatagnttccctatgatgattaatgttattgcacttctgttaggc

SEQ ID NO: 64293 - DNA, 412 bp, Zea mays
  Clone ID: MRT4577_158635C.1
atccctaggtctgatcttagttggttgtacctagcaatggtgttgttttagtcgctgtttgaattttgaggagccgctctttttggtgaaagcctttagtttggtgttaactgattcgatcatcgcaacgacggtgcgtgcgcgtatcgtgtttctctttggaggcgttgttgttagagagctttattgggacccaattgttgcttggatagtgtaagaacttgaagactgaattgtgtggtgtagttcactgcgatatgatagttttgtcacggtgttttttctccttttttccctcttgctggtgtacaacctagttgtatagagaccggaagtcatcttagtgtcttttgtcatcttgatgtaattcactaatatcaataatgatggaaaacagctcttgttttttctt

SEQ ID NO: 64294 - DNA, 306 bp, Zea mays
  Clone ID: MRT4577_158636C.1
attcggctcgagacctgaaccatcatactactacggttgcaacgcactcaaaccattcggcacgacttgcgtctttggtggacgctgtcgctactgccacaagcaggaaggcacccgctgcccatgctcgggggagtgcgctgccgctgggcttcgaccgaagcctcctacaactgcaaggcgacactcgccatgccggttcgagggacgaggggcgcgccttcggcagcgcgcagggtgaccgagcggcttcaatggcagtggctgcgaaactgacacacgacttggagcgcctgaaagaaaacg

SEQ ID NO: 64295 - DNA, 437 bp, Zea mays
  Clone ID: MRT4577_158637C.1
cgttcgcccacgcgtccgttcactcttccgaacattttcaatggtagcatacctgaaggagttcctgatgatctggtctaataaaatgtttcatacaacgacttgtttagctctgttacaaggaatttactgacattcccagattcatctgttcattcagatgaacaaattgcttgatctttctcattcttaattatgaaaatgttctagacaaatcaatcgagtgcaagacacattttgaagcgtaatattctatatgcatcgattatctgtgcatttagttttagcactatcattatagcgctttcactcagtcattgaaagatcagttgtttgaaaaattcggaaaatgattctgtccatagtatacatgatttccaagttccgagtcgttcacagaagtgcataaattccatcaactggaatgtatgatgtat

SEQ ID NO: 64296 - DNA, 906 bp, Zea mays
  unsure (1)..(906): unsure at all n locations
  Clone ID: MRT4577_158638C.1
gccggccggngtctggcattgggtggctcgaggccgccgggcacaccacagctcccacacacacagcaggcagcagcacagcccacagctcgatcgctcctccgaaccggaaagccaagccgctttggcgatcgtgcgtcttgcttggttcctgccggccggagccagcgagagctagctagctgctgctgtcgtggtagacgtcttgccgcacgcacgcctagctcggtctctctggtacaacgtagggaggacgccgacgacgacgatggccggcgcgaccgtgaccgtggaggaggtgaggaaggcccagcgcgccaccggccccgccaccgtgctggcgatcggcaccgccacgcccgccaactgcgtgtaccaggccgactacccggactactacttccggatcaccaagagcgagcacctcaccgacctcaaggagaaattcaagaggatgtgcgagatcaccccatgtgagtgccctcgattatatatcaagctcactctctatctctctctctcgccccgtctccatcgctcgctcgctctcgctagcttgaagaacatacactcacgtcacgtcgtcgtcgtctcctgctacctgcttacagtacttgtttcacgtcgtcggtaggtctcgggcgacgactactagctgacgacggacgatgctagctgctgccntcgtgtagtaagtatatatgtagcagcagcttccacgtattattaattttctccgtcctcgctcatcgcgccatgcacacacacactcacagagtcacagttcatatataccacttattatattattacgacccggnccggnttgttaattactagctactacttatctngatatttttactagcagtgggagaacagaaagctaatagactacggtcgatc

SEQ ID NO: 64297 - DNA, 432 bp, Zea mays
  Clone ID: MRT4577_158639C.1
tgcgcgtcatatatgccatccctaaaaacactaccattaagaacatgaacctgtaaacgcacctcaaaggttcatagggagactgacgaacataaccgtgctattttgtgacctctacactcatggaatagacctagcacgaggcttgagacattctactatatcattgagtccaacagaccctcgataggctaaagcaataatcgaccactctatcggtgctaatttccttagtctcaagagcgatcatgctataggacgaggctgtagcgacacatactactatcgctgcctcggaccctcactatgattgaccgctttaagagtccaacgcctactgtactttaatagtgaggaactggttctactccataactctttatccgaagattcagaacctgctctaacaaaaccaagctacaccactacttt

SEQ ID NO: 64298 - DNA, 198 bp, Zea mays
  Clone ID: MRT4577_15863C.1
ggaaaagcaagttactattgattttgcgccattcaagcctatcaatgtgtacatcaacctattgtgacaacaagttaccacactagaggctttaatgagagctcttggacatctgatgcacaagtttggagttcattgttcatggatggtcaatggtactctattttggcacactaaagtggcaataacccgtgagtg

SEQ ID NO: 64299 - DNA, 419 bp, Zea mays
  Clone ID: MRT4577_158640C.1
ggcagccccaaaaagcaccattttttccttagggtgaaccaaaaacaaaacccggcggggggaacaggaggcggggggccacaggccatgcggggggaagcaagggcctgcgggggccggggaggaacacaggcctaacaacgggcacaaaggggccttgcaaaaaaaaacacaggggggccacaacaaacggggcgaacgaagataaacccttggggctaggggaaacaacacgggggcaaacaggataactggggcgcgcgggccccaccggtaaggtcctccagttcccgggggaggtgccgaagccccccccacgggtgccaccgccgtaaccgccaccaccaccaccggagccaccgccgccaccggagccgccgcccccaccgagggggccgccgtcgccaaaacggggcccc

SEQ ID NO: 64300 - DNA, 449 bp, Zea mays
  Clone ID: MRT4577_158641C.1
acaacgaagcactggcccccacttgggtcgcaagagaaaaaaaatcgcagcaaagggttcggggcaattcccaccgggggggacatactatgggacacaactatgcaggcccccaggttggtcatcagcactggaacgaacaaataaaagggactggcctttacaaacgttttttggactacgggtcccttttaaaaaggacaacaagggttgaactttaacaggggggggggaggatttggaggaacatcttgggatgcttccttcatggaagcagggctttattcaaagggaacaagaaaatcgataactttgatgctgaaacaagggaaaacgggctcaaagggcatagcttggtgggatttgagagttcctgggcgagctgatccctaaaaacccttttaaaaagtttggtcaaagccggttttgggaactcagcgacgactttg

SEQ ID NO: 64301 - DNA, 1546 bp, Zea mays
  Clone ID: MRT4577_158642C.1
attgggacctcgagccggccgcaagtggtccatgttcggcggcggcgtcacgttcctggtcggcgccgcgctcaacggcgccgccaaggacgtgggcatgctcatcctcggccgcgtcctcctcggcgtcggcgtcggcttcgccaaccagtccgtgcccgtctacctctcggagatggcgccggcgcgcctccgcgggatgctcaacatcggcttccagctcatggtcaccatcggcatcctctgcgccaacctcatcaactacggcaccgccaagatcaggggcggctggggctggcgcgtcagcctcgcgctcgcggccgtgccggcggccatcatcgccgtgggcgcgctgttcctgcccgacacacccaactccctcatcgaccgcggctacaccgacgccgccaagcggatgctcaagcgcgtgcggggcaccgacgacgtggaggaggagtacagcgacctggtggccgccagcgacgagtccaagctggtggcgcacccctggcgcaacatcctgcagccgcgctaccgcccgcagctcgtcatggccatcgccatccccatgttccagcagctcacgggcatcaacgtcatcatgttctacgccccggtcctcttcaagacgctgggcttcgcggacgacgcctccctcatgtccgccgtcatcacgggcctcgtcaacgtcttcgccaccttcgtgtccatcgtcaccgtcgaccgcctcggccgacgcaagctgttcctgcagggcggcacccagatgctcgcgtgccagatcgtcgtgggcagactcatcggcgccaattccggcttctccggcgtcgcggagatccccaaggggtacgccgccatcgtcgtgctcttcatctgcgcctacgtggccggcttcgcctggtcctggggccccctcggatggctggtgcccagcgagatcttcccgctggagatccgctcggcggggcagagcatcaacgtgtccgtcaacatgctctgcaccttcatcatcgcgcagccttcctccccatgctctgccgcttcaagttcatcctcttcttcttcttcggcgcctgggtcgtcgtcatgaccatcttcgtcgcgctcttcctgccggagaccaagaacgtgcccatcgaggagatggggcgggtggggaaggcgcactggtactggggccgcttcatccgcgacgtccacgtgcacgtcggcgccgacctcgagatgccctccgccaacgccaagctcggcggcatgcagtagccatggccgtccctcgctgctcatgttgttgggcaataatctacccatacagtattattcttgggggcttaccgggaaatttgaaaatcatcatcaatgtattataatcgtctcattaggtaggatgactggatgatgacgaatagtcaactagtcttcgtctcctgtcttttttttttattctgtgcgggatactgaatgtggagtataattatgtttgcaacagatcaaaccaaatatgaatatcaattgcaagttgcactgcaaaaaacaaaacacaaac

SEQ ID NO: 64302 - DNA, 321 bp, Zea mays
  Clone ID: MRT4577_158643C.1
ccgttggtcgtcttgatgcgatctttcggctcgagaccgcatccgagcggcgctcactcgactccgctccggcagcgacttctatctcccgcgacgagcatgaactgccacggccgtgcgcagaccgggctactacatattggtatgggtagtgtgatatcgatacagaagtcacgatcgtgacgttcacatctgcacagctccgcgctatcatcgacaagaaggactccattcgtaacatgtctgtcattgctcatgtggaccatggcatgtctacgccgacagattcacttgtggcagctgctggccttattgcccagg

SEQ ID NO: 64303 - DNA, 310 bp, Zea mays
  Clone ID: MRT4577_158644C.1
tccggatcccggtcgaccacgcgtgcggtacactcactattatcatgactggtactgagtcaaagatgcctctttttatatgcttcttgcactaaagggtgggattcaaacaatctggggcatacttcgccacttcaatccttttgtttccatgcccgacccgtaacctgaactaaatccatcaacatcatggcgtccaccaccaactacatcgtgccgctcgactcgtgaccgtacgcgatcacactccagctccaatagatcctatctaacctcatcaagctcataccgtacgccatcgtcctttcct

SEQ ID NO: 64304 - DNA, 400 bp, Zea mays
  Clone ID: MRT4577_158645C.1
ggcgaaagcaccccacaagagttccttgacttccttgccaagtttcagaggacatctaggaacttcgcaaagaggcaacttacctggttccgcaatgagaagatttaccactgggtcgatggctcgaaaccatttgaggcgcttgttcaatttgtctgtgatgcttaccatggctgcagtgcaaggatggttcctgaatcacttgaaatgaaaagggaaaattgcgtgctcaaaagccgtgatctcaaaacctatcgctcaatgaacagggtgtttcttgggggtgatgactgctctcacgttttgaattggatcaggagaacacagagcaaatgaaatctagatctactctcttatcatgtttttttttcaaacatggaaattgtctagctttttggtg

SEQ ID NO: 64305 - DNA, 562 bp, Zea mays
  unsure (1)..(562): unsure at all n locations
  Clone ID: MRT4577_158646C.1
cttgacagcatatataaatattaattaaacacgacacacatatatacaaacacaaagctgctatcaaggaaacaaacacagagctagcggaacgacggtacacacacacacactgcacacgctcaagctcaagcttctctctcgcctactcggctccaatggcgcgcttccagctcgcggccctggccatggcaatgctcttcgccgcggcggcggcgcaggccccggccgccaccccgacgccggctcccaaggcgtctcctcccccgccggcgacgccggctccgacgccggcgaccccgccgcccgccccggcgccggtgtctccgcccgcccagcctccggccacgcctcaccccggacccggcgcacgctcccaaggcccccgcccctgcgcccgtggcccttggcccggccccccnctccggggtcccggcttggctgttggggtccgccgcgtgtgcctcggctggtgcctgcgtggcggcccgctggggcgtgtgctgtgtgcgcgtttcttccgccgctgcggtccggggggggcggctccgcgggtggggcc

SEQ ID NO: 64306 - DNA, 298 bp, Zea mays
  Clone ID: MRT4577_158647C.1
ggattcccggctcgactcacgcgtccgcccacacgtcccaatacgcgttgaatttaaaacaataaaaacatatcttcgggaaagagatcaaaatggcaaataccataacgaatctgaaaaaccacctaaagctcgcacgatactacactctcaaacatctctaccaaacttgcatgatcttctttgaagtccacatttaacagatcaatattcatctaactactttggacgatactctgatttgaactaaatgtattaactgtaacatagcaatctctgaagacgtacaacattgaaa

SEQ ID NO: 64307 - DNA, 560 bp, Zea mays
  Clone ID: MRT4577_158648C.1
aattcggcacgaggcagcaggcaaccaactgccgagggagaatcggagccctagctagcggaataggagacggcggcgcgctaccctcctccatctctggcgcctcctccatctccggtgcggcgacatcgtcccgctcggcccctcctccatctccggcgcggcggcgccagcagccggcgtgcaggaagaggaggtggaagcaaggatcagattgcttgaagtgtgaaaaaatgattactcgcatgcatgctagctgttggcgtaacatccagccgatggagagattttagtttgctagatgtatatttatacttctgcatgtaatagaaatgaaagatcccttcaaaaatttaggaaattcgtgtatgctactatttttatatgttcatcactggaatcgtgttctaaacaaatatatgttggaattcaaagtcaaagattgatctctttcttttactaatcaaatttccaaaaaaaaaaaaaaaaaaaaaaaaaaaaaaaaaaaaaaaaaaaaaaaaaaaaaaaaaaaaaaaactcgagagagggcgccggtaccc

SEQ ID NO: 64308 - DNA, 411 bp, Zea mays
  Clone ID: MRT4577_158649C.1
gtttaagccttggtcaaatcacggattaaagatgaggcacctaaatgtcgtgttggtacctcagatatttggcaagacgatgatcacatacactaggagaacaatcttgctagccacccaactatccacatggatgacgactaaaacatgtcttttttcggacttagaagacgatcatttgaaatcacttatttgcaacttgcaaagcgagatatcgacttgtgtacaacaaaatgtatatgtcgacattgctccttaaaagaacacacacaccatcaaaacacgtggctttgttttgcattcaagtatcctgggtgatgccactgttaaagctaccggcctcaacacacagatgttatcactcgacatatggcaaacatattgcatagtgctacatttcactaacattat

SEQ ID NO: 64309 - DNA, 203 bp, Zea mays
  Clone ID: MRT4577_15864C.1
cccacgcgtgcggcgacgcgtgggaaaaaaactatagcgcgctgagacgcgaacacgcacgagctggggcgattggggaacattagatgacgcgaaaataaagagagagggtcgtgtattcgggaccgctaagtttttgtgagatgataaagggactattggtgggcttaaaaataattaattttctattttttcatcttttt

SEQ ID NO: 64310 - DNA, 302 bp, Zea mays
  Clone ID: MRT4577_158650C.1
atgtgacagttgtagttctgaatctctttctctttttcaggtgaaattatttctggtagctgcatgggttacgccttgcagccaaaccgaccggcgttagttgtacggatccacttgtaatgtttgtctatgtaataccagtttccacggcaacatagttatttttgagtcccaacattatagttccagcttccatacaatgtaactagcttgctgctgcctagatatctgaaatttctaatagtactgttgaaaccatttaattgtgttatggttgtggattagaggctaaactgttggag

SEQ ID NO: 64311 - DNA, 428 bp, Zea mays
  Clone ID: MRT4577_158651C.1
gttccgggtttttttttttgtttttttgtagggtaccagctttccctttagtgtgtgcggtttagcacgggggcgcaaacatgggggggggggggggccggggggaaccgtggggggggcggaattccgggcaagacagcagccggaagaagaaagcgcaaagccagggggggcctaatgggggacctaacgaacaagaagggcgaaggggtcaccggccgaaaaccaggggggaaaccaggggggccaaatggaaaaaaaaagggggcaacgaacggggagaggcaccgagagaaaagggggccggggagggggcctttttaaccagggaaaccgccaagagaagagggaacaaaaaaggccggcccagggggaggtgcaggaagcggtccaaccggggaagcccgaggggtcgaaaaccccggggg

SEQ ID NO: 64312 - DNA, 299 bp, Zea mays
  Clone ID: MRT4577_158652C.1
ggttctacaaaagcaaaaggggggcctagactacaacatagtaccggcccacaatggtttgtgagcctttgggggacgggcatgtcccagggccaaaacaaaaaggggcgaaaccggaatggttcaacactcactaaggacacgcgaagccggcgcctaaaacagtaaaactaaaacaccaaaacggggaaatgggatccggcacgggcaaaatggccccataaggggcagggggaggacacttaaaccttaagcccactgcagggactgcatagtcttggcttccgaaacttgcaacc

SEQ ID NO: 64313 - DNA, 158 bp, Zea mays
  Clone ID: MRT4577_158653C.1
gatggttgaaatctcgttgaattcacagaaacttacctgaggtgttactgttttgggctcagccagtgttggggtagcttttacttagggatgaaaacggccggaaacggtatttattcggtaatcagttttttaaaaaaaaaaaaaaaagggcggcc

SEQ ID NO: 64314 - DNA, 347 bp, Zea mays
  Clone ID: MRT4577_158654C.1
gggtggttggttttttttttttgccgaagggaaaattagtttatttttaattaaaaaaatagaatccccttaaaaaaaggaagctcccaacctacccccaaaagggcttaaatcccgagatgtaaggtagccctcccccagcctccatgtgggaatccccagcgacccccccctggtggggggatccatccctctgctcatgtctcagttttccccccctgaaccttaaggagcccggccagcaccccggacccaggttttgaccccggcccccaaatgtggccagtcatctcctttgcgggtcgagacccccaggctttgttgcaccagctcctgggcttttagga

SEQ ID NO: 64315 - DNA, 226 bp, Zea mays
  unsure (1)..(226): unsure at all n locations
  Clone ID: MRT4577_158655C.1
ataaacctataacaaataaggcacggcatattacagaattttagggtaaaanaacaagttactaacaaaaacaagataattgtcagcttatcacccttttatttaccaccacttttgcagaaaccaccatcaattcctcacggagtacagaggttacctaaattacaatcccctaaaataccaaaaacctacaaccaattatcacgaagagaaaaaatatcccctc

SEQ ID NO: 64316 - DNA, 1938 bp, Zea mays
  Clone ID: MRT4577_158656C.1
atggctagggggcaacatcatcttgtgggtggtgcgagtctggagatgcgccgtgggaggaaaacggaataccttgacatcccactcaaggatagcattgaaggatggcgcttagagtggttcattatggaaaaccatggcaagtctctcccccctcggtcagggagacagccggatgttcgcgctccaagttggattgagtctcccacagacttagagatagcagaagccaaagttatacttgctgaaatttgcttgttgaaggagagaggtatgaccgttgaagctgtggttgcagactttgtttttaagaatattcagccactgaaggatagggcatacccagcttatttgtatagtggtgtcaccgattcaacccgggttaccaacaagaggattcctgctgtggatttggtgagtcgactggaaatgatccttagaggcaaggtatcgaacattggtgttgttgttgcatattctgcctggaatctgccgccttccaagttctttttcgattttgtgtcaaatcctcctgctagtgacagtggtttgggtcttagagtgcgaccctctcttgaagaagttgaggttctggttgcttcacttggagatcttcccaatgatgagaggcaagttcactttgagatgcctatgagtctgggtgatgcagagataagcgctatgatggacatgttggctagggattcttctgactcggtccctgctgaaacaatggttgttgcaactatcccagagcctgagaaaaccgtggatactcgaaggcctgaagaagtaccagtggaactctttactggagctgatcccaatgggtgtgtccctgctgatgctgatcccaatgggtgtgtccctgctgatgttgatcccaatgggtgtggccctgctgttgctgaactcaacgggtgtggccctactgatgctgatcccaatgggtgtgtccctgctgatgctgatcccaatgggtgtgaccctgtgccgtatattgtctgtattgttgacgaggacgaggaagaagaagaggaagtccccttagttcgaaagaacagtcggcgttatagagtgactgagagtacttcagccttagaggtggctgttgcggagaacccagtcctcaaggatggtgccagcggttgcccagcccccgagggtgttgccggtaatgatccagctcgggtgggtagcgcgagctgcgacctagcccccgagggtgttgccggtagtgatccggctccgatgggcagtgcgggctgcaacccagcccccgagggtgtccaagcgggctccccttctcatacctccatggatgtccacgttgggtcttctcctccacgttctgatggcatggtaattcggcttttctggttctggcaattctcctggcaagttatcgtctttgtactcatttattttcaatatcaggctttggtcgacgggatgtctaatcaattgagatcacaagatatggctcggcagtactctgaactcgaggagaagtattctcaaggtcagaccgacctggctcgggtttgtgcttccttagatgatgccaactcattgaattcctctctcaatgctcagcttgactctgaaaaggcggctaatgaagatgaggtccttcgtcttaggcagttggtgtcgagtaaagactccatcatcaaggatctgtgtgcctccaagagatcggtcgtccatgagctagaagctgctcaactggctaccaagattgccgaagacaattccaccattctgaaggcccagcgcgacaaagctatggataaagccattcgcacggggcggattttgattagaaggcctggcgtgattgttcctgatgatatagtcgctgatgtcaaagctgctcctgactcctcaagtcgcccttcttcatcggttgctcctgagaaaaacgttgccaagtag

SEQ ID NO: 64317 - DNA, 325 bp, Zea mays
  Clone ID: MRT4577_158657C.1
cctccttttttttttttggtttttttagctcccattggtaggcaacaaccaatccatttgcgaccggctgatacacgacaactctccaaaaaggcctcactggacaaacaacctgtttcacaggatgagttttttacaaccacggtcgatacaaacacgagtgttactcttatgctctaatctttctgacaataggcttggttgcacacctgctgctaccatcttgggggccccatatcaaatcttgctccccgaaaccttgggaaaagataattttctctggcgtgttacaacagaactccaactctggctgctgcaagcactc

SEQ ID NO: 64318 - DNA, 712 bp, Zea mays
  unsure (1)..(712): unsure at all n locations
  Clone ID: MRT4577_158658C.1
gaggtagcactagttagcagccatgggtaacaatggtgtgtggtgtgtcctgttagtggggcttctcctggttgcatcggtggagggagatgactggagtgcgcatcttaatctcaagccttctgctggagaagcgggaggagttatggtagccaagggaggtctacctgatgtccggttctccatctgcgacgtctggtgcgaggacaggcgcccaaacgtcaaccacagactctgcgtccaaaatctgtgcccctatgacaagaccccaaagcgtttttctgctggagaagcgagaggagccatgttagctaagggaggtctgcctgctgtgcggttgtccatctgcgacgtctggtgcgaggatgtgcacccaaacatgaaccacagactctgcatccagaatctgtgcccctatgacaagacccctaggcatttttctgctggagaagtgagaggagccatgttagctaagggaggtctgcctgctgtgcggttgtccatctgcgacgtctggtgcgaggacgtgcacccaaacatgaaccacagactctgcatccagaatctgtgcccctatgacaagacccctagggtaaagctcacctccaacgacctactgtctgcgtgaggctgaccccgtagactgctacaactnccaagtgcgtttgaccatctcgcccgggaatcaagtacaggaagacgcaacaattca

SEQ ID NO: 64319 - DNA, 574 bp, Zea mays
  Clone ID: MRT4577_158659C.1
ctcgaggcggcgggccgggatccaaaagagaatcgaatgaatgacttacagaagaactagaccgtcggtcaaagacaggtttatcatcaatgtagacatatatctacaacccaccgccctgcagcttctccctcatcctcctcctccctctcaccctgatcttattatgcttcacctcttctccttccgctgtgcgcctacatcagcaacccgcatgactccacgtcagcgcccacatagacactgcctcgtctccaccgctggtgcagtacgcgctgaaccagcaaatactaacgagggctacacccacgtcgtctccctcacccatcgctcggccgaccttatcagcgtcttcatgggccagcacaccatgaccgggaaggactcccccttcctgctcatcatcatgaaggacgtcctgcaccactataccgccgcgctccgcgacgctgcgccagtcgaatgacccttttggctctctccgatcccgatgccactggaccactccccttctcacgccctccaggagatccactactgccaccggctgctccgctactgctactacaacgac

SEQ ID NO: 64320 - DNA, 249 bp, Zea mays
  Clone ID: MRT4577_15865C.1
gctgcgtcaccgcggcgcctggccgcggcgcgcgtagcaagcggtcctcccgcgcgcccgcggcggcggcgtggcactccctcgtgccgcgcccaccgtcgcagccgtcgccatccttgtcgttctgctcgtcttcggacttcccgtcgttgtccaacaggccagcgcgcggcaggaagagcccggcgcccggcggtgacgcgtctgcgggctcgtacggcggagggggcgtgcggtagtgcacgcact

SEQ ID NO: 64321 - DNA, 1756 bp, Zea mays
  unsure (1)..(1756): unsure at all n locations
  Clone ID: MRT4577_158660C.1
gtagatagctcatattgttcaaagatgataattctatcgttaacagaagttgttgagtcaaatgatatggccatacatatttatttagtacattagtggcgtaattgaagatctgtttagtgatcggttaaacatatacatagctgcaaatgttttagcagtttggttatatctgcacaaaaccatcgtggtcctaaaactaacaattctagtcataggcatgcaaaataatcagtatggagatagtgttgaacgcactttatccttaggtttctgtggcaagttgtcgtctgtgattaacaacaaatacagaacatcaagtactatatatccatgatttatttattcgcacatacatgttttgcaacactcatcactcatcagtcatgcaaaagggagaaccaagagtgttttattcagtagcgagcttgaatctgaacattcacacggtcagactccacgcctgctccttctcttgagaaaccttgccgggctgaaaggctcgagatcaacgatcttggacttgccgtccaggatgagctcggcgagggctgcgccggtggccggaccattgaggataccccagcagctgtggcccgtggccacatagcaccccttcacgcctggtatctccccgatgaccggcagcccgtcggcggtgcacggcaggtagcacgcctgctccgcgaccacctcagcgccctcctccttcttcagctggctggacactttgcctgcgatcttatgcagcattgcaatcgagtctggctcgcctactatcgttgctgggtcatctggcgggttctcgtccttgctcatcccacatatgtacacctccccggtgggccgcgggtacacctcggggtcgagcatcttggcgccgggctccggctggtagctgaggaagaggcagtgcggcgtgaccttctcgggctcgcgcggccggagcacgatgctgtgcgccttgagcccggacacgtcgaacacctcgctgaccacctggaggcggccggaccacgggccgagcgcgagcacgacggcgtcggcgtccagcacgccgtcgcgccccttgaccacgacgccggcgacgcggccgtcccgggccacgacgacgcgctccacctcgccaatgacgacctcggctcccgacgcggcgaggacggccttggtgaagaggcccgggtggacctgcgcggtggtgtcgggggtcccgagctccctcggcggggcggcggacgcggaggggtcgacccagggcgggagcagcgggtgctgcggcgaggaggaggaggcggcggggtgcggggggagcaggatggagagggtgtggacggggcggaagccgtaggcgtcggcgccgccgagggcgtcggccaggcggcggtggagcgcgaaggaggcccgcgcgagcctggacagcgccggggtggagtcgcaccagtccagcgccaggaagccgccggctttccccgaggcggcgcacgccggggcgcacctctcgacgagcgtcgggacggtgggggacgcggcgtgggtggcgaggaagtaggccgtgcacgcgcccaccacgccgccgccgcagatgaccacgcggcggggcggggcggcggacatgggcggcggcagcggcagcgccagcgtcaggctaagggatgcggggcggcggcacgggtggggctcaagtgtgtgtggatgccgctttttttttttctcgaggtacccggccggctcgaggtacccatcggnnannnaaccc

SEQ ID NO: 64322 - DNA, 630 bp, Zea mays
  Clone ID: MRT4577_158661C.1
gccggccgggttcgggatcgccacaagctagcatcagagagcacattcttcactagtagctattcaaggatcagagttgagaagctgcgactgcgatacacacctttcactctttcaggcagccgcttcagaaactctagcaaattaatacacagggatatatagaagatatggcggccctgaaggcgtacgtgcttttgttcacggcctttttcttctccgggctcatgcagctgtccatggcggcgcacgacaagcagccggcgacgacggcgcgggtggtggtcgacgcaaaggcgatcgatcaggctgtcgcgtacctgctcatgttcgctgcgctctttgtcacctatttcgctcactcacgatcggtagtatagttttgtgtctgctcttaaaggctgcagacaagctcgttgtgtatgatgtaatgccggccgtcgttccgtgtccagcctccagtgtcctcctgactgcattcatgtgtcgattcagttaggagtatttctgatcagtttcttgtctatttctcgagatacaaatacaatttatgcgtccatgactatgtataccatgctgatatgttcagaacattgttttttagaaaaaaaaaaaaaaaaaaggccccta

SEQ ID NO: 64323 - DNA, 439 bp, Zea mays
  unsure (1)..(439): unsure at all n locations
  Clone ID: MRT4577_158662C.1
tgaccctctaggttttctgtgaaggatctggccactaggacccctcttgcccgctgtgacaggtcggggcccctctacaccttcggccttcatccaccggtgcgtctccattgtccgtcctggtctccaccacctgctccatcacttggcatcgccgacttggccatccacgacccgacgtcatgggcaaactcaccagtagcttagatttttaatgtagtaggggacattttgaggatctctgtcatacttgtcagctaggccgacatactcgtctcccattcactacttctagagctgagcaagtttttgatttggttcattgtgatctctggacctctcctgtacttagtttgtctgaatataaatactatctgatgattctggatgctntttccattttctatagacctttcctcttctgttgaagtttgacacg

SEQ ID NO: 64324 - DNA, 296 bp, Zea mays
  Clone ID: MRT4577_158663C.1
accatgcgttccgccaggcgtccgctcacacagtgcagtcaggcacacacagcctactagccaggactacctaccagcaaaacctcccgagggcgaactgcaaagcaagccacggccatgggcttttacaagcgcgccaccatgggcggcgggcttaagcacaaggaggccccgaagcccttataccccacaaaaccggcgcaagtggcacccgacttgcccgcggcccagaaacggcgcatcaaagccaaacagccctcagggaccaccatgtgggacaatcccgctccgccatt

SEQ ID NO: 64325 - DNA, 407 bp, Zea mays
  Clone ID: MRT4577_158664C.1
atacaatatggtgattctggaaaattctacagttttgtgctgttgcatttagtacacagaaaaatttgccgccttgtaggcggactccagcctaacgtctttgtgctacagggaaactggctgattgccaaaaaacccaaggtgcgcgatacagcgaccggaaacatgaaagggccaggaagggaagctacagtgggggagacagagaaagatgtgcttgaattaatggaagcctcacaagctgccccatcagtaaacgccaaaaaaaagggtgcaaaaaaaagaacctcccgatgtcccttttgttatagcatctggcgccaatgaagcggaatccgaacctgttgctgggaaaaagtgtacaagccggcaatttgcaggccccgcctttgggggccgtggttcca

SEQ ID NO: 64326 - DNA, 386 bp, Zea mays
  Clone ID: MRT4577_158665C.1
aaacaaacaacagggcacggggaaattttatgggggctaggggacaatcataaccctgcagattgagttttaattcgtcggggagaaacctttaaataacacgctatgacgtgcgcccacattattccatcccgactgggaggggacacccaatcaaacatgcataacaacaacaagagctagcttattggtggctgcctgctcgtaccaaggcgggcggacagaggttcatggaaggaaccatcagatgagccgctgtggattagactaggggaacttgcatccgctactttcggggaggaagttgcggtatctgtacttggaggcacccttgtccgtggagactgggactcagatcttgcatgtggccgcccacttggtgagga

SEQ ID NO: 64327 - DNA, 799 bp, Zea mays
  Clone ID: MRT4577_158666C.1
ccggccgggacgccactgtttcagtgttcccctcaccacccgagccccaccaccagccggccgggaccaccggcccgtgccccagccacaacaaggcgaaatcaggggtggtcacgccgagcgactacgcgaagacgcagtcggcgggagcgaagatctcccaacccacattgcgcgcgcgtctacgcccgaggatcgatggttggcggcggggggcgccgcgcggcgctggggcgctggtgcctggtgatcctggccgtggcctccgcgctaggggtctctggccccgccttctactggcgctacaagaagggcttctcctcctcctccccgtcgtgccctccctgcagctgcgactgcccggcgcccctttccctcaagtccatcgccccagggcttgccaacttctcaataacagattgtgggaaaaacaaccctgagcttgccaaagagatggagaagcaatttgtcgatcttcttaatgaggaactcaaactgcagcaggttgtagctgaggagcatagtcaccacatgaacgccactcttgtcgaagcaaaaagacaagctactcaataccagcgagaagccgaaaagtgtaatgcagctacagagacctgcgaggaagctcgggagcagtctgaagtagcaatttcaaaggagaagaaactcacagcaatgtgggaacagcgagctcggcaactgggttggcatgattctcgagccacgagcatgtgacagctttagttctgaattttcaggtgaaattatttctggtagctgcatgggttatgccttgcag

SEQ ID NO: 64328 - DNA, 1055 bp, Zea mays
  Clone ID: MRT4577_158667C.1
atccgcgtttcgagcacgagccacactcccccacgccactgtttcagtgttcccctcaccacccgagccccaccaccaccaccaccagtccaccaccaccaccggcccgtgccccagccacaacaaggcgaaatcaggggtggtcacgccgagcgactacgcgaagacgcagtcggcgggggcgaagatctcccaacccacattgcgcgcgcgtctacgcccgaggatcgatggttggcggcggggggcgccgcgcggcgctggggcgctggtgcctggtgatcctggccgtggcctccgcgctaggggtctctggccccgccttctactggcgctacaagaagggcttctcctcctcctccccctcgtccaccgcggcggcggtggcttcttccccgtcgtgccctccctgcagctgcgactgcccggcgcccctttccctcaagtccatcgccccagggcttgccaacttctcaataacagattgtgggaaaaacaaccctgagcttgccaaagagatggagaagcaatttgtcgatcttcttaatgaggaactcaagctgcagcaggttgtagctgaggagcatagtcaccacatgaacgccactcttgtcgaagcaaaaagacaagctactcaataccagcgagaagccgaaaagtgtaatgcagctacagagacctgcgaggaagctcgggagcagtctgaagtagcaatttcaaaggagaagaaactcacagcaatgtgggaacagcgagctcggcaactgggttggcatgattctcgagccacgagcatgtgacagctttagttctgaattttcaggtgaaattatttctggtagctgcatgggttatgccttgcagccaaaccaaccggcgacgtttgtctatgtaatatcagtttccacgacaacattgttaattttgagtctcaacattatagttccagcttccttacaaatgtgactagcttgctgccgcctagatatctgaattttgtcatagtactgttgaaagcctttttattaaggacatgtttgtttttctcctagatt

SEQ ID NO: 64329 - DNA, 475 bp, Zea mays
  Clone ID: MRT4577_158668C.1
cccccctcgagttttttttttttttttttttttttttttttttttttttttttttttttttttttttttttttgtatccataaggcaaccgactttacgcataaacaagaccttattatctgtttttgcgaacactgcaacacgctactggtctatggggaattattacacgaaacgccacacatggggaactagggttttcaatacgcatctgccgcggcggggaggagagatcccaccctgcccggcgggggattttccttaaccctggtgctgaacaggggaggaataggcaatcaaagggcggagcccctcttccaaatttctttgaaccttgtttccgaaaatggagacccccccctcttggcccctgacagtgccccctaagggacaccactccaggaccctttccgtaataaaaacaacggtcgaactcctctaaaccattcccggccttccacaagggggctgtttt

SEQ ID NO: 64330 - DNA, 319 bp, Zea mays
  Clone ID: MRT4577_158669C.1
gtcttagacattgctttttactcagagcgcagaagacccgatcgacacctgagggtgttgctcgttgccctcgctctcctggctctcgctgcgagcgccacctcccgcatacatgcggcggttgcggatgctattctaggtcgactgtttctctgataccttccatatttgtttgatttggtttgtaagaggggggcgttcagtctttctgtttcaattagggagttggggcaagcgccttacgtttatctctgctgttttttgagcactgtcttggcctctttttggtgtagtcattgttgcaactgattagggcaca

SEQ ID NO: 64331 - DNA, 563 bp, Zea mays
  Clone ID: MRT4577_15866C.1
ctcggtacccctgctcatgtaccaaaagagatactgactcatctctaagcaacaactgttgaatacaaatagtactctacgacaacaactaatatgcaatcagaccttacgtacaaatgtgcaagcgagcttattggtccattagatcatgatctaactgtagacataatcgtggtttgttaagagggtttctataaatctacacgagctagtggaggcagggtttaaatgttaaatgtgatacatggttgaatcataatctaatgaatcagaaacctccctttgcacgcttacacatcagacctaattggatattagttgttgccctgatgtgatcatgccttagggagtctttgtttgagtttataatctgtctaggtataatccaacaaatttgtctatttttataaaaaaaagttcttttacctttgactttttcaagatatattataatctcaaaagaacaccacttggttgcaacgatatatacgattgcatctgttatgctgtggaactgtggaggaaatgtgcatcctgcaatgtaccagtctaagcatacagat

SEQ ID NO: 64332 - DNA, 501 bp, Zea mays
  unsure (1)..(501): unsure at all n locations
  Clone ID: MRT4577_158670C.1
ggggaacatcctcagcgtgcacgctgcgcgcggccgtagtggggggtggccccgcagcgcgtcggcatgccgaggtgctggactagacgagggcccgaaccatgagcgctacactacaaccttggaggtgacttctcccgagcgctaccgcccggggcacgcatacacatgctacgaggagaggagctccactcattactacggcgtcatggctgatgtcgaacagggcctgaacagccgcacgctgaggggctacactattcagaaggaaagctctctccacatgggggcgctagtgacagaagcggtgcgccactttatcaaggcaaccgcccgtgggactatcacggttgaaggggtgctcactgacaccatagacagcgagccggccaagatccaggacaaggagggctttcccacagaccaggagcgcggcangtttgctgataagcagttggaggacggacgcacgcttgctgtctacaacatcgacaaggagag

SEQ ID NO: 64333 - DNA, 447 bp, Zea mays
  unsure (1)..(447): unsure at all n locations
  Clone ID: MRT4577_158671C.1
gatctacacnctaaaataaatccaaaactaatttataaatcaaattacgctatgttgcatggctcccacgattatataatccaacttataaattatataaacacctaatgatccgcttatatattattataatctaagtatatatattacatattcaactaataatttgtgttgtttgtttgtcacttaacttatttaagcgcgataagtttctaacacagcaggcaaaccgactcgggccgcttatcggttaataaaccatcctaaccacttctagacaatatatatggaattagccagaccggatcagcaggtggcaataccatctacttctctttttgcttggtgctttcaattatgttgtactaaatatttttcaacacttttctagatgtcataaatataatggtttaacctaatttccacgctcatacattttgcatgtta

SEQ ID NO: 64334 - DNA, 243 bp, Zea mays
  Clone ID: MRT4577_158672C.1
atcgataacagccgcctccatttagtttacctcgcacaccgcaccatccggggcagggcatctatctatggagctcagccatcacccaggtggatcatcaacacgacacgccgaaactgttcaaccgctggaccttatatgatgtacagaacaactacatctatctgaaccactacctacttctaaactcgaccaagcacgctacgtacctgccgcacaccttgttgcctcactaacagaagc

SEQ ID NO: 64335 - DNA, 253 bp, Zea mays
  Clone ID: MRT4577_158673C.1
cgggagccactcatccgcccactcgtccgcccacgcgtccgctttttgtcacgtgcgactgtcgtacaatactatagcgcgctcagaatgctgggaggtgcaagaattcatccccagtccagtcacgaaatggtttgcgtcttgactatatcgtgtaatcttattcagttattcttggttgtttgggtcaacttcgagtcattcccctgtttatatatcttttatatcttactattcctatatattttatcct

SEQ ID NO: 64336 - DNA, 159 bp, Zea mays
  Clone ID: MRT4577_158674C.1
gggttgtggttatcaaactgtgggggggataaacaccaatcactttaggtccagcaccggcctaagacgttcctaccaatagtttacagcaagcttcatcttgcacaacaaggtgcttacaatacctaatccaaacagtgtcacctccctctcttagag

SEQ ID NO: 64337 - DNA, 858 bp, Zea mays
  unsure (1)..(858): unsure at all n locations
  Clone ID: MRT4577_158675C.1
cctcgnagccggccgggtttgtgttcgatttgaagtcgaaagttggccgccgcccgtctcactgcaccatctgaccaaatcttgacgccctcgcatccggccgcttagatagtcctgtcccttccccgccaagaagcaaaaaagaaaacacacagattgcccattatggagtccgaatctgacaacgatttccgcgatgacaagagcgtatctgagcacgaggaggttgaggagacaaagccaaagtctgcgctcaagaagggccgggagccagctcccgttgtagagcgtccagaattgcccgagcaaccagacccaagcaccctcgacgtctcaacgctgagcccgctgtcacccgaaatcatttcccgacaggctaccatcaacattggaacaattggtcacgtcgctcacggaaagagtacagtagtaaaggccatttctggtgtgcagacggtccgcttcaagaacgaactcgagaggaatatcaccatcaagctcggttacgcaaacgcgaagatctaccagtgcgacaactccgagtgcccgcgccccacatgctaccgatcatacaagagtgagaaggaggtcgacccgccttgcgaacgtgaaggatgcggaggacgataccgattgaagcgccacgtctcgttcgtcgattgccccggtcacgacattctcatgagcacgatgttgtctggcgccgccgtcatggatgccgcactgctgttgattgccggaaacgaatcttgtccgcaaccgcagacaagtgagcatcttgctgccattgagattatgaagctcaaccatatcatcatccttcagaaacaggtcgatctcatgcgggaggacagcgct

SEQ ID NO: 64338 - DNA, 180 bp, Zea mays
  Clone ID: MRT4577_158676C.1
gaaacaataattagcacccattgataaaaatagtcacaggtacgtcgtagttcacacggcacactggcacacatgcatgacgcgtgacacataagtaatgaatacatgatcggcgaacgacacaagaccttagatagacatacgcttgacaacaagagaaagaatgaacagcggaggcca

SEQ ID NO: 64339 - DNA, 279 bp, Zea mays
  Clone ID: MRT4577_158677C.1
acttgcttgtggtcttttgttttggacggacttcaaagctacgagatctacgttatagctggggtcgacatgctagatactaaattcgggggaaatagtcccacagaggcaggcgtccctctcccaaagatgaggggctggctatatgttaagccgaccgctcaaattggcatgcccgtgcttttcttaaacggggtgggagcgcataccttgcacgttcgcactcggggcgaccgtctactaccttccctccagtccgttgtacgggcgtacttacca

SEQ ID NO: 64340 - DNA, 555 bp, Zea mays
  Clone ID: MRT4577_158678C.1
tccggcttatcgagtatcgatcatcagtacgacatagtctagccaggtaagctgtgagtgaatacgggtggagattatcaccatcgtccagaaaattagcactactacctccttccatttcgtcacccactccaaaagcctactcataaatgcggtgaacaagcagagcgccaggaagcccaatcgacatcattgtttgatcgccttggaatcaatttcttagaagactagtgaagcctctgcctttagagacatgaagttgaggcccttcagggccattacagtgctcatggcaaagacaatgcttattgttcagaactatttatagaagaaatggctcgctgccgaatagatctcctctatgactctcatcaagatgagtgagatcattgatacttaccttggaacctccatgtagaatgctgtggtcacgggacctgtctagttcatctactcgcagaggctcctcacattcgatgatatggtgattgatgggctcgatgtgatgcgtatcatcgatgagccaatcgctgctgctattgactatggtcttga

SEQ ID NO: 64341 - DNA, 703 bp, Zea mays
  Clone ID: MRT4577_158679C.1
agaagaaaggcatagcagcgggcagcggcatgggcaccagccccgtcatccctgcgacgatgctcttcgtcgctcttcttgtcgctgtctgcttcggcgccaccgccgccaggtccagccacgcccgccacaccgacgccgacgacgcgattcgtctccccagcagctttggcgctggtggtcgaccgtggaattgctgcgactccgctatcaaggacgcctccctgccggcgtggcgctgcaacgacgtggtggacaagtgctccgccgactgccaggactgcgaggcgtcgccggccggcgacggcttcgtctgcggtgactttatcttaagcctgaccgagcccccggtctgcacaccgaggccgtgggactgctgcaggacatggatcagtacgagcaactagctcagctcagctacttgctaaaagtagcgtagcgcagcgcgcgcggctacttgctagtatacgtacgtccacaaataaaaataaaagtggctagcgtacaaagctaacatctggttgttcgtcccgacatggacgattagcctagctcgatcgctagctgctgccactctcgttcgatttaatttcatccccatgtgtggcggtgtagggagtgtggatatgatcatccaataaagtagtctactgaaaatgaatagtcgttgatcatattaatatacatccatctcattttgttc

SEQ ID NO: 64342 - DNA, 452 bp, Zea mays
  Clone ID: MRT4577_15867C.1
tcggaaacagaccttgcaccccttccgtccgtgattttaatacatcctgtcagcccaacgaaaatgtggcgcgctacaaatagccgcactgtgtacatcctcaacgacgctgccctcaacacggccatggcaccggcagaatcaccgaatgcaggcagtcctgacaaggcaccgacctagtcaccaaaggcacgcagtcctgcagcatatgccaatgcacctgagtctgctgccacgagaactgcccccgctaatgcacctcaagccgcctacacctccggcgctgccgatgccccatcttcgtcaacaacctaggaagtctgagccagctgccgagccgaccaccgacgtctctacaccgtcttcttccacggacgaggagttgagcccttcgccgtcagcattcaccgtcgatgtggcgtcccctgccgctgatgggcctgctgatggac

SEQ ID NO: 64343 - DNA, 162 bp, Zea mays
  Clone ID: MRT4577_158680C.1
tctacccacgcgttctctttaatgctgagcataaacatgagcggcgctcataacacaatgaaggaggtgcatcgatcatcatctgtacccagaatatgcaacgtccaacccaactctaatacctacccatgttcctgctacttcgagaggtttattgcccac

SEQ ID NO: 64344 - DNA, 1002 bp, Zea mays
  Clone ID: MRT4577_158681C.1
ggtaccctcccgagccgtccgggcaggatgggtgtatttatttcctgcgcctgcgaatgaataatcatcagcaacaacttgaggcttggagaaagaagaaaggcatagcagcgggcagcggcatgggcaccagccccgtcatccctgcgacgatgctcttcgtcgctcttcttgtcgctgtctgcttcggcgccaccgccgccaggtccagccacgcccgccacaccgacgccgacgccgcgattcgtctccccagcagctttggcgctggtggtcgaccgtggaattgctgcgactccgctatcaagaacgccgagctgccggcgtggcgctgcaacgacgtggtggacaagtgctccgctgactgccaggactgcgaggcgtcgccggccggcgacggcttcgtctgcggtgactttatcttaagcctgaccgagcccccggtctgcacaccgaggccatgggactgctgcgacagcgtggcctgcacaagggactacatccccaactgcatgtgcctggacaaggtggagtcgtgctcgagcaactgcgaacggtgcgagtttctgtatcattcggaccctcctcgcttccaatgccgagacatcttccacggctatcctggtcccaagtgctggacgacatggatcagtacgagcaactagctcagctcagctacttgctaaaagtagcgcagcgcggctacttgctagtatacgtatgtccacaaataaaaataaaagtggctagcgtaacatctggttgttcatcccgacatggacgattagcctagctcgatcgctagctgctgccactctcgttcgcgcgtcactgacgaagccagctaggcctcgatttcatccccatgtgtgaaggtgtagggagtgtggatatgatcatccaataaagtagtctagtgaaaatgaatcgtcgttcatcatattaatatacatccatctcattttgttcgctatgttattcgaaaacaatatttttttcgtt

SEQ ID NO: 64345 - DNA, 1364 bp, Zea mays
  Clone ID: MRT4577_158682C.1
ccgggtacactcctaatggctgtggctgaagaacgaattcaagcgcgtggacagggaaaagacaccctggcttatcgttctcatgcattctcccatgtacaacagcaacgaggcacattacatggagggtgagagtatgagggctgctttcgagaaatggtttgtgaagtacaaggtcgacttggtgtttgcagggcacgttcatgcttatgagagatcataccgcatttctatgtatcagcaacaacttcaggcttggagaaagaagaaaggcatagcagcgggcagcggcatgggcaccagccccgtcatccctgcgacgatgctcttcgtcgctcttcttgtcgctgtctgcttcggcgccaccgccgccaggtccagccacgcccgccacaccgacgccgacgacgcgattcgtctccccagcagctttggcgctggtggtcgaccgtggaattgctgcgactccgctatcaaggacgcctccctgccggcgtggcgctgcaacgacgtggtggacaagtgctccgccgactgccaggactgcgaggcgtcgccggccggcgacggcttcgtctgcggtgactttatcttaagcctgaccgagcccccggtctgcacaccgaggccgtgggactgctgcgacagcgtggcctgcacaagggactacatccccaactgcatgtgcctggacaaggtggagtcgtgctcgagcaactgcgaacggtgcgagtttcagaatcattcggaccctcctcgcttccaatgccgagacatcttccacggctatcctggtcccaagtgcaggacatggatcagtacgagcaactagctcagctcagctacttgctaaaagtagcgtagcgcagcgcgcgcggctacttgctagtatacgtacgtccacaaataaaaataaaagtggctagcgtacaaagctaacatctggttggtggctgcccccgcaccgtcccccgtgagcttcatagactgcgggagcgcgtgcggggcgcggtgcgcgctgtcgtcgcggtggaacctgtgccggagggcgtgcgggtcctgctgcgcccgctgcaactgcgtgccgccgggcaccgccgggaaccacgacgtctgcccctgctacgccgccatcaccacccgcggtggccgccccaagtgcccttgacgtacgcatgggcgaggccgccgcgcgcgacgcctctcctattgtctccgtgtagtcgtttgttgtactcagccggtgtacgtgcgtgtctcctgtgtgcgtacgtacgtcacactcacacatgatgcgactgcaactgcaatgcatgcctgacccgaccgtcgttgcctagaaaaaaaaaaaaaaaaaagcggcc

SEQ ID NO: 64346 - DNA, 1942 bp, Zea mays
  Clone ID: MRT4577_158683C.1
tctacggtgggggccgccacgcccctcgtatgggaccacgtcaccggcgccgctcgcctgccgttccgcctccccgcctccgtcgaatccctgcccgcggggctgccgcggcttgactccccgcgccggatcgccgccgcagccttcggatcggacgacgagctggtggatctggaactgcgggtcgagatctcgtccatcgccggtatcgaggacgcgctctcctgaagcccgcctctggtaaggccgccgagacgcggctccgcgccgggtgggcacgctggctggaggggaaggccgactacctacggcgcgatcggatgctccgctccaacctggaatccctcaatccgcgcaaccacccgcttctccaggatccggacagccccggcctcacttctctcacccgcggcgaccgcatggtgcagcgaatgctactagccgagctcgacaagcccgcgtccaagagctttgagcggcgtaggcttctatcttacgagaacaagcagagcatgacaacaactgtgaaggagaagccgcagacgggaaggaggtggggatatttcccggggatcgatccacatttgggattctcagagttcatggagaggttcttcgagcatgggaagtgttccatgagagtgttcatggtgtggaacagcccgcagtgggcgtatggcatcaggcaccagaggggactggagagtctactcaagcagcacccagatgcctgtgtagtcatgctatcggagacactggaactagagtccttccaccaattcgtcaaggaaggatataaagttgctgttgcagtgccgaatcttgatgagcttttagaaagcactccaactcacgtatttgcatcagtgtggtatgaatggcggcagacaaaatattaccatttgcactacagtgaactagtacgccttgctgccctttacaaatatggtggaatataccttgactctgatgttattattcttaaacctttaacatcgctccggaattctattggtgccacaaatcatgtctctggaaattcccgttttggtggggctgtgttagcatttgaaaaacagagccctttattggaggagtgccttagggaattttattcgacatatgatgataccctcgtgcagtggaatggggctgaacttatgacaagagtgataagcaatatttctagcagagcagatgaaaacagggggcatcttgacattaagttggagccctttgttaaattttaccctataagctctactgatattatacgatatttctcagagcccgataacatggtccaaaaagcacatcatgatgcatcttttctaggatcgtgaatgactctaccactttccatttttggaatggcatcacgtctgcactggtgcctgaacccagcagtgttgtttcgaaaatccttaaccgttactgcatccgttgccttgatgttttatagttgcagcagtctagctttattttggtttagaacacaacacatacacagaagaaatctttcaatgaggtactcagaatggctagtattgctgaatcttgcaaaacattgtgatggggggaaaattaccggcagcactgtgtatatattcttttcactaaggtttgtgccggagctgcgcctgcaaagtccaagcatgttgacttgactagttattgtcgatagcaaaagtcttcctcctggcaatacagaatgcaacaactgaagacacttggaactagagagttttgactagttcggtaccccttctatatttgcacatatactgataattttcacaatttgatattttgaaaataacatgattcgtgtaagacagtagaaactgaaggaccatataccgaattcactgggtttatctagatctcttgtaagcttttatttctcagagcatgaaaatgtctgaattaacgacttgggaac

SEQ ID NO: 64347 - DNA, 113 bp, Zea mays
  Clone ID: MRT4577_158684C.1
tcggtttcgaagacgaccagataccgcaggggccggaaccagaaacggagccggccagggaggagcggccgcaaccaaaaggacccgggaccgaaccgaccgagaaaacaaag

SEQ ID NO: 64348 - DNA, 179 bp, Zea mays
  Clone ID: MRT4577_158685C.1
ctcagcggaggcacggtggcggtcgcgggacggtggggccacgctggactgacgcgggataccggccggaaccatccaactcgccgcgtcgtcgtcgccttcgtctcgcgtgctcaccaagagaacaaaacgcgtgcaacaaagaattcaacgtccacggtccgcccaccctccgtttc

SEQ ID NO: 64349 - DNA, 754 bp, Zea mays
  unsure (1)..(754): unsure at all n locations
  Clone ID: MRT4577_158686C.1
ccctcgaggctggccggaaaaaagctgctagcttcaggcgccgcaatggcaagcgggccacgcagcggcgaggccaagcctcggcggtttgatctcaccatgtcaaggaggacgaggcggccagcggcagcaaccgtggagcgactgggattcctccagccggtggtgcggccggaggagcgacggagtccagatggccgcccgttctgcttgccgggtcatccgcagcccgaggatgctcaccaagagcacgaggcgtcagaaccctcgacggaggaagagtgtcaggaccgtcgtttctcgctgcaggagctgatcgaggacgaggccgtcgacggcgccgccaccggaggcaccacggaagggaacactcctgctgctggtgttcgtgaatttgcacaactacaaggagctgcagcaggcgaggcaacgcggcgggctggacaggtgccggcgggacggagggtgatcggaatggtgcgccgctacgtgaaggtccggtccatcaagcccaagcgtgcgtcgccgtcggcggagaagtgcgcttcacctgtatgctgacgaggctgaactgttcccgttcgcctttttatggactgtgtaaatgaattggctcatcttgtgcagnttttttttttctctgtgcgttttccccggttgtgtaaaagaaaacttttgtgcgctgcagatgatgtgttctgcacttttgcttagttgttcgttggctggcatgttaacaatgttgagacctggg

SEQ ID NO: 64350 - DNA, 295 bp, Zea mays
  Clone ID: MRT4577_158687C.1
ctatttgcatcaaaaaacaaactcaaaatagagatgttaacttctttggaagtaaagtaatttttactttatgaccttgaataaataaccaaagcagaaatgtgaataacttgatagcaagacaacctattaattcattgggcaactatgtatttcgatttttggttgcttttcctttaagacagtaaaattggtagattattcacttgtactatatactaatatttttaaaaattctttcagaaatgccagatctggagtaaggaatattgtcatcacctggattttgagaaag

SEQ ID NO: 64351 - DNA, 526 bp, Zea mays
  Clone ID: MRT4577_158688C.1
gggggaacccaaaaaccccccaacaaaacaaaaaaatgggccagggctaacttttaaattttgggccgggaggggaccaaaacaaaattttgggggctttaacctggtccaaaacaagaaaaaagggggggggaactttcccaactgcctttgggaaaacggcaaacccgggaacccccttttttaaaagaaaaaaccccggggggggggggggccccaaacccggcccccccttgtttgcccggtttttaggaaagggaaacccccccggggggggggccgaccttttagggctggaccccacccgggtgaaaggcctgcccgttgaaacccccaacagggcttccaattttttaagggccaatgttcttttcccggaaaggggcctggacgggcccgggttcccccccaagaggaccattttttttcccctggccccctttttggaggagccccgggggcttccttttaaaaccccttgggacccttttcctggcccggccgggaaaaacctgacaaaggcccc

SEQ ID NO: 64352 - DNA, 142 bp, Zea mays
  Clone ID: MRT4577_158689C.1
ggcgagggcacaccttttcccaacaaaggggggccggaaactgaaagcgagaaacgttactttaaggggatccaagttagatttaggggggtttaattaaaacacgggttataaggggaaaaaatttttcgtttagaaaact

SEQ ID NO: 64353 - DNA, 449 bp, Zea mays
  Clone ID: MRT4577_15868C.1
ggtaataggttagagataaaaacaggcttgggtcaaaacatacaaaggattcacagccttttttccttcctttttgggtgccataatttgtttttaaggggccaagatttttttttcaacaataaaacaaaagggaaaaaaaaagaagcccctggtctaggggtcatcccgggattgcatccttggcggcatgggaatcgctccaaggacacatagggccctttacaaaggggggcagatgcagggactcatatttttggtgccgtctagctgaagcctgcaaagacagctagatttaaaaattttttggaaatggacggggcgggggcctacggttttgccctgggggggccaccccccatgggcaacgggaactccctggcccttttggggtcggatccggaggaacccccctgcctggagacggggaggacaaggtccttgacccc

SEQ ID NO: 64354 - DNA, 753 bp, Zea mays
  Clone ID: MRT4577_158690C.1
atggtgtccattcctaccgtgtgtttcctcccgacccgcacttccggcaagctgctagagccatctccccttcgagctcctctttcatggtgtcgagccctcttcactcgctatctctgctcagagtgtcgcagtccttgtcgcagtccttggttgggctccaccctcgctggagcccggcggtcgtcgaggtctcggatgctgtctttatcttccatggtgtttgtcgtgagctccacgtacggctccggccatcgttcctctcgtcgtgatccttttctgctcgtcctcagcatgaagccacgcccagcgcctacgtcgaccatctccctggcgcacctccctgctccatccatcagacgccagtactcatgccaagccatcctcctctctcagttcatcggacgtcgatctccgttgcacttgtctccctcaatgctctccactgtacgcccagttgtctcgaacctcatcgtcgtttctcatctacaatctcgtcagcctctgctcgacatgtgtttggtgaagagcctgagccaagtgttgttgctgcttccaggaattcataattaaattggtaatagtactctagctcgctactcctactaattaattcgataaatagattactaattaattcgatgaatagattggatggatattaattgcgatgctcgaatcagatacttataatgtgctatagtaattatctgtattttattggatatgtttgctgttagggtatttctctac

SEQ ID NO: 64355 - DNA, 423 bp, Zea mays
  Clone ID: MRT4577_158691C.1
ccaaaccaacttattgataattaaaggtagaaagccgggcgacctgattgcatacaaagtacaggttacaggccgtgccctcttataatggtaattctggttgtaacgagacccagggacccattttaccctatattagatgtaattttaagacgggtgaaatgtgttggagacattgtttgaagatacacttattttatggtcacaatcgacatagaacagggttccggcttcagagtcatgttttttatcttggggccaacattcttcaacgcgcagatctggtgccacagcatctcagactgcacagggccaacttgatcctaccagctctgtaacagttgcttacatcgtggtttttgacagtcttgaccatgttgcgtaacttcttgctcattacagacttgtggatgagttggcgga

SEQ ID NO: 64356 - DNA, 402 bp, Zea mays
  Clone ID: MRT4577_158692C.1
atggggcccggggggccacccgggaaaaccggaccggggcctgggggcgacccaccttggccaaaagggagggaaaaaaaagctggggggaaccagggcaaaagatgctacctgggggaaaatggtatccgtacccaattccccacaacagacaacccggaaacaaaaaggggaaagccgggggggccaaaggggggggggaactcaaaataatggggtgggccccactgccccctttccagaggggaaaccgggcgggccaaatgcataaaggaaggggccaacccgcggggaaaggggccttggatattgggccccaccgtgttttttcttttaaccagggagacgcggcacacttgatggccatacccccccgggcccttaaaaatggaaagaaagggg

SEQ ID NO: 64357 - DNA, 313 bp, Zea mays
  Clone ID: MRT4577_158693C.1
ctagctattaatttccctcgagatcctaagacgccaaatgctattaccagggggggagaaatataagagctggggctatcaataactactcgtacaagacaggacacacatatgaaaacactctacaacagtcctaagatccatcactgcagcatatacaaaagtccgcatatcatgcaaaacttacatttaaatactcacaaccactggtagagatgttaacaataaaccattgctcgcaactgaagaactacaaatctaccacgttgtcaactatatcgaaacacatttatgataggtgatttaaggctca

SEQ ID NO: 64358 - DNA, 227 bp, Zea mays
  unsure (1)..(227): unsure at all n locations
  Clone ID: MRT4577_158694C.1
gttcggctgtgcgcggtcacctacaccacaccacaccaattctccataccagaaggagcaaaaataacacnntnntcatgtacgagcgcttgccttaaacgggcgtcgcccgcacggttctcgccagagctactggatccttcgcacggtaacccgcccgtgatagttatgtgcgcctgtgggcccggccggctctggacttacataggcgcactcacccccgtctg

SEQ ID NO: 64359 - DNA, 158 bp, Zea mays
  unsure (1)..(158): unsure at all n locations
  Clone ID: MRT4577_158695C.1
ctctttgtatcaacaacccacctgtgntgtctgtgacactgcgcgtgtttgggtggcagattgctgggtgagtgggcgcgagcttggttttcggggatttcgtggtttgcgttggctgagctgcgagagactcacgtcactgcttgaatattttttga

SEQ ID NO: 64360 - DNA, 478 bp, Zea mays
  Clone ID: MRT4577_158696C.1
aggagaagcgcaagggcgcggtgcacacgcgcgcgttggctcccactgcctgccggctggaactctccgctcttgctcggtccatatatgagctgagctgagcaccaggaggaaagagacgacgacgcagatggttttgagctgttgtggggaattgaggcttcatggtccgagatatatataaaaatatctctaggtatcttaactagtgccggctactactaatctagatctcctagctagctgtattatttttcattctctctctctccctctccccccgttctcttctcccttgctgctgttttgagaggatgcgtccagacgggacgatgttcttggctggctagctagctagctagctagctgctgctgctgctgccgtgccatgacgtctcagattaatggtcctccaagtgatgtaataagaataatactgttacagggagtatatatattgagtttggaaaaaaaaaaa

SEQ ID NO: 64361 - DNA, 476 bp, Zea mays
  Clone ID: MRT4577_158697C.1
atgtctacctctatgaattggaggtctattagataaaatttcgaagctcggggttgggatgagcatgttcttatacattgacaccggttttttctcataattataaacttattattttaaaaaataagaacagaggccaatggcgagatgcccgtggaatctaggaattgtagtaatctgcgaggagggatcgaggccctggcgctttgcgttacctttttccggctagccttgacccccggcgacccgtactccggagtgcggggcaacgcgggccacctttccggcgttcttggcgcaaccgcagcgcccggcggcattatgaaaccagtgccccagtcgggcgtcgccgcgaacctggggctccggtcgtgcgtttgcgggaacccggcggcgccagcgccccagtccggagtgggcaccaagcgcggggtcccgtcgggcgtggcggcggcccaaaacttcatgatcctggc

SEQ ID NO: 64362 - DNA, 551 bp, Zea mays
  Clone ID: MRT4577_158698C.1
gcagtgtgagtcaagccgagtcgaagcgacggtcccaccaccgcagttggagcccactatgagtaaggacaagaaccactgagactggtatcctccgagcgatggtgaggatcccacggcgaacggcatcctgacagtggccgccggcggcggctgcatgcgctgtcggcaactacctgggagagcgccccaccaagacaacacactacctgcgggacgcgcaaatgcactgcatccacctcatggacccgacgcgctacctcgacaagccaggggacgatcgcatcacgtaacccgaacgagcaggtgggtgtgtactacaagacgctgtactcgtgaacgacgtacagccacgaggcggcgacgggacccgcagatccaagccggagatctaccagggacacaaagactgggacggtgcgaggcctcggtcacgtgggctgacgtggcccacgcgatccaaaacgtagcggacgccatgaagcaagacatcgaggcggactacgtgctgctcaacgacaggctggacggccgcgtcaagtggaacgacg

SEQ ID NO: 64363 - DNA, 717 bp, Zea mays
  unsure (1)..(717): unsure at all n locations
  Clone ID: MRT4577_158699C.1
tggacgcctgcaggtatccggtccggaattcccgggtcgacccacgcgtccgattcgtggactcaagtccctgaagctgtcgggccggcaattctcactgcacgtgcgcgtcccgctgcccgccggaaggacgaagtctggcagtgtttatctcgttggggaccgaggaatcggttggcgggcaacgggttctaggctgctggcagcgcgaggacccgcggccccaccccggcccggcctggcagtttctagtcctggcagcatacgagccacagctgtcaaaggaactcctcgtgcctgtagacaccctgggtgaccccagggacaacggatcagcttgacaagaacgctctgtgaggggctaatcaaccatggttacatggagttccctgtcctaggtagcagaggcagcaggccgtgccgggggggcatgttcctgtaacctgtggcccaggggatgttacggtggacagtgcatctggagggcgggccacgcagggtgaaccatgctgcagtggctgtcgggcaccgagtatattccttcggnggttactgctctggggaagactacgaaacactacggcagatagatgtgcacattttcaatgctgtgtccttgcgttggacaaagctgcccccagtgaggcctgccgtncgagggcaggctcctgttgttccctacatgcgctatgggcactcaaccgtcctcattgatga

SEQ ID NO: 64364 - DNA, 207 bp, Zea mays
  Clone ID: MRT4577_15869C.1
attaggattgcgctggagccaagggtcccaactgaaacgcacacagtgttgcagacattgtgggagcccaagatgaaacggttagtaggcttgtgcattgaccaaggggatatacaagattgtttgcccattaacacattgtcatcaatggtgtaacaccatccaggatgttcactccctgttacagccagcgagcccaaactccct

SEQ ID NO: 64365 - DNA, 470 bp, Zea mays
  Clone ID: MRT4577_1586C.1
ggaccgggcaaggcaaggaaggacattcggggctggggttaaaaccctaacaggggcccagaagggcccggggttcaacaaggaacaccccatggacaaaaggacagccctattggtaaaaaggcatcaaaaaggccctaaaaaacaaaagggcctgttacatcggggctagaaagagaaaaaaaaacaaagtttttttacaagcccaacacagggcagggattgattgcacacaggggaaaaaaccaactgattggggcaccacccgggaaaaaaccaaaactgggtttgccatggctcaaccggggaaaaaaaactttcgccttgaacaaccaaaaattcagggggcttagggggggccccatatgttaagccacccaggacccaaaagcaatttgggtaaaaaaaaaattggctcgtaaggaaaaaaaaccctggatgtttaaaagcttttgaggcacttgggcgct

SEQ ID NO: 64366 - DNA, 179 bp, Zea mays
  Clone ID: MRT4577_158700C.1
gtcggataatcgaactcgagatgactaaaacggcatctgcataacaatggaaaaggaagaacaaggtcttgaagggacagcattgccagctgctgctgagtcacagatttcattatatctagcctccctaaggaaaatacactgaatgctatttttactaaccattctatttttataaa

SEQ ID NO: 64367 - DNA, 2125 bp, Zea mays
  Clone ID: MRT4577_158701C.1
cattgcctacctctccgggccacggggccgcgctcccggtccctgcgcgtgtttatccacgcctcacgccgcgctcgcttcggccacggcggtaatggcggcggcccgacgcctcttctccttccacctccaagcgcgtcctctcgccgccggtgttgccgtcgcgaccccgcactgccacggaaagcatgacgcggtctcgtgcaaggccacggggaaaaccaagcccaaggcgaaggcgggcaagggcggcgagcggcagcataggcgggcgctggaggagcatctcaagcggcgcacccgttccgcagctgccttcgatgccgacctgtacggtcggcgcgcccacgagcaccatatccccgtcttgcttggcgaggtcctcgccgccttccgcaggccccgcccgctccgctccttcgtcgactgcaccctcggcgccgcaggacactccctcgccatgatggaggcgcacccggagttggagttgtacattggcatggacgtcgacccctccgctctggggattggccatgggcacattgaggccttccttgctggtagggaaagggaagcgaatggaggggaagacgatgccttgcttgggacgctgcgtgcctacactcatgtcaagaacttcaagtacatcaagcaagttctcagtagcgtcgatgagagtctagtggttggatcttctggagttgatggtatcctcattgaccttggcatgtcatccatgcaggtgaataaatctaataggggattcagtgtactccaggatggtcctcttgatatgcgcatggaccctaaggcaactttaagagcagaggacattttgaattcttggccggagcttgaacttgggcgtatcctgcgtgaatatggggaggaaagcaactggcaatccgtccagaagcaaattgttaaagcccggtctgtgggcggtttacactctactggggatcttgtcaaactaatccaaaggatgtgtaccatatcaagcgggcggcagggctggatcaagacttcaacaagagtgtttcaggccctcaggattgcagtcaatgatgagctccgggttctagaagattcactccattcatgctttgactgtctggcgacaggtggtcggcttgctgtaatctcattccacagtctggaggatagaattgtgaagaaaactttcttggagctcatccatgggggtgaagcaaatgaagaagacgacaaagacgaccgggcactcactgatatcgaagacggagatgaaccatggtctggccagagagtgcaaggaaggaatggaaccgtcctcacaaaaagaccaataaccccctcgcaagaggaggaaaaactaaaccagaggtgcagaagcgcaaagcttagagtcattcagaagacctgaataatttcggataaattttgaaggattcctgggcacatcggcgtgtagttttttatagccagagaaatgtgaatgggattctcacttgcgtgcacagccagctgcagtctggatcaccagaaattttacatcagccggatgtggtggtgctatttatcctcgacaagaaatctagaggcttaggttagtcgaaaaaaaactcactgtatctgcatcagtttctgaacttcgttcatgtatatcgcctcatgaactctgtaaaccattcacttgcaagacacgataatcagtttagggttttcgagccctccttcattacaaaaaaaaaaaaaaaaaaaacccgcggccccaatgaggtgtcggtcctggagaagaacacctgatctgatcagcgagctagtgacctgtggaattactcgtgcacaggttacccttctgctgctgtgtattgtaatgtaaggccatcaacatgtataccgccgcaacagctgggcagtgggacccggcgggaagtacaggtacagggtgtgatgctctgtttggtagaatgttatagcctttgcgcatcattcggaaatttgaaatatgtctggctttttttttgcaatattcgtcctctaattaaaatatgttatcctggttgtgacaatgtttcctacagtagactaatcatgtctgttgtgacaaatgttccacgtggtagactaatcgtgttagctg

SEQ ID NO: 64368 - DNA, 296 bp, Zea mays
  Clone ID: MRT4577_158702C.1
cggctcgagatagacaagcaccgagttttatgcataaccgtcatatatgatattttacaacacttaatatttgtaggcttgtaccgtgcacatacgtgtcgaagttgtctgcgaacctagttgcatgagctcagaattccttttgagctggatactagtatgctaggtcgagtagctactatgactaaatcaggctctacggtagtagtcaaatgattttactagcactcgagcgaagtcaggaattggttgtatccattctgatacttgcatgatgatggtctatggacacggat

SEQ ID NO: 64369 - DNA, 983 bp, Zea mays
  Clone ID: MRT4577_158703C.1
ttgggtccctcgaggccggccgggatccatcattgtccagagagccagagcacattcttatcccacatcatccatcaactcggagcgcagatttttgggaactcgaagcagagccagacacagcacagcccaggagaagcgagcgcagacgatggcggcggtgtggtggtggtgggcgccgctgccggcgtggctgacctccagtgcgttatggttcctcgtcgtcaacgcggtcgtcgccgcggtcgccgtcctttcctccaggccgctgccgctgcaatcgccccgctgcggtgccggggtctcgctcacgcggagggcctcgtccgcggtgctgcagcgcctccgctccttctccatcttctccttcccctccgcctgcctcaactacaccacgccatcgacgttcacgcagcctgacgccgccacccaagaaacagaggagacgtccaggacaccgacgacggccaagccgtcaccgcgcgcgctcccgctcccactcccgccatccccgctgtcgccgtcagtgcgcgcgccggcggcagacgacgacgtgcccagcgggatgagcatggacgaggcctacgcgctggcgctggaggcgcgccggcggccggaccgggagagggaggaggaggccaggaggtccgaggtggacgccaaggccgaggagttcatccgcggcttcaaggaggacctgcgccagcagcgcctcaactccatcttcaactacacccagatgctcaagcagcgcgcgtcgccgccgcccgccgccagcgccagccggatgccccgccagatcagctttgagtcacgtgttcggttcgttcgttcctgatattggtcagcgttttcagggagaccaaaatcagttttgagttgctgtacatagcctgctttcaacagattgtttgtatatagtctccagatatgatttacagataaagtacgacataaagatatatcttgatcgtttataactc

SEQ ID NO: 64370 - DNA, 171 bp, Zea mays
  Clone ID: MRT4577_158704C.1
gaacgcaggaaaaagctcctacaaataggcgctatggacgagaacatgctgcacctacacaatgtattggtacgttacattcttgtcctgaaactgcagattctgatacacaactctttaagcagaattgtgctgatgcagaccgtgtatctactctaagcttgggcggac

SEQ ID NO: 64371 - DNA, 522 bp, Zea mays
  Clone ID: MRT4577_158705C.1
cgcccggctggactccggcaccagcgggctctgtggctgcattgatgggtgtccaggcgggatcctccctccccggcgacgtctctgctcggggcggctggccgctcgcggcactggttcggtgtcgctctgggactcggcagcggtccccacctagcccttctccacgccgctgtccgcggctcccctctcggcccattttgcatgggactgctagtggtttgtcaggtactccgcaacaagttcaggcaagaagcccacaacaaccacctacagcagaacagaatatcaggaccgagatcaatccagtgttgacaccaagagcagcaggcactgagggttcattgattggtatccaaggatctaatcaggctggaaacaatttaactctgaaaggctggccgctcacgcagaagccatttatgcaatctccacagcaatttcagcagctccagtttctgaccccacagcagcagcagcagctgtttgcagctgcgtcagcaaaatgctgtcgtcctcgat

SEQ ID NO: 64372 - DNA, 4912 bp, Zea mays
  Clone ID: MRT4577_158706C.1
gcgacgcatctgacattcttcccaaccatcactcaatgactccaaggcgttggtgccattgggtaatggattgtcgtcaaactcaacttttggtgctgaccctttctctgcaactccacgaccagaacagggttcaccttttccccccaacgttccaaacaatctgctcagctctacccctcctgcctcagctgctggacatcatcaccctcctaagccaatgcaggctggtcctgtgcagagtatatcctcgctttctcctcatactagccagttgccacacaatcagccacctccgaggcaacaacaatttaatgctacaccaagtgctccaggaccagtgagttcaaatattcccactggacaaattccttcaagcccaagccagcctcaggcaccatggccgaaaatcactcaagtagatgtcagaaaatacatgattgtatttatcaaggtagacagggatcgtgatgggaaaatcactggtgaagaggcaaggaatctatttttaagttggaggcttccaagagatgtcttaaggaaggtgtgggatttgtccgaccaggataaggatgggatgctatctttcaaggaattttgtattgctgtgtacttaatggagagacatcgagagcaccgtcctcttcctgacacagtaacagatgctatttgggctgagggcaccgcactaccctctactggacagtttgcagaaaatcctagtgcccccgctcctcaagcaagtgccggatatacaagtagaacaatgcaaggaccacatcatgggatgcttccctcatccatgaagccaccatctcggaggcctcttcctttagatgctgacgatactattaagccagagcaacaaaagccaaaggtccctgtcttggaggaacatctagttggccaactaagcaaggaggaacaagatacactggatgcaaagtttaatgaagcttcagtcgctgataagaaagtccaagagttggagaaggagatccttgattctagagagaagaccgagttttatcgcacgaagatgcaggagcttattctttacaaaagtaggtgcgacaataggtttaatgaagtctcagaaagtatgtctgctgataaacgtgaggtccaatctctttctgcaaaatatgatgagagatgcaagaaggttggagatgtggcatcaaagctaacaatggatgaggctactttccgtgagatccaggagaagaagttggaaatttataacgccatagttaagctgcaaaaaggggatgatagcgatgagaagtttcaggagcgggctaataagatacagtcagatcttgaggagcttgtgaaatcattgaatgagcaatgcaagagatatgggttgagagctaagccaactactttagtggagcttccttttggttggcaacctggaattcaagagacagcttatgcatgggatgaagaatgggataattttggagatgaaggattctctataataaaggaactaacagttgaagtggagcctcccgttgtagcaaagagtcagcctactgaggatgttaaagcatcttcaaatggggcatcaacagaaaaagaagacaacaagggtgataaatctgctgctgctgtggagcaggttgtcaaacctgaaacagcaccttcgaatatcaaaccagagtcagcaaaaagtcctccagttagtcctgtcaagaacaaagaggatggtcccgatgaacatgataaaaagcaatctggaacaaatgatgtctcaccacgtgagagtatcagcaaccgtggagcaatggattcccctactcatggagataaaacccatgatggacactcatggggcatggataatgactccctatggaactttgatcataaggagggtgagaatggtgattcagatctcttctttgggccacaaggccttcccccgataagaactggaggttcctcatctggtaattcagttgtcaaggaacagaagccgttctttgattctgttcctggtaccccagtggagaaatccgtctttgattccatcccaggcacgccatttcagaaatccgtctttgattctatcccaggcacgccagttcagaaatccgtgtttgattactctgtccctagcacaccgatgcagaactcagtctttgattattctgtcccaagcacgccgatgcagaagtcactctttgattctgtccctggtacaccggtgcagagatcagttttcgattctgttccgagcacaccaatgcagagatcagtttttgactctgttccgagcacgccgacgcagaaaccattcttcgactcctttccaagcacaccaatgcagagatcactgttcgattctgggccaagcagagcagaatctcctaccgccagcagcatgtatggcaaagagcagaagggattcttcgattcttcagtcccgagtactccaatgtacaactcaagcttcacgccaaggtatagcgaagcaggagacgattcattcgacaccatgtcccaatacagctcatttggcatgcacgagagcaattcctttggacagcgcgacagcttatcgagattcgattctttcagcagcaatgctgacaacggtgggaatgacacttttgcgaggtttgattctttccgcagcacttcagatcagggtgggggcaacagcttcatgaggtacgattccatgaacagcagcagcgaccatgacgggatcggcacgtttgcgaggtttgattcgatgaagagcagtaactacaacagccggggctactcgttcgacgacgaggacccctttgggacagggccgtttaaatcgacagagaccacgagccacagcccgacaaaacatgggacggacacatggagcgcgttttgacaggcaggggctgtatcatatattcaatagaggtcatgcgcttgtgcaccttactgcagatatatacacacgtacaggggcaagacaattttttgttgtgtgcatgggcctctgctccaacacacctggggaaggggaagggatgggacggggatttgcttgtgtgcttgctttgtgtttaattttgtacgtaggctgggaacatgtgtttggtgggatgatgatgatgatgctgctgctgctgcttataaactcaacattctttataccttgtattgtacaagtgcatgtacaagatgtgagtcgacccgtttgggttgagtaactctcgagtgttttttcttccatggtgtagcgttttcctgtttctccagaattttctgagcaatgtacagacagacaaacttttgtgtgaaacacctgttgtccaatactgagacccttcagcgagaagcacagttgcgagattcatggatatggagggcaacccttcacggtttgttaaaacaatgaacaaactgatccctaggttctagatctgggccgttcaaatcaacagagaaatcgaacagcccgacgagacatgggacggatgcgtggagtgcattttgacaggtattgtattatagaggtcatgttcttgtgcaccttactgcagatatacatacacgtacaagggcaagacattttttttttgcatgggcctctgctcgcccacaccttttggacgggacggggcttgcttgtgtgtttaattttgtacctaggctgggaacatgtgtttggagggatggtgctgcttataaacattctttataccttgtattgtacacgtacatctacaagatgcgagtcaacccgttgggttgaaaaactctccgagtgttttcttccattgtgtaggttttttttttctttcagtttctgcaaaaagttttgagctctgtacatacattttggctaagaagtcaacctagttatggggatattgtgagcaattataagtcggttcagcgagaagctagggatcagtttgttcattgttttaacaaaccgtgagggttgccctccatatccatgaattgaagacctgtgcttctcgctgaaccgacttataattgctcacaatatccccataactaggttgacttcttagccaaaatgtatgtacagagctcagaactttttgcagaaactgaaagaaaaaaaaaaaccctacacaatggaagaaaacactcggagagttcttcaacccaacgggttgactcgcatcttgtagatgtacgtgtacaatacaaggtataaagaatgtttataagcagcaccatccctccaaacacatgttcccagcctaggtacaaaattaaacacacaagcaagccccgtcccgtccaaaaggtgtggagcagagcagaggcccatgcaaaaaaaaaaagtgtcttgcccttgtacgtgtatgtatatctgcagtaaggtgcacaagaacatgaccgctataatacaatacctgtcaaaatgcactccacgcatccgtcccatgtctcgtcgggctgttcgatttctctgttgatttgaacggcccagttccaaaggggtcgtcgtcatcaaatgagtagctccggttgttgtagtcactgtttttcatggaatcaaacctcgcaaatgtatccgttctgtcatggtcactgctgctgttcatggaatcgtacctcatgaagctgttgcccccgccttgatctgaagtgctgcggaaagaatcaaatctcgcaaaggcgtcattaccgccattatcagcattgctccggaaggaatcaaatcttgagaagctgtctatctgtccaaaagaattgttgtcgtgcatgccgaaggagctgtattgagacattgtgtcaaatgaatcatctcctgcttcactgtatctgggcgtgaggcttgagttgtacattggtgtactcggaactgaagaatcaaagaatcccttttgctctttgccatacacgctgccagcagtaggagattctgctc

SEQ ID NO: 64373 - DNA, 389 bp, Zea mays
  Clone ID: MRT4577_158707C.1
ggccggtcattacaactccctaaagtgacgtcgtattacgcgtccgacctcctcctcacccgccggccaacaactcagccgctgcaaccgccacatcagccatgggcgcttgcgcaaccaatcccaagacgcttgaggggcaggccccagctgaggccgccgtctccacacccaaggttgcacccgaggccactctaatctccgttgaggttgcggctgaagaataggtatcttacaatgtggtggtggaggaaccggctgcggcggccgacgttgagcaatagtaggctaatgaggtgttctctccagaagcggccgtccccgagcccgatcacaacgacgacgaaaccgtcgagaaaaccatcttctaggaggacaatccaaccgga

SEQ ID NO: 64374 - DNA, 2030 bp, Zea mays
  Clone ID: MRT4577_158708C.1
gaggaattcctcgagaccggccgggagtttattttaacatgaaattggatttagagaaggaaaaatctttctttgaggaggagaagcgataagcgattcaagctcaggagaatctagcaataacccaaaatgagcgagaagatttacaaagtttgcaggtgaaacttaaagatgaaagtgatagtcggagagcccaaaaggttgacctaattgctgatgcagaaaggctattatcagaaaaagaaaggtttgagattgaatgggagttgatcgatgagaagaaggaggaactacaaaaggaggcagccaggattgctgaagaacgaagagtaatagatgagcatctcaagagcgaatttgatattatcaaacaagaaaaggaagatctccgtgttcagttaaaaattagtacagaatcccttgctcatgaacatgctgaattcatgaataagatgcagcaagagcatgctagttggcttagcaggatacaattagaaagagaagatctgaagaaagatattgatatccagagaaccgagttactgaattctgcaaaggctaggcagatggaaatagattcatatttgagggaaaaagaagaggagtttgaacagaaaaaatccaaggaacttgaatacatctgttgtgaagaggaaactatcggatcaaaaccgctgcatgtcacgcttgaattgcaaaaacttgaggaggagaggaaaaggtctatgctggagcgagagagaagagaggaagagctgtctgaaacaaagaaaactatagacgcgcttaatgagcaacgcgagaagttaccagaagcaaagaaaactgcttcattcagaccgaaaatcaattacacagcaaatgcagctgcttaatgagttagaagagctgaagattgaatctgagaacaagcaactgtctttgagacagtgtgggaaatcgaagcatgctggtgtggaaaacctggaagacaacggtgttcacctgtctcctgatgaggatcaaaatgctagtccaaaacaaactactgtaaagaaattggaagtgtccccttcagtctccacaccaatttcttgggttaaaaaatgtgctcaggtgatattcaaacgctctccagagaagagtgctgatcccaacaatgatatacctccaaagttgggaaatgtcaatgactgtacctccttagctactgcctattcagatggattgtttgcttgtcacctggaaaatggtgctgagaaagtaccacaagctatcgatggtctgaaagttgggaaaaagaggcttaataatgcactctctcatggtgactccgaaatttcacagccaaaacgcaagcagcaaaggagcactactcagactttgagagtgattggaggagaaattgattccaactgcagcccatcagttctagaagaaaaatgttcaaagaatgaacatgatgcagtcccagttggtttgtgtgggaagggaccacaaaatccccaagcagagcattcagaggatatttcagtgtctgcatctgaaccgtcgaacggacctggtgttgtggactctgaggacaaggatgaagcagatgaggagtctgacgatgaaggcgaggacgaggaggaagagaagacgtcatcggcgaagaagctgtggcgtttcctcatcacatgatttatttatctttgtcgtacgataaaaaaatagcacggctaactgtaggttctatatgatggtaggaggccacttaggcattcaaagctctgctagtttcattggctttgtcatggcgtgtcctctggtgtgtagtaaaggtggaagaaggtactggtttggttgtgtgcttcgggtgttgtgagtagcgcggtggctttggaaggcgctgtggactgtcccccacctactaccacccatgcctttttttttcctgtttatcttgtccgcaggaaaacgtgtgtgaagtgattgacagtttccgggttggtgcgaaaaaaaaaaaaaaaaaaaaaaaaaaaaagtactctgcgttgttaccactgctt

SEQ ID NO: 64375 - DNA, 170 bp, Zea mays
  Clone ID: MRT4577_15870C.1
cgtgggcgtaagcggatgctcatagccgggcccaggtgaggcttcatggtgctctgttgccagcctgagctggtacctggcctaatgccccttgatgtcctacattggctgctctctgaaccgcaagcctatctcattgctcgctccatattctagagcctgaatccgct

SEQ ID NO: 64376 - DNA, 591 bp, Zea mays
  Clone ID: MRT4577_158710C.1
atacatttcatctggtgggtctggccttagaaattcctaatgaaccaaacactagagcttgtagttcctctagcttctctatgacctgtatctagagagtaaaacactagagatgcccaattagacaaagaaaaagatttgtttcagttttactaggtggattagcttttagttttgcagtctaaagttgtgcagttctgtgtatcaaccacacatcgtgctaaaattataaagaaaaatattcttgcaaagtcactgtctgagtgtgattgctgttttttgttttattggtaactgttggttattgtctgcagtcagtcattttgaacagtaatgttgactgctaaaatgctacccctattttgaacagtcatcataagctttatgtttctagatttatctggggaaatacttgcccaagatataattccgatgttaaatggtactaatattttaggaaatgatggtcaatgatagaaaatgtagaactacaatctttttgaaatggagggagtgaagttcttttgtcagttcacttctatctgggatatgactctctcactatcttatgttcgaactggatatctttgc

SEQ ID NO: 64377 - DNA, 1116 bp, Zea mays
  unsure (1)..(1116): unsure at all n locations
  Clone ID: MRT4577_158711C.1
gtagatgcccacaacaactctgcttctggctccctcttcaccaaagcctcccacctcgggccagagaatttcttcaggtaaagctgatttgctatctttgcttgtgctacggcagcctttcncctcggggcaagagcttccggtgttccaatcttctcaagcattttgtcgatcagactgtcaactcggctgacaaagaaggatgctacactggttactcgggataagtcgctcaaaccagaagcctcaagcccgtcgaggtaagcatcaatcacagcctcgtatcttgcaacagagaagataagagtgacattgacgctgatgccattagcaatgacttccttgatagaaggaacacattctgctgtagctgggatctttatgtacacattggggcggttgaccactttgtgtaaccacttcgcagcttcgacggttccttgggtgtcatttgccagcctaggagacacctccactgaaacgtaaccatcagccccatcagtctcgtcgtagatgggctcaaacagcttgcacgcgtcttggatgtcctttatgacgagttcccagtaagcgctctccgcatccttcccagctgatataagctccttgaactgaccgtcataggcgtttgatgaagagatggctttctggaaaatcgttgggttgctggtgactccacggacaccgttggcgatgtagggcagcaaatcggtgacaggccggcaaaggttgtcgtaccacggggactgaccctgttgctcatagaggtcatggagcgtggtcctcttcgtcacggcgccgttcccctccttggcggaagccatcgcaatgacggggctcctggcgcgggcggcgagggagacgcggaagcggcgggcggagggggcggaggcgagcgcggcggagcggaggggctgcgaggggagcggccccgcggccgccggcctcggggcggcgagcttgggcacggtgccggccatcgatcgcggctctgcttccgactctcggcggggttggtgaatggtgagggggacggctggttggtcgcccacgggggttgttgcgaggtttagcggagcggggatctctctctctctctccctccttctggaccct

SEQ ID NO: 64378 - DNA, 260 bp, Zea mays
  Clone ID: MRT4577_158712C.1
gaggaacgatagccacatcaggggcatgcgaactactcgtcgcgacgcgacgccatcggccgccatgacgctctccctctccaggtctttcctctcgatcgccgccgccgcgaggaccatcgcccgcacccgacgctccgtcgtcccctctcacgggatgcgctgctcgatgcgctagaactggttgcacccggcgatctacgaggacgcgaaagtgtactcgaacgtcgagctgctgctgatgacgcgggtcacaaacc

SEQ ID NO: 64379 - DNA, 339 bp, Zea mays
  Clone ID: MRT4577_158713C.1
gccaaccaatttcttggcccctaaccattacgtgggccgcccctacggggtgggcgcgcacattttgttgtaactcacatcaaacgccaaccacttactctcctacgtggccgccgaaatgctcccatacaccatgttgtggtcgatatccaaaatgtccatcgcctccagcaactccacgcggacgaagtcgaacctgaaccggttgcgctacacggacagcgcgttcaacggattctccgcgccgaacatcgcctactcgtcgcccgtaaactgattgtccaagagctccacatcgccgaacgccgcgccggcaaatgcagccggaatcggccccat

SEQ ID NO: 64380 - DNA, 107 bp, Zea mays
  Clone ID: MRT4577_158714C.1
cggacactgggcgagacgcgtgggtgaagtttcggcgagatgttgatagacttcgtgcccaccgtggcgggggtctcgctagcggaagtgccggccttactcaaggc

SEQ ID NO: 64381 - DNA, 808 bp, Zea mays
  Clone ID: MRT4577_158715C.1
aaccaccaacaatctggaaggcgagctgcctccaccgtctcgttgctgaggaacctccggtacctgtcagtgttcgacaacaacatgagtggcaccgtaccgccggacctcggcgcagggctggcgttgaccgatgtgagcttcgcgaacaacagcttctccggcgagctgccgcagggcctctgcgacggcttcgcgctgcacaacttcacggcgaaccacaataacttcagtggcaggctgccgccgtgcttgaagaactgctccgagctgtaccgggtgcggctggaggggagccgcttcaccggcgacatctcggaggcgttcggggtccaccccagcatggactacctggacatctccgggaacaagctgaccggccggctctcggatgactggggacgatgcaccaggaccacgcgcctgaagatggatggcaacagcatatcaggcgccatcccggcggcgttcgggaacatgacgagcttgcaggacctcagcttggccgcgaacaacttggtaggagccgttccacccgagctgggtaatctcagcttcttgttcagcctcaacctgagccacaactccttctccgggccgattccgacaagcttgggccgaaattccaaactgcagaaagttgatctgtcagggaacatgcttagtggagccataccagtgggcatcgacaatcttggctcactaacctatcttgacctgagcaagacagactgtcagggcagataccaagtgagctcggcgacctattccagctgcagaccctgcttgatctgagcagcaactcgct

SEQ ID NO: 64382 - DNA, 283 bp, Zea mays
  Clone ID: MRT4577_158716C.1
gtaataaaaccttatttacatacctctgacacggcaaagccagaatccatgaaacaaagaaggccccaaaaataccaaaaaaagctgaaaacgagggcaacccacggggggaacttaaaccccacacacacaaacaacgaccactgggaattaaaataaacaggggccaaaccactcaaacaaagggggggataaggagcaactccacacaccaaggaggggcgaggaattaagagatgaacagcgaccaaaaaaaaaagccctctccccagaaggggcaact

SEQ ID NO: 64383 - DNA, 323 bp, Zea mays
  unsure (1)..(323): unsure at all n locations
  Clone ID: MRT4577_158717C.1
taggggaggggcgtgaganttattaatgatttgtnataggtgggggtagtangcacacacaananaancggttnattattaaannaagattgagacgantnatganangaacagnagatactttgacaacctccatttgtttagagggcaccagacgacgggggggggggggcancttttcgtcttttgactnactgaccaccacggngacggagcacaggggggagggngcncncctcccccatgttgtagtctgctagggtgcggccatcctccagctgtttgccggcgaagaaaaaacactgctggtccggggggatgcc

SEQ ID NO: 64384 - DNA, 3336 bp, Zea mays
  Clone ID: MRT4577_158718C.1
atggttgaagatcgtgcatggatgtacaatggctggagtaggaatgggcgtcattctgatgagtgggtagccaagaccaaagattttgtggaccacgtattcgctttgtccttaaccggcactgtcagatgcccttgtaggcgtcacgaaaacagtatatttcttaataaggaaagagttagcctagatctttgtcagtttggatttatgcccggatatgaggtgtgggaacatcatggtgaggtagtacccaaccggaatgtagaagaggaggagaacaatgattgggctggcgatgatgcgatgcatgagatggtagattcgctacgtccagaattcaacctaagctccgaggatcctgccacaccagaggtttccagattttttaaactactaaaagactctgaagagccgttgcatgaacacacagatgtgagtatactcgcttttgtgactcggctcatggccattaagtccaagtactttttctcgaacaattgttacaatgagattttaaagttattaggagatgtgctcccaaagcccaataagttgcctaaagacatgtaccaatcaaagacaattatcaaaggtctcggtatggattatgagaagattgatgtgtgcaaaaataattgtatgcttttcatgaaggagcatgcggaagagaaaaaatgtctgaaatgtggacaatctagatttgtggaagttgttaatgatgagggtgaaaaggtgatgacagatgttgcacataagcagctccgctacttgccactaactcctcgagtgaaacgaatgtttctatctaaaaaaaccgctatgcacatgcgatggcacaaagaaggtgtccgtgataacgatgacctaatcgtgcacccttcagatggggatgcatggaaggctctcgacacgtttgatcctgagtttgcagctgatccgaggaatgttcgaatcggcctcgcgaccgatggcttcacaccttttggtcaaatggcatcatcatactcatgttggcccgtctttgttattccatacaaccttccaccttctctttgtatgaaatatgaatttatatttctttgcttaatcattcctggcccagactatcctggaaagaacctcaatgtcatgttaaaacccttgattgaagagttgaaggagctttggaaaggtgttgaagcatacgatgtttttacaaaacagatattcaaacttcgagttgcgtatttgtggtcggtgcatgacttcatggcgtatgctatttttaccggttggagtacacatggtagattgacatgtccatattgcggttcagatacagattgcttccgtcttgctcatggtggaaagatcacttacttcgattgtcatcgacgctggttgcccaggaaacacccctttaggagcgataagaaaaactttataaagaacactgtggtcaccaaaggtccgcctaaacgtcttaacgcggcagaaatatatgctcagctgaacaaccttgtcctaaatgaaaagggggacaagtatgaaggattcggagtggaccacaactggacacatatatgtggtctctgggagctcccttatatgtcgtcattgattcttgtgcacaacattgatgtcatgcaccaagaaagtaatgttgctgaagccctcatacacacctgcatgcattttgacaaaacaaaggacaatctgaaagctcgaagagatctagcaatgctttgtgaccgaccaacccaagaagaggaggacgacgaggaggaggtgcaacaccatgaggaggaggacgaggacgagcaggcccatgaggaggataacgaggaggacgagcaggcccatgagggcatagatgctgaggcggatgacgataccaccgaggctcctgtcgttcgacgaaggggcactcggaagggccactttgtcctacctccgtcagcgcctgcacaatctgaagctcgagtactgatcatcccggttggtgatagccaatgggaagacacgtcatttgacggtcgaggtcaccatagacaggttaatcaagtcttaggtaacctctgtcgtctacataacccaggaattgtcaccgacccgaaaggtgtggtggttccttgcactagctggtcgcacttcgcactagctccacatgctacatatggaacagctcaaggcgccgtcaagcacgacttttggagacgctatcgtgtggaacctgaggctcaagagcatgcagaccgagtattagagaaaaatgcgaaaaaggtgtgcagggatgcattttccaatgctcgtctacaggttgtgaacgcgtacatgaagcgccgaggtcattctatcaacaactttcgacaatattcagatgtctacttgactgtagaccagtacatggaggtaactcttccatggatggaacaccggccgcaggcttacaaggctttgtgtgagatatgggcttcgcccgagtggattgagaagtcaaacagaaatcgacataggcagcgccatcagcaggacgaggacgatgatgaggtcgtagtcaaccatacctatggggctgatggacacattcggttggctaagcgaatggaggctcaaactggagttgtcccgagcccaatcgatgtttataggagagggcatcgagcgaaaaacagtgaaatctccgatgagctgtgtagtcaagcggccgttgagcgtatggagacatacgggcaggagatggttaagaagtatggagaagactacgattggcgaggagcgcctaccatcgacgctgaggttgtgcattcacttggaggcaaggcgcatggacgatattctatgtttaccggtgttatcgattcgacggagttgcgttctcgtggcggctcttcgtcgcaggcgggctgtggtagtagcagccgtagtcgccgctctgtatctagcatggaggaagctatgagggagcagcaagaaaaatttcgtgaagagatgcggcaacaacaaatggcatttctccaacagcaatcagagtacatggctgcttataacgcacaggcgcaacaagcaatgaactcttggtttccacagcaggcacagcagcaaccatttgttttccctcaatttcagccgccgatgcctcagtggggattacatgctccgccacctccacctccacctcagggatccggggtcatgggccacaacacgccaccaccggtcataccagcaccaggaggagcttatgcaggggagggagcttatgcaggagaggatccaaacccgttacacgacttcgtcgaccagttattggcttctggaggtagtggacacaactccaacgaccccaatgtgtga

SEQ ID NO: 64385 - DNA, 977 bp, Zea mays
  Clone ID: MRT4577_158719C.1
gagtccatacaaatataaagtccacaaatagtccatacaaacataaagtccacaaatagttcattacaacacagtgcggcacaaagctaactcaatcacacattggggtcgttggagttgtgtccactacctccagaagccaataactggtcgacgaagtcgtgtaacgggtttggatcctctcctgcataagctccctcccctgcataagctcctcctggtgctggtatgaccggtggtggcgtgttgtggcccatgaccccggatccctgaggtggaggtggaggtggcggagcatgtaatccccactgaggcatcggcggctgaaattgagggaaaacaaatggttgctgctgtgcctgctgtggaaaccaagagttcattgcttgttgcgcctgtgcgttgtaagcagccatgtactctgattgctgatggagaaatgccatttgttgttgccgcatctcttcacgaaatttttcttgctgctccctcatagcttcctccatgctagatacagagcggcgactacggctgctactaccacagcccgcctgcgacgaagagccgccacgagaacgcaactccgtcgaatcgataacaccggtaaacatagaatatcgtccatgcgccttgcctccaagtgaatgcacaacctcagcgtcgatggtaggcgctcctcgccaatcgtagtcttctccatacttcttaaccatctcctgcccgtatgtctccatacgctcaacggccgcttgactacacagctcatcggagatttcactgtttttcgctcgatgccctctcctataaacatcgattgggctcgggacaactccagtttgagcctcctgcaaatatatgagttcaatcctgtttcatttctgagtaaaacagaatactacatactcaccattcgcttagccaaccgaatgtgtccatcaaccccataggtatggttgactacgacctcatcatcgtcc

SEQ ID NO: 64386 - DNA, 220 bp, Zea mays
  Clone ID: MRT4577_158720C.1
tgggacccactcttctcatcacgactactcatacacagcacattagtgaggtatagcatctcgaaaaaagctgtgatctgagggacatggccgtcggcaccatggctcttatctatcgcgcgctcgtttgtaagccggtgaccaacaccagggacgtcttttgcgaggggcgcattaccatgcgcaagactgttggcaagcccaagccagcggcgttcgg

SEQ ID NO: 64387 - DNA, 966 bp, Zea mays
  Clone ID: MRT4577_158721C.1
aatcacaataaaatgacataaacattagaccatattgtatcacacttcttcacaaccacattgtagtttaccaacattaagttcacaaatggttcaccacatcaaagttcacaaatacaacatcacagttcacaaatagttcattacaacataataactccctccagaagcgaaaaactcaaaccatcacatatcggggttgttgaagttgtgaccactacctccataagcaaaaaactcgttgacgaagtcgtgtaacgggtttggattctctcctgtagtagctccctcccctgcataagctcctcctggtgctggtatcaccggtggtggcgtgttgtggcccatgaccccggatccctgaggtggaggtggcggagcatgtaatccccattgtggcatcgacaactaaaattgagggaaaacaaatgattgctgttgtgcctgctgttcattgcttgttgcgcctgtgcgttgtaagcagccatgtactctaattgctgttggagaaatgttatttgttgttgccgcagctcttcacgaaacctttcttgctgctccctcatagcgtcctccatgctagtacatagctccgactatggctgctactaccacaacccgcctgcgacgaagagccgccacgagaacgcaattccgtcgaatcgatcacaccggtaaacatagaatatctttcgatggggaagagcttggcgacgacggcggagtggttgcacgaggagggcttggccacggctggtcgacggaagcttagaacggcggcggacgacggtggcggctcgtggcggcacgggcggccggtgctgggcgagggcgggcgggcgacgctggggcgctgggcggcgcaggggtggccggggagcagcggcgtgggtgctccgcgcggctggcggcgcgggagctgggcgacccagggagcggcggcgcggttgcttggtcaagtaaaat

SEQ ID NO: 64388 - DNA, 689 bp, Zea mays
  Clone ID: MRT4577_158722C.1
agcagtggtaacaacgcagagtacgcgggtgaagggtgcacgattaggtcatcgttatcacggacaccttctttgtgccatcgcatatgcatagcgattttttagatagaaacatccgtttcacttgaggagttagtggcaagtagtggagctgcttatgtgcaacatctgtcatcaccttctcaccctcatcattaacaacttccacaaatctaaattgtccacatttcagacattttttctctttcgcatgctccttcatgaaaaacatacaattatttttgcacacatcaatcttctcataatccataccgagacctttgataattgtctttgaatggtacgtctttaggcaacatattaggctttgggagcacatctcctaataactttaaaatctcattgtaacaattgttcgagaaaaagtacttggacttaatggccatgagccgagtcacaaaagcgagtatactcatatctgtgtgttcatgcaacggctctttagagtcttttagtagtttgaaaaatctggaaacctctggtgtggtaggatcctcggagcttaggtttaattctggacgtagggaatctagcatctcatgcatcgcatcatcgccagtccaatcattggtctcctcctcttctacatttccgttgggtactacctcaccatgatgttcccacacctc

SEQ ID NO: 64389 - DNA, 281 bp, Zea mays
  unsure (1)..(281): unsure at all n locations
  Clone ID: MRT4577_158723C.1
attttnggtcgacggacgcgtncggtcactctatacactaccacggtcaaaggattcaaactccacatgcaccctacatacacgggacagggacgccataccccaacaagtgacgactacacctacggatccaaaccccgttatctaatttctttacacaccccaaaaaaaggagcaaacaacctcaatctacacaccaacaaaggctgtgcaactggaacacgcaccagaaagacgaaagaggctgcaaccgcgaacaagaacaacacgaacacccataa

SEQ ID NO: 64390 - DNA, 779 bp, Zea mays
  unsure (1)..(779): unsure at all n locations
  Clone ID: MRT4577_158724C.1
ttttttttttttttttgcagcggaaataaattctttatacaaaatgattacaagttacaacatttacaagttatagcaatattacaatatatcatcggagtgattacaacgagaaattgattcaaaagattaccaatttgaatgtataaaacatttataagttttaaaatacatgctagcttaagtgacaatccttattaatgaagctaaagatgggatatacttatataagaaggccgaccccaccgacacttagcaccattcacaacagaacaaaattacaacctccagaagccaataactggtcgacgaagtcgtgtaacggggttggatcctctcctgcataagctccctcccctgcataagctccctcccctgcataagctcctggtgctggtatgaccggtggtggcgtgttgtggcccatgaccccggatccctgaggtggaggtggaggtggcggagcatgtaatccccactgaggcatcggcggctgaaattgagggaaaacaaatggttgctgctgtgcctgctgtggaaaccaagagttcattgcttgttgcgcctgtgcgttgtaagcagccatgtactctgattgctgttggagaaatgccatttgttgttgccgcatctcttcacgaaacttttcttgctgctccctcatagcttcctccatgctagatacagagcggcgactacggctgctgctaccacagcccgcctgcgnacgaaaccgnccgagaacgcactcgtcgaatcgatacaccggtaacatagat

SEQ ID NO: 64391 - DNA, 414 bp, Zea mays
  Clone ID: MRT4577_158725C.1
gtggaatcaacaccctgttattgtgaactgacaaacgccatacacaaaacgcagccatgcaaatgatgatcatgtccgtcccaaattctatggaagggacaaagccataaccattccactcaaggaagggaaaaaaaaacccccgggtatacaaattaatttaaaagggccgccacattttatgggggaacacaaaaggaacttcttaagcgaaggcgtggggggagcattcccagaggggtccccaggggagccggggggttccttctttttggagagaaacttggcgggaagccaaacaatgactgcaagaaacacaatggcaacgacagaaaggagcaggcccgggccaaaccaaccacctttggggcgcttggtcaaaaatgcaaccctttttgcacaccctgaaaacgg

SEQ ID NO: 64392 - DNA, 531 bp, Zea mays
  Clone ID: MRT4577_158726C.1
catcagtcaagcaatcgtcgcatatagtacaagatgtagtaataatatattacacacacgtacatatatgccgcccatccaaatccgatgtatataggaagaggagtatgtgcccgaccgggccgctgtctactagcacggctggccgacgatgcacttgagtggtccggcgaagcgcgtgagctggacatggacacgtggtcgatccacacgttgctggacgacagcacggagacgccgtcgccgtcgctccgcgtgcgcagtcggtactgccgatttgagtcgcggatcatgccgcccgagtgcgccttggagtcgtggatgtgcaggttgtgcaggatcacgttctgcacgttctgcagcgtgatctgcgcgaacatgatgtgcacctgcgcgccccgaccgtcgatcgccttgttgaggttcacgatcagctcctgccgcagctcgatcaccatgtcgtgcgcgaacacgatccacagtggacggtcctgtatcacggcgtgccgtagcgtgcccttccgcgggatg

SEQ ID NO: 64393 - DNA, 297 bp, Zea mays
  Clone ID: MRT4577_158727C.1
ctcgtggcccacgtgcgggaaaactaccccaagtctgaagtggttgctccggcggattgcatcatgctagcgctgcgaacaactcaaacacaccggctttctttgaggacctgttgacatggaatctaatcctgtcagaacctgtgacgttcttagaggttctgctttggatcatcatgccttgaaaagaggaaccaatcatgtcaggtgatgctatttgagcaaagcaattctgactattcggacgcaacagtcatatagtcacagcggtataaaggatgcggatgcattgtgtgg

SEQ ID NO: 64394 - DNA, 1781 bp, Zea mays
  Clone ID: MRT4577_158728C.1
cccacgcgtccgcccacgcgtccgcgcgtccctcgctcctgcgccgcccgtccgatccggtcactggccggggagggctcagaaacctttcatccaatacatacatctatctgagccctttcccgcggtgaggcccgaccggagtccacacacacacacacacggtgtcgatggcggccgtaataaggagccgccgccgcgtgtccgttttcttctacgtcgtcctcgccgcagctgcagctgcagccgcggcgcaggcatccaataacgtcacctccgacgaggagtactgggcggagcgcgccgaggtggctcggtcgcgcaacctcgccgcctacgtcagcgaccccgtggccgccacgaaccgcttcaacgcggacgtgctgagggccacgacgcggcgggcgctggcgaggtacgatggcccgtgcatggcgaccaaccccatcgaccggtgctggcgctgccgcgccgactgggcgacggaccggaagcggctggcgcagtgcgcgcgcgggttcggccacaggagcgtcggcggcgcggccggcaagctgtacgtggtgagggacccgagcgacgacgagatgatcatcccgcggaagggcacgctgcggcacgcggtgatccaggaccggccgctgtggatcgtgttcgcgcgcgacatggtgatcgagctgcggcaggagctgatcgtgaaccacaacaagacgatcgacgggcggggcgcgcaggtgcacatcatgttcgcgcagatcacgctgcagaacgtgcagaacgtgatcctgcacaacctgcacatccacgactccaaggcgcactcgggcggcatgatccgcgactcgcagcggcactacgggctgcgcacgcggagcgacggcgacggcgtctccgtgatggggtccagcgatgtgtggatcgaccacgtgtccatgagcagctgcgcggacgggctggtggacgcggtggacggctccaccgccatcaccgtctccaacggccacttcacgaggcacgaccacgttatgctgttcggcgccagcaacgacagcccgcaggacgcggtgatgcaggtcacggtggcgttcaaccacttcggcaacgggctggtgcagcggatgccgcgctgccgctacggcttcttccacgtggtgaacaacgactacacgcactggatcatgtacgccatcggcggcaacatgaaccccaccatcatcagccagggcaaccgcttcagcgccgtcgacgacagcaggttcaaggaggtgaccaagcgggagtacacgccgtacaaggactacaaggagtgggtgtggaagtcgcagggcgacgtcatgatgaatggcgccttcttcaacgagtccggcggccagaacgagcgcaagtacgacaggttcgacttcatcccggccaagcacggccgctacgtcggtcagctcacgcgcttcgccggaccactcaagtgcatcgtcggccagccgtgctagtagacagcggcccggtcgggcacatactcctcttcctatatacatcggatttggatgggcggcatatatgtacgtgtgtgtaatatattattactacatcttgtactatatgcgacgattgctttactgatgaatcacgcttcttaggttagaccaatttagaagggaattagaggagattaaatctgctcccggtaaaaaatgactcgaagaaaatttagggactgtttggtttgtggttaaatgtgctacaaattgtttagtgtttaatgttagtcgttcggattaagagga

SEQ ID NO: 64395 - DNA, 202 bp, Zea mays
  Clone ID: MRT4577_158729C.1
ccacgcgatccgcacatccgcacctctctccagctccctgctcctccgcctacgtcgtgagttcaaatgggaaacgggtcaagggggtaaaaccaatggcaaacaaagaaatgcaaggatccaaggaaaacatggtttggccaaaaatcaactccaggattcccaaaggggaagtatcagaaaaaatcccaaaatgggcaaa

SEQ ID NO: 64396 - DNA, 1441 bp, Zea mays
  Clone ID: MRT4577_15872C.1
cagaaacaaatgtcacatctttactatataataggagttatgtaaaaaatagctaaataattacatcatatatagacaacgaaccaacaaccatagttgactgggagacgacagcctagaccactcacgaactcatcacaacatccttcatgcgccttgtccagtggtacctgttcttgataggggatgtgagtacaacaagggtgagctcacatacggtcatcgctcaacaagttgtggggaataatgtgcatgaactcaccaaaggtgggagctcatgtgaagtgtaaggcttatcaaaggagacgactaaaattgagcattgcttttaaagttggtcaaaattttattagcagttactaagtataaatagataccaacctaattaagcaagagatgaaaattgataataacacccgcgatgcaatgcatatgacatattaagtttagttctataaattaatcatgcgagagtcctgagctgctcatgaccacgagcacgactgatataccagttttacactctacagaggttgcgccctttacccacaagtcgtgtatcccatcgagccaggcttagctagacccatagacacttctgaggtgaatgactagggatgcactacgaggcctttaaaaatttccactaccttcagaaaacctgctacagtttctagggagcgcaatataggaattccccgtccgacaagccatcgcagcatgatcgacccgagaacctccctatatcgacaactcctctactacccttgccccttttgggtaaggtagtccttcactagctttcctaattagtcagccaagggcgtcccattccacccttgtggtggcatgtgttctcaagttaagctccatgttccaaataaaaataatgatcttgacatgaataataaataacagtataattcgaacatgaacataatgtaatattaaacccaaaaatatatagagcaatagcaaaaactacccaaatagtttaggggtaaataaggtaacaagataatcagtctagggtgacctattgggtcccatcaaaattaaacctatgcatgaataagtgatactaaagaacattattgggtaataaaagtggtcaagggcacaacttgcctgggacttcagattccaggtaccaacttgttcttcaggtgactcgtgacctcactgcgtgagtcaatgcttggttgcggccagccaagtaccaggcaaaatcacggcgtaggggaaacgacggtgagaaattagtggcctcacggtggatttccccgtagcggaaggttgtggccggttttggtaatcgccaccgattgtccaagggcttcaattcggctccacaaccgtcatggcgagagcagagccaatggcaggcctttcccctagcaggcggcagcgaggttcaagggattaggcctcgtgccgaatt

SEQ ID NO: 64397 - DNA, 264 bp, Zea mays
  Clone ID: MRT4577_158730C.1
gctccagtctcctcaccatgagatccaactggtaggacgtataaacagaacttgagtacactgatgtccttgtcctgtatcaactatccctgggtcatctgctacggactttgcaagacctttctcctactcaaccaggaagccgtagtttctggaatccagggccatggcaactgtgactccaaagtcgctctgtctcatccagtcaacttttctagctcctaacgaccgagttcctctacgcaggctcatgctgcccaggct

SEQ ID NO: 64398 - DNA, 193 bp, Zea mays
  Clone ID: MRT4577_158731C.1
cttaaacttacaacaaatatatgtgtggttcattcactagtaaataaagcattttttagattatttatagcagtacagctagcactcatgtactcggttttgtctgatgaccgcataccagtaattgtcctctgtacctctctttctttaaaaaaaaaacaataaaaatctattaaattaacaacggctgtcc

SEQ ID NO: 64399 - DNA, 734 bp, Zea mays
  Clone ID: MRT4577_158732C.1
gccggccgggccgggacgtcacctgttccttatcctgtggttactggggtctctcccgaacgtctttatctcatggtcgtcagtctcttggacagcgcgctcctcccagctcgtttgtccccccacactgctccagctttcaccacgcctatgcgctgctactctgccacaccgtttcctccattcctactcgagctcccaagcgcttgctcatggtgtttccagctcgtggctgccctggttgtgctctgcatcacagttctcccagccgttgtctacctagcaccagcatgaagccgctcggacgtcaccttcctcaccccgagctcgcacggcctcgtcgggactgcgccgtcgtctcctcttgtggctgaacgtcgcattgtttctgctccttgccgcggcttcccatggcatgctcggactcgtctgggtgccgacctcctccacgctgtgctcgggacttcgtcggtgccgtctggccatgctcgtcgtcgcgctacacgtcttcatgttcctctgcgtcgatctcgcttcgccgaagcaacagcaacaccagcgtcgtctcctagcttgggttcgtgaatttcctcgtcgaaccggcattatgtcgtcatccggtagtgtggctctctttattcgtattttggcgatttatattcttgtgtatatattgtaggtgtattcccttcgaggttgtgtattacgttacactcgattaattctgttcggtt

SEQ ID NO: 64400 - DNA, 339 bp, Zea mays
  Clone ID: MRT4577_158733C.1
gccagttcggggtcacctacctcgatacgcactctgataccgcgcagcgcttcgcctgcaagcgcctccccacgcggacgctcgtccaccgcgacgacattgaagacgatcgtcgggagtgtgattaagctgtaccatctaggcgcccacctacgtcgaatcagacctctggcgggtattcgatagacaggctagccactacatactatgtattgggtattatacacggacggggaactaattgatgatgcccacaactgagcctgctacactagatgcgcaggccacacattctgtcaggaagacgcctgctgcatatgtgcatccctgctccaacct

SEQ ID NO: 64401 - DNA, 389 bp, Zea mays
  Clone ID: MRT4577_158734C.1
cttcttatctaggtggtggggcgatccatttgcccttctgggagaaaaagggcatcctttccaggcacaacattggctctccaatcacaccgataacatgtacaaacattcgggcggaattacatagcagttttgcacacggtaacccagcattggggaactggaacatattttcccattagacaaaatcgcatggcccatggtaaactccccaaaagggaaaaggcttccaacccatcacgggggataaacaacggggctgttacgcgttacattcaggacagaccattccaccttaaacctatccaaattgtcgctttgaatcgttcccaaaattccaagaagcaaatgaccctttatttacccccttgtgtaggggctgaattttc

SEQ ID NO: 64402 - DNA, 369 bp, Zea mays
  Clone ID: MRT4577_158735C.1
tcattttcctccatgtgggtttctttcgggttaacaggaccagccgaagatggcactctgatgctagagtccgctatatatcatacatctgcataaaaagcattgatttgcaactccaaagttgatcactaagtctaagcccggattcaccgaaactaaattagggttcgcactcccagcaaaaatatctctatgcaaaatgactaatttttatctgcgtaggccaaaatcctgctttttgttgatacaacaaacacggaaccaatcaatatacgcgggcatacacaggcgctgggggccaatatagaacaatattgaaccaccacagccgcatattctctgggatactgtccagcttctttttgggaa

SEQ ID NO: 64403 - DNA, 252 bp, Zea mays
  Clone ID: MRT4577_158736C.1
ggctcatactataaacgtagttgctagatacatgtctaatcctggtaaagagcattgtaaagctgttcagtgtattttcacatatctacttctttcttatagtgcttagatatgttctggcaaaatctggaaatggtctgattgtctatgttgattcatattatggtggttatttatacataattatatttttttcatgttatgttctttacttatttaatatttattcttatatattagaaattctttttt

SEQ ID NO: 64404 - DNA, 464 bp, Zea mays
  unsure (1)..(464): unsure at all n locations
  Clone ID: MRT4577_158737C.1
gggggggggccaaaaaagaagccagcgggagaagaagccggcggccgaggagaaggcggagaagacgaccgcaggnaagaagcccaagnccgagaagcgccngcccgccncgaagncctccggcaaggagggcggcaagaagagagggggggaggggggctttcctctttttggagaccnacaaaancnacancgncaggggggggaggcaggngcaccccgacaccggcancnccnccaaggccangnccancangaaccccnncancaacgacaccnncgagaagcncgccggcgaggccgcgaagcncgcccggggcaacaagaggcccaccancaccncccgcgagaaccagaccgccgngcgccgcgnccncccaggagagcgcgccaaacacgccgncnccgagggaaccaaggccgncaccaaggncaccagcaanggagcagcccccagcggccac

SEQ ID NO: 64405 - DNA, 373 bp, Zea mays
  Clone ID: MRT4577_158738C.1
gtcgccatctacatcgaggtcggcaaggacttcgatctcaacgacatccagaggatcatcggcgaccggctcggcgtgtcatgggagaaccggacgctcaaggagcgcgccggtgtgctctacagagtgctcagcaagatgaacttcgtgctgctgctggacgacgtttgggagccactcaatttccggatgcttggcatcccggtgcccaagcacaactcccagagcaagatcgtcttgacgaccaggatcgaggatgtgtgcgaccgcatggacgtccgccgcaagctcaagatggagtgtcttccctgggagccctcgtgggagctcttccgtgagaaggttggcgaccacctgatgagcgctagccctg

SEQ ID NO: 64406 - DNA, 607 bp, Zea mays
  Clone ID: MRT4577_158739C.1
cctctaggagaaaaatcgtctctgtacgaaaataaaggtcatcagtgttaccacgggggagatcgccacttggtgacaaaaaaacagaagataagattcaccaaggataaagcggatacaatgtctgtcgccgaatgtattgacctaacacacatatagttgcagggtgctaactggccattttgaaagatggaaacctcttctggcaccaatatcaatgaataacccaatccgagccaagagatggtgtcgtccattgatggctcatccccttcatcgctacatgacctcgctctctctggcctctctcggtagcagggagcgtcatcatgacatcgtcaaaagcctgaatacaactatcaaccaaagcatgatacaaccaatgaaagaaccagtgacaaagacaccaggacaagtgaaccaaaccaaaaaaaggcgggggggtgtggcattgacagtatgtgtaccaaccccctgacagaaataagagaaatatgcggtatacaaacaggaggctaaacatggacccaccatacatataacaggcatgctccccgtggaaggtcgcacgtgagatctcctatctcgaccctgacaatatacaaga

SEQ ID NO: 64407 - DNA, 332 bp, Zea mays
  Clone ID: MRT4577_15873C.1
aacaaaaacttttggctcgccaaagttggaagcctcccttaaatgggaatttatcacaaaaaaaagcgggggaatggggaaccaacttggaatttaggtggtgacaggaaaacccagttttacatgggagaggccatgaatgggccaggaagatagcccaaaaaatgctttaaggcggtggtttacaaaacttggcaacaaaaaaaccactggtttgggaaactgcaggatcaaatcccagtgttttggggatgcccccacttttgcagggccaattggcggccaaattgatcttttgcaaatttgcaaaagggggtgttgaaaggaattgt

SEQ ID NO: 64408 - DNA, 177 bp, Zea mays
  unsure (1)..(177): unsure at all n locations
  Clone ID: MRT4577_158740C.1
cccacgcgtccgcggacggcatggaggaaccgggagntcggcaacggaagatgcnggcggtccggctaaaggtgtgggagccggagtctgtgctccgcaagcggaagcgcgaggaacagtggcccaccgagaagaaggagaaggccctagtctagtagcagaagagcatttttagcc

SEQ ID NO: 64409 - DNA, 152 bp, Zea mays
  Clone ID: MRT4577_158741C.1
gcagattccaggggtacttgtcagtggaactcgttgttttgtagaaaagtataggagcacctagattgcttccttctcccgtcttatctcgcttctagcatctaacgtctgtcagtggtacagtcattttgaagttatcaaggagtaatatg

SEQ ID NO: 64410 - DNA, 1062 bp, Zea mays
  Clone ID: MRT4577_158742C.1
tgacgagattattcgattggagtttagtcattatgatgtcaagtcgtctaagactagagcatcaaaggattatgccactgatgcggtcctttctgcgacaagggtccactcataaggatggtttacgtattggacttaaagttggcaagcctgtggagaatggtggggtggttgagtacttctttgggagtgatgggaacgagcctctacactgtgtcaggttctcaaattttttgaaggagttgcatgacgagattattcgattggagtttagtcattatgatgtcaagtcgtctaaaactataccaacaaaggattttgcattgtccatggttgcttctgctgacatgaaccatatcaacaagctgcttgatagagctgatggtttggtcaaggagccagatctgaaggacatacgcatcacctttgaggagtttaaggcatttgctgacttgcgacaaagattggagccactgtcgatggctatctttgctcatgggaaagtgaatggattattgacaaaggaggatctaaaacgtgcaacacaacatgtttgtggtgtcaacttaactgatagagtggtagacatcattttccatgtgttcgacacaaatcaggatgggaacctgagctcggaagagttcttaagagcattagaaagaagagaaactgatattcgtcaaccaacaataccaggtccatggggttttttgtcttgctggttcagtggtaggaagtgttcacttaaacaggtggtgctctgatttggcccctacttgatcctcactgaatctgtcatccaccttcaattgtcatctcccggtacgtatgtcatctcctgttgcaggaggtaatcacgaagcagtgcctagctgatcggtaaaacgactttgttgtacatgtcgtctccgagtccgaagcttgcctagcagtagcagctgtaattgtaagtagtgtcagccctaggactgaaccttgtgttattctcatatgtaaatcaaaccccatacgatttaaatatatgatatctgttggcgttgactggacgtaaaaaaaaaaaaa

SEQ ID NO: 64411 - DNA, 1153 bp, Zea mays
  Clone ID: MRT4577_158743C.1
ggccgcttttttttttttttttttaactagatgatattttttattattatttcctccataccacagtaatctcttcctataaatatccatcttcagaacaaaggagagagctaagtaaagagaaagcatataaaggggaatgttacacaagctactatttataaagccatcatcatgtagtgcagtactgtaccatctaaacaggctgactctgcaggccaacagacgcacgcttctttctcaggggctgcacgtctcgaataatagcgtgcagaggcacatttcgacaggagaggaacattgcgattgtaatggcataggacacaattatgagctgtttcagtcgagtaggtaccctccttccgtccgtccgtccgtccgtcacaaaataacgagaccatgttttgcgtgtacatgaggaaaagcagagaagaattggctgatctgatcatcaaaacccctcgacaacgctgctacattccaacagaacggggaaagctatgcccgagccggaccctcactcgaacggaatgggcgtgccctgcttcttgttgacaatggccatggccaagtacctggtgcccattccaacaggtgccgcctggtcctcggggccttcccagaacggggcttccccgtctccaaccagtcgccagtagcccgtccgcaatgattccgcctgctcctcggtgcagttctgcaggagagcttctaccctgaagttgatgccgagagaacccaggaactgggactgcgtcattggcccatggaccgagatatcgtctgaagcttcctcggcggagcgcttgatcgaagcaaaatcaacgtaggcactcaaatcagcggagccaggatcgtctaatatgtccacaaacttgtgtttgcggatggcctggagactattggatactattccgttttttccatagtcaataataagagcgcctccgccgtccgaactaattctatctgcaatttgttcggtaagctccattgctttggggcagacttcaatgtgctcaatcttctcaagctcctcggagctagcccaaccacaacgcttggcgaggtagattaaagaggctgtgggatggggagacaaaacaaaccgaaacaaagaacttctgccccggccggcctcgaggtacccaat

SEQ ID NO: 64412 - DNA, 803 bp, Zea mays
  Clone ID: MRT4577_158744C.1
cgggctgtcacagtccacagctagctgcttctagaatggctatgcaaaatgcctctgtgagtgaactaaaaataacaaaggttacatttcagtgttacttacagtatgtatacataaaatggtcaaaccctttgcatgtcacagagattaaatttcctatcatcaagtttctctacagcattatggtatatgattggcaatgagggtaagtaatgcaagatgagcaaaaaattaccatccttcagttaactcatgatccatctcaatatatttagaattcagaaaaaaaaactccccattacttccatgaataaacttgtgtattaaatcatattcctagtttgtgttttaggacaacatattcaagagcacttcaatcaagaacataaaagttctattgctaacgcagaaaatgcatcccaaattcaaatggatcaagatcgatgtccatcaagaagatgaacacactagaaagtagaaacaagattttcaacatgaaatgacaaaaatgtaggaagaatttacctgttcaaaaatatatgtccagatatcagaaccgatcgcacctgagcatgaggtacagctcctaacatctcaactctatcctgaagggagaacttctccctcatttcttcaaggcgcacacgttttggaccatcaccaccaacaataaagtgaacctggcaagtccatgggagtcgtgaatcggcaacacacaaccaacttactaaatccaaaacaatacatacagcaagaaaataatggtgcaagataacttcatgaaacagccaaaactctactgt

SEQ ID NO: 64413 - DNA, 392 bp, Zea mays
  Clone ID: MRT4577_158745C.1
cccacgcgtccgctgagctacaccatcatttttatggagcagcagaacaccaacagcaaggagggggtggaggtgctgcagcaggccccgttccacgaggatgccaagcttggcaagggccacttcacttccaaagtttatcatctgcaaaggtttggtttttatcactcgatgcgatgcacagatacacagtaatttttttttacctactttgtacagttttatatatataaatgaatctaaagctgtttcagaagcataattactcgatcaggcttctatcgaatacatgaatgcttgttttttttataccaaaattgtataaggaaccttgacttaaacagtcagattatgtgcagcaagattccgtcatggatgaagggctttgcacc

SEQ ID NO: 64414 - DNA, 847 bp, Zea mays
  Clone ID: MRT4577_158746C.1
agacgcttcgcgacggccctgctgctccgctctgcgttccccgttcctttcctcgtgtgctctcctttcctcgtgtgcggcacgccaaggcagcaagcgatccttccagaatgctcctccgcgtcggccgccgggccgcgctcctcctagccgcaaccgccgccttctcgcgcctccgcgatcccgacacagccgtctacgtttcggcctccccgccgcagccgccacgccaggccttttcctcctccgccgccgccgagggcctccgctccggcacctgcctcttctccccgtatctgctcccatatccgttccaagggttcccagtactgaataccttcacgtctgcatcggtttcacctgctaacaatggcgaccaaggttctgacggaagctctggtgatccaagatgctgcccagcgtgtctaggcaggaattcgattgccaaggcggcatctgcagttggtcctgctgttgtaaacatttcttctatgcatgatatgcatggatgggtaaacgagcagagcattggatctggaactataatagatccagatgggactatattgacatgtgcgcatgttgttgcagattttcaaagcacaaaagcaattgtgaggagaaaggttagtgtgactttaccagatggtcgtgaatttgaaggtgttgtccttaatgctgaccgcctgtctgacattgccgttgtgaagattaagtcgatgacccctttgcctgctgccaggcttggatcatcatctcaacttcaagccgtggacctggggttgtggctctgggctgtccactttctcttcagaaacagttacagctggtattgtcagctgtgttg

SEQ ID NO: 64415 - DNA, 3009 bp, Zea mays
  Clone ID: MRT4577_158747C.1
gacaaccgcaaccgcagcagctagaccgacacgcactctactctcgcacacagccgccgggcgggcacagtgacgcggccacgcgggcgccggagctagggtttccctgatccggcagggccggggagccgccggaaaccgttgctcgatttcggcgccggaggcgcggcatcggtgtctccgaggacggcgggcgcgaggcgggctggggagctgaggcgcggcgccgagggctcagatctggtatgaccgacggcggcgaagacgggaatgctgcggcgcccagggccccctcgcgccggaggggacctgtgcgggccagcctcgatgccgacgagttcatggcgctgatgcacggctcggatcccgtcagggtcgagctcacccgcctggagaacgagctcagggacaaggagagggagcttggggaggcacagacggagatacgcgcactgcgcttgtcggagagggcgcgggagaaagccgtcgagggagcttactagatgaatttggagaagatggctgagaaactcaagctgacagaatctgtccgcccacgcgtccgcccacgcgtccggcagaaccttgaagttaaaaagataaatgatgagagaaaggctgcattggctgcccagtttgcagcagaagcaactttgcggagagtacatgcagcccagaaagatgatgacatgccaccaattgaagccattcttgcaccacttgaagctgagctaaagctttctcgccaggagattgcaaatctccaggatgacaacagagctttggatcgtctaacaaaacaaaaggaggcagctctgctagaagcagagaggactgtgcaaattgctatggcaaaagctgctatggttgacgatttgcaaaacaagaaccaagagttgatcaagcaaattgagatctgccatgaagaaaataaaatcttagataagctgcatcgccaaaagattgcagaagttgaaaagcttagccaaactgtgagggagttggaagaagctgttcttcaaggtggtgcaacggctaatgttgtccgagattaccagcgcagatttcaagaaataaatgaagaaaagagaacacttgaccgtgaacttgcacgtgcaaaagttacagcaaacagagttgcttctgttgttgctaatgagtggaaagattctaatgacaaggtgatgccagttaaacagtggcttgaagagcgtaggttcttgcagggggagatgcaacaacttcgtgacaagcttgccattacagaacgtacagcacgatctgaagctcaactgaaggaaaaatatcagttacgtctgaaagtactagaagatggactaagggggccaccaagtggctctattcgtccacctactgaaggaaagagctttagcaatgtcccttcccgccggttgtcactcggtggagctgataatatatcaagattgtctcctaatgggttattgtcaaggcgatctccttcttttaattcaagatcatctcttacgtcaaacagcagcttggtcctgaagcatgctaaaggcacttcgaagtcatttgatggcggaactaggtcactagataggggaaaaatccatggaagtggagctcatttactcaacagatctacagatgctgttagagataaggagactagtgatagttggaagggcgatatggatgagagaactaatgagagggcagacaacaacacagatgagaaaagtaacgaaaccacaaataaaaactcagctgagacagtttctggtttcctatatgatatgctgcaaaaagaggtaatttctttgagaaagtcatgccatgaaaaggatcagattctaaaagataaagatgatgctattgagatgttagcaaagaaagtagacaccttaaccaaagcaatggaagtggaggctagaaaggtcagacgagaggttgcagccatggagaaagaagttgcagcaatgcgtgccagtaaagaacaagaaaccagagccaagctgcttggtacgaaaggctctggtagttcacaactgcttcctggaaggaacgcagcacgaactgggtcgatgcgcaacttccagtgatggcagcactaacacgaagcagcattcttggatagatccttctccgttccaccatttgttctattcctatcctattaattttgtgtctaaaattatagtagagtgagatgacccaacggtacctagatcagggtaaagagtaggctcggatctgatgagaccattgtgggagtgaaaccgagcctgtgtctaaccttgtggcgcgccctcttgtttctttgtccaggaagcgcacccgatgcttgtataggctggggccgctggggatcttcggatgcccagtctgcaatgtatcttgagtgctcagttacacaggacacccgttgcccaggttgtgaatattgtatcctctcacgtgcttgtttgcgctgctcaattagaaaggtacatggaaatggagctcatttactcaacagatctacagatgctgttagagataaagagactaatgatagttggaagggcggtatggatgagaaaactaatgagagtgcagacagcaacgcagatgggaaaagtaccgaaaccatgaataataattcagctgagacagtttctggtttcctatatgatatgctgcaaaaagaggtaatttctttgagaaagacatgccatgagaaggatcagattctaaaagataaagatgatgctattgagatgttagcaaagaaagtagacaccttaactaaagcaatggaagtggaagctaaaaaggtcagacgggaggttgcatccatggagaaagaagttgcagcaatgcgtgccagtaaagaacaagaaatcagagccaagcggcttggtacgaaaggctctggtagttcacaactgcttcctggaagaaacgcaccacgaagtgggtccatgcgcaacttacaatgatggcagcactaacaccaagcagcattcttggataggtcctctg

SEQ ID NO: 64416 - DNA, 859 bp, Zea mays
  unsure (1)..(859): unsure at all n locations
  Clone ID: MRT4577_158748C.1
ggccgggcccgggaaagcaaaaaggttgggcggaaaagtctcccacctttacgcggcgacggcggtggcgacgacgacggcgagctaggttgccgcggcaccgatgtctctccctccgaccgacggcggcgacgattggttcctcgactgcggcatcctcgaggacctcccggccgctgcctgcggcgctttcccgtgggacgcatccgtctcctcgtccaatccaagtgcggaagtaggcagccatgtgaacaagttagatctccccaaggattccggcagcaataaacgcttaaggtcagagccctgtggtaggccgacatctaaggcttgtagggaaaaagtgagaagagacaagctgaatgacaggttccttgaattgggtactacattggatcctggtaagccagtaaaagctgacaaagctgctatcctgagtgatgcgactcgcatggttactcagcttcgtgctgaagcgcagcagctaaaggatactaatggaagtctagaagacaagattaaagagttgaaggcagagaaggatgaacttcgtgatgagaagcagaagctgaaactagagaaagagacattagagcaccagatgaaacttttgacggcaactccagcctatatgcctcatcctactatgatgccctccccgttcgctcaggctccgatggctcccttccatgcacagggacaagctctaggacagaaactgatgatgccctttgttggttacccaggatatccgatgtggcagttgatgcccgcctctgaagtcgacacctcaaaggacagcgaagcatgcccgcctgntgcgtgatatgcntggaccgcttaaatcgcatgaactcat

SEQ ID NO: 64417 - DNA, 456 bp, Zea mays
  Clone ID: MRT4577_158749C.1
caatctcctggcgagaaagctttagctcagcttcaagtggtgcaagaatggcttcaattggtggcatgtcatcatctttctgggctgcatgtactctccgcaaagttgcttctgctgcaaactgggcagccaatgcagcctttctctcatcatttatctttttaacttcaaggtttttgctttcaaggagagattctgtcagcttgagtttctcagccatcttctccaattcatctgtaagctcctcgacggctttctcccgcgccctctccgacaagcgcagtgcgcgtatctccgtctgtgcctccccaagctccctctccttgtccctgagctcgttctccaggcgggtgagctcgaccctgacgggatccgagccgtgcatcagcgccatgaactcgtcggcatcgaggctggcccgcacaggtccccttcggcgcgagggggccctgggcc

SEQ ID NO: 64418 - DNA, 382 bp, Zea mays
  Clone ID: MRT4577_15874C.1
cttattggtcgaaagcagggacaggtacctagagcgcgctctccagctgcttatgctcgaagcaccccaagtggaacaagtatatgatgctgcggctcaacaggaagcgccttttattgagatagagatctaagtaagctcatattgtgactatggatgtaaagcttcttctgcatcatcactgagactcgttatgataatggtctgcctttgcagacgtactttgatgtagacgtaggatatataaacctgcctttttgattcattataccatgttttgagactgtgtttatattgtgatttgacgataattatatgatgctgtaagtttaatcagattgctgtcacttgattaatggaaatgcagaaattgatctgattg

SEQ ID NO: 64419 - DNA, 1263 bp, Zea mays
  unsure (1)..(1263): unsure at all n locations
  Clone ID: MRT4577_158750C.1
agcgccgccgccctccttcctgttcctgttctccagcaccgccgttgaacctcctcccctctccctcgtgcttccctctctcatcctctctgccgcttccccgctctccccaaactactctgtgccccgtcagatcgacctggactttggcggcagctacttcttctcgacgggcggcacggcagcaagccagcaaggagaacgcggcggcacgggcctgctgctacttctgcttcctctcccacgcttgctggtgagagaaacctcccaatctctcttgctcgttctttctttctcactcccgccgtacccccatcgatatccaacttccacccgctcccggtccgtatagcgcccgccacaagcgattcgacatgattctgacgccaaaacaacgttttttgtgcgcctcgttcgcaaggcaatagacgccatacacatctaaacagagtgaatgagctttactttttctaatgattgaactcatgcccaccaattttgtccagccctaagattaccaatatgccaaatttattgttttttgaacaaaactacagtacgagatcacttcgtagttcgttgccccatggtatgtagtgagtttatgtaactatgaaatggcattgatcggttatgatcatgttctgacttctgatatcctcacgcctctatcaattgggcagtctcatctttaaggtttggtcttgagggacataaacattaactgtatttcattttgctgatttactatgagcagatgggtgcagtaatattttgtaattctctatatttatataagtataacctgtgttcaaaatccccatcagaagttgaggacgtattggatgtattatgtcaatattcatagcatagacttgtgtggaaatattacacttgtggtgctagaaccctggtccttatatttatgtatagcctctggtcgttagataagaggagacatgagacagtatgtgcatgtatttctaatttgcaggagcattcagatttttaagtttcagtggctattaaagcgtcgtttaagcgctaaaacgtgattaggagttaaagcgtccgtacgttttaaaaatactgcatagaacgtncgttttggacgtttaagcgacgtttaaacgtngaaaagcgcgttctggatgttttactcgttttacggacgttttgtgcgtctataagttgttgggccttaatgggcctttaaccagcaagcttgctctagccgccaaactaaactgncagacgcacagc

SEQ ID NO: 64420 - DNA, 501 bp, Zea mays
  unsure (1)..(501): unsure at all n locations
  Clone ID: MRT4577_158751C.1
gcctgnngactggggtttgggggggtgtttttttctgtttggggttgcgtgcacctttcgatcttgcggttgtgctcacttgctagtactgctgtctttttttgtgaaggttcttacttgttggactctctctggttggttatggggggggcgtttctttttntttgatccagactggtttttgcgtttcggttattgtacagggtccttgttccatccgttggcgtttgttgtggttattttgtcgnttggggtggtcttgtcttttttggtgttgttgggtaggggtgtgtttttggggttgttgttcttcgtgttgttgggggtttggctgttctgttgtggttttttttnctgggcggttttttttttgtttgtttgttggcttgtggttgtgtgttttttggctttgtttttgttgttgttgtgctttgcttttgtttgtttttttttttggtttttttgtttgtttgtggctttttgtttttttttgttgttttg

SEQ ID NO: 64421 - DNA, 421 bp, Zea mays
  unsure (1)..(421): unsure at all n locations
  Clone ID: MRT4577_158752C.1
tcctggctttttttgtgctggtagtgttgtgagacgctcctgctgctgctgctgccgccgccgccgctcgaccgatcgatggcgatcaagagcatgacggtggcaccgacgacgacgcggtcgctggacgcggacatgacggtggacgagttcaaggagtggctgcggnggttcgacacggaccgggacgggcgcatcagccgngaggagctgtggtgcgccatgcgcgccatccgcgcccggttcacggggtggaggagcaagcttgggatcagttacgccgacacggacggtgatgggtacattgacgacagngaggtggacgggcttatcgagtttgcgcagaagaacctgggtctntggatcgtgggctactaatttngcattccgnagggggcgcgcgctgttgggcggtgggcgc

SEQ ID NO: 64422 - DNA, 683 bp, Zea mays
  Clone ID: MRT4577_158753C.1
cattgggtacctcgaggccggccgggtatgtcaacctatactcaccacttaattgccagcgctcttcttgctagcgatgtactcaatagccgtctgaaatgccagggtctgctacatgtcctccatccatctctaaccaatggctgatatcgaggactctcacctccttgcccgcgacaatggaactcggcatgaacaagggtggtcttgctggagactgagccgccaaggactgatttctcacgcattgacgggcctcccctctacactgtggatgatgatcgtgatggggcataatgatgctatatgttggagacgaggccacagatacacattacggggatgctgtactctctgaacacgccatctaatctggcatcggtatacattgagatgtactggagatatatctgcatctacaccttctatacacgaactacatgtggctcctgcaagtagaaaccatgtcgtatgctgacaccaataccactctccaccccactgctaacatgaagaatatgacacagaccactgtgagacacctgcaactgctcctgccaggtgattgacaacataccacgatgactctttcgctgtacgccacagcgcgaacgactgagatggtgaagaactctgtcgatggcgtcacccacagcgtgctaatcgacaaatgtaatgccctt

SEQ ID NO: 64423 - DNA, 2479 bp, Zea mays
  Clone ID: MRT4577_158754C.1
aaaaacagaaagcaaacattgcttctttaaataattgcgtaagtatggacaatttaactgtcaatcctattgatcctgtagttctcaatgagggagagcagacaggtacagcaatcactgagcaggttcctgttcctttgaatctagtgcttgagaataaaaatgacaaggaccaaggtgagcaaagcagtgaaacttcagaacaacttatgtccaaagaaccacaaaaaagggacatcaaaaggcaaaagagaacatggtctcatacatgcaagtttgatgatgatgaccttctgatgacagctgtaatatataagctgacagcacgttacaggaactcttttcatcggaagctcagaaataaattcggtttcaggcgtcttccaacataccgctgggagaatgaagataaaggtgacaggaagaagtttcctggagaagcaaggacggtgttgaacaagttacttgaaatgggcattgttgctagagtggatattcttcaatgtcatggtccaggaggcaaaaatgtgttgaaggatgggaacataactgcgagtggcattcaatgccagtgctgtggtaccacattcacaatgtccaagtttaagtgtcatgcaggtctcaggcaagaagtcccatctctgaatcttttcttggatacaggcaaatcttacagtctttgtcagcttcaagcatggtctatagagcagaaggtgaggaaagagcatgcaaaggatacaatgtcccttcaagcagaccaaaacgatgatacctgtggatcatgtggcgatggtggtgaactgatatgctgtgacaattgtcctgctagttaccatcaagcctgcttgtcttgccaggatattccagatggcaactggtactgctctagctgcctttgcgacatttgtggtgaagtaatcgattcaaaggagcttgtaacttcccttcctgctttagaatgctcacagtgcgaacgccaataccatgtaaaaagagtatctgccaaagttccgtgcaatgaggatggatctggtacctggttttgtggaagaaaatgccacgagatctatatgaccttccgttctcgtgttggagtgcctgatcacatggacgatgatctgtgtttcaccgttcttcgtaacaacggtgataagaaggttcgcacggcagaggagattgctctcatggctgaatgcaacatgaaactcatgatcgccacgagtatcatggaagagtgtttcctgcctattctagatcccaggacagggatagacattattccctccatattgtataactggaggtctgatttacatttcaattacaaggggttctatacaatagtcttggaaagtgatgatagcatggtatctgttgcctccataaggttgcatggtgcaattgtagcagagatgcctctggtagcaacttctaaagagaatcgtcagcaggggatgtgcaggcgcctcatggattacattgaggagatgctgaaatccctgaaggtggagatgctgctcctatcagcaatcccgcacctggcggagacatggacatcgacatttgggttcagagagatagatgagtcggacaagaagaggctgagtaaggtgaggctggccgcagttccggggaccgtcctactgaagaaggacctgctgtgtgaatgttcaggcgcggacgccggtgagccgccgagccctaagcccttccaagtttactcgcgcgtgccgagaggccgcaccggtttggatgcagtgtgccaataaagatgacgcagcggatcgaatgcgccgcggtcagtcgtcgccgtggtcgtcgtcggtgacagggggcagctggtggtcgtcacggggcctcgtctccggttgctgaagccgaggccgagcacatcagcacgcgccggtttgtgtggtggaaatggaaagcctcgttgctctggtaggagctctgaagatcgctgtcgtctgcttgtagtctgtaaatagcttctccgtcggcgagaagcccagggtccacggatgccgctggccagtggacgcggccattgtggaaccgaacctgtatgataaaactagaccgtgttggcgccccaccagcgtttagtagtttccgttgccctttgaactcccaagtttcaggctagtccattgtgttcgtttcagaagcctgcggttttcagggggaggggaggtgccagaaagggaggacataacgcacgtgcagaccgagtattatgtggtggtgtcgtagacacgcacgagttgacgaagctataggagcagctcgtgatgagcaatggttggtgcagatgatgatgtcaatgagctcctcccgcagggaccggacctgtggacacggatggagctgaacttgtttgaaggatgcgtagtactaataatatatgcagtcaagccagcctgaacttatttgaatgaggtgtagtactaataatatatgcagccaagccagcctgaca

SEQ ID NO: 64424 - DNA, 265 bp, Zea mays
  Clone ID: MRT4577_158755C.1
ctcgagccgggcttccatagccccccaaaaatgaagagcaccatcttctttgctctctttctcttttgtgccttcaccacctcatacctaccttcagccatcgctgatttcgtgctcgataatgaaggtaaccctcttgaaaatggtggcacatattatatcttgtcagacataacagcatttggtggaataagagcagccccaacgggaaatgaaagatgccctctcactgtggtgcaatctcgcaatgagctcctcaaaggga

SEQ ID NO: 64425 - DNA, 255 bp, Zea mays
  Clone ID: MRT4577_158756C.1
caaaccagaacaagctcatgctcaagtatacgacttgacacgaaataacgctctaacccttctgggtaacccgtacacaatgacattaccaaaaggtcccaggtttcctagtatactatgccatgctatgacacgtacttgaacaacacatttatatccctatgtaacacctacgtatgcagcacaacaccaaagctgcatcaagtcatataccatgcacacgtgaacactcaacaagttttgatcacttaaaaa

SEQ ID NO: 64426 - DNA, 574 bp, Zea mays
  Clone ID: MRT4577_158757C.1
tccggcgcgtccgtgctgccgccgcagcggaacaggtctgaacctccccttcgccggagacagccgcgacttcgcgagcggcatggtactgcctccccttcgccgacccaggaggctgcccggcggcggcgctctgccgcgacggccagggtttcctcgtcgcccgttgacgcgtccggctgctgattgatctgataaagaatgaaaatccgcactgttgagcaaggtgtgaagacaataaagctgcagatttgggatactgctggccaacaagagcgttaggaccggcacaagcagaagcagctactaccgtggggctcatggcatattgttgtgacacttacccacggggtacgcgggtatgggtactgcacacccgacggggtacgcgggtatgggtactgcacacccgacggggtacgcgggtatgggtactgcacacccgaatccgtacctgctttacccgatgggtagaggtttccgcctaattgcgtatccgtgggttgtccggatgcagggataggaggcaagcccatccatggcctttcataggcctccagttgccactttactc

SEQ ID NO: 64427 - DNA, 727 bp, Zea mays
  Clone ID: MRT4577_158758C.1
ctgtttctcctgcccagcgctcccgcaagtcgcagccaagaaatggctcgacctgaggagaacgcgaaattccccagctgtgatgcctactttgacactatccagtccaagaagaagctccctctagctttgcaggaatcccagaccgccgcctttgctcagatcccagtcgcatcgtttcctgatgttcctagtggccgagtgaccgaaattcctggagaaacttccgttcttgatgctgttagaattttatctgagcacaacataagggcagcgccagtgcttaaccctgaacctggggctccagctgattggcaagggaggtatcttggcatcatcgagtactcagccatcatcctttgggtactagataatgctgatctcgcggccgtagctctgtcagctggatcagcaactgctgcaggagttggaatgggtgctgttggtgcagtgggcgtggcagcattaggtgtaaccggcccggcagctgtcgctggattgactgctgctgcagtaggggctgctgttgctggcgggttaactgctgaaaagggtgttgcgaaggatggagttactgctgctgatcatttaggggaagatttctacaaagttctgcttcagcaagaaccctttcaatcgactacagttcggtcaattgttgagccctacccatggtctccttttgtgcctgttacacttgacagttcaatgcttgccgtactactgc

SEQ ID NO: 64428 - DNA, 336 bp, Zea mays
  Clone ID: MRT4577_158759C.1
caacccttaaaattcaggggttttgtaccaaaaaataaacttttcgcccccttattgggggcacgaacgggaattcaataatgccgctcgtgggcggacacctgggcccaaagaaggtttgttctttcccattttatacactggggttcccttaaaaacagacgaccgggcctggtcacacactttctttatggtcccttgatcttggaaccgcaggctcttgcttggggctacatgatgacagggcgttgggcaggtccctacgcttaacacagaaaccacctaaaccttccggcagatttacttcgggagaccccgggaattgccgaccgggac

SEQ ID NO: 64429 - DNA, 287 bp, Zea mays
  Clone ID: MRT4577_15875C.1
atttaaagctattttttgtaaatatttctaatcagcgataatttctacctatgttctcaaccaacttagccagtttgtttttcagagcctgtagtcttattggaaatctattttatcagtgtgctttattgagtgtggattttgcatacatcaaaacattaaccacaaaatacagcaagtgcacctatattcaccattaacttttatcccaagtccattttttcctgtacactacaaacaaaagatatattagagacttttgaaaaatgctgaaatactttgcttca

SEQ ID NO: 64430 - DNA, 149 bp, Zea mays
  Clone ID: MRT4577_158760C.1
tgcactcgatgcaactcccgttcgctttctaatcggcccatacatgagaatgggacccctcattcgtccatggacttgacctcacaagaacaggttcaaagaggaaaaaaggagccagcttatcaacgggaaggaggccatagaagaaa

SEQ ID NO: 64431 - DNA, 930 bp, Zea mays
  Clone ID: MRT4577_158761C.1
ggtaccctcgccgggggccggacacccgagccagagcgcgtcgccagctgataactaacccaacccaacccaaataagctcgatcctgctctctgccgacgcggccggattcgaatccgaggacgatcgatgacggtgggcgccggcatcgccgtccaggacggcagcctcctggcgctgggcgccaaggtcctgcgggaggtgcgcggcaacgtgctcgtgacgccggccgccggcgggggcctaaccaacggcgcgttcctcggcgtccggtccgcgcccgccgccagccgcagcatcttccccgtcgggaagctccgggaccagcggttcgtgtgcacgttccggttcaagatgtggtggatgacgcagaggatgggctccgcaggccgcgacatcccctccgagacgcagttcctgctcgtggaagtgtccggcggcggcgagcagcccgccgtcgtgtacaccgtcttcctccccgtgctggagggctcattccgtgccgttcttcaggggaacgccgacgacgagctggagatctgcctggagagcggcgacccggacgtggaatctttccaaggctcccatctggtcttcgttggcgccggatcggacccgttcgaggtcatcacaagttcagtcaaggctgtcgagaggcacttgcagacgttctctcacagggagaagaaaaagatgccagacattctgaactggtttggctggtgcacgtgggacgcgttctacaccaatgtcaccgcccagggagtgaagcaaggattgcagagcttggagaaaggcggggtttctcctaggttcgtcataatcgacgacggatggcagtccgtcgccatggaccctgtgggaatcgcttgcctatctgacacctcagccaacttcgcaaacaggctgactcacatcaggggagaccac

SEQ ID NO: 64432 - DNA, 322 bp, Zea mays
  Clone ID: MRT4577_158762C.1
attcggctcgagctctagccgctagccttggttacactgggtgccgataggaccaagattatcccacggaatacaacctagcctacctagaaggcaagtgcctgatcagcagctgctgacggccagactcgcgtggggatcaatgagctccacagagaacgggcgatagtcagatacagcaaggctctgggtccattgccggttgcctggattccttcggccccaacaggagcttcggatggcggagacaagcttgaccttgaagcggaccgacttaggtatcaacctgatccggacatgggtacaggggacaaccaggatt

SEQ ID NO: 64433 - DNA, 247 bp, Zea mays
  Clone ID: MRT4577_158763C.1
atgcacgcggacctcagcccggagctcggattgagcttcgagccgcgctcgttcaagccgcctactacctactaaaagcctacactctggtgcgtcatgatcgggcccatgttgcagctgctcagatccttgaagcgggacagcatcgccttgctggtcaacatgtccggcagcttcctgtacgaaggccatctggtatttccaaggaaactatgcatactgccctcagataccaagtgttcgtttc

SEQ ID NO: 64434 - DNA, 869 bp, Zea mays
  Clone ID: MRT4577_158764C.1
gggccacgccgacatgggctactacgtcttcgcccgcagcatcgtggccggcgagcccgtcacgctgttccgcgccgccgacggctccgacgcgcgccgcgacttcacctacatcgacgacgtcgtcaagggctgcctcggcgcgctcgacaccgccggcaagagcaccggctccagctcgtgcagaaaaagcgggcccgcgccgctccgcgtctacaacctcggcaaccacctcccccgtgcccgtcacccggatggcagccatcctcgagaagctgctcggcaggaaggccaacaagcgcgtcgtcaccatgccaagcaacggcgacgtgcctttcacccacgccaacgtcagccacgccgcgcacgacttcggctaccgccccaccacctccctcgaggccggcctccgccacttcgtcgactggttcgtcagctactacaagctcgacgccaagatcgccaagcccgccgccgccgccgacgacgacaagcccgcgaaaaagaagaagaagaacaaagccatgtcggcgtcgtcgtgatcgtacgttcatcgatcaagcacgggcacacagaaacagagcaccgccaccgccaagcacagtcaccaagtgtgtattctctagctagttctcggaggcctttttggttttttgtctgtaaccatgtattgttgaagccgtcgctacatacttgctcctcctccttatgctgatagtgcttagtaggaaggaaggaataatgatgcaaataattgttgcattcatattggtacgtagatatatatatatataaaagattgggagaggtatagatgacgataagatcaaacagaggaggagtgaggacagattgaagaaagatcagtc

SEQ ID NO: 64435 - DNA, 386 bp, Zea mays
  Clone ID: MRT4577_158765C.1
aaagaaactaaaatttttttgatttaattacataaagggtggggaattttcatttttaattttaacaaggcattcaacttttggttgtttgttggaaaaaaaaaaaatagctgacatgcgtttttttttccccaaaatccccttttttttttttttttttttgcaggcccataactttgcgaataaccacttttttttttttcatgggtaggggctttaacttgaaaattttttttcgggatgcccataaaaaactgcccttcaactgggtggtgtagttttttttcacgccgttaaaaagggcccacaacattattccgcccgagttgccaatgcctcggatgggggggatcaccctgcccctcaaggtgccggggtcgatttac

SEQ ID NO: 64436 - DNA, 302 bp, Zea mays
  Clone ID: MRT4577_158766C.1
gccgggtcgggagaacgcgcagctttcctaacgcgcgcagagccgccttctcaacctcctcccggacggcacgctctccgcagcttcctcgccatctcatccacccataccgcgtgcagcttcttcaacctctccctccctccgatatctcgtctcccatcctacggcggagccctcggggacaaccacgagtgcctaagatcccgtcctctgcgttgaccatcgagggatcgccatggcgttgagggcgtcccccgtgtcgcatcgcatggcgccgaccgccgagggccgaggcagcgcca

SEQ ID NO: 64437 - DNA, 810 bp, Zea mays
  Clone ID: MRT4577_158767C.1
ggccctaggggccttttttttttttttttttatcaagttttataatgtacatgatcagagtgattacaaaaagtgattcaaaggaataactttgaacggttataaattgtttataagtttgaaatatatgttagcttaagtgaccatccagtaagaagtatagaagggttacttagacttataagaaggccgagcccaccggcacttaacaccatcaacagcagcacaaagttaaaacctgggtaacactaggttagtgttgttaggtgacgtccacttgacgatcagccttgagcttggcacttgttcagattatctatcttccggttcgtccatcagctttatcctgcgaattagtccacacttggggtcgacttgcttcgtcttccgcatcacgtgattaattatcgtaccagcatcaaacgtgactcattactcgcgagaatgctgatacatcctggctcgagcttgtcgttgaacacctgacggtgtggtgtggcttcactttcttttccatatcttccgctgatttctctcaaaccagcgacgattgatgaggattgcgaatgtgacgagagggcaaaaatcatttatcacaataactctctctaccccgcaaacagcatctaaaacagccatgaagcagtgttgagatcttccacccccatgacccaaatgggactgaccacgaggaggcgaaacacgacgagacacgtatcggaagagttactgagatcaaagatgacgacacgcattcaagcgagacggcataggggcaggaaaagtagaaacggacgacgacgagggagc

SEQ ID NO: 64438 - DNA, 326 bp, Zea mays
  unsure (1)..(326): unsure at all n locations
  Clone ID: MRT4577_158768C.1
ttctcttccgcgttcatggcctctggatttgngtctggccngcccacgggagcgacactgccgagcccttcgtcctttattacnggctctcatacggtgctctaccccgttctttacatgccactggagcttgcggattgggtttagggctcgctactgcttctgctgacggtggtctcttggcccggctctcgcctttgcctgggtgtgccttggccgggacctcgcttggggcgagttttgtctcactgtcggtcgttctagcggatccgagctcgggtcgcgcttggcgtgttttggtctggctgttcccgtggggtggggag

SEQ ID NO: 64439 - DNA, 475 bp, Zea mays
  unsure (1)..(475): unsure at all n locations
  Clone ID: MRT4577_158769C.1
ttgtttctccggagtatgtccgctaccttgttagaattgccaacagtaaaatggaggcaaataaaaggcgaatgaatggatttttggatctcttgcaaactaagggtttgtcatacccatcagggttatcaaacaactctaatagtggtggtcagtctgatgattacgaggcttctgtgggtcctgaagttaagataccatcagatacaagtgccaaaacaaatgatgagtacttagttacaaaaatgagaaatggtggacgtagtcgtgatgatgatgatacaggttcaatagaagcacagtattttggaaaacaagactctgcatggagccagggtgtcaatcatggttctggtaatgctaaacgattattaacgctggagaagctgcgagaaaataaaaatcatctctctaccacaacattgaagattagcggngaaccaattgagaagctcttcttatggggccaagcctc

SEQ ID NO: 64440 - DNA, 805 bp, Zea mays
  Clone ID: MRT4577_15876C.1
acttcccctccctctgcgccgccacttctctcccctcccgctcgcgtctcccagggtttgccgatccagctagcggttagggttcccgaaaccggcgaccatggcgaacgagcagccggcggagacctacacggtggaggagctcgtggcggtgaacccctacaaccccgacatcctcaacgacctcgaggtctttgtcaacgaccaggtttcttctaaaacatataacctggatgcaaatctcagccttctacgcctttaccagtttgagccagaaaggttgagcgtgcaaattgtagcccgcatattgattaaggctctcatggcaatgccggcccccgacttcagcttatgcttgttcttaattcctgaacacgtgcaaatggaggagcagttcaagacgttgatagttctttctcactacctggagactggtaggttccgccagttttgggatgaggcatcaaagagccgtaaccatactggatgttgtaccaggttttgagcaggcaatccaaagctatgcgattcatgtgctttccttgacataccagaaagttcctaggccagttctagccgaggccatcaacattgaagggcttgcgttggacaagtttatggagtatcatgctgcaaactcaggatgggtcattgagaagggatcacgctcccaactgattgtccttccgcgcaacgagttcaatcaccccgaactcaagaagaacacagccgacactgttccattcgagcacgtgacccgcatattccccatcctgagctgatccagcaaccatgatcagattga

SEQ ID NO: 64441 - DNA, 349 bp, Zea mays
  Clone ID: MRT4577_158770C.1
gctacttctccatttcctatgtttcattcacgacaaagcacacactgcaaccactcctcacccaaatatgtagagccgctctaacgaacaacatcacaaaactccggagatctcacctgccacatctgggccgggttgatccttgctcatccgcggactacgatgaggcaacaagacgaaaccattcaaggggctgcagccccacatggagctcaccccagatctggaaaagcacgagacacaagaggagcaccaccggcggatctacggccaagcgaacgggctgaagacaccgcacaaggacgacaccaagatcacaaactcccaagagaactcacctaaatcccaa

SEQ ID NO: 64442 - DNA, 251 bp, Zea mays
  Clone ID: MRT4577_158771C.1
agcttctgtcacgcgtccgggagaaggtggctaagactgtatatgtggaagagcggacgtgttgttgagcgtaaccttctgtctgttgcatacaagaatgtgattggggctcgtcgcgcttcatggcgcattagtttcttccattgtacaaaaggaggtgtcctgttagaacgttgagcatgtgtaccttatcaaggaatatcttggcatgatcgtagtttgtacctgtctatatatgatataggcaattt

SEQ ID NO: 64443 - DNA, 210 bp, Zea mays
  Clone ID: MRT4577_158772C.1
atattttattttttacatcatctttacagaatttgtgggaaaaaagcaggtaaagggagggccaataccccaatgaacgacacaaagataaaaaaatagtctaaagttatgaaggacggtgtttcaataaaaaaggttctaattgtttatttagggaaccgaaacacgattaggcaaacaccaaaaaaaattaggcgccacaattaaggt

SEQ ID NO: 64444 - DNA, 329 bp, Zea mays
  Clone ID: MRT4577_158773C.1
ccccttggccggttcaaccctaaagggaagccaaaaaccccgggtaaatataattcctaagtaatccttaatccagctgtttttaaggaatttatttgcattaaaagcccagaaaaaacctttttccccccatttatgccctgccaatgctccctggcaaaacttaagggcccccttgggctcatgcaaaaccccacccggttgcttggcccagccttggggcctatacccaaagggagaacttccaaattcctagaacccaatgctatccctttaacccgttgcccccatttgttaagaccctttcccaacatttttgacctttccca

SEQ ID NO: 64445 - DNA, 312 bp, Zea mays
  Clone ID: MRT4577_158774C.1
agaatggtatatacctcaaggttcaagttactctcgtagggtttcaaactaagcagtatggttttgctcgcgctattcggcctgttaccaatttcaatgaagtggctctgcatttcattgattgtatttatttgcatttggaaaatgtacggcaaaaggtcaattccctcgctccattcaagcaaatgtgtctacttatgagatgcaagctcaagttgctcacagtgttcaaacaaaatcacctgctcatatccccttttctggtggagctagagatcatcaagttgattttgctcctgaagtaaaccatgg

SEQ ID NO: 64446 - DNA, 420 bp, Zea mays
  Clone ID: MRT4577_158775C.1
tgtgttttctctacagtcttccggcacaccattttaagaaagtttggccttcacagctgagcgcctcagcatggtgacactaattttctgcaatggtgggaaagagtttcagctattgtagtgaggaaaggattggactctctcattatcctgggagcatggatgatctggaagcataggaacgaagtgatgttcaaaggagtttctcctaatctcactcttctcctggagtctgctaatgaggaaagggagaaatggcaagttgcaagagccaacggtttatcctttttggctgctcctagtcgtaatgtttagggacagtggttggggttttttattttttgatgtcttttatggacatttttgtgtatgcctgtttctggtctccgtaaggagtgccttgtacccggggtcttctct

SEQ ID NO: 64447 - DNA, 418 bp, Zea mays
  Clone ID: MRT4577_158776C.1
actgtcccaaacatggtacctttgtaatcacccgaaaaaaaaagaaccgcagaaggaacgccccaacctgcaaaacaaggggcctgtgctggaaaacctacgaaaaagggaacccatgggggggctcaaatgcccctgcgcctacaaaaggggggttatttccccctcaaacataaaagggggggcaaatcaaggagcataggctgggaaagcaggaaactaatccggatcgggggggaaggaaatctgaccttctttgggaagggagaaaaaaaccgggctggatttcggtaaagaaggcaactcattgcaggggatggaaaggggtcgtttttcttcctggaaaaacggggggttgcaaagcatgggacttaaaaacgggacaacataaaggggggaaaagatctcccggacccca

SEQ ID NO: 64448 - DNA, 1397 bp, Zea mays
  unsure (1)..(1397): unsure at all n locations
  Clone ID: MRT4577_158777C.1
actaatgcattgttctgcgttcgctgaccgtaaatgcccatgtcaaattgctggtgacagtacgctagcactcttcttccccccccccccttaattatttggaggattgtttgcacgatactagctggagaaagttacgatgcacgttgcggtgattcctgccatcttgaattcggtttcccttgtgtcaatttcgctttcgcctgatctccaactgttccattaatgctctttggggtgacggatcatatgtaggggtgcgatctcatatgaacctggagcagatttgtgaagcatgttggagttggacgatggtttgctgatggacgagtaaccagtgcttggacaagatccagagcacgacggccaggttcaacaccctgatgcactcgccccccgggcggcggtggcatctgcgcgccgttcgcgcaccgcgccgtgtcggcgatgtaccgcgggctgaggcggtggctcgccggcgagatcatggctacgacgagcagggccagctgctggggcgagtcgtcgccgtcggtgacggtggctgcgggcagcgacgtggagcggagatgggagtcagccttcatacagaagcactggtcgacgcagcagctgcggcacaccgagcagcagtgctggcggccccagcgcggcctgccagcgaagtccgttgccgtgctcaaagcatgaatgttcaagaacttcctgcacccgtaagtctgtcccgcgacgttgctgtgcaaatcgtctatcgacattgttggccatgatcagaatcgcgctctgctttgctctgctcaggtatcccaaggaccatgagaaggacgtgctggcggcaaggagcagcctcaccaggaaccaagcacagatcgaaatcccaccagactcgtttcaaattcgattcttttttggcgagatggggtaatgatggattcgagtggttttgcatttgtaccaggtttcaaattggttcataaatgcgagggttcgtctgtggaagccgttgatcgaggagatgtaccaggaccttaagaggagctcgggtgcaggaggagggcacggtccggcgatggagccgcaacagcagcacttgagcaagcgtcgaatttgcgagctggaagatggtggccagtgaaccatccagctccatagctgcctgccgtggatttaccattggcccttgtagtttccctgtgctatgtttatgtacatatcattgccaacgccagcatttaacatctgcgcatcttttatcctgggttgactgggaagggccaagagcagcggcggcggatactgctggatcagggttctggatgctccaaaaaaaaaaaaaaaattccgatggctgcccgtttcagatatagcggatttcatgctntggttctggtcatgtc

SEQ ID NO: 64449 - DNA, 350 bp, Zea mays
  Clone ID: MRT4577_158778C.1
ggggacaaatacaaaaggcccccctttattatttaatccccagaaggcgtaaatttttttaatacgccccccccttttgctgcccgggggcctgacacacgactaacacatatacgtacataagcatccaggggggggggggggccttgaaacacgtattactcgaacaaaagctcacgggggggggtatatatatacgtacgtacggacctacccgttttcggccggcccatgctgtgggggagagaataggggtttaatttacgaacagaagggcctcaagcagcagcgggggtaaatttgaggtagcagcgaccatcattataattcccggggcaaggcggaggggg

SEQ ID NO: 64450 - DNA, 339 bp, Zea mays
  Clone ID: MRT4577_158779C.1
catatagcggaaatactacagcacataggcagtcaaaatctaacgattacgtgtgctcattggtcttgctgtaagtgctgctactgcaaccattagcacacaatgctaacacgctcatatagctaactatcttatactatacctgtcactagcggtatcttcagcatgagaaaacgcaattctacaactctacaggatccaaaaggcaatcgcagcaggcattttacctttatcaccatcattcttgcaacatccgcaagcattattacagcaactacctttagcgcatgtgcaggcacagaacatcaaggtacaacaactacaactactagagctagg

SEQ ID NO: 64451 - DNA, 602 bp, Zea mays
  Clone ID: MRT4577_15877C.1
aaacagggggtttttttccttgtggggggaccccgttattattattccagcctttttcccaaaaaattaaacgggggtttgttgtttgcacccttcgcacaggttttttaaaaacaaaaaagggggccgggggcctaaatacataccctttagtggtttaaaacaaggggggccatccttttttaattttaaatatcctccccccccggggtttcccccctttttgggggggaacttgcccttaacaatttccatccccatccacccgtttttatggttgggtatttctttcattaattctttcaggcacccgactttgggggggcccaacaacaaatccgggggggataaggctttttctttgtgggaaaaaatttcaaggagcgcggggcccttggggacggaaagttcaacccgaaatttggcccctttttatgggtccagaatggggcgaaaggcttcctcctccagggggtggaaaattttccgggtggccacccgcccttgcgcagggaagcgcaattcgccggggctttttttgtcctcccacgccgtgggttcattgttggcccccccaaacttcggggcctaaaaaatcccgg

SEQ ID NO: 64452 - DNA, 393 bp, Zea mays
  Clone ID: MRT4577_158780C.1
ggacctttgggctggtttatgtgcttgtctagggagtttcctaagctcgaggttgccctttctgagaaggtctacgctcttacccttaggaggattgacggtaagtaggagaagttaatcgcttgtatagaactggacgatcaagggtcggtgtgttacggtgatacagcttccttcatagacgacccgaagtgccgccgtaagccctcgagatccgacacccagccggtcagacccgtaactaacgtcgaagaacaaacatcacccgtgataacggatcacccataacgctgcgacgtccctggcgtcaaccgtatccgtttccgttaaactaagtacgcgaatcaacggaacgtcctagccccgcgtagcccggcaaaaaaacagaacacc

SEQ ID NO: 64453 - DNA, 578 bp, Zea mays
  Clone ID: MRT4577_158781C.1
cccacgttgtgattgggggaggtggtgctcacaccatttcttgtccattgacatcagcgctccacgcctgcgcccccgaattcccaaatcctgcggcgcctccgccccaaccccgctcgtcgactcctctcttccgaacacgccggaggaatccttctccgactcgtcttccacctgtctgccgggctggcgtggattggtctcttcttctgctgatcatctgttataatggtgtttgctgctggaggcacatcccgattcgtcgatagggctgagtgcacctgcctcattcacaagataaacgacgctccgcgtcagcatcctccccgttcgcgattggctcgagcggcaccgatggagcgacgactctgtttcccagaaggcgaaaggacgatgagatcgacagacgattcgtgccgatcgcacaccggttggcggtggcgagccgcgtgagatctctcgcgtcctcccggttctcaggggccacgacgtccgcgccgtcgcgcgccttttccacgcgcttatgaaggcgaacgtcccggcggaccaccccggggccttcctcagggtgttccggc

SEQ ID NO: 64454 - DNA, 433 bp, Zea mays
  unsure (1)..(433): unsure at all n locations
  Clone ID: MRT4577_158782C.1
ggaagtagtgctcacaccatttcttgtccattgacatcagcgctccacgcctgcgcccccgaattcccaaatcctgcggcgcctccgccccaaccccgctcgtcgactcctctcttccgaacacgccggaggaatccttctccgactcgtcttccacctctctgccgggctggcgtggattggtctcttcttctgctggattgtgcagtgatctagggattgcgtattaggatattgaggatgggattttcacaaattgctatagtccaattattttcttcccttctaccctgatacatgccagatcatctgttataatggtgtttgctgctggaggcacatcccgattcgtcgatagggctgagtgcacctgcctcattcacaagataaacgacgnctcgcgtcagcatcctccccgttcgcgattggctcg

SEQ ID NO: 64455 - DNA, 160 bp, Zea mays
  Clone ID: MRT4577_158783C.1
cgccgccgacggtttcgcccctgcagactttaggtatcccagtgtccaacggcccacccccaccgcagccgtcgtccgtccgtccagcgcgacgacgcacgatgcataggggtgaggccagacaggatccgccggcgcctgtagattctcctatccaacc

SEQ ID NO: 64456 - DNA, 1379 bp, Zea mays
  Clone ID: MRT4577_158784C.1
cctcgaggccggccgggactacccgggcacgacgtgcgttgcgtcgtgagtgtttgtgtttcagagctgagagtctgagactgagagagatagaggtgatgatggctctgcaggcgcaggggacgcgggtgccgctggtcctggcgctcttcctcctcctggccggttgcggcagcgaggcgcagccgctggtgccggcgctgtttacgttcggtgactcgtcggtggacgtcgggaacaacgactacctccacaccatcatcaaggccaacttcccgccatacggcagggacttcgccaaccacgtcgccaccgggaggttctgcaatggcaagctggcgaccgacatcaccggtacgtacgtagctaggactaagtcggggatgcatgccattgccattcctttctgtctctctctggagtctggacaacatcgatctgatgaatgcaatccccgccagcgtacgacgactttttcgtcgatcgtctgcgtacgtggtgcatgcattgtgccatggctgcagccgacacgctggggttcactacctaccctgccgcgtacctcagcccacaggcgtcggggcagaacctcctcatcggcgccaacttcgcgtccgcggggtctgggtactacgaccacacggcacttatcacgcgatcccgctgtcccagcagctggagtacttcagggagtaccagacgaagctggcggcggtggccggcgccgggcaggcgcgctccatcctcagcggcgcgctgtacatcgtcagtgccggcgccagcgacttcgtgcagaactactacataaacccgctgctgttcaagacgcagacggccgaccagttctccgaccgcctcgtggccatcttcggccgcaccgtgcaggagctctacggcatgggggcgcgccgcgtcggcgtcacgtcgctgccgccgctgggctgcctgccggcgtccatcacgctgttcgggcacggcgccgccgggtgcgtgtccaggctcaacagcgacgcgcagagcttcaaccggaagatgaacggcaccgtggacgcgctggcgcggcggtacccggacctcaagatcgccgtcttcgacatctacacgccgctgtacgacctggtcacggacccccagtcgcagggcttcgcggaggcccggcggggatgcttgcgggacgggcacggtggagaccaccgtgctcctctgcaaccccaagtccgtcgggacgtgccccaacgccacgtcctacgtcttctgggacgccgtccacccgtccgaggcggccaaccaggtcatcgctgactcgctcatcaccgagggcctcatcctcgtcacgtaatcatggcttttgttttggcttcaaatcgatcagactaccc

SEQ ID NO: 64457 - DNA, 600 bp, Zea mays
  Clone ID: MRT4577_158785C.1
ccggcctggagccgtaggctcctacctcatcttcctgctcgagcacgcgacgccccctccagccccaacgcccagccggagctccctccctgctcggatttcgtcaggccgcgtagctccctggcgcccctctcctcggaactccctcctctcgctctagctcgccgcgcactcctctactcggctctcctcaagcacgtgcccatccctctgccccctcgccatagtcggcgcttctcacagctcggaccgcgcccctctctgctcgtcctccacttggatcatggcgcccggcccctgctcggatctctaccgtccgccatggccgcgtccccctcatccgtcctgacgtccgctcggcttacgcgcgctctcccttgccgattcaagttcacttcgctcccatggccaggtttctctggtggtcgtgtccggtgccaggtcctgtctctccctccccatcgcgcacagtcgcagagtagctgcatcaagttggagctgaaggtgtgcgcagacatagactggtttgaggaagaggccaggcaaggccggacctgttcgggggccctaagcaaaaaaaaaaaaaaaaaaggggcggcc

SEQ ID NO: 64458 - DNA, 314 bp, Zea mays
  Clone ID: MRT4577_158786C.1
attcacagaacaaagtggagaatcggatttataaaaaagtaaagaaagtaaagaaagagaactatactgactatgtaacatgtgtatcaaaaggactgaagcctgcgtatgatgctgatgctaaatctactggtggggggggaccacacgagaaaacagaaggcgtcgaatactacattacatttgaggattaggacaacgccggtgcagagttagctacagttaggatcaaaacaaaagaaacgggtgctacgacagatcttgcaccgagtgattccagagcttttttctcacgatcaagaatctttcgtcac

SEQ ID NO: 64459 - DNA, 842 bp, Zea mays
  Clone ID: MRT4577_158787C.1
actccatagggcgattgggttcctcgaggccggccgggagccgggttacggtgccaaactgcgcgcaaatccacctccatacccagcatcgccaaatttcacagcgacaaccgccgccatgggtatcgatctcgaccgccaccacgttaagggcactcaccgcactgcccccaagagcgacaatgtctacctcaagctcttggtgaagctctaccgcttcctggctcgccgaaccgatgcctctttcaacaaggttgttcttcgacgtctgtttacgtccaagatcaaccgacctcccgtctccttgtcccgcattgtcgccaacatcaacaaggagggtgagaagcgaaccgtcgttgttgtcggtaccatcaccgacgacaaccgtctgctcgagtgccccaaggtgaccgtcgctgctctgcgattcaccgccaccgcccgtgcccgcatcctcgctgctggtggtgaggctatcaccctggaccagcttgctctccgtgcccccactggaagcaacaccctgatcctccgtggccccaagaacgcccgtgaggctgtcaagcacttcggcttcggtccccatagccacaagaagcctcatgtcgagtcaaagggtcgcaagttcgagcgtgcccgtggccgaagacgttctcgtggtttcaaggtctaagcggtttcaaggtgaaaattattggccttggggtggagttggggccagtttatggggcaaatgatgccgaacatcggcttgcaaatgggtcttgcatgggattggcgtgcctaggtatcacaaaattctacaatgaacttctcggaaaaaaaaaaaaaaaaacccgcgg

SEQ ID NO: 64460 - DNA, 307 bp, Zea mays
  Clone ID: MRT4577_158788C.1
aatgcccacgtccgtaagctcataatttggctcgagagctatttcctttaaacactctttttcaaatctggacacataataacgagagccgagatatgataatgtcctccaacagcttcatgtcacttaaccaaatactgtatgtgcaacccaaaataattaatcttgtgtcccacactttttagcttgcttttttcttactgtctcttcatctcacataaaactgcatccttcacgtcacgaacttgccacactattcccacatctcccttaacttttacaagcaccacgtctaatcaggcctttt

SEQ ID NO: 64461 - DNA, 549 bp, Zea mays
  Clone ID: MRT4577_158789C.1
aattcggcacgaggcctcattctgccaccgcttgccgtattgctcactgccctgctcttctctgctatcaaccccctatgctatccggctgtgcacccactcacgaacttatcttttgtccacacctcgcacgctggggaccactgctcatcaatatgctgaatcttccctttctctctcgtatttatactttctctattttacaccgatgccggcataccatacctcccgcaacaatcccctgcctcctccccacgacgcactgttgttcgagcccaggcatcttcctcggcggaaccccgcccccgcgcgcgcatctgttgcgccactctccgatctacacatatcctctactcagaaggacgctcgagctgcatcgacagacacgcagcccgcaacgtctccgagctccaccaaaggtgatggtcgcgatcgtctgctcacatacaccccaagcgcatgccacgccaagcacttcgcacctatcttactgctacgcccgatggccagaggcttcgatgaacaccattgaggtctgccctcctatgc

SEQ ID NO: 64462 - DNA, 1726 bp, Zea mays
  Clone ID: MRT4577_15878C.1
tcccgggaagagtgtccacaaggggagatcaaacatctgaagaaactctatcagtaccccatgattacaatgatgttggcagagaagctagtctaagtttggcagagccatcatctattgatgagcatgcacaaagctctgccaacaacttttactatgactatggtgaatggagggttatctgggatccattctataatcggtattatttttacaacatccagacacaagagtccacatggtgtcctcctgaaggactggaggattttgcatcatattgtagcccagatactactaaagagctagctgaactgggatctcagtgttcaagcatggcaccacaagagaacaatctggctactcatgtcaatcatttagaagcacaggagcaagatcactgcattcatgatttatctgacattcctgttgaaaagccaatatatcaaagtatgataactacctctgacaaagcacagcacactgaaaataagtacagcgattcaacaactactgtgttagagatgaaccaggaagttgctagcaccaaaacgaaaaagagaatcattcatgccaagacatggcagggaacgtctctaatgacatcatcaagtactgggctcagcggtattcacttttctcactttttgatagtggtataaagatggatgaagtagggtggttttcagttacgccagagccaattgcaaagcatcatgcatctcgtgtgggtgcgggagtaatgattgattgtttcacaggagttggtggaaatgccatccaatttgccaaaaagtgcaagcatgtaattgcagttgatattgatccacaaaagattgattgcgcgcatcataatgcatccatttatggagtaaatgatcacatagatttcattgtaggtgattttatacatatagctcctcatctgaagggagaaactgctttcatgtcgcctccttggggtggccctgactatgccaaagttgatgtttatgatatgaaaagcatgcttattccttgtcatgggtactctctttttaaactcggaaccatgatagcttcaagagtagtgatgtttcttcctcgcaacattgacctaaaccaattggcggacatgtccttgtctgtggatcccccgtgggcagttgaggtcgagaagaacttcctcaacggaaagctgaaagccataacagcttactttgaagaacaggatcgttgaaccaagcatcggcgctggtgatacaaatcatcttgttagctatgactcacgacaaatttttgtggtgaccctaaacagaacctttgtgttcggagacagaaagaagcggtttatcatcttcaccgagcatagataatttatttgcagagatgagtcattggtatcatacaaaagcagctcagcttatctcaattcacagcaagtgaaactgtcgaaggaaaactacaaggctgacagtcgaacgcgtgggagttagcttaattttgccttatgataagcaagcatgcttcctggtttatttcatacagctactagtagtttcagctgcaacagttgtgcgttggtgtgcgtgtgattctcacatatctggtcctgcggatgtgagtgatgcaaatgtatgtgtcatcatcccatgtaagggtttgtttgtttgctctcaatctatgtagattgagtgggattaagtgagtttaaatctcagacaagtcaaaaaaaaatgttttcaatctc

SEQ ID NO: 64463 - DNA, 460 bp, Zea mays
  Clone ID: MRT4577_158790C.1
tcacagactcagagagaacccaccatggtgctgtctcctgccgacaagaccaacgtcaaggccgcctggggtaaggtcggcgcgcacgctggcgagtatggtgcggaggccctggagaggatgttcctgtccttccccaccaccaagacctacttcccgcacttcgacctgagccacggctctgcccaggttaagggccacggcaagaaggtggccgacgcgctgaccaacgccgtggcgcacgtggacgacatgcccaacgcgctgtccgccctgagcgacctgcacgcgcacaagcttcgggtggacccggtcaacttcaagctcctaagccactgcctgctggtgaccctggccgcccacctccccgccgagttcacccctgcggtgcacgcctccctggacaagttcctggcttctgtgagcaccgtgcggacctccaattaccggtaagctggag

SEQ ID NO: 64464 - DNA, 546 bp, Zea mays
  Clone ID: MRT4577_158791C.1
gtctacccagcgtcctttactcgctgccgccttcctcgacccgcaccggacccgcagaagctaatggcgactgtgccagttaacccaaaacctttcttgaacaatctgactgggaagactgtaattgtcaaacttaagtggggtatggagtacaaagggtatcttacttctgttgactcatacatgaaccttcaggttgctaacacagaggagtacattgatggacaattctctggaaacctgggtgagattctgatcagatgcaacaatgtcctttatctccgaggtgttccagaagatacagagatagaggatgcagagtgaggagccgggagtgggggaccatgccttaagattggttctgataaccatgtattagctgtcatcttaagattggttgatgatatttcagatgcgcactactgaatacaaaattgctgatgcatttgcctgcttgcacggcacgacaagacattgtgaaatcatttggccatgtagtacggactatattccaatcttgtatgtttttggctcattaaccttgtc

SEQ ID NO: 64465 - DNA, 165 bp, Zea mays
  unsure (1)..(165): unsure at all n locations
  Clone ID: MRT4577_158792C.1
ctttcaaaaaaaaaaaagagggggggggggggggggggggattaaaaaagggacgagtggtggcatgtgaagatggtgaagttcacggttgtnnatctccctgccatcatgtgacataaagtaacancattcgtnntatgtctgttattgctcatctataaccat

SEQ ID NO: 64466 - DNA, 144 bp, Zea mays
  Clone ID: MRT4577_158793C.1
ttctcgtcgtcgagctccctgaggggtggtggcgtgctgctgcaggggggggactgcagtgccaaggacgatggtgtggtgggatgacagcgacgatcaagctcatgcatgttctggtatggatttaatccctaattaattcac

SEQ ID NO: 64467 - DNA, 406 bp, Zea mays
  unsure (1)..(406): unsure at all n locations
  Clone ID: MRT4577_158794C.1
cctcttttctcntttctctgggacacaacattcacgagggcgattttttttgaggtaaagggccttcaaccatattgacagaattcatcggtattactaagaggcaattccaccaccaggatggtggctggaaaaatgtactgatacaccacccaattacgaaaaaatggaaaaaatcaaatagatccaaaggtgagttcatatacatctgaccaaagaaaatgaaaggaagggtatttaaaatcctaaccggggatgcattgagggaaactaaaaaacttggtaaagggggggccttcttaaaactttccctggtaaagctggagtgacccacaaccaaggggcgcaagcttaccaaaaaaaaggtcccggcgacgagcgcccattttttcaccctccccgggca

SEQ ID NO: 64468 - DNA, 721 bp, Zea mays
  Clone ID: MRT4577_158795C.1
ggaactggtgtaaagcagaatcatcagattcaccgcaacaggacaacacaaaaaggatacttggaagtgtacatcaacctcctggccctgggccagtttgtcatggtggttctggagctccctcccctgaacagcatgcttctagacagggagcagtgaagagaggtgtgtgtgaagctgaatcgtcagatttaccaatacaggatgagtcctcagaagtaacactaaaacaaagtgcagataaacctctttgtaccacagaggatggcaattctggagctggttcctgtgaatgcctgttcctgagcagggtggggtggggatagacttgcgtgaagcaggaccaccagatataccatgtcagattccggatggcagttctgaagcattccttgaactccttgttcccgagcatagggggatggaagctggcttgtgtaaagtagagccatcagatgcaccttatcagggtcaggatggcagtcctggaaccgcttcacatgaacagcctgtccctgagcagcgagggatgggaagagcagactcgtgcgctacagaaccattgtcagtacaccaggacagcacagaaaataaacctgaaaccgtagaacaagatagctagacagtagacacttctgaattttgatatgttacctttctttttctgctctgtatagaaacctgtgcataataagcatgtagggcctgattggttggggtg

SEQ ID NO: 64469 - DNA, 202 bp, Zea mays
  Clone ID: MRT4577_158796C.1
tcgatcatatcgaacatcgaaatatagcaatagcttggcagcttgattagacaaaaatgagggggatcagatgaagatggagagctacaaagcctggaaggcaaggggtgatgtgtatccaagcctaagtattagctggtagccacaactgacaatcttgaggagactaataacacgaatggcgacactctagattatcaaa

SEQ ID NO: 64470 - DNA, 1516 bp, Zea mays
  Clone ID: MRT4577_158797C.1
ttgggaccctcgaggccggccgggccactcccgcgcgtctcccacccaacaacaaaacaagcctaatggcttcctctccatctcacgccactgcggttgcctacttgccctagaaccctcgccgccgcccctctttaggattcccatgtccctggtcgccccctgacacgcccgccccggatcctgcacccgaattccgcgtggaattccgggccgaaccgcctctctgcgtgcgcctccgaccaccaaactctctctctcacacgcgcgcgcgcgcgcacgtctgaggcggtttgattctccggtgggggttccttggtctcgaactctcgatttgctgctgatgggggtgccgaagcagcgctggacgccggaggaagaggccgcgctcaaggccggtgtcgccaagcacgggcccggcaagtggcgcaccatcctccgggactcggacttcagcgcgctcctgcgcctccgctccaatgttgacctcaaggacaagtggcgcaacttgagcgtcaccgcaggaggttacgggtctagagagaaggcaaggatggcgttgaaaaaaggcaggcgcgtggtgcctaagcttactgctgacccaatggatgtagatgagaaggatatggacaacgctcatgacacagtcattgatgtggaaccgttagcaatggctttcgagcccttgccacttttggaaagcccagataagtcagttgctaggctcgatgatctcatagtagaagctataaggaagcttaacgagccatctgggtccaataaggcagtcattgctggatatattgaggtaaaccaaaagtacagaattgcaccaagttcttccttgggcggaataagcactaaggtatcctcttctgaagggatgaacacagaaaataataatgttaaacggctaactaagcctcaagtggttgctgaactggagaagatgaaaggcatgaccagggaagaggctgctgcctttgctgccaaggcagttgccgaggcagaagtagcaatggcagaagctgaggaagcagcaagagttgcagaggctgcagaaaatgatgctgaagctgcaaaggcttttcttgatgctgtcattttgtcaatgagaaacaggaacgctgcttccatgatacttcgagcttgctgatccttcacccatgcagcacaccgatgttctgctgcaaagattttctggatagatgagtttcttgtatagccttatagatcatggcgggttttcaacagcttgctgttgtcctgtgctgtgcagccaatcgacaacatgataacaagaatgatcgagaaagtagtcttcatttttttttgtttcccattgtgttgctttgtaattaaactatagccttttcccttcattagttgatgaagtgatgtcgtctaatagaacaactgtagtgaaaagaaaatgtcagaaagccgccttagttaatgcaaattgctgtgatattatttttgcagaaatgattatatggtgacagcgtttaagatt

SEQ ID NO: 64471 - DNA, 252 bp, Zea mays
  Clone ID: MRT4577_158798C.1
gtggtatagatacattaaaatctatcttttttttttacagagcgaaagagcccccaaaaattaaatttattcctttttccccgaaaagaaattttaagggggcccctcgggtgcctttaaacgacggggatgagaaaaaaaccaagtcctttggaaacaaacccccttaaatttattcggggagcgcggaataataaaaccccctttcatttctttggattttaacaaaaaaggttttaaaaaaaaacccga

SEQ ID NO: 64472 - DNA, 1260 bp, Zea mays
  Clone ID: MRT4577_158799C.1
gattctccggtgggggttccttggtctcgatttgctgctgatgggggtgccgaagcagcgctggacgccggaggaagaggccgcgctcaaggccggcgtcgccaagcacgggcccggcaagtggcgcaccatcctccgggactcggacttcagcgcgctcctgcgcctccgctccaatgttgacctcaaggacaagtggcgcaacttgagcgtcaccgcaggaggttacgggtctagagagaaggcaaggatggcgttgaagaaaggcaggcgcgtggtgcctaagcttactgctgagccaatggatgtagatgagaaggatatggacaacgctcatgacacagtcattgatgtggaaccgttagcaatggctttcgagcccttgccacttttggaaagcccagataagtcagttgctaggctcgatgatctcatagtagaagctataaggaagcttaacgagccatctgggtccaataaggcagtcatttctggatatattgaggaccaatactggccgcctgctgattttcaatacctgctatctacaaaattgaagtcattggttaattctggaaaattaatcaaggtaaaccaaaagtacagaattgcaccaagttcttccttgggcggaataagcactaaggtatcctcttctgaagggatgaacacagaaaataataatgttaaacggctaactaagcctcaagtggttgctgaactggagaagatgaaaggcatgaccagggaagaggctgctgccttcgctgccaaggcagttgccgaggcagaagtagcaatggcagaagctgaggaagcagcaagagttgcagaggctgcagaaaatgatgctgaagctgcaaaggcttttcttgatgctgtcattttgtcaatgagaaacaggaacgctgcttccatgatacttcgagcttgctgatccttcacccatgccgtcgcatggttttggcagcagcacaccgatgttctgctgcaaagattttctggatagatgagtttcttgtatagtcttatagatcatggcgggttttcaacagcttgctgttgtcctgtgctgtgcagccaatcgacaacatgataacaagaatgatcgagaaagtagtcttcatttttttttgtttcccattgtgttgctttgtaattaaactatagccttttcctttcattagttgatgaagtgatgtcgtctaatagaacaactgtagtgaaaagaaaatgtcagaaagccgccttagttaatgc

SEQ ID NO: 64473 - DNA, 2244 bp, Zea mays
  Clone ID: MRT4577_15879C.1
atttgacctgagatccatccttgatgatgtcatctcattattttcttcaaagtcaagagagaagggaattgagcttgctgtatatgtctctgaaagagttcctgaactcttgttgggtgatcctggaaggtttcggcagataattacaaatttagtgggcaactcaattaagttcacagaacggggacatatttttgtacaagttcatctggcagatcactcaaatcttgcaacagaacccaaagttgagtcagtggctaacgggatgaatggacataaagatgagaaaactgctgtagcaaccagtgtttctctcaacacactaagtggttttgaagctgctgatagccgaaatagttgggaaaacttcaagcttttgctttcttatgagaaaaatgagatgccctatgaaagtgtatctgataaagttactcttgtagtaagtgtggaagatacagggataggtataccattggatgcccaagccaaggtgttcactcctttcatgcaggccgatagttcgacttccaggacatatggtggtactggaattggattgagcatcagcaaatgtcttgttgaactaatgggtggtcagataaactttgtcagccgaccacatgttgggagtacgttcacatttactgcggttctcaaaagatgtgacagaagcgctattggtgacagtaagcctgttatgttgcatcctcttccatccagtttcaaaggtttatctgcactattggttgatagaagaccagtaagagctactgtaactaagtatcacttgcaaaggctgggaattgcctgtgatgttgttgctaccattgaactggctcttggtgtgctgtccgggagaaatggcagttccctaaccagtatgaagcaaccatgcatgttattgatcgagagtgattcatggggcttcaatattgatgtttctttacgatctagactcctggagatgaagcagaatggtcacacacatgtattacccaaaatcatccttcttgcagctgcagaatcgggcaaactcaaagaacactatgcagttgattctgtgatcacgaaacctctgaaagcaagcgcacttgccgcttgtctattccaaacacttggtatcaaacagtcaagcaacgagagaagtgacaactcaggttctctttacgggttgcttcttggcaagaacatattggtggttgatgacaacaaggtaaatcttagagtggctgctggcacgttaaagaaatttggagcaaaggtggagtgcgtggagagtggaaaagatgccctcgccctcctacaggtcccatataagtttcatctttgtctcatggacattcagatgcccgaaatggatgggtttgaggctaccaagcaaataagggcaatggaagcgaaggcaaatgagcaggcagtcgcctgtgacgattcagaaatagatggcgcgacaagggcagcaagatggcgcctgcctgttcttgcaatgaccgccgatgtcatccaggccacccatgaagagtgcacgaagtgcgggatggatgggtacgtcacaaagcccttcgaggagaagcagctcttccaggcgttgcagaagttcttggaccccggcatgtcctgctaacgccgaagtgatgcgttggagaccgtgcagcgcgggctgctcgtcgatcatgccagcggggaacagcaggcagacaaggcagcacgcaccacgggccttcgctggtctgcctgcctgtgcaggcgtcgtgtaaatgtattgtatttgcagggatactgtttacagcgctagtatgccccgtgccacaatgtccgagctacctgtggctgatgcacgttgcgcataggtggttttttttgtacagcttccaccatttttgtgctccagatcagaccaccgaaggaggcaagcatgctcgctggtgcagtgcagcactggaaggaaaacctgacttcctgagagtagatttttgctgtttaattgcattgggatttatgatgtattataatcagataaatgtgtgatgtaagctggcgtaattggcccaatgcatttccattgttatggatgagttgaaatggcattggttagacatacactattgggtgtatgcccttccacagttccattttccctgcaaaatatcaaaatgtgcaaagggatagtggaatcatggcttgaattatatgaattttctttggtgtttttttcccgtaaaaaaaaaaaaaaaccgtctagag

SEQ ID NO: 64474 - DNA, 618 bp, Zea mays
  Clone ID: MRT4577_1587C.1
ccggccgggacaggcggctgcactgccgcagcacacggcggcgatctcgccggagcacagtgctcaggtgccccggatgcattgctgcagagacagcgacccatgggcacgtggatccgtggcgaaaatccaacccagtgagggattccggtcagtccgaggccacattctgcttgatgctgccgtggatagctccgccacaacccaaggatgcttccagatcatgctccgaaggttgggatgcagcacacatacgttggccgcggtggcccgatctcatctctctgcttgcgatggcctttagatcggctcccaaactatgtgcttggcatggctgtggaggaggtgtcagggtaaaacttatatgcgggttaattcgttggcggcgaacaatacccagatcatgcagtgaatttagtttctctggtttgttgcgattccccccgtgtgcgtgatctcgttttgatatggtggagagtggagacagagctgaccaccgggtcccacatgtcagtgtcacaggattgcaggtgttggtggctgtgcgtccgaattttttatattttggcccttcctcggaaaaaaatacacgttgaatcctagaaaattttgatggcc

SEQ ID NO: 64475 - DNA, 145 bp, Zea mays
  Clone ID: MRT4577_158800C.1
agtgatgttgttatgcgggatagcgatggacattccaggtgttatggatttgtcaattttgagaatgcagatgctgctgctcaggctgttcaggagctgaatggcaagctattcaatgataaggcactgtatgtgggaagagcac

SEQ ID NO: 64476 - DNA, 1767 bp, Zea mays
  Clone ID: MRT4577_158801C.1
ttgggaccctcgaggccggccgggtccgccaccttctccacccaacaacaaaacaagcctaatgggtaatggcttcctcagttcctctccatctcacgccactgcgctgccctagaaccttcgccgccgcccctctttaggattaccgtgtcctcgatcgccccctggcacgcccgccccgatcgccccctggcacgcccgccccggatcctgcaccggaattccgtgtggaattccggacccgatcgaaatcgaaccgcctccctgcgtgctcccctgatcaagaaattctcacgccgcgcgaacgcacgcctgaggcggttggatcctctggtggggttccttggtctcgatttgctgtgtggatgggggcgccgaagcagcgctggacgccggaggaagaggccgctctcaaggccggcgtcgccaagcacgggcccggcaagtggcgcaccatcctccgagactcggacttcagcgcgctcctgcgcctccgctccaatgttgacctcaaggacaagtggcgcaacttgagcgtcactgcaggaggttatgggtctagagagaaggcaaggatggcgttgaagaaaggtagacgcgtggtgcctaagcttactgctgagccaatggatgtagatgtgaaggatatggatgacgctcatgacacagccattgatgtggaacctttagcaatggctttcgagtccttgccaactgaggaaagtccagataagtcagttgctaggctcgatgatctcatattagaagctataaggaagcttaaggagccttctgggtccagtaaggcagccattgctgcatacattgaggaccaatactggccacctgctgattttcagcgcctgctatctacaaaactgaaggcattggttaattccggaaaattaatcaaggtaaaccaaaagtacagaattgcaccaagtccacccccctcgggcagaataggcactaaggtatcctctgctgaaggcatgaaggcagaaaataataatgctaaacggctaactaagcatcaagtgattgctgagctggagaagatgaaaggcatgaccaaggaagaggcagctgcctttgctgccaaggcagttgctgaggcagaagtagcaatagcagaagctgaggaagcagcaagagttgcagaggctgcagaaaatgatgctgaagctgcaaaggcttttcttgatgctgtcactttatcaatgagaaacaggaatgctgcttccatgatgcttcgagcttgctgatcctttacccatgcggtcatatggttttggccagcagcacaccggtgtttctgctgcaaagattttctggatatatgagtttcttgtatagccttatttatagatcacgacgcatcaactggaggggtttttaacatcttgctgttggtcctttgtcgttgcagcctttagacaatcgacaatatgataacaagagttatcttgaaagtagtcttcatttatttttgttttctccccattgtgttgctttgtaattaaactctagccttttcgtttagttatttgaaattgtgtcgtctagtagaacaactgtagtgaaaagaaaatgtcagatagccaccttagttattcaatttgctgtgatagtatgtttctagatatgattagctaatgacagcgtttaagattacattcccccaatggggtggtttggaaataaactttagcccttttggttaggtaattgaaaaaaaaaaaaaaaaggcggccggttctaaaagga

SEQ ID NO: 64477 - DNA, 525 bp, Zea mays
  Clone ID: MRT4577_158802C.1
aattcggcacgaggtcgacgcggcctcatccccgtaggcgagcctccactcccctccgccggtaagcctccaccgccccatcgatcgctcctcacccgccggtggcctccccctcggcggacagcctcacctcaccagtcgcgcggccaccatcgccccactcgatgctctgcacaccgtgcgatacccgctgctctgcgcaccgcgcgacagtaaccgctctccccacgacctattccatcccggcggcggcgtccatccctccgttgtccccgtgcacgctatccgcgtgcggggccgtggccctcgcgctgctccccgacgacgtgcggacccagccgtggtggcccaggtcgcgcgccccgacgtcgtgtgcctgctaaggacgctcgtggcgaaccgttgcgtggaggtggagggtacgcttctctgggtcgtgaccaggaggaggtctggggaaggggaagggggcgacgccgcgttggaggcagggtcgtcatgctgctcgacgtctacatacccgtc

SEQ ID NO: 64478 - DNA, 240 bp, Zea mays
  Clone ID: MRT4577_158803C.1
acttacgtcccgaccccaccgatccaaataaagaacttctttataatacgaatgaattgctgtggacgggggctgatgaaggctgagaccggtatttttaaaaaaaaaaaaaaaagggcggcgttaagaccaagcttactcgcgtgctgcagcatacttttatggtaccaaattaattatgccgcgttacacgctgacggaaaactgcgtccactaatgctgagacatccccttgcagtg

SEQ ID NO: 64479 - DNA, 467 bp, Zea mays
  Clone ID: MRT4577_158804C.1
caacctttgatggtttctttcctttagatagatgccataattatgtggagcatcaacgaaactctgctacctgttggatcagctaaggctaattattagctggactaaaaatcagccatgtaacatcctaactattagcccatggccccatgcatgtttggatcccaggctaaaaggtgcctttatctatagcaatgaactattaacccttgttagatagttgtacttggctaatgacctaacaactagccaagggtttggctaaaatttagcacacctacaactacaagcccttttgtttggattgactagagctatttcttagctgctagtttttgccatgggatcaaacaggtccgacatgcatggtttttgaggtgtcgcctaggcgttgaggcataccacaagcgcgacaggacgccacagggtttatttacgccatatgcgctaagcgttcaggcgtaccc

SEQ ID NO: 64480 - DNA, 787 bp, Zea mays
  Clone ID: MRT4577_158805C.1
ccggccgggactcgccgccggcattccggcagtgcccgctccaggccttccagaggtagcgccgcgatgggcaacccaggcacctccgccaaccccgccgtgcgccaccgcctctcgccgcatctcgtggggcagccgccggtgccgcgcgcctcggatccgctagacctggcctccgtcgccgcgccgtccgggtatcgccgcctcttgccgtcgctccggccgccgcgcctcccttcgcccgacgcgggctgcaattagattctgtgccatttgccaggggatcgtgatattggatttggaggtcgatggattttgtagtccatgttttatgcgcagcagcgtcgttgtgtttgcatcggagtcgcgtcgagctgcgtccgcctctctctcttcgcttcccatctgcccgcgccgcctccgcctacgccgctcagcgacctagctctcccggtctctcgccgccgcgttcgcaccgcgctggccaccaacttcgtcgccgccacagcgactgtatccgaccatccgagggcgcggcagccttgcatcccacacccgccagtgcccagcccttcgcatcggcggtggccacgctggagaagaagccataccatacccacccgacatggtcgcaggtgagcctgcacttaatctgagactagaaaattgggctcaatcacgggttgtgtcgtcccgacggacggaggaggaccgtcgctagagctcgcgttgtcgcgccagctgctcccgtcgctcgtatatattacttgcgaagtaaccctagctg

SEQ ID NO: 64481 - DNA, 401 bp, Zea mays
  Clone ID: MRT4577_158806C.1
cggacgcgtgggggagctgggaatttttgataactgttaaggacatcaactatatttttaaactgaagtgcagttgatttacattcctgtatttgttttggggtgtacaacacagtgattcaatatttttatgaaataaactctatttaaaggtatcacacacacaaaaaaagatgaaaatacacagattcaacaattctcacaaatcctaggaagagaaaaaataaatgtgcatctgggcacatcacagtgaaacttcaggacatgaacaacaaagagaaatctgaagagggtacatttaccagaaggtaaaatatatgttacatttaaagaacaacagaaagttgagtttttcagaagaaataatagaaacccagaatcagatcttcagggtgctgagg

SEQ ID NO: 64482 - DNA, 273 bp, Zea mays
  Clone ID: MRT4577_158807C.1
tctcctcagcgagaaccgaatcggtcacgcggcagaacgatgaataatctcgcgacagacagagcgcggcccgctgctccgctcagctgcctcgtcaccgacgcgccacgcccgaacaggatcaccttcgtctgcgccacgctcgcctccatgaccaccatcctgatgggttacgatcgcgcgctgatgagcgacacgacatgtatcaccagcagacctcagcctctccgacatgcaagtcgacgtgcacacggagtccatggacctgttcat

SEQ ID NO: 64483 - DNA, 187 bp, Zea mays
  unsure (1)..(187): unsure at all n locations
  Clone ID: MRT4577_158808C.1
tnctggaggagnaaagtataatttacccttagggtangaaaggagattgtctgttatgcttgcttaaaagataaggcctatcaacttgtgtagatatgctaaatctactaagcaaacgaatatgcactccttgtttcagttatgaaaaatcatttattaatttgtatcactacagatgggggggggg

SEQ ID NO: 64484 - DNA, 418 bp, Zea mays
  Clone ID: MRT4577_158809C.1
ccaggccctgttcttttacaacccgcctaccggaccctgtcggcgagggcgggggcgtgaccgtacggtgctctccgctcgacaccaccgacttccgcgcagctagcgtctacactcccggcgacgacggcggaggacctggcttcggacacggcgatccgagacagagccctgatcccccactacgaggctatggcccacatcggagcgctccggtactgtgaagccaagctcatgcgcgccccgacgacccccccgacacccgaccccaagcctcgtaaggaaggacaggcggtcatcatgaccaggaacctacggaccaacgtacagtaacataccgcccagaggctccacaaggcacccaaaggctaaattacacccaacagaggacaaatgcgatcactaccatgtatccaaa

SEQ ID NO: 64485 - DNA, 318 bp, Zea mays
  Clone ID: MRT4577_15880C.1
ttttttttttttttttttttaacgatacctgctactgtatttaattacatccatccaatccatccatgcgagtcgacggcgtgtacggtgtaccatgtatatacatttatcaactaaaggacgtgcggaggagcaattacctgccactcttgactcttccaatggcgcgctgcgactgcgagcagagcaccgagcgggggtagtacgtcgtaataaaaaaaaatctagtacgccgtcaggccgtgggccgcggggagccggcggcggcgtggcgcgcgggcgcgaacctggcgctgaagtccggctcgcgctcctcca

SEQ ID NO: 64486 - DNA, 235 bp, Zea mays
  Clone ID: MRT4577_158810C.1
caccccataacatacccaaagctacgttcattttaaaacatcgcaagcccttccactactactcaactatatccacctctcattcacctctctctctctaaataaccaacaatcaaacttataatccatacttatctaaaattactccaatactacaatcactttacacttctctccaatcctctaaataacatataatccttacaacatctattctccatccatcactacccct

SEQ ID NO: 64487 - DNA, 358 bp, Zea mays
  Clone ID: MRT4577_158811C.1
gaagccccacaaatcacattttttttttcccaaatcataaagacctaccccggtaatcaggttaccacaggcatagatccatcacataaacacaaaagccccacaattttttttttacaaaagcattacaaattttttttcacaaaatcggggtttcctcagctactttttcaggcatttttaaatgctttgggggacaccgtaggtagacagcatttgcaggggaaatttttattttcacaccatagaaaaaccttgcaactaggtcaaatgacttggcacccccaggaatgtgatttagttggaggatgcattttttttgggcagaattttccccacccgtccgcggacccgtggg

SEQ ID NO: 64488 - DNA, 366 bp, Zea mays
  unsure (1)..(366): unsure at all n locations
  Clone ID: MRT4577_158812C.1
gacaaactcgcctgcctgcaggttgactctagagattgcgctagaacagccaatggtantggaacatgatcggggatgagcacggacactctataaacgaggatgctttatataaaatgcgaagcataacaagcatgatccattctaatatgcatgtgatagttatgatgcagggtatgaacaacataacgtcgtttagacatgaaagcgcgtattcaatttcgagcccaacttaataatagtgcaacaacgaccatgaattaagtggaaacccatccataaagaactatgacgtcgaagagacgaattactgttccaagaagcttataaaagatcaggaattctttatacgtaaatgaatatggg

SEQ ID NO: 64489 - DNA, 324 bp, Zea mays
  Clone ID: MRT4577_158813C.1
gaaggcttcaatgccataaccactgctttggttaaacatgccacgaacagacccattatcggggggcctttcttgatgcagcctgcacgcctgctccagttcatatagatttctatgcccgataagccttacaggctttacatgacaccagcctgcctcatgtagtacaccggagctaaggaccatccctcgcgcgcttttgtcatagacacccagtgcttgatgctaactgatatctcccagaactgacagcgtgcgtgcctgtatcacatctatgagaacatatgcaaggtcatctaacttgtgaagcacctgaaagacaac

SEQ ID NO: 64490 - DNA, 343 bp, Zea mays
  Clone ID: MRT4577_158814C.1
cccacgcgtccgttttgttatatcatcagacacacagcaaatggaggtactgccctgcacattgcataatttcaacgtacccacacacagtactgatatgagacattttacttttgtcctaagtcaaaattctctattttgtcaaaattaatagaaaattgtgatggtgcatttatttcactaaatctactgtgaaatgtgtcttgatggtgcatttatttggtattgtagatgttaatatatttttctataaacttgatcaaaattagagaaaattgacttaggataaaactaaagcatcttacattttaaaatggagggaatatactctgtttgctttctt

SEQ ID NO: 64491 - DNA, 283 bp, Zea mays
  unsure (1)..(283): unsure at all n locations
  Clone ID: MRT4577_158815C.1
ccccaaccccacagnggcaanaaatgaaccctttaaaaaaagctttcggtttcaacaccaaaactatgatcagcacaaattacccccttaacacaaaacaatatctacgagagcagaacatggaccatcctccatgctcatgaacaaaaaaggtcacagccagcacaaagaaaactgcaaatgcccactgcaatgctaacccccacaggaaaacccccccccctaaaaagcaacccctgacagccaattgtcactgcccaccgcaccgacggccaaaacaccc

SEQ ID NO: 64492 - DNA, 643 bp, Zea mays
  Clone ID: MRT4577_158816C.1
tttggttcgatttgcctatctgatactatgtgccttagtaagtatatagaggaaattgtggtgtctgcagtttcgtatcacttgatgaataacaaagatccagagtatcgaaatgggaaattagttctatccacaaagagcttgtcccatgcattggaaatttttcaaggcaacaagataagtgataaggacagcatgaaattggaagcgacagatgacgccttaaaggctgctgaaaaggcaactgctccaaccactgcaaaatcagaaacaaaatcagcaacatcactgccacctgctcgggctccggctgctgctgctgctgctcccgctagtgcccctgctcctagaattgagagcaaaacagaacttgaaaagaaggataatccacctccagttgcaaaagcaccggaagtaacacccgataatgagtttgaaaagcgtattagaccagaagtgatacctgctaatgaaattggagtttcatttgatgatattggtgccttggatgatatcaaagaatcccttcaagagcttgtcatgcttcctctaagacgggctgacctcttcaaaggcggttttcttaacccctgcagaggtattttactttttggccctccaggaccaggcaagaattttcttg

SEQ ID NO: 64493 - DNA, 2607 bp, Zea mays
  Clone ID: MRT4577_158817C.1
aattcggcacgagggtacaatcctgctgtcaggtcctgcagagctctaccagcagatgcttgccatgggcgcttgcccactacttttcaagcaaagttgctcttgctagatcctactgatttccttacaaacatctggagcaaatatggcacaggtggcagcacagagaagacggttaaaagatcaatctccgagacgacgcttgaacgtgtgtcgggattgcttggatctctttctattcttccacaaaaggaacagcccaaaggaactatacgtagacaaagcagcatgatggatgtcaaattaaggagttctgagagtatgagcaacttaacaaagctcagaagaaatgcatctacttcctctgatatgagtagcatggcttcgcaaggaccttcaactagtacagctcctcttaggcggtcaagcagttggacttttgatgagaaaattttagtgcaagcattgtacaaggttctgctttcagtgtcaaagaagtacccagttgtactctatataagagatattgagaagttccttcacaagtccccaaaaatgtatctcctgtttgagaaactactaaacaagcttgaaggtccagtgttaatcctcggatcaaggattgtagatatgaacagtgatgaggaatcggatgacagattgactgttctgttcccatataatatagaaatcaagccacctgaaaatgaaaaccaccttgtaagttggaactcccaattagaagaagacatgaagatgattcagtttcaagataaccgaaatcatattatggaagtgcttgcagaaaatgatcttgaatgtgatgatttaggttcgatttgcctatctgatactatgtgccttagcaagtatatagaggaaattgtggtgtctgcagtttcgtatcacttgatgaataacaaagatccagagtatcgaaatgggaaattagttctatccacaaagagcttgtcccatgcattggaaatttttcaaggcaacaagataagtgataaggacagcatgaaattggaagcgacagatgacgccttaaaggcttctgaaaaggcaattgctccaaccactgcaaaatcagaaacaaaacctgcatcatcgctgccacctgttcgacccccagctgctggtgcccctgctccaagggttgaaagcaaaacagaactggagaagaaggataatccacctccatctgcaaaagtcccggaagggacagcagataatgagtttgaaaagcgtattagaccagaagtgatacctgcaaatgagattggagtttcatttgatgatattggtgccttggatgatatcaaagaatcccttcatgagcttgtcatgctgcctctgagacgacctgacctcttcaaaggcggtcttcttaagccctgcagaggtatattactctttggtcctccaggaaccggcaagactatgcttgccaaggctatagccaatgaagctcaagcaagttttataaatgtctctatgtcaactatcacatcaaagtggtttggtgaagatgagaagaatgttcgagcactgttcacgttagctgctaaagtatcaccaaccatcattttcgtcgatgaagttgatagcatgcttgggcagcggaacagagctggagagcacgaggcaatgaggaagatcaagaatgaatttatgacacactgggatggcctcttgtcaagaccggatcagagaattcttgttcttgctgcaaccaaccggcctttcgatcttgatgaggctataatccgtaggttcgagcgaagaatcatggtaggtctgccatcgatgggaagtcgggaactcataatgcggcgacttctgtcaaaggagaaagttgatgaagggctggacttcaaggagctagcaaccatgacagaaggatatagtggaagtgatctcaagaacctgtgcacgacggcagcatatcgccctgtgagggagctaatccagaaggaaagaaagaaggagctggagaagctgaagtgtgagaaaggagaaactccgtcggatcttccgaagaaggaaaaggaggagaccatcattctaaggccgctgaacatgacagatctgaaagaagcaaagaaccaggtggctgcaagtttcgcttccgaaggtgtctgcatgagcgagctgaggcaatggaacgagttgtatggtgaaggaggctccagaaagaaggaacaattaacatacttccttctgagcaatatgaaaatctatggaccatcacacgcaaaaaatgtatggacattttggaaagtatagtgcacaaaatagtcatgaggaaataggccgaacatgtatgagaactttgggaaacggggggagtgttaaaaggacaggctcccagagtgtgtcggaggctcccacaccagtgggcacaagaaatcaggtcataaaagccactttctggtgtaggacaaggaagaagagttttatctccacctaaatcacagtttgcctgtgttgtaagtattagtattacactaaaaatgggtgtatgtataaactggtaggttgtggctactggctagcagctaaaggttcaggtagcagtttttaatcatttttcatgttacc

SEQ ID NO: 64494 - DNA, 166 bp, Zea mays
  Clone ID: MRT4577_158818C.1
cggggccgtgttactaaaatctcaacaagccccagtttgatgcttgctgcttttatgcaaaaaaaaaattgggcgacgaaaaaaagcgaaattttttgtgcgtagaagaaggaaagggggtttgggtttatgggaaaaccatggcacgaaaacccctgagcgatca

SEQ ID NO: 64495 - DNA, 564 bp, Zea mays
  Clone ID: MRT4577_158819C.1
atgaagcatggtcccaacagtatgaatcctaatgccgaagccttctatcgagtgcacgagcttcattaccaaatgaaggacagagcagatggccttcttgagaattttggttgctacaattttgtgtatcaaacggatacgaaggctccggcagacgagaaaaggagggagaagctgatgactatggtcatgagtccactgaaattgagcttcaggatgacaaggcccttgtgccatatgcagcttggctccccatgccaagtagccgaagtagagtttagagtggtagcggccgaagtcagcactagagatctagtgcaagaattcttggcaaatagagtatttccgacctctagtggctggggaatggccaagaagaaggatgggggcaaaaagcacgaacttgtttggctcccttaccgcttcaagtttgagaatgaattcaagaagccatgccaagagtggttagaaatgattgaaactatgtgcaatgaaatccttagcaactacaccaagaaggaagaccagttgatgactgctgccttcggcacccggccaaaatga

SEQ ID NO: 64496 - DNA, 981 bp, Zea mays
  Clone ID: MRT4577_15881C.1
catcacacagtcaagcaacgagagacgcgacaactcaggttcccttcatgggttgctccttggcaagaacatattggtggttgatgacaacaaggtaaatcttagagtggctgctggcacattaaagaaattcggagcgaaggtggagtgcgtggagagtgggaaagatgctctcgccagcctacaagttccacataagttccatctttgtctcatggacattcagatgcccgaaatggatgggttcgaggccaccaagcaaataagggcaatggaggcgaaggcaaatgagcaggcagtcgcctgtgatgattcagaaacagatggcgcgacaagggcggcgagatggcacctgcctgtccttgcaatgaccgccgatgtcatccaggccacccatgaggagtgcacgaagtacgggatggacgggtacgtcacgaagcccttcgaggagaagcagctcttccaggcgctgcagaagttcttggaccctggcatgtccagctaacacccaagtgctgcgtttgttgcaagtgaggcaccattctcctccgttctgtagttcgctaaccatggacgcaatctgaccccgaagaaagatcgtatatcgcgggctgctcgtcgaccatgccagcggggggaacagcaggcagcacgcagcaggggggctttgctgcctgcctgtgcagtgcaggcgtcttgtaaatgtattgtattagcagggatcctgtttatagcgctagtatgggcctgcgcgacaatgttggagctgcctgcggctgatgcacgtcgagcataattttgttgtacagcttccaccatttttgtgctactgtggcaggcatgctcgcaggtgcagtgcaggactggaaggaaaacctgactgcctgagagtagtgtttttttttggccgtcaacattgcattgggattcatgatgtattacaatcagctaatgtgcgatataagctcatgtaattggctc

SEQ ID NO: 64497 - DNA, 337 bp, Zea mays
  Clone ID: MRT4577_158820C.1
gaagatgaaaaccatatatagactatactccaataaatccacatacactgttgtcaagagaagggaagaaaaaaaagaagtccaaaggaaaaaattgtcactctaccccgcctccgccgccgcccccaaatcccaaatggaatccgcccatccatcaaaacgaccaaatccagatcttgatgcggaccttacacttggcgtccgtcggcgtcatcttcccgccgccgccgccgccgctggaagacgacgacttcgtcgtccgtacgaccgagcgcggcgagtggccacgcccacggccccgtgccggggccggggccttggctacgaccacgggggg

SEQ ID NO: 64498 - DNA, 792 bp, Zea mays
  Clone ID: MRT4577_158821C.1
ccggccgggccgccgacagttatcattctctatcaactcaacattcttttctctacactcctttaaacacattccaaattaccaaaaatcacaatgcatattcttcagttttccatctttgctgcagccatggctgcctccgccaacggcgccaaggttgaacagcgtgatatcgactcatgcacctcagcagccagcggcctcgttgatgccatgaggcgacatgccaactgcagacaagacccttgcgagcttcctcgccaagcagactgacttcgaagatgtcgccgactcttgcgttattcctgcagtcactggatccatggccgctgcctatacttcctacgccaagtctatggagaactggatttctgagttcaaggacgacctctccagcgtttacgatgcttgcaaggacgttccccaagttcaggagcaactcgaatcctacgctattcccagcggactatgctcttcttatgcttgggctaccgcctccgctacggaaaccgctactgcaactgccaagacgaccaactccgtcgcagatacagccacaagcaccgccacagagtctatctccagcatctctacccctagcaacgttgctgagaactctgctgtacgcagtactgggcttggagtcatttgccgttgtcgccgttgtcggtctgactgtagctggagctctctagatagatattccagtgtaggagtttatttttacagtcgctgtagacccatagtctcagccttttaatctattaaagcagtcggtttgtcatatcggcc

SEQ ID NO: 64499 - DNA, 552 bp, Zea mays
  Clone ID: MRT4577_158822C.1
ttggactcgtgggggcagaggcggttcgtgggtggcaacctcggagggccgagtcttttgagaagttggacaagataggacaaggtacatatagcagcgtttataaagcacgtgatcttgagaacggaaaaattgtggctctgaagaaagttcggtttgccaatatggaccctgagagtgtccgatttatggcaagggaaatccacatcttaagaagacttgatcatccaaatgtcatcaaacttgaaggtttggtgacgtcacgcatgtcaagcagcttgtatcttgtatttgaatacatggagcatgaccttgcaggccttgcagctaccccaggcttaaaattctcagaacctcaggtcaagtgttacatgcaacagctactctctggacttgaccattgtcataaccgtggtgttttgcatcgggatataaagggtgcaaatctcctacttgacaataatggcattcttaaagtagcagattttggtctagctacattctttaatcccaaccagaacaacatttgacaagtcgcgtagttacattgtg

SEQ ID NO: 64500 - DNA, 359 bp, Zea mays
  unsure (1)..(359): unsure at all n locations
  Clone ID: MRT4577_158823C.1
ccctgcagaccgtccgaattcccggtcacccaccgtcgacaccataactcactacctacacatcttacaagcatagccaataccaccgattagacagggacaagcccgacctcgagagannnnnnnacgagtggtcattctccagacccgcatgccgggggcgctgaaggaccgtgtgtacatgtactacggagataacgctgcagtcattgacaatgccaagggtgccatgaaaggctgtggaatcactcgacctatcgtcacggactgtgccgacattggggctacgatcgctagcgcaaaagatgtcatcgtctcagaccttgttggaatggacatagacttgcttatgaccatct

SEQ ID NO: 64501 - DNA, 138 bp, Zea mays
  unsure (1)..(138): unsure at all n locations
  Clone ID: MRT4577_158824C.1
cgctcaagaactcggcgaggattgaaangnncnttggcagggggtgtaggggggtagtatcacacgagaaccttgggggacacccggatgttgagaaatggctattgctgaggaatgtgagtggaggtacatggcttt

SEQ ID NO: 64502 - DNA, 377 bp, Zea mays
  Clone ID: MRT4577_158825C.1
gccccaaacccaatcagggaactacttgtcggaatctacatatgtatgttatttctaagatttggaccctagaatcgaccaccttacctagccagtccagtctccaaccagattacatctgtgtatgaatctgtaccctgatcaaacgtggcagcctatatggttgtgggaatgaaatagaaaaaaaaagggtaaacaggagcattttctcaacctttctagcgtctattgttactgtccaagtcttaccgaatccgaggttatgttctgctcttgaactttctatgtgacttgaggtcgactacaatgacggtaatgttgtccttgctccccttctggagggccagcttcgacaaatattcagcagctgcttgagc

SEQ ID NO: 64503 - DNA, 516 bp, Zea mays
  Clone ID: MRT4577_158826C.1
gtgttttttttttttttttttttttttttttttttttttttttttttttttttttttttttttttaaacccaatcagggaactacttgggggaatctacatatgtatgttatttctaagatttggaccctaaaatcgaccaccttaccgggggggggggggctccaaccaaattacatctgggtatgaatctggaccctgatcaaacggggcagcctatatgggtgggggaaagaaaaagaaaaaaaaggggaaacaggagcattttctcaaccttcctagcgtttattggtactggccaagtcttaccgaatccgggggtatgttctgctcttgaactttttatgggacttgagggcgactacaatgacgggaatggtggccttgctccccttctggagggccagcttcgacaaatattcagcagctggttgagctggttcatttgccgaatcaccgcttttttgggctgaccctgagtcgtcgccgttctttttgtgccacagaaatatgcgct

SEQ ID NO: 64504 - DNA, 212 bp, Zea mays
  Clone ID: MRT4577_158827C.1
ggttctcccccgaagaagaaccaccaccattggcttttcgtagaggaggacgacgaacagagcaacttcagtgtcgaatcgaaggtgatcacgttcatgggaacctcccccaaattccaccttctgccacaatcgaaggccaaagacgcacacaccaaacgcaactgcaactgcacgagcacgccacagcagaaaccaacagttccacacaa

SEQ ID NO: 64505 - DNA, 263 bp, Zea mays
  unsure (1)..(263): unsure at all n locations
  Clone ID: MRT4577_158828C.1
agggttctttgtaagtcttaaagcgataggcaccacccacngcccccagtaaggaaacatcattcgctccaattacaacatgttttccaaggaatattcagctgatacgtgccgggtggattctaatgccaattagcttgtaacactattaacccttccaagaaaccaataattataatgacaccacctaaagaacgttcttgttccaggttggaatcaaaagctcaacatttaatcatttctctggtaccccaacattattt

SEQ ID NO: 64506 - DNA, 570 bp, Zea mays
  Clone ID: MRT4577_158829C.1
atccaccagacgccagactcagtcctggacacagtggatgagctctgcactctgcttcatcttcagctgagagtccttggctgctagcatcacgcatgcacatacacacacactacaccgcttagataggactgcactagtgggcttcattgatgatcatgaaccgcactgccgctcacgaagaggaggttgcactgtgaccggcggctacgacgcggagaatccacaacgaggagaccggtgctccggtggtggagaccgatgctggagctattgacgagccggagcccatcgaagacgtgactgactacaaggaagtagaggcttaggccgaggccgacgccgaagccgtatgtgatgctgacccgaccgaggaagagcccgaggtgcgctttgccggctatagagacggcagcctatgtagcagagccgtaggccgccttgccggcagcagacacggaggctgatgctgccccgcacgaggctgctgagccggagatagtcgccgagaccaaagaggtggcggctgtggaggctaacgaatgataggaggaggcactgcctgctgat

SEQ ID NO: 64507 - DNA, 198 bp, Zea mays
  Clone ID: MRT4577_15882C.1
gggtgctctctggcctccgggggctgccgagccgctgcgcatgatcggacttggtttggaggagctcgtcccgcggcgcgtcggtctgcaaataggattgcagggcacaaggaattgcctacatagatagcagagaacttacaaaggattgctgcttgaatttcaaaatcctgaagatctttgcttgtgtgaaaggcc

SEQ ID NO: 64508 - DNA, 495 bp, Zea mays
  unsure (1)..(495): unsure at all n locations
  Clone ID: MRT4577_158830C.1
cccacgcgcccggcggaggccgaggtaggtccggcggaactctgccggcgtgaggtcggagaacttagtgccgccccgcaacacgagggcatgttcccgggccctacctcgcagccttcgccgccgccgcccgntgcgagcagcggggtggggtcgaggtgggccggcgacatctgctcgatcttctgcggcagcaaccaggtgcccaggacgccggcagccatcagggggaaggacgcggcattgcagccggaggtgccgagcggtgccggcgcgcacgacggcacatcgtcatccggtgggtccggaagcaactatgggggatccgggctgcccagtgacagcgtccatgtccacaagaggaaggggatgtgtagagacgagtcagatagccggagtgaggatgccgagtgtgaggaggcaaggagaccaaaccctggcggcggcatgggcggaaacgccggactcgtgcagctgaagtccataatctctcag

SEQ ID NO: 64509 - DNA, 267 bp, Zea mays
  Clone ID: MRT4577_158831C.1
tgaaaacaataacgccaaacttaataacccatttgcatagggggggaataaagccttacaacgtaagtggtatcccacccaacgccatgtttttttataaccggccgaaacttaacacgtttggggccactctgggcagtccacaggtttgcaggggcacacaatccctactaccccgggccagtatagggtttagttcttgtcaccctctttgcctgccttacccttgttaaacttaaaacccgacctctttgttattctttttaa

SEQ ID NO: 64510 - DNA, 273 bp, Zea mays
  Clone ID: MRT4577_158832C.1
atgggcaagaacaaggagggtggaagttcgtcgcatcactccgacgacaagcggaagcgcgagccaagtcccccctcggaggactttggtgactccgagtactcggaggaggagttttcctccgagtccgaggggtcgccggtctacgcctctccctcggtgtcgttcgatgactcagacaattcccaggggatcgctgccgaggtgtggacgtacatccaggccatcgagcgctccgggctcgagggctcggatgagtcggagatctcctag

SEQ ID NO: 64511 - DNA, 311 bp, Zea mays
  Clone ID: MRT4577_158833C.1
gggtcgcacagaagagcacattcaccagcaactctaggagctagctgctgctgtatatgcgataataacgtgttttcccccctatggttctgacaaacgatgacaaaacagcgcgcgattagtacacttcagtagccggtcataattcaccggccctcgccgccgctgagctgggagaacaccttgctgtcgacggcgcccacgcccgttacggccgagtcgtcctggtcggccgaggacatgaagctggtcgaccactgcccccagcgcggcacgacgacattctcggggaactgcgcgcccacagggcc

SEQ ID NO: 64512 - DNA, 466 bp, Zea mays
  Clone ID: MRT4577_158834C.1
cttcgattaccccacgcttgcaaccgtctctgacatttacatttccaaagttctaactcctacaccaaacctcttctacctaatcaacaccccataccaaaatgtctgcccccaacgccggtcgccagtctcccgaccccgagcgccagtctggtgctcaagccggtcagatctccgacaacgtcaaccagcagggcgctggacccaaggagggcgccgagaagtccagtgacaatactaaggacaccctgagctcaaaccccgaacacccactcaaggagcacagcgaggaaaccactagcaagaaggtttaaattagtggagatgagaagatcggaagattatgatggatgattggaggaatgtagagactgcataattaacaggcaatgggcagtctgaatatgaaatgaacaatcgaatagaacgataatttatggccaaaaaaaaaaaaaaaaaagcggcc

SEQ ID NO: 64513 - DNA, 269 bp, Zea mays
  Clone ID: MRT4577_158835C.1
ccttggacaggttgcccagctcccaagggctcacgttcttcctcctgccccttttgcacagttttccgacagctcaacacggccatcgccgtatcccagatgtcctcaggccagttctgcctggtccccctcatccaggttctccaggacttctgccacctctagcactacacggtcaagctcctgttcaagctacactcttgtgagtgcgccagggcaacccctggcccgcgaagctgtgtttatatggcttagacattcactgtcag

SEQ ID NO: 64514 - DNA, 142 bp, Zea mays
  Clone ID: MRT4577_158836C.1
cccactcgtacccacgcgtccggagagaccagaaacacctgactatggctcatcttttcgacaagccatccttccggagaccggttactcttgataaagactacatctcaatctcgcatgtcaacacacatctgcccatcct

SEQ ID NO: 64515 - DNA, 113 bp, Zea mays
  Clone ID: MRT4577_158837C.1
tgaaaaagatatatgcaaagtatggcatggcataccgagctccactatggtaaaacaaccactagctcactcacagtcacatcctgcctgtctgccgacgctgacactacaca

SEQ ID NO: 64516 - DNA, 163 bp, Zea mays
  Clone ID: MRT4577_158838C.1
tcgagacgatcgcgcgcatagtgacagacccggtagaatcaactgttggggacaagatggggcgggggttgacctaccggaagcgcatatctactccaccaaatctaaccatacccacctcaataagacacctggtgggaaacttgtgtaccagtacaccaat

SEQ ID NO: 64517 - DNA, 343 bp, Zea mays
  Clone ID: MRT4577_158839C.1
acgctagttctagctcgcgatctagaactagttttagatcgcgatctagaactaaggcgcgagcgcggatggcacgcccaagaggcggacctacgactagatccatagcaaaacgttcatggaggtgaagggcacggtcactgcatatcagtgcctgtccattgtatgttgattgtatgttttcccttttaggttgttttggtctaaattgaataaatatgtcttgtagctgctttatttattttttatattgtttttatcgccaagaacgccccgcccgagttccaaaagaccaagctcatgaaccggctcacgtacacgctggacgagatcgagggcccgc

SEQ ID NO: 64518 - DNA, 1267 bp, Zea mays
  Clone ID: MRT4577_15883C.1
ttataattttctaagagtgccatcttcatgcaggttgaattcatcaagcaacattgtccatgcagcctcaaactctatttcagtcaatggatgatgtactatagactggaattttgtcttaaaatccgctccagcataacgtgcatacaactcatttagaaatggcatgtacctattttgcacatgccatagacacaacatgtggactgtgtttgggaagacccgatgtaatgccactggcattgcagggtcttgatctgtcaacattactcttggtccttcagtccccatgcatgtcttgaatgcattaaacacccactcgaatgtttcaatagtttcatctcccaacaatgagaacccaaacactgtgcattgtaggtggtggtttgcaccaacaaacattcctaggggttttccatacaaattagtcttatgagttgtatcaaaggtaactgcatccccaaaatcaacatactctccttgctgactagcatgagaccaaaaaatactcaatatttttccttcgttgtctagctggaagtcagagaaaaattgtggattatccctttctgtatttctaccctccattgaacaatttaaccacttacagttcttcctctccctatactttttaagtggaaaaccaacctcatatgcgtaacaactataaaaattgtatgcctcatcgacatttccaaatggcataccgatcctacgcaccatgcttggatcaatactttcaggatggctccgtaggatattaggtgtatcttgttcatgatcactaatggtcctcataggcaccatttgatttgctgctcccattgtctcaatttccattgtattgtcatcgttgacccccgacgctcgaaattctgcaggtggtgttacaatatgtctccgtggactcgtagcacagtttggagatttaagtcttagggtgagcgctgttggtagaccactctctgtgcatgatgcagaagaaacatcaccagtttcttcttctccaccgtcaaccatgggtcaacaatgcagcgacgccgccagttccctttcttatatgcaccgctctgtctagtctcgggtagccatgtttacgctattttttgtggtcatttacggtctataaagtttgttcctgcatgcacggagatattatcggagacgtgacaactacccgatagattttatctcggtttgttgaaacaattttgtatttactcaactaaatgaaaccagttacgcaaaaaaaaaaaaaaaccccaag

SEQ ID NO: 64519 - DNA, 495 bp, Zea mays
  unsure (1)..(495): unsure at all n locations
  Clone ID: MRT4577_158840C.1
cctacctgaacgcctctactcctacacccccactgcctggccgcccaaattgtgacggacatgaacgaaaccctcggctacattcgacctggtactacgcaccaggtgcatggaggactgccatanaccagactctctgtcttagacaagagctaccatctgcctcccgggaagagcacacaccatcggtgctgaacacttccgttgtcctgaaagacctgttccatccatccttgactgagatagacgctgctgctatccacgaaaccacctacacctacatcatgaactgcgacggggatattaggaaggatctctatgggctcatcggaccatccagaggcaccactatgatccctggccttgctgacaggatgagcaaggacatcaccgccctggctcccaacatcacgaacatcaacgtgctagctcctacataaaggatgtacagacgctggatcgaaggatccatcctggcatcactcagcacctacc

SEQ ID NO: 64520 - DNA, 557 bp, Zea mays
  unsure (1)..(557): unsure at all n locations
  Clone ID: MRT4577_158841C.1
atgaatggcaaatcactcacgcgccttcagagcgcaccgaggaaggtgacgagcactggtgtccacacagtcaccaaccaaagactttttttttagccagggaccttgcatcccactaatgcgcgcttctggactatacaggctagctcagggccacatggttaagtaccttactaccacatgatctggaccgatcaaagatagatgattacaacactctgacctatattgatgacctgaatgccgaccacataactatcagggttggtcaaacctacatgtgtgacatctcaagcanagtaaggtctatacacctgattacctcctgatgggtaacaataaggctgctaacaaactgtcacgcgactgccattcctttgatgtctcctacaaaataggcatcatctcagttaataggtaactggattacacatctatgtcctactatttctgagcataccaacacatgtttacctgttactaataattgggcgtgctatatcttatggttggagagcaactaatgcttggtgtccttcaactctacatatgcctgt

SEQ ID NO: 64521 - DNA, 1943 bp, Zea mays
  Clone ID: MRT4577_158842C.1
actcctatgggcgattgggtcccccggcgccggccggggtctcgcatacccggttcaagcatccgatctgcgaatctcacgttcatcacaaacgtacacacaaaccatccacaaccgtcaaaatgggtaaggaggagaagactcaccttaacgtcgtcgtcatcggccacgtcgactctggcaagtcgaccactaccggtcacttgatctaccagtgcggtggtatcgacaagcgaaccatcgagaagttcgagaaggaagccgccgagctcggtaagggttccttcaagtacgcctgggttcttgacaagctcaaagccgagcgtgagcgtggtatcaccattgatatcgccctctggaagttcgagactcctcgctactatgtcaccgtcattgacgctcccggtcaccgtgatttcatcaagaacatgatcactggtacttcccaggccgattgcgccattctcatcattgccgccggtactggtgagttcgaggctggtatctccaaggatggccagacccgtgagcacgctctccttgcctacacccttggtgtcaagaacctcattgttgccatcaacaagatggacaccaccaagtggtctgaggcccgttaccaggagatcatcaaggagacctcttctttcatcaagaaggtcggctacaaccccaaggctgtcgctttcgtccccatctccggtttcaacggtgacaacatgcttactgcctccaccaactgcccctggtacaagggttgggagcgtgagatcaagtctggcaagctctccggaaagaccctccttgaggccattgactccatcgagccccccaagcgtcccaacgacaagcccctccgacttcccctccaggatgtctacaagattggcggtattggaacggttcctgtcggccgtatcgagactggtatcatcaagcccggtatggtcgttaccttcgctccttccaacgtcaccactgaagtcaagtccgttgagatgcaccacgagcagctcactgagggacagcccggtgacaacgttggtttcaacgtgaagaacgtttccgtcaaggacatccgacgtggtaacgtcgctggtgactccaagaacgacccccccatgggtgccgcttctttcaccgcccaggtcatcgtcctcaaccaccccggtcaggtcggtgctggttacgctcccgtcctcgattgccacactgcccacattgcctgcaagttcgccgagatccaggagaagatcgaccgccgaaccggtaaggctactgaggccgcccccaagttcatcaagtctggtgactccgccatcgtcaagatggttccctccaagcccatgtgtgttgaggctttcaccgactaccctcctctgggtcgtttcgccgtccgtgacatgcgacagaccgtcgccgtcggtgtcatcaaggccgtcgagaagtccactggcgctgctggcaaggtcaccaagtccgctgccaaggctggtaagaaataagcgcattatttctgaaatgacaaccttcggtgggatcttacgactctggtctcacgcccaagggctgatgtactcgcttctacgacgaaatgatcatgttggcatgagcactcggcttatgtctgggggcacgagatgaggcgaaaataaaagcctgggatcttgtgcaaatcaaaaataggaatagagagtctagaagtgattcgtgcaaaaaaaaaaaaaaaaaacccgcggccgccttcccaaaagctcgtcttttctttgcttcggtgctcttctcaaggtcacatgagttgagcatttcactaacgataccacctttctgctgtcacgaccttgcatgaaacatgatggcgaggcagttgcttcgagggatctgggtttatggcttagattattagtttgcagcagcaattcaaaactcattgttgattgcac

SEQ ID NO: 64522 - DNA, 484 bp, Zea mays
  Clone ID: MRT4577_158843C.1
gtgtgttcttgggaaaacccaggggtttgtgggggtgtttaccccacggggcggggcgggaccgagaatcgccaacaaaaagagggggaaccctttagctaaaggcttgggaactttttggggggggagccgaaaagctaaaaaccccttgggggggggggaggggcaagggcaaggggagggggaacccaaggggagaacccccccagggggccaaacccggaaaacctggaaccttgccggggggcacccggggaaagggggggtcccaccaaccggacccctgacacattaacggggctttgcaaggttggcaggggcataaaggtgatcgaggaaaaaaagccccgacatggggggcgcgctgcaaaaaaaaaaacgcgggggttcccataacttggccccaaactttgttggggggaaccgggaaaaccctggcccctggggggggggggacagggccttgggcacccttttccttttc

SEQ ID NO: 64523 - DNA, 355 bp, Zea mays
  Clone ID: MRT4577_158844C.1
cgttcgggtttgcacaatctacttcacttttgctctagtttccatgttgctggggttgactgcgtcttcgttccccgactctgctctctgtgctaagacagtttcgagcaatggagctttgcaggcctttttgtttttaaacatagttatgcacttgcacaatatagagttctatccagaatttttccacctaggagtctcatggatgctcacatccttggtcttttgtatctactgggcaatgtaagttatcttagctttatgtcatttgatcacaaaactatatcgagctaaagagtttgttggaatggtttgcagttgcaatgtaagttttaaaggtatcttagttttatgc

SEQ ID NO: 64524 - DNA, 399 bp, Zea mays
  Clone ID: MRT4577_158845C.1
atcaggccaaaaggacggagaccagcttaggcgaaacgcagacgtagtggagatcctgaggaagaccaggttcccgcacgttcacggagcaggtgaagagaagtcaccggagacgatcctggatcacgatcgtgttatttggcttggggacctgaactaccggatcgcgctttcctaccgctcggtgaaggctttggttgagatgcacaactggaagcagttgctggaaaaggaccagcttcgcatagagcaaaggtttggccgggtcttcgcgggctggagagaagggaggatctacttcccgctcacctacaagtactcgtacaacttcgacaggtacgccggcgacgacatgcggccaaacgagaagcggatgacacccgcatggtgtgatcggat

SEQ ID NO: 64525 - DNA, 141 bp, Zea mays
  Clone ID: MRT4577_158846C.1
ccggccggaattcgggctctactggcgctactttgactcaccctaaactagtttagggtcttacttagctctactagccggccactccttctgtagcatagccttctatcgccaccaatgccactgccgaggtccaaagcc

SEQ ID NO: 64526 - DNA, 646 bp, Zea mays
  Clone ID: MRT4577_158847C.1
ggccgcaaattttttttttttttttttggagataaaagtcacaatataatcagagtacttattacatagcgaaagtcttacaaaataaaagataaatataaaacaaactaaggatcatccttggcgcaagtcaactgggagacgccacctagatcgaatcgaactcctcgatacgtgactcctctttaaccacctgttcttctccatgaatcgcgctgtgccaatacatgtccatggcagatggcggcccggcaatggtgaagtgttggctgcggcggcgccacccgagcctcggcgaaggattccgagaagtccggcaaggagtcagggcgactacctaacccggcgctgttggtggagttctgttcaaccgtccggtggcttgccagagctctccacggccatgggagcggcggcttggcagcagcaccgcaccccggcgaggcatccaccgccccccagctgccggtcgagtcggcagcggcgcccaggcgagggagggacgagccggggaggacgacaatgagctacaagcaggcagggcaagcgtagggcgcaatccaggggagacgcgcgcaaccggagttaagcagagggcaggggcatgacggaggagctttccatcccggccggttttcccggccgg

SEQ ID NO: 64527 - DNA, 214 bp, Zea mays
  Clone ID: MRT4577_158848C.1
attcggctcgagcccgatcccaattttttttatacacacttggtccatccttaatggatggttttaaacaaaccaggcgtgggaccaaaatgcattaaacaatcgtatgtgcgcctaaaaacgaaaaaactcctcctctttactgaattactcaagaaatacttcgggaagaccaggaaatccctacaaacacccacttgtttactacaagtta

SEQ ID NO: 64528 - DNA, 276 bp, Zea mays
  Clone ID: MRT4577_158849C.1
atcttttttttcaccgtcgtctcttcttgtggaagggtctgaactaaatgagctgcggtccaacctgcacttcacctgctctacaacatcttccccactcccatcttctcaattatccacaccttcttcatccttttcatcactccccttagatctatatttttcccgcctttttctctttagacgtctcctcactcccccagttctacactttacatatttgctcatgatgattaatcttacctgcctctcttctttgcattcaatctaatcatc

SEQ ID NO: 64529 - DNA, 319 bp, Zea mays
  Clone ID: MRT4577_15884C.1
gggggaccacataagcattattatcaattatataataatattttacactaaactccattgcactttgccggatttatggtacaaaacattattagttagactttcatgactcgggggaccccaaaatgatccccttttaccactaataaatttttaaaaaaatcttttttggacccaaccgtacatggttggacctaagaaaaagacccaccccttccttattttcatttttcaaacttttttgttacggtcccccaaaagggccaagggtgccacccaacaggggtggggggcccaccaagtcaaaatatttttattc

SEQ ID NO: 64530 - DNA, 445 bp, Zea mays
  Clone ID: MRT4577_158850C.1
gcgacacgcggcccctagctcacatgcattctaatacttttattgttgcaaatcaaaccctaccttctgaccgtgctgcaaaaacgaatgaactcgatgcgatatccacgccactcggtgacatcgcaacagagagcgactctgacagactcgagccttgagcaggtgaagcaatagaatgctttctaatcgagttatcttaacttggctacattatagccttaaaaagcttatgagaatgtgctcaagcttgcggaagaacaacataacggagaaacatgctgcgtcgcagaagattctgatcgtggaacaacaattggatgcgaaccaaaaccttgaattcgagatacagcacgtgaacggcagactcttagtgatcgagcatatgccacttgatgaagacttacctgtatagaataaactaaatgtgctgagcgacgcattg

SEQ ID NO: 64531 - DNA, 1190 bp, Zea mays
  Clone ID: MRT4577_158851C.1
ccggggtgacacgccagtccgcgtcggttacggcgtgcggcaacgaacaatgaatccatgatagcgcagcagcgctcgtgctcgcgccccagttccactccgatcgaccgaaccccaacaaaatcctcgtccttcgcgtcatctcgacgccacaactctccgagccccgctccgcaatagacccggaggcgccgccgccaaaacccaagctaggagtgggagattccgatcctccgcgcgcgcgcgcgcaccatggagccggtgccccggaagcgcaagggcgcgcccccggtgtgctccgccgccaggtccctccaagatttggcctcccgcaagcgcgcctgccgcggctccgtgccgcagcaatcccactgcaccgacgcccccgcccccgctgtggtgatgacggcccccgcggcgagcggcgcgtcggcgtcagcgggggtcctcccggggcgcgggctcaagcggaaggtgggctgcatcgacaacgccacgcggatcgggcggcggaagcggctggagaacgagtacgacctcggcgaggagatcgggcacggcaagttcggctccgtccgcgtctgccgccccaaggcccggacccggggcgaggaggagttcgcctgcaaggcgctgccgaagaacggcggtgacacggcccaccgcgaggtggagatcatgcagcacctctcgggccacccgggcgtcgtcacgctcagggccgtctttgaagacaccgacgccttctacctcgtcatggagctctgccacggcggacggctcctcgatgaggtggccagggagggtaaactctcagagcgccgcgccgccaatgtgatcaaggagctcatggcggtcctcaagtactgccacgagatgggcgtcgtgcatagggacgtcaagccggagaatgttctgctcaccaagtctggaaggttgaagcttgcagattttggattggccgtgcgagttgctgatggtcagcaattgactggtgttgctggcagcccggcatatctggcacctgaggttctactaggaaattactcccaaaaggtagatgtatgggctgccggggtggttctgcatgttctgttgatgggcactcttccgttccaaggaaaatctgtcgaagctatctttgatgctataaagactgctgaacttgactttcacagcagtcagtgggc

SEQ ID NO: 64532 - DNA, 2015 bp, Zea mays
  Clone ID: MRT4577_158852C.1
gacacgccagtccgcgtcggttacggcgtgcggcaacgaacaatgaatccatgatagcgcagcagcgctcgtgctcgcgccccagttctccactccgatcgaccgaaccccaacaaaatcctcgtccttcgcgtcatctcgacgccacaactctccgagccccgctccgcaatagacccgtaagacgctgtctcgatccgtccccctacctcccccgccgccgacgctcgactcgatacattggagcaggaggcgccgccgccaaaacccaagctaggagtgggagattccgatcctccgcgcgcgcgcgcgcaccatggagccggtgccccggaagcgcaagggcgcgcccccggtgtgctccgccgccaggtccctccaagatttggcctcccgcaagcgcgcctgccgcggctccgtgccgcagcaatcccactgcaccgacgcccccgcccccgctgtggtgatgacggcccccgcggcgagcggcgcgtcggcgtcagcgggggtcctcccggggcgcgggctcaagcggaaggtgggctgcatcgacaacgccacgcggatcgggcggcggaagcggctggagaacgagtacgacctcggcgaggagatcgggcacggcaagttcggctccgtccgcgtctgccgccccaaggcccggacccggggcgaggaggagttcgcctgcaaggcgctgccgaagaacggcggtgacacggcccaccgcgaggtggagatcatgcagcacctctcgggccacccgggcgtcgtcacgcctcagggccgtctttgaagacaccgacgccttctacctcgtcatggagctctgccacggcggacggctcctcgatgaggtggccagggagggtaaactctcagagcgccgcgccgccaatgtgatcaaggagctcatggcggtcctcaagtactgccacgagatgggcgtcgtgcatagggacgtcaagccggagaatgttctgctcaccaagtctggaaggttgaagcttgcagattttggattggccgtgcgagttgctgatggtgtgtcaagagtcgaagtggtgctaacttggtagttgcagtcgagttgttgtcatctggaggtagttgttacttccacggagttctggatatttgggttcacagcatcaatagattgacatcatgatggtcaggtcagcaattgactggtgttgctggcagcccggcatatctggcacctgaggttctactaggaaattactcccaaaaggtagatgtatgggctgccggggtgcttctgcatgttctgttgatgggcactcttccgttccaaggaaaatctgtcgaagctatctttgatgctataaagactgctgaacttgactttcacagcagtcagtgggcatctgtgtcactgcttgctcgtgatctcattggccgaatgcttaatcgagaggtctcttcaaggcccgatgccgaagatgttctccggcacccctgggtcttattctacactgattgcccgcagaaagctgaattctctaacctatggggtactaacaaaactgcagctcccatgattcatcaggagatagtcaggtttggttactgcgagtcttcatcttcaaaatcctcaagtgacaactctgaagagcgagatgaatgcggtatagttgacgcactggcgacagcaataacacaggtgaggatctcagagcccaagaggagtcggctgttcagcctacccaacgggttgttgccaccaagcaggaacagtctccgaacatgaagaggatgaatccgtgtgtggctttctaacttgacctacctagctcccatccccatgcatgtataaacgagataaacgagctctgtgattttatagatggaaaattttcaccgtggttgatgttttgcgattgctagctcgctgaggctgcaatcctctgtaaatatatcactgttgtcatcgtttctatacatcgatgatcaccgtaattgattcgattatttattttaaaaaaaaaaaa

SEQ ID NO: 64533 - DNA, 353 bp, Zea mays
  Clone ID: MRT4577_158853C.1
aaaaccaaaacttatttatgaggcaaaaattattgggccataccacacaggaaaagggggggcggctaacggcattattacatatatagatagagggggagggatagaggaaatttcccaaatatcaggaaacacaagcagggcggaagggcgggggggaccccacaggggatggggcggaagctgggcaagaggaaccccggccgccaccacccgaggggcgaattacatcagactgcccgccggggaaaggggagccccgctgacacccgaggggggatgaaggcaggaggcgaagaatccaaggagccatgggcgttgcgggggctttaccagacatgagggaggggggg

SEQ ID NO: 64534 - DNA, 293 bp, Zea mays
  Clone ID: MRT4577_158854C.1
atggcagggataaccttgtttgttatgaggttgccatggtaaagacaagtcgacgcataagaagaacttagaagccacgacatgcaagagcccgacaagacgacccaaagacatggccaccatggatcgggggcagcataagccaggcagagcgcctgatatgaagaaagaaaactaagcaaaagtacatgcatacgccagagcgagaagaagaccacgaccgcaacgtacgatacaaggaccaatccagccaaacatgggggaggcatgccatcccatcggggccacggcgg

SEQ ID NO: 64535 - DNA, 564 bp, Zea mays
  Clone ID: MRT4577_158855C.1
tcgctgtcgttcaatatgcgtgcaatgctaatgtgtctgtacggggcggggaaggaagagacacacgcatgtatacgagcgatcggaacccaaggcaccatctaaatggcctcgcgcatcggagtcaattgacccattggatctaaagcggagaagagaactactttgcaggctagctagaggaagtaagtagaggcagaagatggcgaccacgtccggaccgaccgaagaataacatagaggtcgctgttgatgagcgactacggctatggcgcgttagttcaaatggcgatcgggcaccggccagtacaccatactcacggtggactgacaaaaaatagaacgaggtagcttcatgcaaatacacgagctcctatgaggaactgtctgaatacgggaccggacgctgggccggtacgctgtctacctcctagctagtctagttaggtagaccagcacagagaatacatgtagctgctaagcagaggagaaaccgatcaggcgaggccatatagaggatggatgggtggcggataagcgtaacgcgcgcgtattgtttggccg

SEQ ID NO: 64536 - DNA, 436 bp, Zea mays
  Clone ID: MRT4577_158856C.1
gccccgccataactgccgggacgacccacgcctccgaaaacgtggtcgtattctagctgctatcacgttctatcatggggaacattagcagatgttgcgggggcacttattggcgtctattatgtagctggagggaaaatagctgcacaccctcaacttaaaacgcacccaaaggacctgatccaatggcttccccaagaaaacccattttttaagccatataacatacccgagagcatactgaaaatcatcaattatgacacactatagggtgcattgggtatcaagtctcacaataaacgcttacttgttgaagctataacgcatgcttcaagaccatcatcaggtctatcccggtaccaacccctggaatctgtcggtgaagctctattggaccatcttattacgaagcacttaatttttacttataccgacc

SEQ ID NO: 64537 - DNA, 315 bp, Zea mays
  Clone ID: MRT4577_158857C.1
aaaacaaaaaacccggcatataaaaataaaaagggggggggggggggcataaccgggagccctttccaggggaaaaagaaccccaggggccaccttgggttgaaaagggggggggccgttaaaaggattttttttaaacgccgcttttttttttaaaaaaatgggggggggcctttgaatttttggggccaattgctggacggggtaaatgggggctggaaaaggggaacacgaatttgggccccaaattgcgggggtggaaagaaaaaccgccgcccttgggggggaccttaagacccacgggcttggccttgg

SEQ ID NO: 64538 - DNA, 974 bp, Zea mays
  unsure (1)..(974): unsure at all n locations
  Clone ID: MRT4577_158858C.1
cccacgcgtccgcccacgcgtccgcccacgcgtccgtacaatgtcatgttctacttgattgtatgcaacgagttgaggtgaaacctagggatatagtagtacaacagggcggtgaaggtgactgcttctatgtagttggtagtggtgagtatgaagttctggctattcaggaagaaaatggaaaggaaataaccaaggttctgcatgggtatacagttgacaagttatcttcttttggggagctagcactaatgcacaataagccgcttcaggcttcagttcgtgctgtgaccagtggaacattatgggctctaaagagggaggacttccggggtattttgatgtcagaattttcaaacataccatcattgaagttgctccgatctgtacaactgtttacaagatttacagtgcttcaactaagtcaacttgccgagtcacttgttgaagtatcttttgcagatgggcaaataatagtagataagaatgataaattctcttctctgtatatcattcaaagaggtcgtgtgagacttatattggctactgatcaaatgacttcagatacttgggatctcattagtgctgaaacaaagcaggcacaaagtagtcgggaaaatggtaattatgtgcttgatatagatgagggagggcacttcggagagtggtctctcattggtgagactattgctttcactgctattgctgttggtgatgttacttgttctactatcacaaaggagaaatttgactcaattgttgggccttttcctaaactttcgcaagctgattccaagattaaagaatctctggtaactctggagaatgttgcagatggtgatttcccttttaggagggtgaagctctcagatttggaatggaaaatgtgcatatatgctgctgattgcagtgaaattggtcttgtccaagtcaggggctatgagcagatgagaacnttaaaaggttttacatca

SEQ ID NO: 64539 - DNA, 2466 bp, Zea mays
  Clone ID: MRT4577_158859C.1
ccccgaagtgggggcagatcccactagctgtcggaggaaacctagcggaattaggggccaaacccacccgtacgaaataatcagcgctccaagccatgaaaatcacgggttcgattgtttgctctagaaagatctctagagaatgggcaattaggggtccctccatctccatcgcatcggaagacatgggaagagcaagcgcatattgagcgggtactacatgatcatttcctatttaggaagcttactgactcacaatgtcatgttctacttgattgtatgcaacgagttgaggtgaaacctagggatatagtagtacaacagggcggtgaaggtgactccagttctgtagttgttgaccttataaccaagctactcgtggtcgacgaaaacgcgcgccttggaaccagtggtgctgaagctgtgaagaaacacccctggtttgatggcactgattgggagcgaatagcatctgggacttgtgcagcacctgaagaaatcactgagcgcatcaactactgtatagaaactcttaatgaggacttatccgcatctccttccgtgccgattgaagacccagatgatctcactgctccagagtggatccaggattggtgatctcaatagttgcatgactgtccaatgatgaattgttctagttgaggaaaacgtctctagtttttcaccgagcattctcatatcaaatggaagaaggtatacataagagttgatcgaactgacaagttgtacataccaaagattattccttctgtgatcatagatcagaatttgagatgccaagcaacagagactttggtctatgtttgctgcatagttcctggtaagaaggatctggatagtttgttggtgatccatgtaattatatatccaatttgtgcactcccttgctgtttcggaaatggatactggtcgggaggaaggtcaataattatcgttgtgaatacggacatttctttcagcaagctgattccaagattaaagaatctccggtaactctggagaatgttgcagatggtgatttcccttttaggagggtgaagctctcagatttggtacggggaatggaaaatgtgcatatatgctgctgattgcagtgagattggtcttgtccaagtcaggggctatgacaagatgagaactttaaaaaggttttacatcaagagagtacaagatctccataaggaagtacaagtatttgaggaaaaggaccttatgaaaagcttgagcaaatcaacttgcgtgccagaagttctgtctacttgtgctgatcagtcataccttggaatattactgaattgttgcctttgttgctcactggcttcaatacttcatacaccactaaatgagacatctgcaagattctttgcagcctcagttgttgttgctctagaagaacttcatcagaagtccattatctatagaggtgtttcggcagacattcttatgctcgacagatcaggacatctgcagctggtggattttaggtttgcaaagaagttggaaggtcaaaggacatacacaatatgtgggatcgctgactctctggcaccagagattgttcttggtaggggtcatggatttcctgctgactggtgggcacttggagttttgatctatttcatgcttcagtcagacatgccattcgggtcctggagggagagcgagctggaacctattacaaaaattgccaaaggccaccttgttatgccagtgtctttcagtgcagaagttgttgaccttataaccaagctactcgtggtcgacgaaaacgcgcgccttggaaccagtggtgctgaagctgtgaagaaacacccctggtttgatggcactgattgggagcgaatagcatctgggacttgtgcagcacctgaagaaatcactgagcgcatcaactactgtatagaaactcttaatgaggacttgtccgcatctccttccgtgccgattgaagacccagatgatctcactgctccagagtggatccaggattggtgatctcaatagttgcatgactgtccaatgatgaattgttctagttgaggaaaacgtctctagtttttcaccgagcattctcatatcaaatggaagaaggtatacataagagttgatcgaactgacaagttgtacataccaaagattattccttctgtgatcatagatcagaatttgagatgccaagcaacagagactttggtctatgtttgctgcatagttcctggtgagaaggatctggatagtttgttggtgatccatgtacatgaactttggatcttctgtaattatatatccaatttgtgcactcccttgctgtttcggaaatggatactggtcgggaggaaggtcaataattatcgttgtgaatacggacatttctttcataaaaaactgtcaatcgatttgtacaagatcaagttttccaaatataattatgaaggttaccaaaac

SEQ ID NO: 64540 - DNA, 440 bp, Zea mays
  Clone ID: MRT4577_15885C.1
attaggaatagcaccctgagtactagaatgtactcagctagactgacccgtccaaaactaggaaataagaaagtaaaagactccaacgattatgcaaagctatatcaggagttggctctttactttataagggtaacgagagttaatgaaattgttagcaacttaaagggttaccaagttcattataccatttttagcagatcagtatttgtacctattccgctgcagaactagatttgcatctgattctctaagtactcatcttcagttttactataagcctagttgtagctgtaatgaagaatcaagttaaggaagattgttcataattatcacatcaagattaacccatcccctgaccatagttgggagcaacatcatttcttattcctatcatcaagcttatagaaagtgtagttattaatatgatgagataactc

SEQ ID NO: 64541 - DNA, 361 bp, Zea mays
  Clone ID: MRT4577_158860C.1
tcttagcagtggtaacaacgcagagtactttttttcttttttttttttttttttttttgccctttttttttgtttttttctttcttctaggagctcgggaagtctgttggcaggcgtcaccatcgcgcacggcggcgtcctccccaacatccactccgtgctcctgcccaagaaggcggcggagaaggcggccagcgccggctgcccggagcccaagtcccccaagaagggcgcctcgccccccacgaaggcttagaaaggcggggcttccttcgcactgtgtgctgccgcatgctcgggtctagctccgcgggtgggatgcgccctgctctaggttggtgcttgcgccttattgcctgcc

SEQ ID NO: 64542 - DNA, 441 bp, Zea mays
  Clone ID: MRT4577_158861C.1
aaaaaaaaaaaaaaaaaaaaaaaaaaaatttttaaaaaaaaaaaaaaaaaaaaaaaaagagtggattattaaaaaagaaggaaggaaacgcccccccctctttaatttccaaaattccataccccctttctccccacattatatcttttttattttcccccctatttaattttctctccccctttttacacaacctttactcttaaaaccccttattttcccaaatttatatccttttataacatatccctttttccccatttcgttttatccaaaaaacccccacacttttccctcttcaaaaattttccacaccctatttccaattttacaccccccctatcacttctttttaatcccggttattttttttttctcccactatttccccttttacttttcatttccctattaccccccccttttcatatttctcccttc

SEQ ID NO: 64543 - DNA, 285 bp, Zea mays
  Clone ID: MRT4577_158862C.1
gagaactcgaatactacactgctgctcacgagtgacaaaagccatggcagtcatacatggctgcctgcaatttcctcatacctcacacgcaccactgctactgtaccccgacgaggagtgtaacattttccttcagccatgggcaaggagaagactcacatcaacattgtgggcattggccatgtcgactctggcaaggcgaccaccactgtgcacctgatctactagcttggaggtattgacaagcgagtgattgagaggttctagaaagaggctgccgagatg

SEQ ID NO: 64544 - DNA, 419 bp, Zea mays
  Clone ID: MRT4577_158863C.1
cattgggtacctcgaggccggccgggatagcatctcaagccaccctctaacttaagtctcggtaaccacaagtgctataaagaaggccgccgcaatgaggagctaccaccatggtcctctcttcacgctgttcgcacagaacggcttgatcttgccccagttatatttccttcagggaaggccgggtgactatgagtaagactcgcggtgaatgtcaagccagacgtctgtctgttcgagaggacctgccaccccggccgaccgtgatgctggacctgagaggccattagtccttgcgagggactaagctacctgaaccaggacttcctgggcgactacatgttggacaccgagttgctgtgatttcacatggacacattctccatgaacccggagctggaagtgttcatactcccact

SEQ ID NO: 64545 - DNA, 287 bp, Zea mays
  unsure (1)..(287): unsure at all n locations
  Clone ID: MRT4577_158864C.1
acccacgcgtccagtcccttcctcttccgttccatcttttcttccccgcatcctcntcgagaagtgcacttttcatacgcgtcgagcaccattaaccaggtcatgcaccggtctctatggcgtccgccgacgcactcttggcaagaattacctcctccatccgctatatacgcgacttcaccaagccagggatcataatccaggacattacgacacttctgctcgaccccaaaacgttccgtaacaccatcaacctcttctttgagccgttcaaggaccaatgtatc

SEQ ID NO: 64546 - DNA, 926 bp, Zea mays
  Clone ID: MRT4577_158865C.1
accctcctcctcccgcttgccgcggccactgtcctcgtcgcctccaccaggttcctcttcgccgccgtcggcgcgcgctggcggccggccgacaccggcctccccgtcccgcccgacgccttccccacggccgtgaccattgctttacccaacgccaccacaggcaaagagctctcatttcttgacgagaacggccgcccggacgacccctcctccgcctcagcatccggcgccaccgccgtcagatgcgatccccgcgccgccgccgtcagggtcttcatgtacgacgtgccgcccgagttccacttcggcctcctcggctggtccccgccgtcccctgcctccgtctggccagacgtcacggacggctccctgccgccgccgcgctaccctggggggctcaaccagcagcacagcgttgagtactggctcacgctcgacctcctctcctcctccttctcgcccccctgcggccgccactccgcagtgcgtgtcaccgacccccgcgacgccgacctcgtcttcgtccccttcttcgcgtccctcagctacaaccgccactcccggcccttgccgcccgagaaggtcggcagggacaaggcactccaggagaagctggtggggtacctcacggcgcggccggaatggaggaggttcggcggagccgaccacgtcatcgtggcgcaccaccccaacagcttgctgcacgcccgggcggcgttgtcccccgcagtgttcgtgctgtcagacttcgggaggtacccaccgagggtggccagcttggagaaggatgtcattgcgccatacaagcacatggccaagacgttcgtcaatgactacggcacggtgttcgatgacccggatgaccctcgttatacttccggggatcaatttacaggcagtacggatggggcttcgacaggagc

SEQ ID NO: 64547 - DNA, 494 bp, Zea mays
  Clone ID: MRT4577_158866C.1
aacaatggcgaccaagaggttgtccctccttatgctccttggtcctcctgcatgtgttgctgacgcgacaatcgcaccttagtgctcacaggctcctatagcttgccttcttcccccatcaccttccatcattgaggggggggggggtgtcaaaacccagctcttcagccctattggctgcagcaagcaatcgcagccagcaacatacccttatcacccttggtggctcaacactcgccagccctctctccggtgcagcccttgggccacaccatcagggcacaccggcatgccggacctcgagctacctgggatcaaccaacctactctggccaacctttgtccctactctcaccatcagctctgtcttgcatactaccaactggttacactgcaaccctggtgcttgtttgtgccaacgcctatttccattcacccaggctaactgctgcctactcttacaaacaacaactatttccatttaccccattggt

SEQ ID NO: 64548 - DNA, 671 bp, Zea mays
  unsure (1)..(671): unsure at all n locations
  Clone ID: MRT4577_158867C.1
aatcgatgtgaatgagtttcaagatattaaatcaggctactccattactcttgcattctcttcntaatccatattttgaagatacaaagcttacaaaaacatgttcgttcagtgatgatgggaaaataactgtgaaggccaccaccattaattggaaggatggaatggatattgcaaatggaaaggcatacatggagaatggggagaaacgactattgattgatgagagtttcttcacttggttcaatgatgcaaagaacaaaagtttttctgatggagtgatggatgaggtggcagatgttatcaaggaagaattgtggcctaatcctttgaagtattttaacaatgaggctgaagatgaatttgaagatgacaaggatgaagagggatttgatgaagatgacgatgatgaagatgaagaagaggaggaagatgatgaggagtgaagccttctttcatgctgaatttcaattggcttcgacaactcccgtgcatgtagagtggagatcccggttctcctggggactgaaaagcaaggtgtccccnnttttgtggtgttttgttgcttgacttagctggatctgtaggattctaagcttgatctgtgggaaacttgttttgatctgctcatacatttggagtcctgcagattcccatatgtggcacttcaa

SEQ ID NO: 64549 - DNA, 404 bp, Zea mays
  unsure (1)..(404): unsure at all n locations
  Clone ID: MRT4577_158868C.1
ccacgcgtccggtagatcatggaaaagagcaacttcaagttgttatctgacgaagagtacgaggtggcacagtctggtcagtatcttctaaacctcccaatcaaggttgatgaatccaaggtagacagcaagttattgacaaagtactttatggagcacccacatgacaatctaccagcatttgctaacaagtatattatcttccgtcggggcattgggattgatcggacaactgactacttcttcatggagaaagtggatgtcatcatatcccgagcatggaggtcattgcttcgagtcacaaggatcgatagactgttctcaaagaaacaaatactgccaagaaaggacacaaagaacactgatggaataaatgatgatgnanaagagccagacctctatgt

SEQ ID NO: 64550 - DNA, 725 bp, Zea mays
  unsure (1)..(725): unsure at all n locations
  Clone ID: MRT4577_158869C.1
aggtacgttagattggatattgagttttgccctatggttatagtctcccaccctacttataatatacactaggaacaaaatcgtttaattggtatctgatcctccttggtactaattccctgtgcatgtacttatgagaatgttgagtgaagtgataagtaggtgtatagctatttaaacatcaaagatctgaagatacttgtatgtctccatatttggtctgctaaattattcttttgagtggggatggaacatggttttgctttgtttatattctttcattcgagatgtaaaacttccaagatgcttcaatatcttgctctctctctctctctcttatcgaacgcacaggaggactgcgtatcttttatatatcagagaggaagaaacgggtcaagtctcaagtacacaatcttttatatattagagaggaagaaacaggataagtcccaagtacacagagaaccctgctacagggccaaagcatcctgatataaacctattaaagatgaaaaatgaaactcaacccaaccctcctaagatcatcctcaaccatttgcaggtgacgagccctcaccaaaacccagcagctgagctcttgaagaaagctttgctgcaccttcccagggcccggntgatccccatcaaacacacacctgttgcgctgaagccatatgcaccaagcacccaggatgatgggcgctgttatgcctttccttttatcc

SEQ ID NO: 64551 - DNA, 831 bp, Zea mays
  Clone ID: MRT4577_15886C.1
gcggccggccgacccataatattttgaacattcagaaacacacctagcgaagcgcactagcaacgacctaacaacaatggctaccaagatattatccctccttgcgcttcttgccctttttgtgagcgcaacaaatgcgttcattattccacaatattagttatactcttaatgtcacgatgtatatgtttgattaaattgtttaatagatataatcaaagataaataacttgcatggctccgtaggatattaggtgtatcttgttcatgatcactaatggtcctcataggcaccatttgatttgctgctcccattgtctcaatttccattgtattgtcatcgttgacccccgacgctcgaaattctgcaggtggtgttacaatatgtctccgtggactcgtagcacagtttggagatttaagtcttagggtgagcgctgttggtagaccactgtatgtgtctgcacgacgcgccaccatatttgactttttattttataaaccgatgtatttatacaaatattaatgtacctgatgcagctctgtgcatgaaaaaaaaaaaaaaagaccactatcttcttctccaccgtcaaccatgggtcaacaatgcagcgacgccgccagttccctttcttatatgcaccgctctgtctagtctcgggtagccatgtttacgctattttttgtggtcatttacggtctataaagtttgttcctgcatgcatggagatattatcggagacgtgacaactacccgatagattttatctcggtttgttgaaacaattttgtatttactcaactaaatgaaaccagttacgcattttctgt

SEQ ID NO: 64552 - DNA, 455 bp, Zea mays
  Clone ID: MRT4577_158870C.1
tcgacccaggcgtacccaggctcctggggctcaggtgaggagaacaagatacagtgcaccgaatcagaagcctggggagctatttatggacatggacaagcacaccaatacatgtgacatgcctgatatgcttgtcgactacattaaggaactgctcaaccaggttaaggtaagcaatacagtatgttctatgcagatgagcaccttgtcaggccgctgtactggaacctaggtgtcttacttagccggctaacaaattgttaggtgggctgatccaactaatgagctctataggctccaaacagggccttatttagaaagacaaccctccctaagcggagggtctagaaccaaactatacttacttgtcagcccttcaactgaatggagaaagtcaactaccgggctcttgtaaacttatctgaaataagcctctaaaacagactttgacagtg

SEQ ID NO: 64553 - DNA, 230 bp, Zea mays
  Clone ID: MRT4577_158871C.1
gacaaacttacccccacgaatttttcttactcttatccccatgacaaaatgccagactctcaagtacgtcatgctgtcaacgtccccgaaaagaattaccctactcgagttgcatcctgccctcaaatcaaaaaagctcgctccaattattgatatttatgaggatcaccgccgcaagagccaatacctgctcgagctgtaggccactgtccacaggattcagacataca

SEQ ID NO: 64554 - DNA, 313 bp, Zea mays
  Clone ID: MRT4577_158872C.1
aagctcggaattcggctcgagagtaaatatagccggctctaattttaatcacctcaatactcaccacggaggggggctttttggacatcaagagtgctatctgccatgagatccgccacctactcattcatatgctgcaacagataactctgaacacaacactggagatgttcttgtacacacgtcacacatggtcacaacattatgcccgcacccctgtcaatgtctacggccaagatgcgcacttggggactgcggacggccatctggagcgacagaagactatcgagactactgacacccttaccaagct

SEQ ID NO: 64555 - DNA, 332 bp, Zea mays
  Clone ID: MRT4577_158873C.1
aattggccccctggcttgttcccaatggcttgttacaaaaataacagggcttaagattggttaaagcggcttaaaacgtaaaaaaacagatttccggggggataatttccttgaggttggaacagattagatccaaactacctcaccccaggattaacttttaaaaaatggttaccggttttaactaaaagcccgggggcgaaattttggagaaattctaacattgcatgtttgggttgggcgattggccaaaccagttggggcgtccttgttttgccgtttgggcaaactatttttttaaaggggccgcctttagtcctaaggggggggaa

SEQ ID NO: 64556 - DNA, 605 bp, Zea mays
  Clone ID: MRT4577_158874C.1
tcgaggccggccgggatccactccacaagggagagacatatctgcatctttgagatctggactctgcagtctggatgactgagagccagacggtctctcgtaccacatgctgcacagattcccgaggcccacgtatttgagagagacgccccgaattccggagaccagtgatcccccgccaggaactaacgcgcatctgcagggacctcctggtcgagttcttctgatgatacctgctgatcggatccgcccttgctcactcaactacctcgccataatcaccacccagataatcccctatgagtggaccatctttacatgctgtaaagatccaggaaggcctcccggcgagaatgggtagttttcttgaacttctcatatgaggaaaggatcttgaattataatgaccgcggcaaagcacaattgaagggcattatattgatcacacgccatctgtggagatcgtgcatattgctgtactattggagtctactacaacgctgaataggagcgcttccattgtacaccactttctgggttccacagatgactagctggctttctcgcgttcctgaagtaactcttacaaatcttgaatttccgat

SEQ ID NO: 64557 - DNA, 786 bp, Zea mays
  Clone ID: MRT4577_158875C.1
attgggacctcgagccggcgggatgcagaccctatagatccggccagatccccacatctgtaactatctgtgcgaatggggtactaggatgagatggaggtggaggtgaagtccgcggctgatgatgtgtgggcgtctgtgcgtgactctatcgaggtggtgcccaagagcttgccctatcagtaccagagcctcaagaccggcgagtccgacagttagtggcccaggaccggcacgcctcgtccgtacaccgaggcggcgccgatgctgactctctccgaggatacgattgcacacggagtcacacactcacaacaaggggcacgcacgtagagagcagctgggaccacgattgtgagggaacttctagcaagaaacttctagatctcactgataccgagactccggcctagggtaggatgctgcatgccgtaagccgtatgcagctgctgcatgtggttctactcatagccccatgccaggtgcctgacccgtgcagtcatatctggagaccgacaccaagacttgcaacctattcgacgactacctcctcaggatgtagatggattaaaatctggtaacgcccagcacagtacctatccagacgattaatctcggcgcgacacaccactgagagcaccagatggcgtgtcgtgttctatacgatggcggcgtacctggctttcatggttgctagcgcgctgcaggccctctacatccgccgcttgatcagtaaaaatgtgggatcacacagagtgtacgatagagatctacttcaaaggcgac

SEQ ID NO: 64558 - DNA, 504 bp, Zea mays
  Clone ID: MRT4577_158876C.1
ggcttggaacctttgggctgatttatgtgcttgcttatgtgcttgtttatgtgcttgtttatgtgcttgcttatgtgcttgacggataatctcccagggtgtccggcgcacctgtatagaggaaaactaattctataaagactgaaagctgcttatataaggagaggttctcctgagcactcgacgatcgccttctatctccaaagaaccccgaccattctccccatgccgattccgaagtactaacggtcgacttaaagacctagaacgtctccggaaactcgaaggagcccgtaattcccccaagagcttctggaagtcacttcataaacgcgaacgaattccagaaaatatcgtagaccatacgacggaccagtaggaacggatgaaacggcccgagccggcctctcgagtaggccgataagcgaggattctcacgaagtcgacgtcaatacccatagagtaaaaggactcacaccagagtagcacagaagggcggacgcg

SEQ ID NO: 64559 - DNA, 387 bp, Zea mays
  Clone ID: MRT4577_158877C.1
aaaaaaaaaaaaaaaaaaaaataaaaaaaaaaaaaactaacactcaaaaaaaaaccaaaaaaacgggcacggggcaaacaaaaaaaaaagaaaataaaataaatatacctaacttgtcttcccttttactgcttccaacctccctcccccgtgcttccccccttctttctcttaacatgtttccccataaatcatttccctgtcctctttttaccaatcggctccactagaaaaacccctgggctcccctaccttaaattcctcacaccccaatcccctttttgccccctcccttattaccctaattacccttcccttttccccctcccatctttttcccatccttattgtttaattgtcccttccctccaactgccctttaatctc

SEQ ID NO: 64560 - DNA, 533 bp, Zea mays
  Clone ID: MRT4577_158878C.1
aaaaaccccaagggtgttacccagctgggggaagaccatgccaaagggtcgccagctcaaattgtgcccaattttcccagattgggtgtaacatccacatccttgggggggggggagatttctgcgcgggggagtttctttttcccaaaatttaaggggggttccccacaacaaggccctaatacgggccctgtgaatagcaagggggccccaaaaaaaatctagaataactttaacccaggttagttttcatcatgggccggtggggggcaaaaacaagggcagttgaatgggttccaaaattttcacaacctttaaaaccaattgcgccgagggaaaactacttctttttttggaaggggaggccatcccagtggaccttccttgttgctttccaccataaccgggaatgaaattatttggaccttggaaaaggcccgcaccacccccaggaattgggagcacagaagcctgcccaattagaacttcaaataaaaagggattaacaaggggggttcttagtttgcctgaaa

SEQ ID NO: 64561 - DNA, 177 bp, Zea mays
  Clone ID: MRT4577_158879C.1
ccacccttcaaatatggccacttccaccggtacttctcttttggcgctgccggaaattcatggtaactatttttttggtgcggctacatcagaatctcataaggcaatttgtcaggttattgggacattcaacttgcatgaggtggtcaacaaggccatctctggttcctgatgggg

SEQ ID NO: 64562 - DNA, 276 bp, Zea mays
  Clone ID: MRT4577_15887C.1
cgagttcctgtggcgtctccgcggcgccgacggtgacgccctactgctcgtctcattgccagttgttgcggcggctgtgttgcctgctagcttatgcaggtggagccgttgctccgtttccaggcgatcttccgtttggtccttcattccttcctgctatgtctgccgtatagtgggcggggggcggggctgttggcttgtcctattgcgtcttttctgacggtgatgtgctggcctgctctattccactccatgcccttattctgttgtcggttg

SEQ ID NO: 64563 - DNA, 327 bp, Zea mays
  Clone ID: MRT4577_158880C.1
ttttacacaatttttttttttttttttttttttttttttttttttttttttttttttgcggtttttgaactttttgagggaggggaacggttttgaccacccctaaaaccctattttttaaaaataaaaaaccctggggcaacccgaaaaaaaaataaaacccctgggcaaatccagatgggtggggggacttgcccccccccacattttggggtcctccgggtaatcctccaggcctttacgtggtttttcagccggcctttaaaaacggcccttccattgttttatcttaaagcccaacacaaaacggtaggaagggggggaggc

SEQ ID NO: 64564 - DNA, 454 bp, Zea mays
  unsure (1)..(454): unsure at all n locations
  Clone ID: MRT4577_158881C.1
cctatctaacggcttcttagccacttttcttaccagccaaaaatacaaacccggtgggccttctactcacggatgatgccgaccaccttacaactacgcacaagagacntgcaaggcaacaataacccgtccaagcaagtgtcatactgacacatcaccgtgcatcagactatcttgttaacggggcgacaatcgccctcagactactgcactagaatgcattctgagcatccgcttaatctgactagagatcactgaaaagcaacattattttactatcggacaaaaccaatccatgatcttgcgcactgaaaccgtaatcctccttgcggtgagagcagcatcgcactcatttagcataatccggtactctaaatcgaccaatacaagantatttccaccagcaccaggcaacatgctgttggatcgtcagtttggtgtcttgttcctgatc

SEQ ID NO: 64565 - DNA, 211 bp, Zea mays
  Clone ID: MRT4577_158882C.1
gccacaccccacgcccccacaccatttcttatcgcctgctccctatcgcccgggtggggttgtccacgctccgggggagtgaatgagcaactttgcttatccatcttcccattgcgttcccacccgcggtccggcggcggtacgtgaccctgacgcctcaacgctagctagctcttcggaacagcaggctgttgttcactacctgagatca

SEQ ID NO: 64566 - DNA, 308 bp, Zea mays
  Clone ID: MRT4577_158883C.1
cttaatgaatgtattgcatagcagcgcacccatgaattgacacatggcgtaggaggcatacccagacaaacggtaagatccccgcgcaaacctaaacggtaatgtaacaagttttacaagacataggtttagttttctgccgtcttaaatgggtgatctattttaaaaagggtaaaaaaggatacgcacaacgttttgcagaaaatggggcgcataaccttcaacctttgacgcgtaaacggggggcaactcatggaaccattcagtcgccaggcaggcgtgggttatagctggaggaccaacagggg

SEQ ID NO: 64567 - DNA, 547 bp, Zea mays
  Clone ID: MRT4577_158884C.1
agaagttggatagaaattagtacacagtcagcaatcagcaggtatggaacatgtttcacatgatgtttagatttgcaggtatctctcttatttggcggttcacggttcaccgccgagttgatttccgatatccccttagctcaccggacactcagttgttgcaagtggcaactacgaaggaggagcagcagaggcagatgcctcagccggagctgcctcgtcatccttgtgcttcaccatgcccgagtcgaccagaatcgggacttccgccgcgagccacggcgcgaggccgaggcacagcgcgtgcgccaggccgaacctcgggcagttcttggcccacagcggcttgaagtgcacggtgaggcagatcttcccaccgcggtacatcttgtgagtcttgccgtcgagggtggggagctcgatctcgggggcgaccagcaggtcccctcccagcgggttccctccgggttggcggcggcgatgcggaaccagtcgttgtccttggccttgttcaccgacgtgtaggcgatgagcgcgcggtactcct

SEQ ID NO: 64568 - DNA, 800 bp, Zea mays
  unsure (1)..(800): unsure at all n locations
  Clone ID: MRT4577_158885C.1
agaagccgcggccgtcacgcgtcagacccacgcagcgcaccttctcttctccgccgcgtcgccgccgaacatcagcatcggatcgatggagggctgggacaaggggaccaagagcacggtgggcgagatcccgctgctgtcaacgcgcgcgggtccgcgagacggcgaggcatggcggcagcggctcaaggaggagtaccgcgcgctcatcgcctacacctcggtgaacaaggccaaggacaacgactggttccgcatcgccgccgccaacccggagggaacccgctgggaggggacctgctggtacgtccacaacctccagttcgacatccccgtcgcctacccccaggtcgcccccgagatcgagctccccccctcgacggcaagacccacaagatgtaccgcggtgggaagatctgcctcaccgtgcacttcaagccgctgtgggccaagaactgcccgaggttcggcctcgcgcacgcgctatgcctcggcctcgcgccgtggctcgcggcggaggtcccgattctggtcgactcgggcatggtgaagcacaaggatgatgaggcggctccggctgaggcatctgcctctgctgctcctccttcgtaggtgccacttgcaacgactgagtgtccggtgagctaagggggatatcggaaatcaactcggcggtgaaccgtgaaccgccaaataagagagatacctgcaaatctaaacatcatgtngaaacatgttccatacctgctgattgctgactgtgtactaatttctatccaacttctaaattgtgttcgcag

SEQ ID NO: 64569 - DNA, 983 bp, Zea mays
  Clone ID: MRT4577_158886C.1
cattgggtacctcgaggccggccgggagccgggcaacccatttgcctgcactagtagacagagttctcagaagccgcggccgtcacgcgtcagacccacgcagcgcaccttctcttctccgccgcgtcgccgccgaacatcagcatcggatcgatggagggctgggacaaggggaccaagagcacggtgggcgagatcccgctgctgtcgacgcgcgcgggtccgcgggacggcgaggcgtggcggcagcggctcaaggaggagtaccgcgcgctcatcgcctacacgtcggtgaacaaggccaaggacaacgactggttccgcatcgccgccgccaacccggagggaacccgctgggaggggacctgctggtacgtccacaacctccgccgctatgagttccctctccagttcgacatgcccgtcgcctacccccaggtcgcccccgagatcgagctccccaccctcgacggcaagactcacaagatgtaccgcggtgggaagatctgcctcaccgtgcacttcaagccgctgtgggccaagaactgcccgaggttcggcctggcgcacgcgctgtgcctcggcctcgcgccgtggctcgcggcggaagtcccgattctggtcgactcgggcatggtgaagcacaaggatgacgaggcggctccggctgaggcatctgcctctgctgctcctccttcgtagttgccacttgcaacaactgagtgtccggtgagctaagggcgatatcggaaatcaactcggcggtgaaccgtgaaccgccaaataagagagatacctgcaaatctaaacatcatgtgaaacatgttccatacctgctgattgctgtctgcgtactaatttctatccaacttctaaattgtgttcgcagatttttatggtacacttgactaataccataaggtaacataattgcttaataaaaaaagtgcagattttctgaaaaaaaaaaaaaaaaagcggcc

SEQ ID NO: 64570 - DNA, 728 bp, Zea mays
  Clone ID: MRT4577_158887C.1
ttgacgcgtgggctggccgacagcggcgagccggcgagtggcgacaggaacacgcgagggcgcccaggccccatgcgcgctgagccgctgacccgctgtgtgtctgctactccgctgcggcgtgcggcgtcccgcaaggccacaagcaaggcagcaccgctgttgctggcatcttggcgttggcgattaggcaattggcatcttcatcttgctgctgctcggtcttgctgctacagtttcttggtgttgatttggcaatttcttgctctgctcgagtgctcggtctcacggtctgcaactgcaagggccaagggccaacggcaataccgcgtacagtgactaaaatatgaagaagcagagagatattgcctctctttttcgcaatcatgctgcaaagaaacagaagtttattgcgtcgagacctcaagaacaagaggaagagaggataaataaagaaattgtgaatccaatgccatctataccgcctccgacaacattttatgatgtcagtgcgtcttgcacatgatccaggtgaaagacaacctatggcagctaccatgctaacgatgcaattcgagagcatatattttgaaggagccggttaaccatatgcacatgaattaccaaaaggaaaattggaatagaagatcgccattttaatgtcgagtgaatgaagaagacatatgtgaactgtatggcgttgaggtagcgcagccagataagtagta

SEQ ID NO: 64571 - DNA, 266 bp, Zea mays
  Clone ID: MRT4577_158888C.1
atgctgttgtcctcctcctctgtcttgctggtgccggctgggtagctgcctccgtcgactcggagtgcccgctgctccggcgggtggttcccggtggagatgaccagacctcgacctgagcacggagtcctagttactgagctgcgttcagggttcggatgtccgtccgggacgccggacagcacccgtaccggctgtaggttctcaaggacaacctgcgcagcgcacaccagtaccatcttctgagcccgtcggacgaccacggc

SEQ ID NO: 64572 - DNA, 294 bp, Zea mays
  Clone ID: MRT4577_158889C.1
tcgtccactcgtatgcagactgccacgctgtggggtggtgttggctggacaagtacactacccaaacaagagcgccctggcctgcatgctgcaggacgcaaggtgcttccaagggcggccgcctgccctcgtgtgattaaacacccttcttctacggaccaacacctgcataccttgacccctacctccaccacatggaaacaaagtatcaaggagcctagtgacgcgtacgtcggagatcattcacaaggaaggagaaacggatgaagaaggcggacaacataagagccttac

SEQ ID NO: 64573 - DNA, 271 bp, Zea mays
  Clone ID: MRT4577_15888C.1
ttttataatggtggtggtaataataaattttttctgtttttgggggccgggtcaatagaaccaccaccgtcccattgactggccaaacctgtgctttgttttgaacgtaacgtgcgagtccaactacgggaaaaaaggcatggtatttggggggtggcttttcaaaaaaaaaaattattataaatatttatattaaggggcggccgttttaggggacccaagcttccgtccccgggcatgctacgtaatagtttttttttggggcaaccta

SEQ ID NO: 64574 - DNA, 148 bp, Zea mays
  Clone ID: MRT4577_158890C.1
gccatttctgacccctcccaggcgtactacaagctgttctgcctcatgtaccgggaacagatgattgcactgtcaactataccctaatggggccccacctctccccaacccccccacccatgcaatgcactgatcccccacaggcttc

SEQ ID NO: 64575 - DNA, 317 bp, Zea mays
  Clone ID: MRT4577_158891C.1
caccgaccctgatggtgctgccctgaccgcacgggctgagatatcctagtggggactgccactctggtgatagggatgctacggcaaaggactacgcatgaattaacacgtgctcctgtagaatctcgtgttgttgaacgcactgtcaaaaacaggtgatccgcaactgtgatctgccttggactgggactgtcgccagcggaataaggcatggattgatgagaactctagataataaaagaagtgccgcctcgtagcttgcagaagccccaatcacaatctataggtgcactgctagatgcgaatacactgatagc

SEQ ID NO: 64576 - DNA, 1479 bp, Zea mays
  unsure (1)..(1479): unsure at all n locations
  Clone ID: MRT4577_158892C.1
cctcgaggccggccgntccggttttcctcctctttccgccgncgngncgncttttccngacaccacagagnaatgcccggcggccgaaagcgtccgaccccgttcgccggtttctccccattcgctcgctccctcatcttctccgccgccacgtcaagctggccaaaatcgcgtcctctccccgacgcttccaccgccgccgaaacccctcgccaagacgacatgccgcggccgccgtccaagcgcgtgaagcgagccgagccctccagcgacgaggtggaggaccgcggcagcagcggaagcgaagaggagagcttcagcaccagcggcagcgacagcgatgacggggaggagtcctcggaggagctcgagacggtgcaagcggacttcgccctcttcgaccccaagccgagcgacttccatggcgccaggctgctgctcaagacgtacctcgactctaagccctgggacctcaccggcttcgctgatctcatcctcgcgcagaccactgtaggcacggttgtcaagttggccgatgacgaggaggaggaaggggaagggaacggtgttcagaaggccaattctagtactaacaatgacgacgatgatctgtttggtctcattagcgtgctcaatttgggacaacacgccgagcaaaaatgcattaaggatcttaaggagtatctgcttgatgtctgtcccgacaaaggtactaagaagcagctcagatctctgcttgaagagaaagcgtcgagcgtgggcctgctggtgtgtcgccgctttgtgaatttcccttatgaactcgtgcctaagctgtatgacgcgctctttgacgaggtttcctgggcaacagaagatgagccaacacaagaactccaggactccttccggttcaagcactacctgttaatcgtcagaatgcttgagaggaagacccctccaaaacataaatcaaaggcgaacaaagatgatgacgaacctattatctatccaaagtttgaggatgaaatttttcacgagcttagctcatggtctttcacttttccaatacgttctgaagagtcagctcagcaggagatgaagaattacaaggagatgggcttagtgatggcaattaaagcaggcacagttccgaagttcagaaagaagctgggggatttggtgtccgaataggagcgtaattgaccgatgtggaattttgctgctgtccacgtggtttgaacatttccacattcagcttgttgtctgtaacgatgtgattctgactggagcttgaatggtggcaatggtattgacattgtcgttgatttgcaacaaggattctgttcgtgaactaatcaagtaaagagattttgagctgtgtttgtcctaaggcatgtcttgtagtggtagataagcacagccacacactaggccgaacgccagggatgggagttgaagagtgctggcctcccggtcatcatggatgataatatcttc

SEQ ID NO: 64577 - DNA, 3048 bp, Zea mays
  Clone ID: MRT4577_158893C.1
cctcgggtctcggctctcgccgtcgccactcgccgcgagcgagatgcagggcctagccgtatcatgccagcttcctcctgctgcggccgcagctcggtggcggccgcgcgcttcttcctctaatagggaagcagttttacaatgttggaagtatgaattaagtcaagaccactatttgggaggccccctaaggataggtcagtctcaaggaagtttgcacagacatcgctctacaaattttctcagaccagctgctgcagctatttcagttgaacaagatgaagtcaatacttatcttccaaaaggtgatatgtggtctgtgcacaagttcggtggaacctgtatgggaactcccaaaagaatccagtgtgttgcaaatatagttcttggtgattcttctgagaggaagctgatcattgtttccgcaatgtccaaagtaactgacatgatgtacaaccttgtacaaaaggctcagtcacgggatgattcatatgcaatagcactggcagaagtttttgagaagcatatgactgcagcaaaggatcttcttgacggagaagatcttgcaagattcttgtctcagttgcattcagacgtcagcaacttgcgagccatgctccgtgctatttatatagctgggcatgcgacagaatctttctctgactttgttgttgggcatggagagttgtggtctgcgcagatgctgtcgtatgcaataaagaagtctggggcaccctgcagttggatggatacaagagaagttctagttgtaacacccagtggttgtaatcaagtagaccctgattacttggaatgtgagaagcgacttcagaaatggttttctcgacaaccagctgagataatagttgctacaggatttattgcaagtacagctggaaacattccaacaactctaaaaagggatggaagtgatttctcagcagccatagttggttctcttgtcagggcacgccaggtcactatttggactgatgttgacggggtatttagcgcagatcctagaaaagttagtgaggctgtgatcttaagcactctgtcttaccaggaggcctgggaaatgtcatattttggggcaaatgttttgcatccgcgcaccattatacctgtgatgaaagacaacattcccattgttattaggaacatgttcaacctctctgcccctggaaccatgatttgcaagcagcctgccaatgaaaatggtgatttagacgcatgtgtcaaatcatttgctactgtcgataatttagcacttgttaatgttgaaggaactggaatggctggcgttccaggtacagcaagtgctatatttagtgctgttaaggatgttggagctaatgttatcatgatatctcaggctagcagcgaacattcagtatgctttgctgttccagaaaaggaagttgctgtagtttctgctgagttacatgataggtttcgtgaggcattagctgcagggaggctgtctaaggttgaagttattaatggttgcagcattcttgctgctgttggtctgaggatggccagcactccaggagtcagtgcaatactttttgatgcattagcaaaggcaaacattaatgttcgagcaatagctcaaggttgcagtgaatacaatattactgttgtattgaagcaacaagattgtgtaagggctctgagagctgctcactcaaggttcttcctctccaaaaccacacttgctgttgggatcattggacctggtttaattggtggagcactccttaaccagttgaagaatcagactgctgttctcaaggaaaatatgaacattgatctgcgtgtcattggaataactggctcaagtacaatgcttctgagcgacacgggaatagacttaacccagtggaaacagcttctacaaaaggaagcagaaccagctgatattggtagttttgttcatcatttatctgataatcatgtatttccgaacaaagttttggtggactgcacagcggatacaagtgtggcatcccactattacgattggttaaagaagggtattcatgtcatcacgccaaataagaaagcaaattctgggccacttgatcagtacctgaaattacggactatgcagcgtgcctcatacactcattacttttatgaagcaactgttggtgctggcctcccaatcatcagcaccttgcgaggtcttctggagacgggtgacaagatactgcgtattgagggcattttcagtggaactttgagttatatatttaacaatttcgaaggaacaagggcgtttagtgatgttgttgccgaagcaagagaggcgggatacactgaacctgacccaagggatgacctatctggaactgacgttgcccgaaaggtcgttgtcctcgcgagggaatctggtctgaggcttgaactttctgacattcctgtgaagagccttgtgccagaaacactcgcagagtcatgctcgtcagcagatgaattcatgcagaagctaccgtccttcgacgaggactgggccaggcaacgcagtgatgctgaggctgcaggcgaagtcctgcgttacgttggagcgttggatgcggtgaacaggagcggacaggtggagctacgcaggtacaggagggaccacccgttcgcgcagctctccggctccgacaacatcatcgccttcaccacgtccaggtacaaggagcagccgctgatcgtgcggggtccgggtgccggcgcggaggtgacagccggtggcgtcttctgcgacattctgcggctggcgtcttacctcggtgctccttcttgagcttcgagctacaggtgccagtttcaggaagcagtcggagacacactgccatgcatgatgcctcccctccgtgtttgggctatgctcacatgttgtaatgttgttctgaataagtgccaggaaataatgcctctagcgtatgtcgagagagagaggtggttcggctttggaatagccgattaggtgttgtttttgctgcatgatgcaaatgaattatcgtaccaatgaagggatgtttgcttgtgcct

SEQ ID NO: 64578 - DNA, 1462 bp, Zea mays
  Clone ID: MRT4577_158894C.1
attagcaaaggcaaacattaatgttcgagcaatagctcaaggttgcagtgaatacaatatcactgttgtattgaagcaagaagattgtgtaagggctctgagagctgctcactcaaggttcttcctctccaaaacgacacttgcagttggcatcattggacctggtttaattggtagaacactccttaaccagctcaaggatcaggttgctgctctcaaggaaaatatgaacattgatctgcgtgtcattggaataactggctcaagtacaatgcttttgagcgacacgggaatagacttaacccagtggaaacaacttctaaaaaaggaagcagaaccagctgatattgatagttttgttcatcatttatccgataatcacgtatttccaaacaaagttttggtggactgcacagcagatacaagtgttgcatcccactattataattggttaaagaagggtattcatgtcatcacaccaaataagaaagcaaattctgggccacttgatcagtacctgaaattgcggactctgcaacgtgcctcgtacactcattacttttatgaagcaactgttggtgctggcctcccaatcattagtaccttgcgaggtcttctggagacgggtgacaagatactgcgtattgagggcattttcagtggaactttgagttatatatttaataatttcgaaggaacaagggcattcagtgatgtcgttgctgaagcaaaagaggcgggatacactgaacctgacccaagagatgatctatctggaactgatgttgcccgaaaggtcattatccttgcaagggaatcaggtttgaggcttgaactttctgatattcctgtgaagagccttgtgccagaaacacttgcagcatgctcgtcagcagatgaattcatgcagaagctaccatcctttgacgaggactgggccaggcaacgcagtgatgctgatgctgcagacgaagtcctgcgttacgttggagtggtggatacggtgaacaagaggggacatgtggagctacgtaggtacaagagggaccacccgttcgcgcagctctccggctccgacaacatcatcgcattcaccacctcgaggtacaaggagcagccgctaatcgtgcggggcccaggcgcgggcgcggaggtgactgcgggtggcgtcttctgcgacatcctgcggctggcgtcttaccttggcgctccttcttagagcttccacttacagttgtcaatttgaagaggcagatggacagtgccctgcatgatgcctccgtgtttaggcttattatggacttgctcaaagttgttctgaataagtgccaggaaataaggcctctatcttatttaggcctctatcttcggggtagctgactaagtgttgttattgctacggaatccagaattctgtgaattgaaatgaattgtaccgaaaaaaaaaaaaaaaaaaaaaaaa

SEQ ID NO: 64579 - DNA, 346 bp, Zea mays
  Clone ID: MRT4577_158895C.1
ggaaaaaaaaaagctgaaagaaccttttctccaacagaagggggttgttgaaacatccatccccgtcccacaggtgatgcttccaaattgaaaaaaaaaaaaactttaacggggtagagcaaagaccagggcccattggttgtgtttgtagcacacggttggcttttttctgaaaggcttaaccatttaaacggtacattcctagcaacagacccagacaatccccatcaatttgcccattttgaacagtccaggcttaactgtttaagaaacaggttaacattttttttaactccttaggggttaggacacgctgtttacgttaacccgtttctttttcaaaaag

SEQ ID NO: 64580 - DNA, 538 bp, Zea mays
  Clone ID: MRT4577_158896C.1
aaaaaaaaaaaaaaaaaaaaaaaaaaaaaaaaaaagcgaaacataaaaaataaaggctgtccctcgcctctaatgctggtgtgatctgtttagctgggggttaatctgggccgctaggtgtaatcctgggtcatagtttgtttcctgtgacaatttgttactccgttcacaatcgcacacataatgcgtcaccggatgcataaagtaaaaagtgtggtgtcccaaatgagtggggtaactcacattgattgctttgcactcactgacctttttgcaccaggtaaatttgtgattccacctactttaaggaataggccaacgcgcgatgagaggctgttcgggtttttggctcttttactctttctccttcactgattcgctgcgctcagcggttccattgcagtgagcggcctcatttcacttataggcggaatataggggtttccacagaatcgagcatttacgcacgaagcaacatgcaggccaaaaggccgtaaaaaggccaggaccctaaaaaaggcccataggctgccccccc

SEQ ID NO: 64581 - DNA, 147 bp, Zea mays
  Clone ID: MRT4577_158897C.1
acaacaatatttatcggatggggagttgggtgttttttttttactggaacacccctaagccatggccgagaatgctcatgactacgtctgtagggcggacgcgaactcattacggcgtgttcactctattagaggccataacagaaa

SEQ ID NO: 64582 - DNA, 109 bp, Zea mays
  Clone ID: MRT4577_158898C.1
cagaaacctatccactagctcacgcactcgatcgaggggatccagttcatgatctacttatgcactaactaccttgatctcaacgttgccctgaccattgtccaaacct

SEQ ID NO: 64583 - DNA, 539 bp, Zea mays
  Clone ID: MRT4577_158899C.1
tccgggtcgatcctagcgtccggttccttttttagatcacggaccagggggtatggcgaggagacatttccctacttatactgtacacagatgtaatacccaaactaaacaaatactctccttaagcagctacaatatcacaaacatacactttatcaatatcacacgtcaagttccagagcccaagaccaccgacctcacgatgcggccaatctttcactactaaagaaatagacacccctacatcgtccagatacgttctattcttgcaacacttaccactcccataacattctctcaacgccatcctacttggaactactctctcatcaaacaatctcttaaatctacagggcagtcataatcaagaacacaacctcgagtactcgtcccctttcttgtcccagtcacacaagctagatgaactgctgcataagaacaagcgccacatccctcaaacttcacgaacatcatggttcagaagaactgtcagattgagctgacacatgaataaaagtaaacaaattacgcaaaccttg

SEQ ID NO: 64584 - DNA, 344 bp, Zea mays
  unsure (1)..(344): unsure at all n locations
  Clone ID: MRT4577_15889C.1
agaggagaaaaggcgcgggggaaggttttgacgacgaggaaggaggaggnggncaccagggagccgccagcggccgccacagagcgcccccacgcgagaacangcagagaagaaggcacccaacgccaccgaggacagcaggacggcggcggagaaggccacggggaccagggacaccacgacagacgggaagcccaacaagcacaccgggagacacgggagcaggagcgcgccgagcacggcgcgggcgaggagcgcccgccagaggaagcgacgagttttgttttttttccgccccccccccccccccccgttgttatccgtcggcggagatcccccggccg

SEQ ID NO: 64585 - DNA, 122 bp, Zea mays
  unsure (1)..(122): unsure at all n locations
  Clone ID: MRT4577_1588C.1
cgacaagcacctatgagtccgacgatcgcangcaatcctacatcacattctttattgctgtcaactagcactaacacacgatgtgatctgattaaggttgagaataaattcttatcattgaa

SEQ ID NO: 64586 - DNA, 154 bp, Zea mays
  Clone ID: MRT4577_158900C.1
ggcttcatcctccctctgacggttctgcttggggaccatgaggttctacggggttcggatcatcgggatgagcgaatcgagatggcgtacgtctgatgcataagtaccgctggttccccggagtgctatgcctgagccacggacgaccactccc

SEQ ID NO: 64587 - DNA, 723 bp, Zea mays
  Clone ID: MRT4577_158901C.1
gtacgcctgcaggttccggtccggaattcccgggtcgacccacgcgtccgtggatacttcgtgtggtgatctttaatcttgtcgtcgcaccggttgtcgccaccgaggtggactggcagccctgagcgtcgcagtcatgcaggccggacccgtgcaggcggtacccccgccgccgccagtagccactgagtccaaacagccaattgaagaagaagcatcgtcaaaggaggatcccaccccttccaagccagtggtcggcattatttaccctcccccggaggtcaggaacatcgtcgacaagactgccagttttgtggccagaaatgggcctgaatttgaagctaggattcgacagaatgagatcaacaaccccaagttcaatttcttaaatcccaatgacccttaccatgcctactaccgccacaaggtcagcgagttcaaggaggggaaggctcaggagccctcagctgccatccccaaggttatgcagcagcagcagcaagctacgcaacagcagctgccccagaaggtccaagcccaggtgatccaagagaccatagtaccgaaggagccccctcctgagtttgagttcatcgctgatcccccctccatctcagccttcgacctggatgtagtgaagctgacagctcagtttgtggccaggaatgggcgtcagtttctgacccagctgatgcagaaagagcagcgcaactaccagtttga

SEQ ID NO: 64588 - DNA, 381 bp, Zea mays
  Clone ID: MRT4577_158902C.1
ggcttgtaaaattagcaagctgatgtagaggctaaaaacacttatggagtatgataaaagcttagagtcctcagagcacaggtcagagacagcgttttgggtgacagtcgacattggctcttaaagactcgctagcgcggttatttttcttgttctctcatcactgggtaagatctgtactcagctgtcgaagtcaattagccattgagcacgcccattaacaggtgaactcagagtggaaatccatctggatgtgattatcatgcatatttcaagatatgtatcctcaaggagaagactttttttttaccttactggatggatgtctccatagtttctgtgcatggtacttgttatctgatccatcttccccaaacattc

SEQ ID NO: 64589 - DNA, 359 bp, Zea mays
  unsure (1)..(359): unsure at all n locations
  Clone ID: MRT4577_158903C.1
ggacgaagcacggagccgctagagcggccgccccccacttcttttnnnnnnnaaacncgaaaaaagangaagccaataaagaaaccacccgggcccacagacacccggncaaacgaacaagcccaangggggagacgcagcngaccacccagagcggcaaacccaccaaancagacggaaccagcaaggggcaacgccggaaggccacaangccacagacgacaaannnncaaaacaaaagcccggcccggcngccccacagaanaaccaaacgacaaccacaaaanngcgacgaaacaaaanaaacaacccagaagcaaaacgaccccagaagccgccccacccaacaagcacccccg

SEQ ID NO: 64590 - DNA, 474 bp, Zea mays
  Clone ID: MRT4577_158904C.1
taaggaacatgctttttatttgaaaaaaaaaaaacgtgatcgacgcccaactgttaaagaaattgaaaatttccaaaacagatatttttccaattggtttagagaacatatcatgcagaaggaggaaaatgatggtagtgacaacatcgacgaggatattagatggttggctcgaggaccactagagattgcacgaaggcatagagcctttaacattcgtgggttcagatttcgtgccaaacggtttgataaggcgactcaaaatagcggagttgttgttactgcaaagacatctagttattcatcggcaggtgatagcaaccccatacttggagatattatgtactatggtaggattattgatatcatagagttagactactacgggagattttcaatggtactatttaaatgtgaatgggttgatgtcactcgaggcaaaggagtaaaaacagataagtttggcttgcccct

SEQ ID NO: 64591 - DNA, 302 bp, Zea mays
  Clone ID: MRT4577_158905C.1
ggggcaagccaaatcgacattttattataattggatatggcacccacacagccacaaaggagttttttgcacttggattatacaatgccccaacataactttttttttaggtactatttgctgggggaatcaagggggccatttattacgccgggccttcctggacgacttgtaaagcaaaccatatagtcgggttttgtagctggggagaatttgggctaccgattggtgaaacgtatttttccagccatcgtcgaatggggtttaaaggtgggtacaggcttttagggttttggaaaagg

SEQ ID NO: 64592 - DNA, 331 bp, Zea mays
  Clone ID: MRT4577_158907C.1
aaaaaaaaaaacacaaaaaaaaaaaatttaaaattaaacaaaaaaaaaaacaaaaaaagaaaaaaaaaaacaaacaacacttaagttcacatctttctctactcatgcgttcctacttcttctcactcccatagtacctcctcatattaaatacacatgtcaatgcttcttcaacggccgtactttgaataccctgggattacctaacccaatgcgcttccggaataaccccctttttacatatttcgtgcttcctgcagattccctaaccgatctcctttttctactattccacatcctcaatggctaatgggtctttctaatcaatggt

SEQ ID NO: 64593 - DNA, 128 bp, Zea mays
  Clone ID: MRT4577_158908C.1
ttcttttgaaaaagcctaatcacggttcgggcgcatggatagaatttttctagggctcacatccaaacataaccctattgggataatccaatccttcaagtcccttttgattggctcctcttatgtca

SEQ ID NO: 64594 - DNA, 426 bp, Zea mays
  Clone ID: MRT4577_158909C.1
aaaaaaaaaaaaaaaaaaaaaaaaaaaaaaaaaaaaaaaaaaaaaaaaaactaaaagaagaaaacaaatctttccttagattcttcattaaaaaaaaaaaaaaaaaaaaaacaaactttaaaaaaaaaaaaaaaccttctagcggcgggcctttttagggttccaattttttttccccgtttttgccaaagtttttcttttttttttggccccccaaattaattttcacggccctgttttaaccccccttatactgggaaaaccccgggcgcccccctaataatgcggttgaaggcattacccgctttagctccgtggttgttgcggtcaaggccccccctctttccctttttccaactttttcccccccttttttgaatttggtccccccctttttttccccctttttgcccggtgtttttgttt

SEQ ID NO: 64595 - DNA, 239 bp, Zea mays
  Clone ID: MRT4577_15890C.1
gggcaaaaaaaattttggtttggagttccagtttgtttgccctgaccccccggttttaatttttacacagtacaagggccggcctttggaatttaaccaaacgagtttaatatttggtgcacgaaccaacaaagccgttttaagattaataagggactcaactttctaagaattttatggcattagtgcttggataaccattgggccaaagaaaaaagttgaacctttttaccaaaatt

SEQ ID NO: 64596 - DNA, 364 bp, Zea mays
  Clone ID: MRT4577_158910C.1
gagacggggagaaacgtagtggactcctaatttttatggccaggtatgacgaattggctagcaagagcaatgttgaatacattgctggaggtaatgttagtgcaaatgcatggattactgcttcatgattcattctctctcttctactatttgtagtgttcttttctttcaggagccactcaaaactctatcagggttgcccaagtaagctctgaagaaaaaccacaataatattcaaagctattagcctatgaccagtcctgattggttacataaactcataagaaattaaaacataacaatcctgacattacttttcagtggatgcttcaaattcctggtgcatcaagttacattggttgca

SEQ ID NO: 64597 - DNA, 390 bp, Zea mays
  Clone ID: MRT4577_158911C.1
atgactgcagaggattgtgatatagagtaaagaattttgctgacaaggacagaatattggttgtagagtagaaatttagagttatatgagtgcggacagcctcaaaacggaactgctactgccagggcagtgagctgtttcggtccgttccctctgctcgggtgctggctctgcaactgttcgtcgccaaggatgggcctgtggccaaccgtggatggagtggaccgtcctctcctgtctatccatctggaacggaactctggactctgacccttgttgggtatctggagcagcagattcggcggttccctgttcggtctccagccggcggatgtggatccattcattacggtaaaagctgcttcagtcccttgccgccggtctggtggc

SEQ ID NO: 64598 - DNA, 336 bp, Zea mays
  Clone ID: MRT4577_158912C.1
cacaaccatcatctgctgtctctaagcatgttttcacaccactcgccctactccctcgaggcgggctctatcccgcgctaggaccgcgccatgaccgttctattccccgaccgtcacctgttccaggtccagtacgctcgtccaggacgcccacaaggctcaacgctcgtcgcgcgcatacgcggcacggacaccgaccaactcggagtactgaacaagtgcacacacaagctccaggaatacatgttcgtgcgcaagatcgactgcctagacactcacatagctctggtacgcgcacagccgaaagcggacgcgcgcgtgctcattaaccgcgcg

SEQ ID NO: 64599 - DNA, 625 bp, Zea mays
  Clone ID: MRT4577_158913C.1
ccggccgggccggccgggatccactctacaactacaacaatcgctataccaacactcgtttaaataacctcgatctacttctctttcaaccttttactcaaaccaaacccaacaaaccaaaccaaccttcaaaatgcacgcctccgctgccgtcctcgctttcgtcgctgttgcggctgctgcccagacccctgtggcccccgttgctactcccatcgctactcccggtgcccctaccaacggtactaagcccggtcacggctctggctctggttccggatctggttccggctccggctcccagcccccctccggcgccgccgcccttggcctcagtggtcttgctggtgccctcgccattgctcttgctctgtaaatgtctttcaatgagactttctcagagttggtggatatgaggatcctgcgacagaccgccttgtagggttctggaggaatcgtgctggtgcgcgtttaactttcgatggagatagatcgggttttcgtttgtcctgactataatagatagaccaatggagcagaattatctccagctatattaatactaatcgcataccaccacaaaaaaaaaaaaaaaaaccgcgaaaaaaaaaaaaaacccgcggcc

SEQ ID NO: 64600 - DNA, 602 bp, Zea mays
  Clone ID: MRT4577_158914C.1
attctcatcgctcgtccatcccaccgtgccgcctgtgcctctccactccactccactctgctcagctcacctccataaggtttggcatggaactgggactgggagctccaacttctccgccgccatggcgtggccatctcctcttgcgcgcgctcgtcatcttcctctgcctctgggttacatctgaggcaaatgaacaacatgtggaactaccaccaagaggatggaattcctatgattctttttcttggacggttgatgaaaatgcatacttgcaaaatgcaaagattttggcagaaaagttactaccacatggatatcagtatgcagttattgattacctgtggtaccggaggtatgttgatggggcatatacagattcgtatgggtttgacaacattgatgagtggggtcgaccgtttcctgacctccaaagatttccatcatccaaatatgataaagggttcagtcaaattgccaataaggttcatgagatgggcttgaaattcggcatccatttaatgaaaggaataagtacacaggctgttaatgcgaacacacccatcttggatattgagacgggaaaaccctatgtagagaac

SEQ ID NO: 64601 - DNA, 465 bp, Zea mays
  Clone ID: MRT4577_158915C.1
ggccgcgggttttttttttttttttttgctttttttttttttttttttttttttttttttttttttttttttttttttttttttaggttcacaaaacatgacgctttcgggggtgaattgaaaacctattttttttaaaagaagccatcccccaaggggcccaatttggcacgaggggcccaccttcaaaaaacagacggagcatgtatctaattctggggagataaagatccaaaagagttgttggctcttccccaagccgttgaatggggagaaacatgtatgactctgcagcaacagggggcgtgccccaagttccaaacccaaagaggccccttacacccacgttaaccgccatcagagatccttcttgcgcattgcagccaatgggtcccctgaccattcacgggtccgaaaacccagaggaaggacggttccctcacaaaaaccatggccctagccccg

SEQ ID NO: 64602 - DNA, 265 bp, Zea mays
  Clone ID: MRT4577_158916C.1
gttacgcgtgggctcacgcggcgagctcctcgagctcgctgcccgttgcaagctagctagaaaatggcctagggagaagcagcctactgcgcgccgacgccgtggagctggtgctcaacatggactccgtcgccgactgccggaccaggcgcggccccacgcctgtacagatggaccaagccatggagaaccagggcatcgttcaggttctgtgcacgagaggtgctgaggacgacaccgaccaagcgtagtgcagccacgtctg

SEQ ID NO: 64603 - DNA, 355 bp, Zea mays
  Clone ID: MRT4577_158917C.1
gggcacagcagactgcacatgcgcaccatgcaggagctgcaccgccggtgccacgaggcagacggccatcacagttcacgtcggtctaccccgggtgcctcgtcaccagggggctgttccgggagcacatcccgctgctgcgcctgatcttcccgcctttccagcaagtctgaggacgaggtcttcacctgcataggcgaaggtcccggaagaggctgccccactcacagtgaggaagcccaccctgaccaactagaagaatgactgcttctggaacagggactccgcgctcagctgcagaaccaagttcggcaagcggccaccaatccgaagaaggccacgatgctatcggaga

SEQ ID NO: 64604 - DNA, 566 bp, Zea mays
  Clone ID: MRT4577_158918C.1
atcgtttaaatattaatagagctcctcagagatctgggggggggggggggggggggggggggggccacatactctgctaccatggccatgatacgcctagtgctaccccgactacccgactgtctaaaccacctacccaccccgggatcatcgggagacatgatagaccgagccacccgccgttacacaataccagtcgggccgaactagttgcaatttggtgcggtacgtacaacgaacgatacgataggaggaaacaactacaacttaagtcgacttaccgccattattgctcccgtttgaccagtagccccacagtgcgcttaggaacgaggctttaggtggattggctagaaaccgaacacgttcggtctgtttcggtttgtttgggcccgaaaccagcctgacccaacgggaggccggggggaaccgaaacgaaccgaacgtgtgccatttcggccaatccaccttaaggcgttttcctaaacttgagacaacgggacagatgatgagtccggagatccaggtcgatctgtttgggtacttgatcgggtaaataaaagttc

SEQ ID NO: 64605 - DNA, 946 bp, Zea mays
  Clone ID: MRT4577_158919C.1
cactcctatgggcgattgggatcctcgaggccggccgggatcagatcgcttcaggtagcataccattaccataccgcgcgggccgggccgggagaaacaaaactgacaaggacgatatggtgcgtagcctcgtcgcgctgctcctcgtcgccacggccgtagccgccgtggccagagccgcaccctcgccggggtttgtcgtaaccggccgcgtctactgcgacaactgccgcgccgggttcgagaccaacgtctcccacgccatcgaaggcgcgacggtggagatggagtgccgtcacttcgagtcgcaggaggtccacgacaaggcggaggcgacgacggacgccggcgggtggtacaggatggagatcagcggcgaccaccaggacgagatctgcgaggtgctgctgctcaagagccccgaggcggactgcgccgagatcgagcgcacccgcgaccgctgccgcgtcccgctcacccgcaacgacggcatcaggcagagcggcatccgatacgccaaccccatcgccttcttccgcaaggagcctctcagcaactgtggcgagctccttcgcgcttacgacctcttcaacgagacgtccgagaattcctaagcgtcattttgttttttttttaatttcctcttccatagcacatttgttcgactgatcgacgttatattagcagacgtgcagctatcctaaaaataaaaataattttcatctccaatgttttagtagctaccatattaatatatattaatggtctttgagtagttgtactgtataaataatgccatcatatatatttgtagccgaaaaaagggaccaaccctatgctgtaaatttattttttaatctcctttatagccgaacgtctgaattatctgaatttgcatgtggcgctgcagccgttgcccaaaaaaaaaaaaaaaaaaggggcggcc

SEQ ID NO: 64606 - DNA, 189 bp, Zea mays
  Clone ID: MRT4577_15891C.1
gcgtcgtcgtagtcggtgcgcgcgtgtatgagtgtgatggttacggatgtcttgcgagtagtaatcgcgctgggaaagtcccaggccccagcctttgtcgcgggaaaaatcttgtagccgtgacatgtgcagcgagaaaaacgctttgagactagaacgataaggatccacattcaaaaaaaaaaagaa

SEQ ID NO: 64607 - DNA, 392 bp, Zea mays
  unsure (1)..(392): unsure at all n locations
  Clone ID: MRT4577_158920C.1
gggaggacctgactcgatctgggcaaaacaccattaccgacgtgttggcggaagaggggtgtagtggccgccgccgtctggtgcttgcacgggcttgcggttcgtgttgcggttcgggaacttcgcgagcgcgcctgggaagcatatccagcctcgatttggcaagggacgtcatggtctggcgggaattcttcactggagttgggtggcggcgcggagttctctccctccgtggaccagttcgagcaccctcacaactaccgaagagccagtggccgaggatccgggtgttcatcaggtagaagttgctgagcaggagctcattgaagacgagcaagctacagaggattatggngttcagctggtagagactgctgtgcangagctcgttg

SEQ ID NO: 64608 - DNA, 939 bp, Zea mays
  Clone ID: MRT4577_158921C.1
ttcttccggccgaccataccgcgcggaccgggcgtggatacctaaaaacgcccaggccaatatgggagtgggcccctcgcgcccgcccggcaccccaccatcaggtacaagaaacaacaagactgacagcgacgatgatgccacagctgcgtagcctcgtcgcgctggtcctcgtggccacggccatagccgccgctcccggcgttgggtttgtcgtcaccggccgcatctactgcgacaactgccgcgccgggttcgagacaaacgtgtcccacgccatccaaggcgcgacggtggagatggagtgccgccacttcgagtcgcagcaggtccacgacaaggcggaggcgacgacgggccccggcggctggtacaggatggagatcagcggcgaccaccaggacgagatctgcgacgtgcgcctgctcaagagccccgaggcggactgcgccgagatcgaccactcccgcgaccgctgccgcgtcccgctcacccgcaacgacggcatcaagcagagcggcgtccgctacgccaaccccatcgccttcctccgcaaggagccgctccccaactgcggcgagctgctccgcgcctacgacctctacaacgagacgtccgagaattcctaagcgtccaaacaaaagttctctcgctcgctttttttttaaaaaaaaaatcccatatacatatagcacatttgtttcggtttgttgatgcgcgcatgcatgctagcagacatctttcctaaaaaaatttaaataatttccatctcgcattattttagtagctaccattcatgttttctgagtagttgtataaatgctaccaccgtcatcttttgtacccggccggaacaaacgaaaaacacactatctatgctgtgttgtgaattcaattcttgaccatcttctctataaaaaaaaaaaaaaaaaagcggcc

SEQ ID NO: 64609 - DNA, 826 bp, Zea mays
  unsure (1)..(826): unsure at all n locations
  Clone ID: MRT4577_158922C.1
caggccggccgggaacagcttggttgcccgagtggttaagggggaagacttaagatcttctgcacagaagtaaaagacgcaactaaataaagcctggaggcttgttcggttatttccttttcatatggattgaagaagattgatatggattgagagagattttttttcaaaagcgcaggggagctgcacatcatttaattagagaagaaaagatctaaaatggaccaaggtacagagcctaagaaggcaagataaaaacacgcacgcgcacactgtcttacagataaagagcttgggagagattttaatttactaggaattgaaatccattcaatctccttcaatccatatagattggtgttgaaacgaacatattatgaaggagctaaaatcttcttactatttaatgaggggattttatcgcctttaatcccctggctcataaagaagccctaggaaaacatgtctctcgctattcagatttagcaggacataactttttctgctatgcttccaggtcacagagattttgatgcttgtgcagaaggtgttggaaggaggaaccatctaacaccgagccactacgggaaaatcttgacagatttcatgtcctgatgtccatacaaacagttgcgcaacatcgtaacaagagttagaacaacatgctgtgggagaatggttacacgtgcttacagcaaagaagcttgctagcttggagtatttgtgcagtcaaagtagccatgactccangttaaaggatgtgcagccatggctggttaatttgtagagttatcgcttttcagacttgatagcttcatctgtatca

SEQ ID NO: 64610 - DNA, 279 bp, Zea mays
  unsure (1)..(279): unsure at all n locations
  Clone ID: MRT4577_158923C.1
agatgtggccgaccccagctcaaacctatcccaccatgactaatgtcttcccgctccggatccggcccctggcgaggctcggtgccttgtgagcgcaaaagggaggggctggtgcgcccgctatccgacctcactggaatatagtaaaatacacgtctaaaagtaagtggtattttcacttttgcgcccggaggcttcccaactctatacctacacctctcaaagtcagtttcacaanagtccggacttagaagtcaaagcttcaacaggnngtcttct

SEQ ID NO: 64611 - DNA, 484 bp, Zea mays
  Clone ID: MRT4577_158924C.1
aagccttccggttgttcgcttgggttaaaaccttaagcagggagtggattaatccgttgcacccttaattaagtggcagtctgattctgtaaaggttgccttttcccaaatggttggggatgccaaggaaaaaattaggaagttaactgaaactggggaacttaaaatgggtctgaaaatttatgatccacaaaaggacaagcgtttaaggggctctgttaagttgccccatatccttcgtccaaagatgaaggtgtgcttgctgggggatgcacagcacgttgaggaggccgaaaaaatggaacttgactacttggatgttgaggctctcaagaaattgaccaggaccatgaggctggttaaaaggcttgccaagaagtaccatgctttcttggcttcaaaggccatcatcaagcaaattccccgtttccttggtcctggtctaaacaaggcaggcaagttcccgaccttggttactcaccag

SEQ ID NO: 64612 - DNA, 362 bp, Zea mays
  Clone ID: MRT4577_158925C.1
gcgtaggatattagaccctccttgcgcttcttgcccttattgtgatcgcaacaaatgcgttgattattccacaatgctgacttgctcctactgccattattccacagtgcctaccaccagctacttcaatggtctttgaacacctagctgcataagccatcattcaacaacaagcgcttgcagctagcgaattacatcaaccaattccccaattgcaacaacgctccttgccacatttaacaatgcatgccatcacaacgcaacatcatcaacagctgctaccagcactgacccacctagccatggtgaaccctgccgtctacttgcctgagcatctgctagcatccaacccactagctctg

SEQ ID NO: 64613 - DNA, 2515 bp, Zea mays
  Clone ID: MRT4577_158926C.1
cgtgtccgcaccgtgcccaacctccacaccgctcgccggcccaacgagaacacaaacgtgttaggcgcagcagtgattcgcatgcagcggaactgcgaaaagattgcactgacgagagaaaagtcgccaggtgcgtcatttgcttgctacactgacaggttctcagagcagaagcatccggcacccctgctcctgaacttgttgccgaggaggccacactcttgcgctgccttggcaatgggggaggttgttgctgcttcctccctggccctggtgctgctcttcttctgctcttgcgggcctgcaagcggccttctctcccccaagggtgtaaactatgaagttcaagctctcatgatgatcaagaactacctcaaggatcctcatggtgtactgaagaactgggaccaagactctgtggatccttgcagctggacaatggtcacttgctctccagagaaccttgtcaccggcttagaagcaccaagccagaacctttctggaattctctccccaagtatagggaatctgaccaaccttgagacagttcttctgcagaacaacaacataaacgggttaatcccagcagagattggaaagctaagaaagctcaaaacgcttgatctgtccagcaaccacttctctggagaaatcccaagctctgtgggccaccttgaaagccttcagtatttgaggcttaacaacaacacattgtctggtgccttcccttcatcatcaactaatttgtcacaccttattttcctggatctgtcatacaataatttgagtggtccaatcccagggtccctgacaaggactttcaacattgtagggaatccactgatctgtgcagcaaccatggaacaagattgttatgggtctttacctatgccaatgtcttacggactgaataacacacagggaactgtgattcctgcaaaagctaagagccataaagttgcaattgcatttggtgctacaactgcctgcatcagccttctgttccttgccgttggttcactattctggtggaggtgtaggcgaaaccggaagactcttttcaacgttgatgatcatcagcacatagagaacggcaacctcggaaatatgaagcggtttcaattcagagagctccaggctgcaacagaaaacttcagcagcaagaacatattaggaaaaggcgggtttggtattgtttaccgggggcagcttccagatggaagtcttgtagccgtcaagaggctcaaagatggtaatgctgcaggcggggaagcacagtttcagactgaagtcgagatgatcagcttagcagtgcacaggaacctcctcagactctatgggttctgcatgactgccagtgagaggctactggtctatccgtacatgtcgaatgggagtgtcgcgttgcgcctgaaagggaagccaccactggactggatcaccagaaagaggatagcacttggggcagcacgaggtctactttatctgcacgagcagtgtgatcccaagatcatccacagagacgttaaggcagcaaacatactgctagatgactgttgtgaagcaattgtcggggactttgggcttgcaaagctcctagaccaccgtgaatcgcatgtcaccacagctgtgcgcggaactgttggccacatcgctcccgagtacctctcgactggccagtcatctgagaaaacagatgtctttggttttggaatcctgctgctggagctgatcaccggtcagactgcactggagtttgggaagtcatcaaatcagaagggagccatgttagactgggtgaagaagatgcaccaagagaagcagctggacatacttgtcgacaagggcctggggagcaaatatgaccgcattgagctggaggagatggtgcaagtagcactgctatgtactcagttcctccctggtcacaggcccaagatgtcagaggtggtccggatgctggaaggcgatggacttgcagagcggtgggaggcgttacaacacactgagtcacacaaattcaaggtgcctgagttctccttcagccgctgccactctgacctgacggacgactcgtcactgttggtgcaagcagtggagctttctgggccaagatgacaccaacggagacggtctgtggcaagaagtatccagcagttgtttcccagtagaaaatgtaaataatacaaagtgaagcaactggtgctgcatcctgtcagaagtcgaagcaaatctcaatcagctgaactgtacaaagattaaaaaaagagcacaacctagtctaagcatggtacattactacatctacagattatgtaactgttggtagaataaggatagagcaatgtttccattttgtttgttattttcccctttgtattctattactgtagttatagtttgtaaaatgcaaaaacggtggcaatagcgctcgatgttggtgctgaagaactcaaatagcttagtaaagaccaagtgtagacaggtgccaacgaagaatttgattgtgtgcatg

SEQ ID NO: 64614 - DNA, 904 bp, Zea mays
  unsure (1)..(904): unsure at all n locations
  Clone ID: MRT4577_158927C.1
agcacaggcatcttcttttcgtcatttgcttgctacactgacaggttctcagagaagaggcatccggcacccctggtaggcttccactgccactgagaatttggttctgggaagagagaaaggctgcacgattcttcctcaccttggcctcactcttgcttccatgcttgacattgaacacggagcaagctcctgaacttgttgccgaggaggccacactcttgcgctgccttggcaatgggggaggttgttgctgcttcctccctggccctggtgctgctcttcttctgctcttgcgggcctgcaagcggccttctctcccccaagggtgtaaactatgaagttcaagctctcatgatgatcaagaactacctcaaggatcctcatggtgtactgaagaactgggaccaagactctgtggatccttgcagctggacaatggtcacttgctctccagagaaccttgtcaccggcttagaagcaccaagccagaacctttctggaattctctccccaagtatagggaatctgaccaaccttgagacagttcttctgcagaacaacaacataaacgggttaatcccagcagagattggaaagctaagaaagctcaaaacgcttgatctgtccagcaaccacttctctggagaaatcccaagctctgtgggccaccttgaaagccttcagtatttgaggcttaacaacaacacattgtctggtgccttcccttcttcatcaactaatttgtcaaaccttattttcctggatctgtcctacaataatttgagtggtccaatcccagggtccctgacaggactttccacattgtagggaatccactgatctgtgcagcaacatgggacnagattggtatgggtctttactatgccatgcttacggactg

SEQ ID NO: 64615 - DNA, 558 bp, Zea mays
  Clone ID: MRT4577_158928C.1
gagttcttcagcaccaacatcgagcgctattgccaccgtttttgcattttacaaactataactacagtaatagaatacaaaggggaaaataacaaacaaaatggaaacattgctctatccttattctaccaacagttacataatctgtagatgtagtaatgtaccatgcttagactaggttgtgctctttttttaatctttgtacagttcagctgattgagatttgcttcgacttctgacaggatgcagcaccagttgcttcactttgtattatttacattttctactgggaaacaacggtctccgttggtgtcatcttggcccagaaagctccactgcttgcaccagcagtgacgagtcgtccgtcaggtcagagtggcagcggctgaaggagaactcgggcaccttgaatttgtgtgactcagtgtgttgtaacgcctcccaccgctctgcaagtccatcaccttccagcatccggaccacctctgacatcttgggcctgtgaccagggaggaactgattacatagcagtgctacttgcaccatctcctccagcta

SEQ ID NO: 64616 - DNA, 157 bp, Zea mays
  Clone ID: MRT4577_158929C.1
gccaggcaatcaagctcattgactgcatcattgatccttgagatctctctaaacaatagtgctttgcaacatacatccagaggctacaccggccattggttgaattctttcactctagttatcacaggatgccaaacacaaactatcttaatgatac

SEQ ID NO: 64617 - DNA, 786 bp, Zea mays
  unsure (1)..(786): unsure at all n locations
  Clone ID: MRT4577_15892C.1
tgttttgccactgccatgtgccagcgcatgagtggagactggagaaagagccctactaccctagctaagccggcacagcggcggccggcgatacacgtgcgagcggcggcgtgaggaaaggcgggcggggtgagagatacctaaccactaagcggctgcggcagcgccgcagcataaccggcaccaggtcaaaaaacgacgactgggcaggtttctccatgatcccatttgataggcaccgtatgcatatcctgaatttcagtaccgcatacactttctacagggcccttgccacaccagacaggcacagacaaacacgcgagcggcatgccatgtcatcaccggcagcaaggagcatcacctgctactccaaaattccagagttcttgttgggcactaatgggcagccaatgcccgcagtggggctcggcacagcatcacacccatttgtggcggaggatgtcaggacatccgtgctcactgcgctggagcttggctaccgccacattgacactgcgggactctacgcctctgagcgggttgtcggcgaggccatggctgaggcagtgtcgcacggccttgtggcgtccagngacgagctgtttgtgacatcccaaggtgtggtgcactcaatgccatcctgagcttgtgcttccgtccctcaaggagagcttgaagaaccttcaaatggaantatgggttgatttgtacctgattcattgggcccatgggctgtaaagcctagcaagcctcacttcccaatggaaaggggagacattgtgccga

SEQ ID NO: 64618 - DNA, 402 bp, Zea mays
  Clone ID: MRT4577_158930C.1
gggtgtggtgtttttttttttttttttttttttttttttttttttttatatgggtgacacggggcatatttggttattcttattaaaattgggggcgaagcacccccacaaatccagcttcctggggaccacgtttacccccctacatacaaagggggggccgtgtaatgcacccttttttttttttgggcaaatccaaataaaaattatttctggaaaaaccaaattacttgcccatgcaaatgcaaagcctttttcggcccatcacgggcaaaaggggacttggtaattgctgttgcccccacatgcatgggtttttatgttgggggggttgggggacccgttggggcattcaagggtcgtgcacaccaaccccaccccggtgttttaggaaaaagccct

SEQ ID NO: 64619 - DNA, 621 bp, Zea mays
  Clone ID: MRT4577_158931C.1
agctcccttctcgttgattccctggccatcggagacgagaggcaagacatgtacgaggatctggaagcagctgctgaacaatctagcaccctactccctcatcaccatgacggccgacgacccctgtcctgcctctccaacgcttccctcccttgtaagggttggagtcccctcatctacagacacggcttccaccgctggctccgcacgatccaccgcgacacattgttgaacatgggccgggggaaggcatatacgttgtggccgcgacgactggaacggcagagatgacagcggacccctcggtacctaacggagattggctgcttgttctgcatcttctgttatctgatgccctcaagctgaatgaatgctcgctattgtcaataattaattagtactattttcttcatttcttttttttatataacaaatacgatctaccatccaattcgagaaaatgataatgctaattatgaccatgagaaaattgcccaacacccgttgccttgcttaccatgaggatggatgatacacaatcttacattttactacgtatcaaggatgccacatgattatgttctagcctatatatgccccgttgcactgtatctcttaaaa

SEQ ID NO: 64620 - DNA, 237 bp, Zea mays
  Clone ID: MRT4577_158932C.1
agaagactaaggcatactttgatgtgaaggagagcactagctcatcgaatgctaagactggggatgaggatggctcgaagtgagaggtcgatgacaaggatggcatcaattactacgtatacgatgactatgaataaacagtattcaaggtcacgaggtatcaaacccagtgttatgttcccaattaacttactgttttgatgactttaaatgttaaatggtttccaacatgtggtt

SEQ ID NO: 64621 - DNA, 179 bp, Zea mays
  Clone ID: MRT4577_158933C.1
accacgataattgatcgcggcggcgaaatatcctcaagaaaatataatgcatgctcctgtaggagggagcatcgcatctcctcgtcatcctttctgcagtgtatatactagctcatggcagcgcctgatcccccaccaccaccgcacacacacacaaagctgccaccttgtaattttgt

SEQ ID NO: 64622 - DNA, 343 bp, Zea mays
  Clone ID: MRT4577_158934C.1
ctcaaacaccaattgcaaaatctgaagatgctgtccaagtctttctcccttctcgcttttggcgccttggcctatggccaggagctggtccaagagggcgctccagcacctgtcgtcctcgcaaccgcaaagtctggtgtcatccccgcgaccccaacagctacacctttcacgggcgtcgataccatccagggtgccattgtctctcctctccctcctgcgccaggctaccttccaggtgagacgggagggctcaagggtaccgcagcagcctcttccaaccagccttcagctacgtaccgtgcaaccatgcctgaggagcaatacaaacccttcgttggca

SEQ ID NO: 64623 - DNA, 603 bp, Zea mays
  unsure (1)..(603): unsure at all n locations
  Clone ID: MRT4577_158935C.1
ccgggatcatccatcccccgccgcttttgctctctgctttggagagggagccgcacgcagtgatngatgatgctgctgctgccgctggtccgccagggttccggacgctgtgctcattccaccggtcggcggaggactgtatcaggcttcttcgacgagggcgagagtggaggaaatgacgacacggagagcgcggacctgaaggaggaggtgttgctgcaggagttcttgggagcaagaagtactactacgagcaggagaagaagaacgacacggacgagctggagagcggcatggagaaggtcacggtgtccgagcccgagaagctcgggcacaaggaggaggagcacgaggtcgtcagcgacaagaaggaggagcttatcgccaagctgcaccgcaccagttgcagctccagctcgtcgagcgacgaggaagaggaggcgaacgatgagaacggccagattatcaagaggaagaggaagaagatggccctcaaggagaagctcaaggagaagcctgcgggccacaaggacggacaccacacgggcgaaccgatcccggcgccccgcgcccgcggagaccccagcccaacaccaggaggaa

SEQ ID NO: 64624 - DNA, 1408 bp, Zea mays
  Clone ID: MRT4577_158936C.1
cccggctgtcgacgaggcggtggaagagcgtgctgctgccagacggtgtctccggtgccggcggcagcgatttcctgtgccacctggacgcccttgagtccatcctcaacaccggcatgctcgagagcttcgtgccccgtggggtcgggcccgacaccttcacctgcgcactgcgccgcgtcgggctcctcggcttcgaggtcgccctggtgctgatctccacgtcgccctgaccaagtgaccagtacggattgcctcctcgctactggtcgccaccggggaagccgcggctcccccgtcatccacgacttcgggaccatggccacctcgcactggcgctggcagatgggtctgctgtcccgtcactctgacctgctcaagacggccgacgacgacagggcgctcctctagtgtgccggcgccgagtttgcgctcacggctaacttgctcatgccgttggacgcgcccggcacacggtgcctcatggagttatccttgtatcggaggcagggcatcattaagttccacaacccttccccctcctcgtagaattgcttgtccctgttgatcgaagtgagactgaatcagggggcccgcactcgcacctcccacgacctctttccgccatggggctccggattccaccgtttgtcaggcatgagtagcgagcgatggactggcggatcccggtagagacctgaaccccgcgccaccaccatcgccacagcaggctacatgtttgttctcttgttctagacgcaagcagcagatgcgaaataggcatccgtctcatggtggggaaattgttcacagttgaggatgtcgtaattggtggcctattcgtgatatctcttcttctagagagtatgcaagacaaggatttgctttgggtcttgttgttgtgctcaaatcgattcgggcaatcaaggaagctaaggacaatattttggggcgccagtttggatttggagcaattgtgaggtctgaccgtgtttcacaacagtggacatgtgacaaaagctcacccatcgttaaggaatttgtgagtgtggatgtagaactcggtggcaagaaacgatacttgacagagcctgcagttgccgtgattttggaattagttaggaagtggtggaagatttgtgcaggcatgatgctatcatatcagaagaatttttgctcaacttttggtgagcactggaagaggatagagtggtgatgcccatgacatatactttgttaagtctgtagtttactgttatgatatgttagacaatgcagtaagtgtcatcactcatggtctttgtattgcatttaattcgtgttccagagttctatagtcttgttacaggtgatcgtgaaagctctgtacataatcttccatatatgtttatgctatctgatgtttcgt

SEQ ID NO: 64625 - DNA, 395 bp, Zea mays
  Clone ID: MRT4577_158937C.1
gggttgacccacgcgagaaaaaaacccacgacggcgcagagagggggggttggtttaaaaggaaaaacgcgggggcacctacagagaaaagcaaaggaagaacaggagaacaaggggaccgaaaacagagccaaaaagcgggacacaacaacagaaaagggaatcaaggggagcgcgaacaggaaggaaccagggggcggagaagaaacggaagaggcaacggccaagaagggaaagtcaggccgaaggaagaaagcaaacgacaacggacagagagaggcaacagaaagagcggggaaacaaaaaggacgatggcaaaaaacgaaccgaagacaaccgccagaaggaatgcaagaagaaagggaaagacgaaaggacacgacagagaaggaccc

SEQ ID NO: 64626 - DNA, 227 bp, Zea mays
  Clone ID: MRT4577_158938C.1
gccacgcgtcgcccacctccgaaaattttattttaacaaaaaaaaaaaaaaagaaaggttaaaaaaaaaaaaataaaaaaaaagtgctgacggcttcttccccctaaccacgcgaggcagaaccctgctcccagggagggggcctgcggctgtccccaaggagttcctgccgctggctaccacccactctccgggctttctggcgcctccatgggcaaggacggttt

SEQ ID NO: 64627 - DNA, 256 bp, Zea mays
  Clone ID: MRT4577_158939C.1
ctcgccgccgaagacgtatagggggagagggtacggccgtctccttgcccccatggcccacgagaagaagctgtccaacccgatgcgggagatcaaggtgcaggggctcttcctcaatatctccgtcgttgagaggggggggcctctcacccgtgtcgcaaaggtgctttaggagctcagcgtctatacccccaccggggggaaggcgaggtaaaaaatgctgtctttcggcattcttttgaactataatatcgcc

SEQ ID NO: 64628 - DNA, 360 bp, Zea mays
  Clone ID: MRT4577_15893C.1
gacaggggaacaacatatggatatcattggacaaaaatagcttctaacaaaaacactagctcattcttatctcgtctcgcctgatagcgggagcgatcaaaaggaacaacaggggtgcctactcctaaaccaaatgtagaacggacactcacacggtgactgacgcgtacgcaaacaaccaacataatatcgataagataattatgacgaagccaggatgggcccacacacaaaattaataaattagctgctttcgctccgtagctgtattcaaaaaccctgttccaaccactgggttggaacaaccctttttttttatttcataatccaaaaatttaattaacgaaaaaaaaaaatata

SEQ ID NO: 64629 - DNA, 249 bp, Zea mays
  Clone ID: MRT4577_158940C.1
ttgtggcgcccttcttctccacgggcaggataaattcccccacaatggggccgcaaatctccaggcggcttcaacctgagtacttcctacctgagctactccaggacgacatccttacgcacctccaccactgtgggattcatagtttccatctcaataagagattatgctctgacactggagagcaccaactcctgcaccatataaggacaggataactaagaattaatacgagcttttatcctcaac

SEQ ID NO: 64630 - DNA, 130 bp, Zea mays
  Clone ID: MRT4577_158941C.1
ggggtctccttcgtgcgcggtcttgagtacgtcccaaatttccttcgcactttttaacccatgttgtaatgagttagttcttgttcgtaataagatgacattattagaggccggattttatatcttgcct

SEQ ID NO: 64631 - DNA, 263 bp, Zea mays
  Clone ID: MRT4577_158942C.1
cttgagaacaaccttctcaacggaagcatacgtgcagagatcgtatcgctcggtagcatgcagcatctggtgctcggtggaaacaagctcagcggggagatcccagacgcgcttcacctcaatgcagggcctcctagagctgcagctcggcggcaactccctggacggagccgtgccatggagcctaggcaagctccagttcatctcccaggtcatgaacatgagcagcaacatgctgagcggcacgatcccaagcagcctcg

SEQ ID NO: 64632 - DNA, 1464 bp, Zea mays
  Clone ID: MRT4577_158943C.1
ggctagttctagatcgcgagcggccgctcggatctagaactagaagagaaattcaaactgatgcatccgttcaaaatttagttgaaagaacagatcacactttccaagatctagtttctttcaaacaacccccggcagatgataaaatagctcttattgacctaactactaacagggaattgccttctcagatggatctcgacatcactgatgcagagacaaaaaggtctaatgcggtctggaaaaatcttgagctcgcaaccatgaaattgtcccaagaactggcagagcaattgcgcctggttatggaaccaactcttgctagtaagcttcaaggggattatagaactggaaagagaataaacatgaagaaggttattccatatattgcgagtcatttccgcagggacaagatatggttgcgccgaactaagcctaataaacggaattaccaagtggttattgctgttgatgactctagaagtatgtctgagggcaaatgtggaaaatttgctatcgaggcattagttactgtgtgccgtgctatgtcacagcttgaggttggacaatttgcagttgcaagttttgggaagaaggggaacgttagtgtgctacacgattttgatcagatctttaatagtgaagctggagttaatgtgatctctagcttgtcgtttgagcaagataacaaaattgaggatgaaccggtgtctgatctcttgacacatctgaatgttatgcttgatactgccgttgcacgggcacgcaccccatcagggcaaaatcctctccagcaactgatactgataatatctgatggaaaattccatgaaaaggaaaacttgaggcgccatgttagagacgttctaaatcgaaagaggatggtcgcgtatgtgctcctggatagccccgaggattctattattaatctaaaggaagcatgcttcagagtaggggagaaggtagagctgaaaaaatacatggattcctttccgttcccgtattatgttatgctacagaacattgaagctcttcctcgcacattggccgacctgcttagacagtggtttgagctcatgcagagcgccaacgagtgacccttgggagttgggagtagtgccacgcatttagctgtacagcaaactacattctagcttccatttttgcttgggcctggacagttctgtggtggcaagcttgattgtgcacaaatgccttcacggttcaaatcgctttcctgaaatatgatctctggtcgcaggcttgattgtctaaaagcatcatcacaattcaaattgtttttgggaaatttgaatagaatttccgctttcctgaaatatggtctctgctcgcaggctttattgtgtaaaaacatcatcacaatttaaattgtttctggcaaatttgaatagaatttccgtgctcaaaagttatagtttgttttttttttacaaaaaaaaaaaa

SEQ ID NO: 64633 - DNA, 378 bp, Zea mays
  Clone ID: MRT4577_158944C.1
taggggccttttttttttttttttttctttttttttttttttttttttttttttttttttttttttttttttttttttttttttttttgggggagagccgggaggtttgaaatcaaaaaaacataaaaaaagccccaactgaatggatggggaaaaacaaactttaataaaactcccaaaagggtggatccaggaaacaaaacttcccacaacatgggccaatgggccaccccgaataaaaagctgccacaaaaccgaaacaactcccaaccacaggtgcggggccgggaccccccgaaccccgaccggggggggggctcccccttgggtccccctgggggggggggcccccaaggtctgggccggggcaaccccccc

SEQ ID NO: 64634 - DNA, 199 bp, Zea mays
  Clone ID: MRT4577_158945C.1
gacagtaattgaccagcactgttaattcaaatcaatgcggttcgtctctcattaagttgccacagatcgatagtgaatacagtcacagctcatgtgcttgataccgaggcatgatccataccctgggcgatgtatgggtacgtatcactaagctcacacatgatagaagggcgaacgggtttttatgatttgtaaaaca

SEQ ID NO: 64635 - DNA, 772 bp, Zea mays
  Clone ID: MRT4577_158946C.1
taataatagagtgtatagagataaatgtcacaatataatcagaatacttattacatagtggaagtcttacaaaataaattataaatatgaaacgaactaaagtccatccttggcgccataaagtcaactaggagacaccacctagatcaattcgaactcctcgttgtgtgcctcatcttgaaccacttgttcttctcctggcgcttgagattccaggtaccaggatgattctttagatcctcgtgacctcactgctagtcgtagcaatactggcgcttgagattccaggtaccaggatgattctttagatcctcgtgacttcactgcgactaatgatgcgctagaatccccgtccgcggtgacccgtggatccgcgacggcgatggagctacgacgagtaattgctgctcctcccgtcgcccacagctccaggaaccgaatcgcgcgcatctggtactcctctccgacctccctggcggcggaaccttcaacccgcccggctatggcgaggaaaggtgcagcggatgagacgactgacggtggtgcacaggcttctgggatctacgattcagcgcgcacaagaccccggaattgattctgggcgcagaatagaggagggaaagggccacaccggcggcgaccgcaatttcacacctcgcccaccactggctcactcagctctcaattgctcccgatggcggtggtgcttcctgagccctttttttcttttgcgcagaacgattcagggaaaaaggatcccggaacggccggc

SEQ ID NO: 64636 - DNA, 315 bp, Zea mays
  Clone ID: MRT4577_158947C.1
gggggcccaaatcacaatcacataattatttttagatatttaaaaaacatatcggttattattatttgacaacctttaggggcccaaagcattaaattgggatcccgaagcccacaacaaaaattcccaactggtacccttcatgatctaactgagtaaatagatggcacaccgaagctccatttggggatggcttcatttcaactttaaaaaaaacttgcaacttttaccttggagcaaaattttccttgaaaagtgtccccaacttattttgggagccaaggcatatgacattaaacctttgggtcacgcaac

SEQ ID NO: 64637 - DNA, 277 bp, Zea mays
  Clone ID: MRT4577_158948C.1
ttctagatcgcgagcggccgccctttttttttttttttttttttttttttttttttttttgtgtggttttttttttatgttttttttttttttttttttttttttttttttttttaaaaacaaacaaccttgttcttcctttataaacaatttttttggccaaaaggcattcttatagcttatttgtctcaacaaaatactattgcttcaaaacttggggctcacttaaatcaccatccactggcccaagttttggaaaacattacaatcatgattg

SEQ ID NO: 64638 - DNA, 162 bp, Zea mays
  Clone ID: MRT4577_158949C.1
ccgggtcgaccccgcgtccgctctaacttcttaggcagagcgaaggctgctacagtatccggtgaaagagctagacgccccactgccccacccatgaggctcgatgaggaatctgactactacatagtatatcaccctccgcacacgagataggtatgctgc

SEQ ID NO: 64639 - DNA, 307 bp, Zea mays
  Clone ID: MRT4577_15894C.1
gctgttaactacaaaatggtaacgcacagatgccgttaaggatggacccaacggtgataaatttcgattggcgcgtgctcgtctggatcccaaacatccttgacttgaaatactgcaagaaagcactatccaaatggattttttccttggtgtgctgaaccactgacatacccacagattgacatttgtaatggcccgacccgaatagcaaaagacaaaaggggaatttgttaaaacagataaaagctcaggtcactgcacaggctgctggtttcacactttcccctgaaggcgtacgacgtggaca

SEQ ID NO: 64640 - DNA, 774 bp, Zea mays
  unsure (1)..(774): unsure at all n locations
  Clone ID: MRT4577_158950C.1
ctcactctcgtgatcgcggcgattgtcatcgctgcagcagtgaccctgcactacgttagaacttacagctactggaaaaagcgtggcatcaacggtccaacgccactgcccatcatcggcaatgtatcactcaaccctgacgacacgctgatgcaaaacacgagatgggtccataaatacggtgaaattcacggcacttacgtcttctctctgcctgttgtctcgatagctcgagttgacatgctaaaagaaattttaattcaacactttcataaattcagcgaccaggctaccatggtgaatcatcctctcgagaaggaaaatttaatcaacaaaaatggctacgagtggaaagctgatcgagacatcatgtcacccaccttcagctcaggcaagatgaaagctatgtatccgttgatgcgtgaatcgtactcgtatctcgatcgtgagcttgaaaaatacgctggaacagagcgagatatcgacacaaaattagtcttcagtcaactgtcaaccattgtcatcactcgctgtgcttttgcgacagacgtggatgctttcagtgatcgaaataatgaactcatcaaacatcttgactccatttttcacatgggcttctgggaaattgttcgtgtaatcaccatcttggctctgcctcaatggctcaacanattactaaagacttcgttcttcaaaccaacggcgatgcagtatttgaagaagtttgcgataatatactccaacaacgacgcaataatccatctaatacaaatg

SEQ ID NO: 64641 - DNA, 364 bp, Zea mays
  Clone ID: MRT4577_158951C.1
tcctactagtactaaaccgacacctcctctaactatattatccatctcttacactctatctaaacgatgcatacttacgcactcatgcaacctaatatctatttacatatatatagttacataaaatcaactcactgacaatctacatacatacatacttacatagaccatcactacattaccctaattactcttctagcaatacataatattctcacctgctataataataacaaaaattccacaaactatctttcttaacaacagctcctccatattaatcactaatcgcaccccttctgcagctcatcatcaacctcacctgttctctttactacccgcaacatcactactattcttatca

SEQ ID NO: 64642 - DNA, 271 bp, Zea mays
  Clone ID: MRT4577_158953C.1
cggtttgcaagccaccaaataccagggagtgaaggatagtgattcttgagagggcaaactcaggaggggagccctgtgattgtccagctcatgctccgaggagggtcccagctgcagtgtgcatgcggggggaaccaggtggagcctgccagcctccctgcagtaggaaaacaatgccagggatccagggagactaaggtggccggaactcgcggtcacagtactggagagagacacacagatctaagtcgggggccagaggagctccctc

SEQ ID NO: 64643 - DNA, 996 bp, Zea mays
  Clone ID: MRT4577_158954C.1
gcctggccggaaaaaaaaaaaaaaaaaaaaaaaaaaaaaaaaaacacccgtgcctgtgtctcaccagcccactttccccagtactctactcacccacccactcacggactcatctactgagcagcgcggtgggcatccgagcgagagggcgagcgcggaaggatcggaattccgaaggttgggcatggaggcgagcggcgagaaggctgcggtggtgcgacggctgatggaggcgaaggaggtgtccgggaagaccttctcgggaatcgccgccgagacgggtctcaccaacgtctacgtggcgcagctgctgcggcgccaggcgcagctcaaggccgacacggtgcccgcgctgagggcggccctgcccacgctcacggacgacctcatcgaactcatgatgcagccgcccttccggtcctaccaccccaacatcgtccacgagcccgccatttacagattgaatgaagctgttatgcattttggagagagcatcaaggaaatcatcaatgaggagtttggtgatggaatcatgtcagccatagacttctattgttcagttgacaaggttgaaggggccgacggaaaagatcgtgtggtggtcacatttgatgggaagtatctaccttacactgaacagaaatctgaacatatgatgtctaggccaacccgcaagacatcttgatgtggctggtgaggaggagaaacatgatcgtagtggttggtatcgggctcagcaaggatcgagcatgccattttctttgtgtagtccaaatcatcaacacaataaacagacctatattgatgataactgtcaaaaggaacattaaagtcaatgttctacctggcatgattgctggactgtattggatgatgctgagataaaaagagagaaaaagtgaaacaaactggattcaaattcatttttttcaaaaaaaaaaaaaaaaaaaaaaaaaaaaaaaaaaaaagcaaaaaaaaaaaaaaaaaaggccccta

SEQ ID NO: 64644 - DNA, 489 bp, Zea mays
  Clone ID: MRT4577_158955C.1
ccggaaaaaaaaaaaacaaaaaaaaaaaaaaaaaaaaaaaaaaaaaaaaaaaaaaaaaaaaaaaaaaaaaaaaaaaacaaaaaaaaaaaaaaaaaaaaagctaaaaacaaaaaaagaataaatgtgggaatacagattaaaataaaaataaaaaaaaatatccttacgagtcccacctggggtgcctcatgagggggctaactcgcccccattggggaaattatgggtggcctgtttttcagtggtgaaaacttgtcgcgttctcctgttttaacaaattgcgccaacccgctggtaaaaggtgtttaagaagagtcgggccctaattcgggttcctcactcagtgacttggggcgggccttcgtgcgctttcttcgagcggtaacacctcactccccggcggtattacaggtcgccaccacgggcggggagagcggcatgtaataacatggggaatttcccggctgcaaaccggcgagaaccaggcca

SEQ ID NO: 64645 - DNA, 2637 bp, Zea mays
  Clone ID: MRT4577_158956C.1
atggacatggagaggggggcgggaagcgagcaggggtcgcccgatagcgaaatgggcgaaggcgacaacgatagcgtcggctacggcgcggagatggaggtggacgccgggagcggctcggctccggcgagctcggcgtccgcatcggcctcggtctccgcgtcggcgtacgcggcgcgcgccggcgccttcgacggggtcgaccctttcgagggcatggagttcgacgacgaggaggacgcctggacgttctataacgtctacgcccaccgcgtgggcttcagcacccggatcagcgtcatgcaccggtcgcgccgggacggctccgtcatgtcgcgccagttcgtctgcgccaaggagggcttccgcacttaccgcgggaagaatgaggtttcccgtgctgatgccgcagacgctggcgacgacgatagtgggaggggtcggaggacacgcgctgtcacccgggttggctgcaaggccatgatccgggtgaagaagcaggacaatggccgctggagtgtgactaagctggagactgcacataaccatcccctggtccccacgaaccaggcacactgcctgcgtccgcacaagccactgtcggagtgtggaaagcaccgtccttttgggggccatcgaaatggcggctcgcttctggcaattgagccaccgccaccacctcttacgccgcctgtgcctcacacaagcgtagctcaagtggttcctcagtatttttcggatggcacctgcattccctgtagggtgtttttggattatgtcaaacgcatgcaagctgaagatccagcgttcttttatgccatgcaatttgttgaggggcgtccagtgggtaatgtgttttgggctgatgcgagggctaggacgacatacaaagactttggagatgccgttgtcttggatgactactgcaaaaggagcaagcatgaactgccacttgtcgcttttactggagttaatcaccattgccagccaatcctatttggctgtgccatcatggcacataacaatgaagtatcctttgtttggttgtttgagacatttctcttagcaatgtctggatgccaccctacatctcttattatggagcatgataatgttttaaaaccagctgctttgaaagtatttcctctaactaggctccagttttgtaagtggcacatcatgaacgaagcacatgataagctgtcatatctcctagatgcatttccatcattccatgacgactttattaattgcatcaatatgtctgagacaataaatgagtttgaagaaaattggaaggcattaatttctaaggccagctctcaaaaaagtgaatggcttgacttggtgtacaattgccgtcatcattgggtcccggtatatctgagagatacattctttggggatgtgtcgttaaagctgcagtgttctagcaggagttcgttgtttgaaggttatattagtgccaaaactgattcacagtcattcattcagcaatatgaaaaagctttagactgttgttatgagaaggaggtgaaggaagaatttgaaacaaaatattcacttccggatattaagacatcatctcctatagaaaagcaaggagcagagttatatacgaggtcaatgtttttgaaattccaacaggaattgatatgtgccactgcttacactgctgaaatggtgaaagaggagggcaatgcttcaatttatacagtggccatatctgaaggaagtgagaagtctgtaacagttcagttctgttcttctggaagttctgcgacatgtagctgtcggatgtttgaatattttggtattgtctgcaggcacatacttactgtgtttggtgtaagaggtgtctctgcacttccttctcattattttgtaaaaagatggacaaagaatgcattggatagaagcttaggcaagaatgttgatgaagttagcagagtggagcccaaggaggagcaaagaagtagcgctgaagatggtgagcaatccccgacatggcgttacaacagtttgtgtcatgaagcactaaggtatgctgaggagggggcatcatcattagaggtttatattgtggcgatgcaagctcttcaagaggctgctaacagggttaatatggccaagagaggtattggacaggtagcaccattagcggtgatgccaattgcagcacaaccaccagagagttttgcaatatatcaggagactacttccaataagcaaaagaagagaaaaaagaattcaagtagctcaagggagaacgccacatcaaatcaacttatgtatgtgcgacaacctgttaattttctttttgttgctcctggttcatcaagtgctttacaagggcctagtcaactagttgctgctcctcctgtttctttgagtagcaaatatggacaaacatctggtgcaaataattcagtagatgacaatatacctcctgcttctgtagttgataagttttctgggttacctgaccaaaatgcaccagcaacttcaactggaaatctgcaaggtggagtaacaaaatccataggggctgattcacgaataaaagaggtagactacttttgctatgctgaccaccgaaagttcataccctgcatattttcaaatgttctattctag

SEQ ID NO: 64646 - DNA, 1188 bp, Zea mays
  Clone ID: MRT4577_158957C.1
tcgacccacgccgtccgcggtacgacaagaagcaagtgatagtcaattggtcgtcaacgtgtgacaagtgttgacatcccgttactaatatgaccgtccctccacgaagtgggtctaatttcgacgcactttgtatgtgcttcatgcatttcattctcatatctctataatctcttataaagcaccaattttatttctcccaccgtcaccctttttgcaaaaaaggttcttatacttttttctaaacaatccgcgatttataagtcagatctgatcctgcggactccacccgaccccacacatctcgcaaacggtagttttgattgaccctgcctgtacccttcctccttatcgcctcgcatcccaactcgacagggtgacagtcgggcctacgtcaggtgttccaggcctacattttcaggccttatccagcgatgaacaccctatgtacgccccacctcgtctcctccgttcgaccaccacggagcaccagatgcagcgaaagggtagcgacttcaatatgaagagtaccatcgtgggcaaagttgttgacgaaatgatcggtgtgcttgtatcgagaaaagttcgtaccaccgtgaaaacgcggattttttggcctcccggactgtttcatccacatgtctgatgacaataattttgcttctgctcttttttgagccatctacctccgtctctcatcttgctcgtgttcgctaacttttttctattcggttttgcctctcataaaccacttggtggcgatggaagccacgatggtccaggaccaacgcacgttcccagcaccttcaatagtcccgtcacaatcgcaccgtcgaagattttgatgtcgccatctttcatgcaagagtagatcgaggtcgctgaggtgctattcgggctcagttctcgtgcatgaccaagcaggagagcaaccgactcgggcaaagcaaagaatttgcaagacattaagatcgatgacaatataaatgtattcgtttttacgtaattgttatgcactaacattttattgaatagttcatatatcgtcgcaacgtaaaagtattgtactggtagttattaaaatatcactcactgtggttacaattcatgttcatgcatatctgcaaacaattttatagtcacataatatatttgagataacaattcaaaaaaaaaaaaaaaaaccag

SEQ ID NO: 64647 - DNA, 202 bp, Zea mays
  Clone ID: MRT4577_158958C.1
ctccgaccacttctaatggagctgtctgtaatcaatgttcattcactatgcaccatctttctgtttattgtataaagccgcaatacggcgcaacctgaggctctaacaacggcgcgtagtgttttacaccatcaaatgtgccatcacttgtgggcggctatgttgccccaggaggtaaccacacacgtttccactatggaaa

SEQ ID NO: 64648 - DNA, 171 bp, Zea mays
  Clone ID: MRT4577_158959C.1
acgactgactacaccaccgcgtcgtcgtctaattaaaaaggatacagagatggccctggggtgtcaacatatggccaggcgagcgcgattcttcgtcgctcgttcttttaatactcgcggatgtatacatgacaatatgcaaggtagtggcggaagagacaactctgactg

SEQ ID NO: 64649 - DNA, 306 bp, Zea mays
  Clone ID: MRT4577_15895C.1
atgactcgcctgaggccaacctcgggtgggagacgtagtcacggctcgcccgagaccaacctcggatgggagaacacagtcaagactcgcccgagatcgcccatgggcgggagaggcagtcacgccttgcctgaggccaccctcaagcgggagacacattcacgccttgcccgaggccgcccttgggcgggagacacagtcatggctcgctcgaggccaacctcgggcgggagacatagtaacgccttgcccgagaccatctctgggctggagatgcagtcacaccttgcccgaggccacccttag

SEQ ID NO: 64650 - DNA, 462 bp, Zea mays
  Clone ID: MRT4577_158960C.1
gggggggggggtgttttttttttattttttttttttttttttttttttttttttttttttttttttttttttttttttttttttggcagaactttatagttgaattgaattggattgtacaccttatgaactaaaagctaggggcttatttggggggggagacaaatactaggatttggactgacatacaaaaaataggttgggattaataaaccttgacgggctttttttttttttttttcccctcggggggtggtttagggtaaggttcttaattttttttttttttcccctcagggggtgttttaggttaaggttcctccaaaattcacgggttttttttttttttttgggggggtgggttttttaaggggggccattagaatgtgctgaaccggtttcttcctgggcctcctttaacttgggcttctttttctttttcttcttcccgggtccaaacta

SEQ ID NO: 64651 - DNA, 108 bp, Zea mays
  Clone ID: MRT4577_158961C.1
tctacacctccagcgaccgctcttaatttacaaccccacacgtccgactagttgtaggtctctaggccgcccttgcacaccaacaataaaccgttgtttgccatgaat

SEQ ID NO: 64652 - DNA, 267 bp, Zea mays
  Clone ID: MRT4577_158962C.1
caaatcaccggcactgatcactccaattcaatcacgcatgtggtataagccgtccgcgtgcagtacgcgattaatagaaggccattgatgctttcataagtactccaacgactcaaaatgatgccacggcatcactccaagggattttacaatggatatcagcgcgccgacacattcgagagttccccgcatagattccaatcgagagctaacgtccctcttcacaaaaagcgtatgacgactgcgatccgtatcggtatcgtggtg

SEQ ID NO: 64653 - DNA, 290 bp, Zea mays
  Clone ID: MRT4577_158963C.1
atcatgaatctcataacataacatgtgaaacacgaatcaagcataggcgccatggggttcacagatccacacctaaaccgttaaattaaactgcgagcgattcatgaaaaactaagaccaaccactcagatctccaccatgggataaaaatccaaaggaacggacgctgggggagtcgacgataacagatggaggtcggcccgacagaccagatcagagagatctaggagagctctccgcagccagtgtccttgtccaccttagtggtggagccgtggcgggtgcccacc

SEQ ID NO: 64654 - DNA, 332 bp, Zea mays
  Clone ID: MRT4577_158964C.1
gggaaaaaaaaaaaaaaaaaaaaaaaaaaacaaaaaaaaaaaaaaaaaaaaaacaaaaaaaaaaaaaaaaaaaaaaaaaaaaacaaaaaaagggggggccccccaaaaggttcaagcttaagtaccccttcaatgaaaattaaaacccctccaaaatggcccccaaattcaattccaaggccctctgtttaaaaactcctaaacgggaaaacccttgggttaaccaacttaaacccctttgaaaaaaaccccctttccccaaccgggctaaataccaaaaaggccctaaccattcccctttccaaaaatttgcgcaaccctaaatgccaaag

SEQ ID NO: 64655 - DNA, 757 bp, Zea mays
  unsure (1)..(757): unsure at all n locations
  Clone ID: MRT4577_158965C.1
ttgggtacctcgaggccggccgggagaaaactagagacgtttggtcatcacttgaagttctgagcactagctggaggcatggctttgcagtgccttgtagactggaagggacagccagttaacccaaaaaggcatggtggggtcaaagccaccatgttcatctacttcctggttgtgatgacaaacattggaaacatcccgatgctgttgaacgtggtgagctacttgcatgggaagatgcacatggacatcgccgacgcctccaccaccgccaccaacttcttcggcgcagtctgtgtcttcaccttcctcggcgccttcgtctccgactcctacatcacgcgcttctacactatcctcatattcgccccgatcgagattttgggttacatgctgctagcatgccaagcccacctgccgtcgctgctcttcgtcgtgtgggtgcaggacaacgaaggctgggacctcgccttcgcgctctccgccctcgtcgcgctcctcggcactctcgtcctcgtcgccggcatgccattctaccggcaccagaagcccacagggagccctctcacaagaatccttcaggtttttgtggcagctttcaggaagaggaatctttcagtgcctgaggattttgttgggacgcacgagaccaccggggaaacaggcaccatcgttgaagtgctggagaggacttcaggtttcaagttcctcgacnaggcggncgtgaacgacggcgacgcgcggcggtggtcgctgt

SEQ ID NO: 64656 - DNA, 587 bp, Zea mays
  Clone ID: MRT4577_158966C.1
ttttttttttttttcttttttttttttttttttttttttttttttttttttttttttttctttttttcccctttccctttctactccgttccttataagaggtttccggggtattatttttcttcgactccgggggaaaaaaaaaagaacgctctactcaaaaccaccccccccaaaaaagggggccccgaagaaaaaaactccggacgccgccatgccgaaaaaaaggggtggcccaaaaaaggggacgcgcataaaagggggtcacgcatcctgcccctcccactgaggggaaaaagggaggcccccgggggagcccacccttgggggaaaccccccaaagagaagtaggccccggccctggtgacggccgatcaaaaagacgcgccaacgagcgggggcccaaaaaagaggaaaccgaaaaaaaaaactgcagcacccacggcaaggggggatcttataaaaacagcaaaatgaagggtggtaaaaaaggaagaccggcggccaccatcttcgcaaccaccacccccaaagaaaaggttcttccacgggattgcactaccgcggaaaaagacgggcccgcctac

SEQ ID NO: 64657 - DNA, 437 bp, Zea mays
  Clone ID: MRT4577_158967C.1
ggagaacaagataaaaacatatatatatgtgtgatatatagttggaacaaagtaagcatttgaaaagaaataaccatttcaagaatgaagttgcaataacattagttatgctgagtccaaggcaataagaaactagttcagcaaccgaaaatacaaactgaaactcagcagcatgcgatatatgtcgaagaattattccctgctggctatatatatgaaaccaaattattatgatgcatgctgcaacaacagtttagctagcaccggccggcccgcggagaggatcggactagtagagataacggagggtggtgacataggaagctacacgctgcggaagcttaccccacactgaagctatatagcacgtgtgacggcgacgaacatggaacgcaccgaaatgcctttgggagcttccgaagcggaagaacaccgta

SEQ ID NO: 64658 - DNA, 360 bp, Zea mays
  Clone ID: MRT4577_158968C.1
gggttgtgttttaaaaaaatgagtgtattgctttatagttttggaatattcatacagtataaaataatggttcaatctataccttacgtacagtaggtttacgacgaccactggttaggccgtctacccttacagtacaagttgttaagccaacatcgtccgccgacttttaaaatgcttggaaccaactgctgtcacaatttttgaaacaaacacacattattattcattgtattattaacttcaccccaaacgcttgctgggaattaactggataatctatccatcatgatggtatacgtgacgggaggcatctaatctgcgatctaatcggaacggaactttagatgattggtgatc

SEQ ID NO: 64659 - DNA, 470 bp, Zea mays
  Clone ID: MRT4577_158969C.1
aggcacaactattacgttcactactactcatcagtctgcacacaacaaacgcggaggggggctccacttgcactaagtgcaccacacatggcccatcgcacacatggtccacaatataaacatcatcttacatggataaaaggtcctgtatgataacacatggagcttaacaaaccatttacatgaacgcttgggatggggctctaaactggatcggcttgatcttgaagtgcaggctgaggagcgaaaacaccaaacacttcacatcctgcacaatggactggaaaatccggaggccctccggcttcttgctggactggacatcgactagggagccaatcttgaaagtggcgaatgaaatgtcgctggttgcccatgacgatccagagctcctggcgctcgatgcggtcgggctcgggccagttgctgtcctgctccttatagggaacggactcctggatgatcctcct

SEQ ID NO: 64660 - DNA, 176 bp, Zea mays
  Clone ID: MRT4577_15896C.1
cggaacccggggcccacgcgtcccttgaaccaccaccgaattggggagggggcgaatcgggagacccagtgcggcctattccaccgcgacctagatcagtggtctggccgcttgcaacctcggggttgggcgaatacgcggcacgattgtgcaaccaatcacggtcgctggaccgg

SEQ ID NO: 64661 - DNA, 333 bp, Zea mays
  Clone ID: MRT4577_158970C.1
gggaacggatacagggtactatatctagtattgagcgaatacagatacatgcgtaagccatttttttctagaaaaaaacaatactaataggaatattacacgttttagtacttttttgggtaaacaaacagtatattaaaattctaaaacagtttcaacctgccaggaatatggaaattcccttgaattctattatttggacttaccactccaattttgcatatttccattttgacagcactccaatagacaagcctgccgagcatttccattgaattttccaaatcgaaggtgcaaacccccactaattatgcataagtgcttaatccacta

SEQ ID NO: 64662 - DNA, 236 bp, Zea mays
  Clone ID: MRT4577_158971C.1
cttcctcttttttttttttctagcaacaaccaggggagctgcctcacatcatggtaatggcaacttggacaaccatagtacaataggaaatgcagttctgtctcatggaccatcgcatttataagtaatgagcacccatctagtacctaacatcgccacgagcacctcaaacgacttattgctgactagtaaagatacaagggacatcatatctttaccaagctcttgggatgatg

SEQ ID NO: 64663 - DNA, 195 bp, Zea mays
  Clone ID: MRT4577_158972C.1
gctctctctcccctcatcgcagctatgtatgcgcacggacgacaatcccttcttctccttgttagcctacacctgctagcgagctaatatcgtttctgtgactgatagtaagtggcacgattgtcactcactccctctcagcctgctatagctctgcgatgagccagctgccaagcctggctcatcgcatgcatg

SEQ ID NO: 64664 - DNA, 167 bp, Zea mays
  Clone ID: MRT4577_158973C.1
ttcttccgctccaataatggagtttcctcaccactttcaccaccacgtccatctccacatacacgactttatactaccacataggccctcctaccccagtctactgctgctacttccaaccacctccaccccacccgtacttcctctctcccttcgacccctatcct

SEQ ID NO: 64665 - DNA, 342 bp, Zea mays
  Clone ID: MRT4577_158974C.1
gtgcgcacttacccccccttcggttaccctcctggcgacgactgggcggcgaccggccgtcgcgcgcccacgccaggtttaaagtcttgtaggccctttcggcgacttgagcaccacaggtgacaaggatagttttggtactgaaggaagacattttgacgcgtagacctttgacggtggtggtggctttaaggtaaggggtggattagacggaaactctgtctgaaggaaggcaaaagtgtaagagagcttgtccaagaggatgaaggtcaggagtagattgggccacatgtgtaggagggaagatcatgcccgaatgaagtgccagctggaggcggtttg

SEQ ID NO: 64666 - DNA, 410 bp, Zea mays
  Clone ID: MRT4577_158975C.1
gtcataccaatctcccgtgggaactatatgtttatatgggggcaaaaggaaaactgacaacacatgatactaggagtacatttattataaagcactttaacaagggccgagcctgcaacgaaacacagagctagaatgctttactagtaccattggcaggcattcattattcgactgataaaagagctaccgcttgatttaacatcctagctcggcggacttatacacataacacaccagctgctgcactgcaatactgacctacccttacagacatgactgatgagccatacatgagatcaccgcacgagcgttcactggtgcgtgtgaccccgcggggcgggggacacgaaggctcggctcatagaagcataaggccccaactaagacctgaccctcaagaccatccc

SEQ ID NO: 64667 - DNA, 2100 bp, Zea mays
  unsure (1)..(2100): unsure at all n locations
  Clone ID: MRT4577_158976C.1
aattcgcccacgcgtccgattcagtccaattgccacacactgcctgacgcaagctcgctcgtccaagtccgacgttgataccattggccgctgcgccgccatggccgtgtcgccggaccagcagcagccacctgcaggggtagggtctcccttgccgtctcctcgcctccgcgtccgcgtccgcgacaccaccctcgtgccgccgtctccgtcaccaccggagacctcgctcccgctcaccttcttggacatcttctggctgcactccccgcccgtcgagcgcctcttcatctaccgcctcgcccccgacgctgacgtcgacgccatcatctccagactccgggactccttgcaccaggccgtccgcgccttctaccctctcgccggccggcttcgcctcacccccggcacgtccgaccgctacgagctgcactaccgcccgggtgacgccgtcactttcaccgtcgccgagtgcgagacagatgacgcggacgncactatcgacgccctcgccaccgacgagccccgcgaggttgccaagatcgccacgctcgtgccgccgctgccggagcgcggcgggctgttcgccgtccaggccacgctccttcccgcgcgccgcggcctctccatcggcgtcaccgtgcaccacgccgcctgcgacggctcgggctccacgcatttcctgcacacctgggcggtcgcctgcagagccggcgcagaagcgccgccgccgccgccgcctgtcatcgaccggtcactcatcgccgacccaaggcccatcgtccgcctctcgtccgcaggagcgccgagcactgaagagtacgagttcgtcaagatgtccgccgaccagctcttcgctacgttcgcgctgtccaaggacgaactgaagcgcatcaaggacgctgtggccgaggaggctgcgaggcgcggcgtcgcgccgccccggtgctcctctctagttgccaccttcggcttcgtctggtcgtgctaccagcaagccaaggaggccagcagcggcgccggagagttccctatgacctgcatggcctttcccgtcgaccaccgctcgcggatggagcctcccctgccggacaagtacctcggcaactgcgtcggcccagcgttcgcgctggcaccaacaggcgagctggcacaggtcggcgcaggcggtttctttagcgcgtgcgccgccgtcgcctcgtccatcgacgaagctgtacgcgacatcgagacatcaaacgtggaggtgtggtttgaccgcatcagggatttaatcccgatgggttttctgaccgtggccggttcgccgaggttccgcgtctacgatatggacttcggattcggccggccggcgaaggtggatgtcgtgtccgtggcgaggaccggcgcagtggcggtggcggagagtcgggatggtaacggcgggatagaggttggggtctctctacagccggctgccatgaagaggtacaggaagtgcttcgcggatgctatcgcgtggctccaccagaggacatgagagcgacaactcgatctaatcaaatatggagaaacgggtcttttacggagtctatcatgtgatgaaaaatcaacttgcactttcttccttttaaattatactaccatattctagcttttcaactagataaaccttttctattcgtttagatatgcacactatctagatatgttataaaacacgattatgcatttaaaattatttaaaaagcttacactttaatatagtgagaggaataaggggttttgtttgttgcctcacatgtcacaattagtcacgtctaaagttacgtaagtttgactaagttaagcatatatttgatttcgagccacagctgtggtaagatttttctcctcttacatatgtcttacttgtgtggaaaaattcctttagacgtggcaaactgtggcgcagaatttgaccgtctaaccttagacaccttatgcaagtacggtataaaaatatgtgataatttttggtaacatgtatagaaccaaacatgccttaaaatttccattgaaaaatattttgggctatagattctctactatataaagcaattgtttcaacagcgtaccacg

SEQ ID NO: 64668 - DNA, 331 bp, Zea mays
  Clone ID: MRT4577_158977C.1
acatgaacaaacatcattaatataccatgattcgcaatcacgtggccaaacctaacaaccccttttagaggaggtaacgttacgttcagaacagtgcagtacaggctctaccggtattgtttatttcctgacaagagacccaacggctactcatctgatacaacctgactgactgataaaagagcagatggtcttggatctatgtctgtcacactcgcgtcctgctgttctcagcggctctcacttgggggaagcactgttgcgttataccttcaattgcagtaaacctctcgtgataatcataactcaaaatcttggcacgagaaatcta

SEQ ID NO: 64669 - DNA, 420 bp, Zea mays
  Clone ID: MRT4577_158978C.1
cacaaaaaggaaatgaacaaaatccgaaacaatccaaaacagcacccccggccagtattaatttgcccccacatgaaatctaatcaaacggcaaacatagggggttaagcctataaacacacaaggcttggccaatgtatgttggagcaacacacaatagagaatcttgacataaaagaaaagagacagcataaattcttatgccccccccaccgcctgaaggaaccatcttaaccaataaccatcccgttaaaaaattgaacacagccttggaagtaaacccactcacaataaacagctatggaaaaggtaaaatgcatgtgaaaaaagatttaaagggccaacccaaccaaaccaaacggggctacaaggccccacgccagaaaccaggtggtaaaccgaggccttgcaaccaaactt

SEQ ID NO: 64670 - DNA, 169 bp, Zea mays
  Clone ID: MRT4577_158979C.1
ccgcaccccgtaggacggccccgaacgaggaccggaccgaggcccacgaggcagagaacgccacaacaaccgcacaggcgaggccacggccgactacgggcggagaacaccacgcaccgggcgaggaccccgagacggtgcccaaaaaccggcagccagaagcgaacca

SEQ ID NO: 64671 - DNA, 671 bp, Zea mays
  Clone ID: MRT4577_15897C.1
ttttaatccctttttttttttttttttttttttttttttttttttttttttttttttttgggggggggttttttaacaggcccccttggaaacccctttttttaaaaggccaaagcctggggatccaatttagaaaaccaccccctaaaaagggtttccccaccccaaagccaaccctttgggggtccaacaacctttaaaaaaaagggggggggggggttttttacccttttacccccaggaaaattggtgccctttttttgggggggaaaaaaatcctaagcccttccaaaattgggttaaagttaaaaaggaaaatttttttgaaaaacccaaaaaaaaccccccccccttttttttatatccttttaattaagggggaagggggaaaaaatgggggattaaaaaagggaaaaaaatgggggggaaattaggccccttcccggccctttttcaaaaactgggaaaatcccttaaagggccatggaaacatcccggggggggaaaggggcaagtttcctaaaaggggggcttttttttaattttttgttggcccagttaaaaatttgggggttttggttttttgtttggtcccggggactggaaaaaagggcccaaaaaaaaagggaacttttttttcaaattttaggcttcaggggaaacccttcttc

SEQ ID NO: 64672 - DNA, 271 bp, Zea mays
  Clone ID: MRT4577_158980C.1
ttttctttttacccgagcgggggcattaaggaggcggggatgctttgcgaatgtttgggggtctgagctcgttgagacactggccggcttgcccatcccaagttggttgtgtctggcggggctttagcgtctctgcagacctgtggtgtcaggaatggcgtgaggctggctttacagagcagcgaacactgtccactttcaacggtgggaggtttaacaagagccgttgctttttgaacccaacacatgcctcagaatcttacttaaataa

SEQ ID NO: 64673 - DNA, 243 bp, Zea mays
  Clone ID: MRT4577_158981C.1
cgcgtccgtctaacatacttatctactcagacgcagagaccgtcgcacatgaggtgtgtcgggccttgttctgctctgtcagcgcactaccatcagcgtgtgagtgcaccccgcgcggtcattaccgcgcgtcattgcactcggtactgcactcgggcattcacgcgtcactgcgcgcgtcactgcacgcgtcattgcgcgcagtattgcgcgcaccatcattctataacgcccgctagctat

SEQ ID NO: 64674 - DNA, 239 bp, Zea mays
  Clone ID: MRT4577_158982C.1
gatgtactctcacaagatgcttgagcgcgccatgcttgccttcttgcatcgccccataaccgaagaattttggcccgaaaaaagtgggggatcatttcccaggccctttttttgcaggttacaaatgcgcaccatcaaacctgtggggcccccttttttttttaagggcccaccttaaaagtggaactttgggcccccataaaatatggggggaccacaggtctgaccgtttttacttg

SEQ ID NO: 64675 - DNA, 629 bp, Zea mays
  unsure (1)..(629): unsure at all n locations
  Clone ID: MRT4577_158983C.1
ctctccaagccacggcgtcaagccgctcctccgctcctccccggcttctcctccgcgcagctcctcctccagcttccctacgcattgctgtagccccttcccatggtcgccgcagcgtcacactcctccctgccgatctctccctctcactgagtccttccccagctcatcacgcccagctcggatttcttcttcccggcgcccggctccagcgcacccacctccccaagctcgtcgcgaacccccagctccctctgcccagctcgcgccctgctcccctgcgcgctggtcggcaatcggcatcctgcgtcgtccacagttcgctggccaagctccatcttccatagtcgcgccctggctccagcttcctccctgcttcccagctcgcggcgcccctgcttttctctctctcctccatggccacgtcttgccgaggtccctgctgtagctggttcgccggtgcccgaacctcgctgtcgacctccctgttcttgccctcccatcacgcccaactgcttgcctgtgctcagctactatctgcggcatcgcgcgacgttcgtcatctatgctagtncatgccgngcgacccatctgcgcgcgatgctccctactcgcattcgtacagaact

SEQ ID NO: 64676 - DNA, 347 bp, Zea mays
  unsure (1)..(347): unsure at all n locations
  Clone ID: MRT4577_158984C.1
ggcagacccgaagaccgcacccgcaagggcaaacgaagccgcgccgccgcgcccccggagcccaccgaaacaaccagggccggccgcgcccggggggagcgccgacgcggaaccaacaccggcgaaagcggccgcaaggggcgaagacgcggccacgcgcggcaccgcgnagaacaacgccgccaacggaggagagcgcgccgacagacaacaccggcaccgcggggcgcgcccggagagcggcggcgagggcacgcaaggccccgcgccccgggggcagaagccccgcagcgacaacacccacacgcggccgcacaacgacgccnccaactcgggcgaccgaggac

SEQ ID NO: 64677 - DNA, 602 bp, Zea mays
  Clone ID: MRT4577_158985C.1
attgggtacctcgaggccggccgggataatttttcataggcgggcaggcagtacacttaccccatggacactgtgcatcggtctccgtaccgtactgctgactaccgagaggctcgtcccttccctgccgctctatctatctcgtgcggagccctgctgggccaccgaccaccacttcctgctgatggcgatgagcacctacgtggaggccctcgacgcgaacatacatcgctggatccgaatacgcggaccgccctgggctacccctactacaccttctgcaccaactacaacgatgatcatcatcatcgacaccgatgaaggtcacaggtaatcaacagtcccaccatcacctgtaacgaagccacagcccctacaagacctgcatccgcaccaagccgacacccacctggtccaccgtgcataggattccgctactcctcaacaccacggagcataactacttcctctgggactacacggcgcactgggctgacactcagaaggaagaacatccggtcgcttcctctagctcgaccttaactggcagaactgacgagcgcctcccgctcaagctatccatcttgttcacttctgctacc

SEQ ID NO: 64678 - DNA, 227 bp, Zea mays
  Clone ID: MRT4577_158986C.1
aaaacaggaacaggggcagctgaattcttcacatttatttataccacgttaagctggagttggacccatcccacatactactggggggagctagggagttaattccacaacacaattcccacatttcgacttgattagcaacgcacttgtaaacgtttattcaccattattactaggttataggaatttttatggttaaacatccactcgcaaccgcgctttttctg

SEQ ID NO: 64679 - DNA, 3242 bp, Zea mays
  Clone ID: MRT4577_158987C.1
tttatcaggccccttcccccgccccggcgcccgccttccccccgctcctgcgcgttgtttctcgtcgccgtcgtccgtcctccggcgtccggcaacctgcaaccggcgacgacgatggaggcggcgctgggggcgctgtgccgcgccggaggctggtcgtacgcggccgtctggcgcttccatccccaagaccctcgattgctcacattgggggactgctactgtgaagatgaggcaaaagcaatggttcagaagatgcttaatcttgttgaagttgttggagaaggcatcctaggacaagctctagtaagcggagagtgtcaatggatttacgacgatacttgccacgcgttgaatcagataagccatgctgataacggagatttacatcagggttatacttggtggcagcatcagtttctcagtgggataaagactattgcactgttacctcttcagttgcatggactggtgcaatttggttccacacggaaggtccccaggagctcagtttttttgaatcaggtccgagatatatttgatcggatgaagaatgcttcaagcgatggtccaatggagtatacccagaataactctcttgcatgcggtcagcaacctatccttacttcatcgagacctgtcaatgacatgctcgtacatagcaaggtcaacccattgcaaactgagaaacttttggaggatattgagagaacagaatctataaggagttcgatctgttctccaagcaattcacagagatctttaaatgatctaacctcccatggtactggtaacagcagcatggatactaatatattagccatgcctgttaactccaagtctatatatgatctcaaacgatttgataacgtcacagagttgtttcatcgaagttctaatgacagaattggttttcaagtcaactctagtaaagagcctggttctaccattgctggtgtaatgtcaggatacaaaagtttgaacaatattcatatgacagaaaatgattcatgtgatcaaaacatagaatataccccgtacctttacactaccaccaactcttcaaattctggccttgatgaactttcttattctggcgttgctttgtcgtcatcgtttacagcagtatcagggaaagttaaagattgcctgcaaactgagagtgacaagtttctatgtaaatctgtatcattcggcagcaacccttgtgcttctaaattccaagaaaatcgcctatcaccataccatgccctcatgcacgaacaatccctgatacctgaccctggagaatctgtgaggctcctctcacaagaagaatccttcattgttcaaggtgactcaagtcaattcaaggatactgccgactttacaagccagggtaacagtacatttcctgaattacctaacagatcacctgaagaagctactgctgaaactctagaaaacaacatgaaggactgtagtggaaacaacagtctgctggaaactatgatgcttgatcttagcactaacagctttgtgcaagattggtgggacaacagtgttctactggcagaaaaccttccaaattcaagcgaaaaggacccagagcctgctatggaattggccaataggcattcattgccaactggggagagaggctcgcctttcatacctgtcatcgaacaaatgctaggtgatgttgcacatccacctacacctaccgggcatagttcacttgaggctgaagctactgctttagctggccgtatttcagattatcagctgccccagtttgctttccgagactgcctaacagtagacaacgcacaaatcccagcattggcctgcagtaattatacatgcagaagtagaagtgcacaaaatggttcttcagaggtgccatcagcaaacgtatctgtggacgacacctgcagtttgaacacagcaaactccaatggcagtcagtcgagcaatcctgagggaacgaaggttgctaagagaagagctagagctggggagagtacccgacctagaccaaaagaccgacaactgatacaagatcgcgttaaagaattacgagagattgtccctaatggtgcaaagtgcagcattgatgctttgttggagcgaacaattaagcacatgctgtttctacaaagtgtaaacaaatatgcagagaaaattaagcaagctgatgaaccaaagataatcgacaaagggagcggtgttatcttgaaagacaacccagttgctggcacaaatggtggtgccacgtgggcctacgaggttgctggccaaactatggtttgcccaataatcattgaggatctttcgccacctggtcagatgcttgttgagatgctttgcgaggaacaagggctctttctggagatagctgacaacatacgtggaattggtctgacggtcttgaaaggacggatggagctctgtgatggcaagatatggtcgcggtttcttgtcgaggcaaacagagaggtcacaaggatggatatatttctgtcgcttgttcagttactggaacagaacagccttgttcgatctactgaccagatggccaaggtcatgaataatggggttccatcctttgcaaaccaccaacggtctccgctgctagttccagtgggcattcctgagagactacagtgacatgcagatgcttcaactagatagagttaggtaccacgactgttaacatatctggtagccggaactccatgcattagactgagcctagtgataacatctgaatgaagatagtctcactgctgctaaagatgactgtatcaagaacatgcatgactggtgcagacatgagcctctagcgcagaaattatgaactttccctgattattagtggtgtgatcagtgaaatggcattatctcctgcttagttggttgacaccttgctcctgagtaactgggtcttgatagtggtgtttcttatgcagcgatggcagtgtattagggtagtagtgctagcttgcagttcgttgcccctgagtcaaccttgggcagttcgtggtaggttcttcatgggcttgggcccaggaccgggccccatgcacgtgcaataagtgcgactgcacagggctcaaaattctgaggggccaatatgtatcaataagcaggctaatattaccccctttaagttgaactcagttagcagctagactgttgctcttcaaacacatctattaatacatatgtttatttaaaaaaaaaaaaaaaaaaactcgagg

SEQ ID NO: 64680 - DNA, 1591 bp, Zea mays
  Clone ID: MRT4577_158988C.1
aggatgtcttcttttaccaggctgatgatcagcacttcatacccaggtctctgcttattgacctggagccgagagtgatcaatgggattcagaacagcgagtacaggaacctgtacaaccatgagaacatatttgttgctgagcacggtggtggtgccgggaacaactgggccagtgggtatcatcagggtgaacaatttgttgatgatatcatggacatggttgacagagaagctgatggaagtgatagccttgagggttttgtcctgtgccactctattgctggtggaactggttcaggtatgggttcttatctattggagacactgaatgatcgatacagtaaaaagcttgtgcagacatatagtgttttcccaaatcaggtggaaacaagtgatgttgtcgtccaaccttacaactcacttttgactctgaagcggctgacactgaatgctgactgtgtggttgttcttgacaatacggctcttaataggattgccgtcgagcgccttcatctatcaaatcctacgtttgcacaaacaaactctttggtctccacggttatgtctgcaagcacaactactttaaggtatcctggatatatgaacaatgatctggttggccttcttgcctccttgattcccactccaaggtgtcattttttgatgacaggttatactccgttgactgtcgagcgccaggttaacatgatacgcaaaacgacggtattggatgttatgagaagacttctgcagacaaagaatataatggtgtcatcatatgctcgaacaaaagaagctagccaggctaaatacatctccatattgaacatcattcaaggggaggtggaccctacacaggttcacgagagcctgcaaagaatacgcgaaaggaagcttgttaactttatagactgggcacctgcaagcattcaggttgctttgtcaagaaaatccccttatgttcaaacaacccacagggttagtggtctgatgttagcaaatcatacaagcatccgtcatttattcagcaaatgcctgggacaatatgaaaagctaaggaaaaagcaggcttttcttgacaactacaggaagttcccaatgtttgcggacaatgatctatctgaatttgatgaatctcgagagataatagagagcctagttgatgaatacaaggcctgcgagtcgcctgactacatcaaatggggaatggaggaccctggagaggcaaatgttgtggcggcacttgactctaagttggtagtgtaaatataaagtgttgtgcagcaatccacgcaactgaggaagtgctgtctacaatctacattcaagtcatgttggtcatccagaccaaacatgctactgtcacatctagtagtcatcagtttgacgccgcctgcttctatagatccaatcggagtgcagccaaagtgggttttgacgttattttgacctcaaatttgcctttagtctgtgctatgtatatttcgaaacccacttcctctggcctgttttcatttctttagggctagtttggaaactccattttttcaacggatttttattttctcaagtgaaattagttcattttt

SEQ ID NO: 64681 - DNA, 408 bp, Zea mays
  unsure (1)..(408): unsure at all n locations
  Clone ID: MRT4577_158989C.1
attcaataagccttggggcagcttctactgtttgtgggtggtcattggttcaatggctgttgcgcaaatattttcctctgtttacttcagtgcatggtccaacaagtcatatttcaaaccgcttgttttcagtagcattgttttgttcttggggaatgtatgctatgcaatggcatatgatatgaagtccctaacagtccttattatcggccgtttactctgtgggatgggttctgcaagagctgtcaatcgccggtacattagtgattgtgtcnctgcaagaatacgcatgcaagcttcggcaggattcgttagcgcaagtgcacttggcatggcctgtgggccagcgctagctggtttacttcaatggaaattcaagatctacatggttacgttcaatcaatcgac

SEQ ID NO: 64682 - DNA, 394 bp, Zea mays
  Clone ID: MRT4577_15898C.1
agtgcccacctcccgttccgtcgcgctcgggtccctctcctcctctcccctcctcctccttcgcttcgtagtaatcgtaaacccggaccgccccggcaggcacccccccgctccacgcgtgcgagagagagagatagagcgcgcgccatgggagaagagaccctcgttgccatgccgcccgcgttcccccaccaccacgcccccacgccgccacagccaccgtcggggccagttgctgcggacaagggggaggaaggggaccatcgtcgtcccgcagagggcgtcgccgggccgccgcaagtccagccgcggtcggtggccccgcacgggctcggcggcgaggaaggggacgtatactacgcgcgcaagatgctccagggcgcggtgcctgcgg

SEQ ID NO: 64683 - DNA, 579 bp, Zea mays
  Clone ID: MRT4577_158990C.1
ccggccggggcacaattcatccatccagtactacttctccagtccacacgtatgcgtgcgactatcgacttccacaattaacgacaacgcacacgaacacacacaaagcatgccgatgatgttcactgcttccccggcgccggtcaccgccctgctgacaccaagacttcggtgcacccgctacacatgtgcccacagatatatcggacaagatggtgaagatctgctgcatcggtgctggctatgtcggtgggccaaccatggacgtcattgccctcaagagcccagacattgaggctgtcgttgttgacatctccaagccactcattgaggcctggaacagcgacacacctctcgatctaccagcccgagctcgatgatgatgggaaggactgcatggacaagaacctcttcttcagcactgatgctgagaagcacgtcactgaggctgacatcatcttcatctcgacgaacaccctcaccaagacccgtgcaattgcagctggcaaggctgccgacctcacctactgggagagtgctgctcgtatgatcaccgatgtctccaagtctgacaagatc

SEQ ID NO: 64684 - DNA, 872 bp, Zea mays
  unsure (1)..(872): unsure at all n locations
  Clone ID: MRT4577_158991C.1
ctcgaggccggccggngaactacaatattcattctgctatcatgtccgcacccaaagtcctcatcatcctctccgatgcacacgctttcgaggtgaagaagaaagacggaaccgtcgctgaagaggagaccggtttcttccttatggaactcgcaaaaccacttgcaaaactcattgatgctggctatcaagtcactttcgcatcgccccaaggcaagcagccgaacatcgaccccttgtcgaagtcaacacctcttgctttcatgggcatgtggtgggagaagaacaaggagtcagagctaatcaagaagatggagctcgagaacaacctgatgcatcctcggccattccataccatcaccgacgacgagctcaagacgttcaagggcatcttcatccctggtggacatgctcctctcactgatctcggtgctgatcctgaactcggtcggattctccttcatttccattcccaggtcaaaccaacagctatcatctgccatggtccttacgccctactttcaacaaaagtcgcacctgggtcgaccggcttcgcttacgagggatacaacatcacctcatggtccgatgaggaagagaagctcgtcgagacgctcaagggtggtgaaatcgtcaaagtccagagttctctccgtgaagcaggtgcaatcatggccgaaggtgcagccccaaagctcggtagcatccacgtcgaccgngaggtcatcagtggtgcgaatcccctggctgctgctgcgctgngtgataagctggtggagatgctcggngatgtcagggcatgatgacctgcagcactgcacaataccaaatgtaaacctaatcntnggtatgatatcatggtcaatcttgga

SEQ ID NO: 64685 - DNA, 2179 bp, Zea mays
  Clone ID: MRT4577_158992C.1
accttccgccggcgtcgccaccggccgtgctccctccctccggccccggttgaccctagcctcgcatcaccctaaccctacccccctcccgccgctgccagagcaggggaaaaagatgccgcgcgagatcatcacgatccaggtggggcaatgcgggaaccagatcgggatggagttctggaagcagctctgcctcgagcacggcatcggcaaggacggcctcctcgaggacttcgccactcaggggggcgacaggaaggatgtcttcttttaccaggctgatgatcagcacttcatacccaggtctctgcttattgacctggagccgagagtgatcaatgggattcagaacagcgagtacaggaacctgtacaaccatgagaacatatttgttgctgagcacggtggtggtgccgggaacaactgggccagtgggtatcatcagggtgaacaatttgttgatgatatcatggacatggttgacagagaagctgatggaagtgatagccttgagggttttgtcctgtgccactctattgctggtggaactggttcaggtatgggttcttatctattggagacactgaatgatcgatacagtaaaaagcttgtgcagacatatagtgttttcccaaatcaggtggaaacaagtgatgttgtcgtccaaccttacaactcacttttgactctgaagcggctgacactgaatgctgactgtgtggttgttcttgacaatacggctcttaataggattgccgtcgagcgccttcatctatcaaatcctacgtttgcacaaacaaactctttggtctccacggttatgtctgcaagcacaactactttaaggtatcctggatatatgaacaatgatctggttggccttcttgcctccttgattcccactccaaggtgtcattttttgatgacaggttatactccgttgactgtcgagcgccaggttaacatgatacgcaaaacgacggtattggatgttatgagaagacttctgcagacaaagaatataatggtgtcatcatatgctcgaacaaaagaagctagccaggctaaatacatctccatattgaacatcattcaaggggaggtggaccctacacaggttcacgagagcctgcaaagaatacgcgaaaggaagcttgttaactttatatactgggcacctgcaagcattcaggttgctttgtcaagaaaatccccttatgttcaaacaacccacagggttagtggtctgatgttagcaaatcatacaagcatccgtcatttattcagcaaatgcctgggacaatatgaaaagctaaggaaaaagcaggcttttcttgacaactacaggaagttcccaatgtttgcggacaatgatctatctgaatttgatgaatctcgagagataatagagagcctagttgatgaatacaaggcctgcgagtcgcctgactacatcaaatggggaatggaggaccctggagaggcaaatgttgtggcggcacttgactctaagttggtagtgtaaatataaaggtaccatctcacagtattaggcactttttatgcagaaacaatttgacgcacaatcatattgaattgattatccacttgaaaccttgaacacttgctttcttttgataaccatgtggactacaccaattattataaacgatgcacaatctctgctagatgttgaaaatgatactaaatccctcatttttcgtatctattgctggcaaataacatcttcacactataaggctctactttaatgttatatcagtactgataaattcttggacaactgtcacttttagaagcaaataattatggtgctgtaattcctcacgtactatgtttagtctgataattttggaaattgcagtgttgtgcagcaatccacgcaactgaggaagtgctgtctacaatctacattcaagtcatgttggtcatccagaccaaacatgctactgtcacatctagtagtcatcagtttgacgccgcctgcttctatagatccaatcggagtgcagccaaagtgggttttgacgttattttgacctcaaatttgcctttagtctgtgctatgtatatttcgaaacccacttcctctggcctgttttcatttctttagggctagtttggaaactccattttttcaacggatttttattttctc

SEQ ID NO: 64686 - DNA, 369 bp, Zea mays
  Clone ID: MRT4577_158993C.1
ataatggaacaggggacaagctctttctacctagctcgctagtttactcatttagcggggatgagtaacgcagtgtcacccatcaccatgggggggagtgtgagcacagagccctgtgagccccagagatggggaggggaaggatatatagagaaaaaaggagtggggaaaaaaaaagcgcaaaaagcagaaaaaaacgaaaacagcggggggtgcacttcccagaaccctggctcacaccacttccctttttgtctggtgcttgttggtgctacatgccctcttttcgagaaaaaaaaaaaaaaagatggttgcttggggggtccccctttgggggggacggtggcggcttgccgaaaagtggggggg

SEQ ID NO: 64687 - DNA, 2439 bp, Zea mays
  Clone ID: MRT4577_158994C.1
cattgggtacctcgaggccggccggggggtccgtcctctcccgcttccgcttcccctcagccgtcacctccccgctcccaccgccaccacccaccaatcgcactcgcggttggcgcgcgctcccgtcctaaccaagcaaaacccacaaccctagcctccgccggcgccgccatctgccgggcctccctccggtcccggccgaccgtagcctcgcagcaccctaaccctatccctcccccgctgccgcgggagcagggtaaaaaaatgccgcgtgagatcatcacgatccaggtggggcaatgtggaaaccagatcgggatggagttctggaagcagctctgtctcgagcacggtatcggcaaggacggcctgctcgaggacttcgccactcaggggggcgacaggaaggacgtcttcttttaccaggctgatgatcagcacttcatacccaggtctctgcttattgacctggagccgagagtgatcaatggaatccagaacagtgagtacaggaacctgtacaaccacgagaacatatttgtcgctgagcatggtggtggtgccgggaacaactgggccagtgggtatcatcagggtgaacaagttgttgatgatatcatggacatggttgacagagaagcagatggaagtgatagccttgagggttttgtcctttgtcattctattgctggtggaactggttcaggtatgggttcttatctgttggagacactgaatgatcgatacagtaaaaagcttgtgcagacatatagtgttttcccaaatcagatggaaacaagtgatgttgtcgtccaaccttacaactcacttttaactctgaagcgtctgacactgaatgctgactgtgtggtggttcttgacaatacggctcttaataggattgcggtcgagcgtcttcatttatcaaatcctacatttgcacaaacaaactctttggtctccacagttatgtctgcaagcacaactacattgcggtatcctggatatatgaacaatgatctggttggccttcttgcctccctgatccccactccaaggtgtcattttttgatgacaggctatactccactgactgttgagcgccaggttaacatgatacgcaaaacaacagtattggatgttatgagaagacttctgcagacaaagaatgtaatggtgtcatcatatgctcgaacaaaagaagccagccaggctaaatatatctccatattgaacatcattcaaggggaggtggaccctacacaggttcatgagagcctgcaaaggatacgtgaaaggaagcttgttaactttatagactgggcacctgcaagcattcaggttgccctgtcaagaaaatccccatatgttcaaacaacccacagggttagtggtctgatgttagctaatcatacgagcatccgccacctgttcggcaaatgcctgggacaatatgaaaagctaaggaaaaagcaggcttttcttgacaactataggaaattcccaatgtttgcagataatgatctctctgaatttgatgaatctcgagagataatagagagcctagttgatgaatacaaggcctgtgagtcgccagactacattaaatggggaatggaggaccctggagaggcaaacgttgcagcagatcttgactctaagttggtagtgtaaatataaaggtaccatttcatgaatcatgatcaggcactttatatgcggaaacaatttgatgtcctatcatattgattattgattgaattgacaatccacttgaacaccactctttcttttgatagccatgtggactacatcaattattataaatgatccacaatctctgctacatgttgaaaatgattgctaaaaaaaaaaaaaaaaaaaaaaaaaccaatcggagtgcagccaaagtgggttttgacgttatttcgacctcaaatttgcctttagtctgtgctatgtacttggacaactgtcacttttagaagcaaataattatggtgctgtaattcctcacgtactatgtttagtctgataattttggaaattgcagtgttgtgcagcaatccacgcaactgaggaagtgctgtctacaatctacattcaagtcatgttggtcatccagaccaaacatgctactgtcacatctagtagtcatcagtttgacgccgcctgcttctatagatccaatcggagtgcagccaaagtgggttttgacgttatttcgacctcaaatttgcctttagtctgtgctatgtatatttcgaaacccacttcctctggcctgttttcatttctttagggctagtttggtaacaccatttttccaagggatttttattttctcaagtgaaattagttcattttcccaaacgaaaattgaaatctcttgggaaaatgttgttcgcaaactatcccttactatatttattgagaatc

SEQ ID NO: 64688 - DNA, 272 bp, Zea mays
  Clone ID: MRT4577_158995C.1
actctctgcatttcacctcaaagtaaaatggaagggtcttctttccgttccgctgcgaacgcagtttctggattttgagcttgcttttgctcttatggaaaatgagaggatgaatggtaatgcttttttagagcatagcatgaagcaatagggatgaaggagggtcttgttcgtaatccatgcaaaaaggcttagtagaagcagtgaaaaaggtgcacacatcggacgctttagtagcctgccttttaccacttactataccacaccacaag

SEQ ID NO: 64689 - DNA, 369 bp, Zea mays
  Clone ID: MRT4577_158996C.1
acatttccctgacgactgggagaagtccagcctactgacgcagctggagaaacatcgcgcatgtttaacacttgctgatgttcaactactgtgatagacactgaggatgtatctgtgaatcttgttacactgtaaggcaacactaaggcctatctcacactcacacttgaggagactctcgtggccctgactaacgaagctatcgaatgcgagctcgatcccgatctgactgtacacactgcgatagctgaggactgtatgagcgcgttgtacgatgacgaccccacacaacataccttggctttggagacggaaccctactgtgtgtcaccttatgacggagctgactcgcattaccatgagatggct

SEQ ID NO: 64690 - DNA, 201 bp, Zea mays
  Clone ID: MRT4577_158997C.1
acggatatgcaagacgttctatccctgtatgcgggcagttgcactagaggtatcgagctcaatgatcgagatggtgagacacaagctaggccaaactaccatggatgcgctcttagtcatgccatcagtaggcgcgctcttgccgaggaagatctgacagattgcgtaaggaacatccttaatgaaagggctcattcgttc

SEQ ID NO: 64691 - DNA, 400 bp, Zea mays
  unsure (1)..(400): unsure at all n locations
  Clone ID: MRT4577_158998C.1
cccgactctgaaatccacgagctcttccccctcgtccacaccccgcccctccctgctctccgcctccccgtccccgcccccatcgctacccacaagcaccttcggaggctccaggcaacccacctcctgcacccggcgtccctcgcggcggcgacgcgcgaacgtcccgctccccggtggtgagcgcccctctgtgatctaatcttgtaaaatgactctgcatctttcgttcggtgggatttcgcctggtcgctggaaaaactggacctccttcggccggggcagcggaggacgtgttctccctcccgttcgggctgccgcagaggtctccgagcagcggaaatggcggcgttgggccatctnttttggctccttaccaaaccaccggaataaaattccc

SEQ ID NO: 64692 - DNA, 380 bp, Zea mays
  unsure (1)..(380): unsure at all n locations
  Clone ID: MRT4577_158999C.1
cggccgcccttttttttttttttttttttttttttttttttttttttttttttttttttttttttttttttttttttttaaaaccaaaacacttggggggaataatcttaaattttaaacttggttccaaacaaaatttttggggccgatgaaaaccagtggacaacttttagtttacgtttttagcaaccttttttccaaactccccttttttttaaagttgcaaacaaacttcttgggaggagaaaccttctggacaggctttttttccttgacaggccttttaagctttacgggaacgcgcgggcgcgggcgctctttataatttcaccnggaccccaccgggccccccttggggaaaccccaccaccacgggggga

SEQ ID NO: 64693 - DNA, 143 bp, Zea mays
  Clone ID: MRT4577_15899C.1
aggaaatggcacttttttttggtaatttttcaacaggaacacacaagaggtttatactactgggcagagtgagcaaagttgttcgctctataataacacataggtatatcgtggatctgcatgatatatgtccaaacaaccat

SEQ ID NO: 64694 - DNA, 637 bp, Zea mays
  Clone ID: MRT4577_1589C.1
acgaccacacaccaccgctccacacaaagaagagtgccgagagctagctacctagcgcgcgatggcgatgtccgcttccaagatgatggcggtcgccgccgccgccctgctagccctggccctggccgcgtcgaccgccgaggcgaggaacatcaagacgacgacgacgacgacggagaagaaggacgacgcggtggtgcagccgcagaccttcccgcccttcgaccgcctcggcggcggcgcgtccccggcgtccggtggcctccccggcacctcgtcgggcggcagcagcattccagcgttcagcatgcccctcttcagcggcggctccccggccttcagcggcttcggcggcatgcccgggtcccccgccgccggctccgtctccgtcgtccccgtgcacggcagcaagccctgaaaatccgtccgtcgccggagcccggaagtctgtcgggccaacttgtgccctagtactcctttgcctgcattgtattggagagttggtatcgcgtttcgtttggtgtttgctttattatatagggcctatctaccgagacatgtgatgtttgttgcggtaaattaaaaccggctgtattcatgctgctgctgctgtctttaatttggttaagaacggttc

SEQ ID NO: 64695 - DNA, 409 bp, Zea mays
  Clone ID: MRT4577_158C.1
atccaaaaaaccttggaaaaaaggtttttatccccctgaaaaaattacctggttcaggggattgaaccccgagaaatacgaaacaaaattttggggccaaaaattggtggggtggaacaaccccaaattaaaaaagggcctcctcaagggttgaaacaaattttttaagcacaatttggaattttttaaaaatttccacacttcattgttccttgagcaaccttttagcacgggcctaaaaggccgaggaaacgaaacaaagccgttttttcgggcgggggggatttaaaaggaaataaacttggtaacggccttggggcccttgaaaacggggggtttggcaaacttcccagaaaggacaaggtcctccaaagtttggatctcccgggaggttatggggggctttttg

SEQ ID NO: 64696 - DNA, 164 bp, Zea mays
  unsure (1)..(164): unsure at all n locations
  Clone ID: MRT4577_159000C.1
aacggtagagntcagacagcgagaattcttgtcnggagacaagcaaccngggcgggcgggaactaaaagaaggtgaagcaagcacaacangaggaaccggagcaaccgacagaaagaagaggagggagcaagggggagagacaagcaggcaagcccccaaacag

SEQ ID NO: 64697 - DNA, 519 bp, Zea mays
  unsure (1)..(519): unsure at all n locations
  Clone ID: MRT4577_159001C.1
ccggccggaagcgcaccaaatgagcatacagacaccaagcgtcaaacttggcaagcagatagaaaccaatccaagaaagacaccatacccatggctncacgctacaagacggcttcggcggtgctgctctcctcaccgccgccatgcttgtgacaccaagtggacgacggaaaatacagctgatgccccctcgcgccgatgcccccgcccccgctgatgacacagctgccgatggacctacaggatcggcagccgcaactgagccccaggtcgtcgagggactatcgctgaatgatagactgacgaccaggactccaccgactaaggccaagaactccacacacgatagcatttggaacaagatatgaaagaaaacgtgagagcaatgatgtttaaaaccactcacccataatagatgtgtggtcatccgcgagatgttcttgctctccctcgttttctctctgtgtgaaatcgatgcgccatcatgctcttaacctctaattgtatcaatgcttgata

SEQ ID NO: 64698 - DNA, 1029 bp, Zea mays
  Clone ID: MRT4577_159002C.1
ctcgaggccggccggggcaaccttcccgcaaacagagccgcccctcgaggagggcaggggggccccagaaaaaagtccgaacgcatctcttctttctactttcttgtaacccaagacgaactcggtgaactctttctcctcgcgcagcaccggagcacaatcaaggattccagtccagtcctgccaatggagtgcgttttgggcttggttggccgcgacttcgcggtggtggcggccgacacctccgccgtgcagagtatcctcgtccacaagactgacgaggacaaagtaatggtcctcgactcgcacaagctgttgggcgcttcaggggagcctggtgaccgggtgcagtttacggagttcatacagaagaacctccacctgtaccagttccgcaacaccatcccgctgtcaaccgccgctgccgccaacttcacacgcggcgagctcgccacagcccttcgtaagaatccatacatggtcaatgttattctcggtggttacgataaggatgttggcgcctcactgtactacatcgactacattgcgaccttgcacaagatcgacaagggcgcttttgggtacggatcgtatttctgcctgtctctgatggacaagctgtaccgcccggacatgaccgttgaggaagcggtagacctcgttgataagtgcattaaggagatccggctgcggctggttgtggcgccccagaacttcgtgatcaagatcgtcgacaaggacggggccagggagtacgcgaggcgtgaactcgtcggcgacagtgcacctgctgaagctgcagctacggttgccgcctgaggcatgaaacttgtttgtgttagttgtttgtttctcagcgaggctactatgtaatcaaatggatactggtgggggtcccacagctgttttttaatcaattttagcccagacatgtaattctgtttctgcactaattcatgtcttcgccgagtacaagttgacacggagtgtgtggcgcttgacagtgctgtgcaccatttctgatcactg

SEQ ID NO: 64699 - DNA, 1103 bp, Zea mays
  Clone ID: MRT4577_159003C.1
cattgggtacctcgaggccggccgggttagaacagaatactcgaaataactttccggttcgttcccctacgcccgtttctctctcgtcgcgcaacatcagagcacaagcgaggaacccagtccagtcccgggaatggagtgcgtattgggcgtggttggccgcgacttcgtgctggtggcggccgacacctccgccgtgcagagtattctcgtccacaagaccgacgaggacaaggtgatggtgctcgactcgcaaaagctgatgggcgcttcaggggagcctggtgaccgggtgcagtttacggagttcatacagaagaacctccacctgtaccagttccgcaacaccatcccgctgtcaaccgccgctgccgccaacttcacacgcggcgagctcgccacagcccttcgtaagaatccatacatggtcaatgttattctcggtggttacgataaggatgttggcgcctcactgtactacatcgactacattgcgaccttgcacaagatcgacaagggcgcttttgggtacggatcgtatttctgcctgtctctgatggacaagctgtaccgcccggacatgaccgttgaggaagcggtagacctcgttgataagtgcattaaggagatccggctgcggctggttgtggcgccccagaacttcgtgatcaagatcgtcgacaaggacggggccagggagtacgcgaggcgtgaactcgtcggcgacagtgcacctgctgaagctgcagctacggttgccgcctgaggcatgaaacttgtttgtgttagttgtttgtttctcagcgaggctactatgtaatcaaatggatactggtgggggtcccacagctgttttttaatcaattttagcccagacatgtaattctgtttctgcactaattcatgtcttcgccgagtacaagtagtggttcacgctcaaacgagttcatgcctcaagcaataacaactgcggttacatcattgcgttgtgcattgttatcgccaagtttacgattgtggttgttgatttccttagccttagcagatgtgttgagctttaaggtattcagcgcgtcctaataggtcactatagttcacacgat

SEQ ID NO: 64700 - DNA, 1041 bp, Zea mays
  Clone ID: MRT4577_159004C.1
gggacctcgagccggcccaaaccacctgcgaccgcctccgcgtcctcgacctcggcgccaaccgcttctccggcgccttccccgtcttcgtcaccgcgttccgaggcctccagcgcctcgacctgggcgccaaccgcctggagggccccatcccggaggccctcgccgggatggcggcgacccagcagctccaggcgctcaacgtctcctacaacaacttctccggccagctgcccccgtccttcgcggcctcccgcttcacggcggactcgttcgtaggcaacgacccagcgctgtgcggcccgccgctgcgccagtgcgtgacagcctcgggcctcagctcccgcggcgtcgccgggatggtcatcgggatcatggccggcgccgtcgtgctcgcgtccgtgtccatcggctgggcgcaggggaggtggaggcgtaacggcaggatcccggagcaggacgagatgctggagtcggccgacgacgcccaggacgcgtcgtcggagggcaggctcgtggtcttcgagggcggcgagcacctcacgctggaggaggtgctcaacgcgaccggccaggtggtggacaaggccagctactgcacggtgtacaaggcgaagctggcgagcggcggcagcagcatcgagctgcgcctgctgcgggaaggcagctgcaaggacgccgcgtcgtgcgcgcccgttgtgcggcgcatcggccgcgcgcgccacgagaacctggtcccgcttagggccttctaccaggggaggcgcggcgagaagctgctggtgtacgactacttcccgcgcagccggacgctgcaggagctgctgcacggtggcagcgagcccgcggcggggcggccggcgctcacctgggggcggcggcacaagatcgcgctgggcgcggcgcgcgcgctggcgtatctgcacgcgggccagggcgaggcgcacgggaacgtgcgctcgtccatcgtggtggtggacgacctcttcgtgccgcgcctggcagagtacgcggtggaccggctgctggtgcccgcggcgg

SEQ ID NO: 64701 - DNA, 958 bp, Zea mays
  Clone ID: MRT4577_159005C.1
tcctataggggaatggtacctcaggcggcagaaaaaaaaaaaaagaaaaaaaaaaaaaaaaaaaaaaaaaaaaaaaaaaaaatttttttttgtaacccaagacgaactcggtgaactctttctcctcgcgcagcaccggagcacaatcaaggattccagtccagtcctgccaatggagtgcgttttgggcttggttggccgcgacttcgcggtggtggcggccgacacctccgccgtgcagagtatcctcgtccacaagactgacgaggacaaagtaatggtcctcgactcgcacaagctgttgggcgcttcaggggagcctggtgaccgggtgcagtttacggagttcatacagaagaacctccacctgtaccagttccgcaacaccatcccgggccggaccgccgctgctgccaacttcacacgcggcgagctcgccacagcccttcgtaagaatccatacatggtcaatgttattctcggtggttacgataaggatgttggtgcctcgctgtactatatcgactacattgcgaccttgcacaagatcgacaagggcgcttttgggtacggatcgtatttctgcctgtctctgatggacaagctgtaccgcccggacatgaccgttgaggaagcggtagatctcgttgacaagtgcattaaggagatccggctgcggctggttgtggcgccccagaacttcatgatcaagatcgtagacaaggacggggccagggagtacgcgaggcgcgaactcgtcggcggcagtgcacctactgaagctgcagctacggttgccgcctgaggcatgaaacttgtttgtgttagttgtttgtttctcagcgaggctactatgtaatcaaatggatactggtgggggtcccacaactgtttttttaatcaattttagcccagacatgtaattctgtttccgaaaaaaaaaaaaaaaaaagcggcc

SEQ ID NO: 64702 - DNA, 1342 bp, Zea mays
  unsure (1)..(1342): unsure at all n locations
  Clone ID: MRT4577_159006C.1
cattgggtacctcgaggccggccgggccctgttcccaacaccgcaaacagagctgccaggagtccaggacatcaggccccagaaaaaagtccgaacgcatctcttctttctactttcttgtaacccaagacgaactcggcgaactctttctcctcgcgcagcaccggagaacaatcaaggattccagtccagtcctgccaatggagtgcgttttgggcttggttggccgcgacttcgcggtggtggcggccgacacctccgccgtgcagagtatcctcgtccacaagactgacgaggacaaagtaatggtcctcgactcgcacaagctgttgggcgcttcaggggagcctggtgaccgggtgcagtttacggagttcatacagaagaacctccacctgtaccagtttcgcaacaccatcccgctgtcaaccgccgctgctgccaacttcacacgcggcgagctcgccacagcccttcgtaagaatccatacatggtcaatgttattctcggtggttacgataaggatgttggtgcctcgctgtactacatcgactacattgcgaccttgcacaagatcgacaaggtgcttttgggtacggatcgtacttctgtttgtctcttatggacaagttgtaccacccggacatgactgttgaggaagcagtagatcttgttgacaagtgcatcaaggagattcggctgcgattggttgtcgcgcctcagaactttgttatcaagattgttgacaaggacggggcgagggagtacgccaggcgtgaactcgtcggtgacaatgcacctgctgaagctgcaaccgcagttgttgctgcctgaggcatgaactcgtttgaggttggaatgtgttagttgtttctcagcgatgctacttatgcgatcacaggatactggtggggggcccacaactgttttatcaattttagcccagtcgtgtaattctgtttctgcactattcatgtctgctgagtacaagtagtgtttcacgcttgaacaaatgaaaaaaaaaaaaaaaaaaaaaaaaaaaaaaaaaaaaaaaaaaaaaaaagtctgaaaccaccgcccagcgctcgcctgtttctgcggccgncgatggagctccacctggccaccatcgcccaccgcccgcctttgccggtaccggcgcggggccaccacctccgccgccgcctccaccacctnccggttcctctctccttccaaaacacctactccccctccctttcctccccgaatcatcatcgcctttctcccacccttcgccgccacctccgcctgcctcttctcgcctcccaagcgcccaattctaacccggagcctgaacct

SEQ ID NO: 64703 - DNA, 212 bp, Zea mays
  unsure (1)..(212): unsure at all n locations
  Clone ID: MRT4577_159007C.1
cccctctaaccttccttaatcttccaaaccttcctttcttttgtaaaacccaaccgtcccaacccagnnnntnnaaactgttagcataagaaaaccccggaatggccgtttttccaaatggccccttttttaccccccttacaaacccatcccgggccgcccccatccacctttccccgacaccagccaccatggtcccccccttccattcc

SEQ ID NO: 64704 - DNA, 2527 bp, Zea mays
  unsure (1)..(2527): unsure at all n locations
  Clone ID: MRT4577_159008C.1
cattgggaccctcgaggccggccgggtgggcaaaagaaggcccaaccagcacgtcacactgctgcgaaggacaccaggcccgccgaaaattgtgtgaacgcccctttcttctaccccaagacgaactcggtgaactctttccggttcgttcccctacgcccgtttctctctcgtcgcgcaacatcagagcacaagcgaggaacccagtccagtcccgggaatggagtgcgtattgggcgtggttggccgcgacttcgcgctggtggcggccgacacctccgccgtgcagagtattctcgtccacaagaccgacgaggacaaggtgatggtgctcgactcgcaaaagctgatgggcgcttcaggggagcctggtgatcgggtgcaatttacggagttcatacagaagaacctccacctgtaccagttccggaacaccatcccgctctcaaccgccgccgccgccaacttcacacgcggcgaactcgccacagcccttcgcaagaatccatatatggtcaatattattcttggtggttatgataaggatgttggtgcttccctctactacatcgactacattgcaaccttgcacaaaattgacaaaggtgcttttgggtacggatcatacttctgtttgtctcttatggacaagttgtaccacccggacatgactgttgaggaagcagtagatcttgttgacaagtgcatcaaggagattcggctgcgattggttgtcgcgcctcagaactttgttatcaagattgttgacaaggacggggcgagggagtacgccaggcgtgaactcgtcggtgacaatgcacctgctgaagctgcaaccgcagttgttgctgcctgaggcatgaactcgtttgaggttggaatgtgttagttgtttctcagcgatgctacttatgcgatcacaggatactggtggggggcccacaactgttttatcaattttagcccagtcgtgtaattctgtttctgcactattcatgtctgctgagtacaagtagtgtttcacgcttgaacaaatacaatactgttgctgtgcaccttttctgatcactgaaatggccggcgacccaggccgttacaagcaaaaaaaaacccgttactaggaggctgaaaccaccgcccagcgctcgcctgtttctgcggccgtcgatggagctccacctcgccacaatcgcccaccgcccgcctttgccggtaccggcgcggggccaccacctccgccgccgcctccaccacctcccggctcctctctccttccaaaacacctactccccctccctttcctccccgcatcatcatcgcctttctcccacccttcgccgccacctccgcctgcctcttctcgcctcccaagcgcccaattctcacccggagcctgaacctgagcccgagcccactggtgcgaagctactgccgctcgtcatctccatcgccatcggcctcgccgtgcggttcctcgcgccgcggcccgtcgaggttagcccgcaggcgtggcagctcctctccatcttcctctccacaatcgcggggctggtgcttggccctctccctgtcggcgcatgggccttcctcgggctcacagccgccgtcgccactcgcacgctccccttcaccgccgccttctccgccttcaccaacgaggtcatctggctcatcgtcatttccttcttcttcgcgcgcgggttcgtcaagacgggcctcggcgaccgaatcgccacctacttcgtcaagtggctcgggagcagcacgctgggcctttcctacgggcttaccctcagcgaggcctgcatcgcgccggccatgcccagcaccacggcgagggccggaggcgtgttcctacccatcatcaagtcgctctcgctgtcggctgagagcaagcccaaccatccatcgtcgcggaagcttgggtcctatcttgtgatgacgcaattccaggcatctggtaactcgagtgctttattcctcactgctgcagcacaaaacctgttgtgcttgaagctagcagaggagcttggtgtaatcattgctccatgggtatcatggagctgctagtttagctctttctctgctagcaacaccatatttgctgtaaatctcccacctgaaacaaggacaccctgatgccccagcactggctgaaactgaagctcatggccccactaaaagcagtagatcttgttgacaagtgcatcaaggagattcggctgcgattggtcgtcgcgcctcagaactttgttatcaagattgtcgacaaggacggggcgagggagtacgccaggcgtgatctcgtcggtgacaatgcacctgctgaagctgcaaccgcagttgttgctgcctgaggcatgaactcgtttgaggttgaaatgtgttagttgtttctcagcgatgctacttatgcgatcacaggatactggtgggggtcccacaactgttttaacaattttagcccagactctgctgagtacaagtagtgttctcacgcttgaacaaaancccccctgttgctgtg

SEQ ID NO: 64705 - DNA, 362 bp, Zea mays
  Clone ID: MRT4577_159009C.1
tgttattgcgttcggcagtcaccatctcccaagggggaatcgactgtcctacgagctggcgcacgcacgtgtcaagtgaccaaactgtcgacatggatagcacgcaatctgctcgtagcggtcgacttggtgggcgcggtgctgttgttggcagatgccttgacgacctcgttgggcccggatcacctgcggccactgcgaattccgcgatcgcatccctgcgtctgctacccccgcgttacggggtccggcccctacgcgttctgctggatacgctcttgaacctcaacagcgccgccagcagcgacgccgacaggctcgccttctggaactgtctcaagaacgccgccaggggcgacagc

SEQ ID NO: 64706 - DNA, 716 bp, Zea mays
  unsure (1)..(716): unsure at all n locations
  Clone ID: MRT4577_15900C.1
aatttcacacatcgtcttcacgggcgattggatctgagcttgaggcggagatggcggaggacggaggcagaggccgccgtctctgccggtcgacgacggagaaacggccgcaaccgaggaggacggccatggaggggagggtgctgcctcgatccggatgaggggagcagatgctgcgacctcgatgcggatgaggagagcagcaaccgcgcccctgttcttcgcggcgcggcggcctcggctaggagctttgccctcttattcccgcgcggtgcagcggcgacctcaggacgagttcgaggtccgtccgacggcagatgcacacccgacgtcgtcatggaggctccgaccccgaggcaccctccctgcttccttctggttgcatctccccctgattctattttatccatgcctacacgatgcacaacagaactcctagcaggcttgcaatctcacgcgtaagggaagatgtgttcctctctggctagcacctgctcgatcaaatgcctagccatttcaatcgtttattgtaggaaatataaggtgcacccaaataggaggccattctgtgtagcctattcttttcagttctaggaatcctatgngtagaggggtggtgttagttctataaataactttcagacatttgtagttttttaagttgtagcgtgacaactttgatcaaaatttgtttcagttgactctacattccattc

SEQ ID NO: 64707 - DNA, 1002 bp, Zea mays
  Clone ID: MRT4577_159010C.1
ccggccgggactgctctgctaacacggttcaccggtgatgaccccggttcctccgactgcaaccgggcgccacgtccgcacctccatctcgctttcagccgttcgtacctaggctacactacatgaaaggtcgctcttctgcttgggaccctcgaggccggccggggtctgaaaccaccgcccagcgctcgcctgtttctgcggccgtcgatggagctccacctcgccacaatcgcccaccgcccgcctttgccggtaccggcgcggggccaccacctccgccgccgcctccaccacctcccggctcctctctccttccaaaacacctactccccctccctttcctccccgcatcatcatcgcctttctcccacccttcgccgccacctccgcctgcctcttctcgcctcccaagcgcccaattctcacccggagcctgaacctgagcccgagcccactggtgcgaagctactgccgctcgtcatctccatcgccatcggcctcgccgtgcggttcctcgcgccgcggcccgtcgaggttagcccgcaggcgtggcagctcctctccatcttcctctccacaatcgcggggctggtgcttggccctctccctgtcggcgcatgggccttcctcgggctcacagccgccgtcgccactcgcacgctccccttcaccgccgccttctccgccttcaccaacgaggtcatctggctcatcgtcatttccttcttcttcgcgcgcgggttcgtcaagacgggcctcggcgaccgaatcgccacctacttcgtcaagtggctcgggagcagcacgctgggcctttcctacgggcttaccctcagcgaggcctgcatcgcgccggccatgcccagcaccacggcgagggccggaggcgtgttcctacccatcatcaagtcgctctcgctgtcggctgagagcaagcccaaccatccatcgtcgcgggagcttgggtcctatcttgtcatgacgcaattccaggcatct

SEQ ID NO: 64708 - DNA, 403 bp, Zea mays
  Clone ID: MRT4577_159011C.1
ccactacgtcgtaatacggacgtcacgtagtagtgagacgagcgtgcgctacgcgcatgcgagtgctaacgggagcgcgggagagttacgacgcggcgcggacccacgcgtccgcgaagagaactggcacgcggggggggtgagtgtcgaggtccgcatgcccatctccatcggccatcgctggctccccagtcgccacgtccgcacacgtttttacccctcgcggcaagccgaccgaccgccggggcgcacagcgtcgcgcggagcaacgccgtcacgtcaggtgcgtcgcgacgatctcctggtccgcctcgtcttcctggcaggccgcgctatagtaagcgggccgcgggatcatcagcccagcttcagatcagtcgatgcgggctgttccagggtttag

SEQ ID NO: 64709 - DNA, 201 bp, Zea mays
  Clone ID: MRT4577_159012C.1
cacctctcaggttataaagggacaaaaaaatcccttggaagaaaacatgattctctgtactgtccagggaggttatgtgtagttcaatttatactcaaagataacgttttgagaacatattaaaatgggatgaatggtaggccaataatgaaataaactatttttttaaaataaaaaaaaaaaaatgaagaaaaaataaat

SEQ ID NO: 64710 - DNA, 604 bp, Zea mays
  unsure (1)..(604): unsure at all n locations
  Clone ID: MRT4577_159013C.1
gcgggagcaaagattgtttccatctaatccctatctctctctctctctctctctctctcaaggcatcggctatggggtacaccccaaccagcgaagaatgacgaggggggcataaccccgccagctgccacgggccgagactacgaactttgtagtcgaggtccgacgtccttgggcacgtacgcccttgacaggcaattctctggaaggtgctaaaggttcaacacaaccaataaaaagattaaagttagggttcaaaagaaaggagcaaaggaaaccgaagagaaccctggtctggccggtgcccaggaccgtacgacttctaacttgccaccttcgggtttctagagagccactccgctataattcaccggactgttcggtgtgccagcggagcaacgggtagtgagcgcaacggtcgactgcaacgtgaacagtgcgcagacagttcacgtagagtcagagcagggccagaaggcgcaccggatagtgaacagtgcctgtccggtgcggcaccggactgtccggtgccccaagaagtcagagctccaacgaccaaaaccgtcagaaccctaacggttgggtgcgnccatcgatagacaac

SEQ ID NO: 64711 - DNA, 133 bp, Zea mays
  unsure (1)..(133): unsure at all n locations
  Clone ID: MRT4577_159014C.1
ccgtccccttcgtgggaggagggtctgcgtgctcactgaagantgtacggtgcaaggcgtggtgagtacgtgtgtcgggtgangtgtgtctgtttgagaggcgtgtctgtggggatgtgtcgtcctggagnac

SEQ ID NO: 64712 - DNA, 259 bp, Zea mays
  Clone ID: MRT4577_159015C.1
gtattggatcagcatgcatatgtgagtctcggttgcagttgaagttaattacatttactttgataataactgttacatgtggcaagcctgataaatgcctttgtaagatttggaggacaaaattaacagccggtacttagtttacttgtcaatttttacatgctactcttccgatcccattctagtgcgacaatcaaagcatgccatcaaagcatggtacctgatttatagcatgtaatgcacagctggcataatgaga

SEQ ID NO: 64713 - DNA, 265 bp, Zea mays
  Clone ID: MRT4577_159016C.1
gagctgtctagtcggcggccgccgcggtccacattacggggatggcggcacccgccaagaggtgcggacccgggaacagcttgcaggtgcggaaccaggcgtcgagcgggccgcctacggactcgagcacgccgaggccgacgaggagggagccctggtggaattgacggtccctgttcgaccctttgagcaccgccttccgatcttaggtgagctcctggatgcaggcctccgccggcgacggcgacttgctggacgaagctgg

SEQ ID NO: 64714 - DNA, 777 bp, Zea mays
  Clone ID: MRT4577_159017C.1
aattcggcacgaggcttttgttagtttgtttgcacttagcttgcatggaaacttggtttgcacttgatatgttgccttttaattgttcttttgggcaatggtttttactctctccattctaatttataattcgtttgactttttcaatctcaagtttaaccactcgttttattaaaaaaatgtgaaaaacataaaattttattgtggttttgtttattatcaaatatacattacatatggcttaatttttttccattttctcataattttttgaataatacttaaggttgaaaatatcaaacaaattatattttaaaacagatggagtattataaaagagaagttttcattttatgaccaaacaatatatttgtaaactagtttgactcgcccaaattcttctatagttgcatcttttatgaacgtagggagcatcttgaaagagggatacgtcatgatccacttttttcatttgccaagaaagcaaattccacgaagctatcacccaaaataattcaatgtgatgttgcttgttgcatctcgaattaatttctgtctatatgaacaccctattcgcttggctttaatttgtatcggcttctattctacagtatttttgcctctataaattacaattgcaacagtgcaaacaactgattttaatttgaagcgaacaacctatagacataaaatttatacatattcgagccctcctgagcgataatacctcacttccagtttaccggtggttatgttttgattattttccgtgcccct

SEQ ID NO: 64715 - DNA, 488 bp, Zea mays
  Clone ID: MRT4577_159018C.1
ctctcctgtgccgtgactgccctctgcttcgccgtcgaatccgatactccgatctcgggttcaccgcagcgcacagagcagcccctactcccggcccgatccgtgctcttctctccgtcgcttcattcatggcacgaatggcacctgagggttctcaccacaatgctaagcactatgattctaagatgcaggagctgctgagcaccggcgagactgaggagttattcactccataagatgaagcttttgagagttttgatgatatgggcctacaagagaatcttctgcagcaggcatttatgcttatggttttgagaagccatctgcaattaatcacagaggaattgactcccttctgcaagggtcttgatgttattcatcaagcacaatctggtacaggaaagacagcacccttccgtttggggatcttgcacccacctgcaccatgctctggctgaatgccacgccctcggcccttgcctcccccc

SEQ ID NO: 64716 - DNA, 762 bp, Zea mays
  Clone ID: MRT4577_159019C.1
cattgggtacctcgaggccggccgggatccgtaccccggactcactctacactccccaccgatgcgcgtcagaacgcgtgcgacgatcgcacacacacgcacggagacagaggaaatgccacacgagccgcacactcgccacgcgcgggtgagtaatagcacaccgacgctcgtctgctgcatcgtcgctaggagctgcgagatagacgcatgcgcggaactccggcagccaggcgcggacaggcaactgccacttaaccgccgtgatcgactacaaagactccaactctgacgcccccgacatggcatcgatcttcagcgctcgcaccggctgacaacggtgggaccttcttcggcaaggccgccaggcacaactgcaatgtgcgcctacacaatcgaattcatcgtctgaaagactgaagccgactcacctcatggcgcacctgaactcgatagcaaccaacatcacacagacaaccaagtttgccacatactggatcgacaatgagaaaacaaaatacatctctgcccatatctggcttcactgccattgccttgaacgtacaatgatgggagtgctgacaatgcataaccagaaatctactccactaccaaacagatgcgtgactacaacgacatgctaccaaggacgcactacattcttccactgacttgtacaccttctagaacattgaaaccacatcacatcaagatacttggtcatctctctctccgaagaagtcgaagccataatccctgatc

SEQ ID NO: 64717 - DNA, 298 bp, Zea mays
  Clone ID: MRT4577_15901C.1
gactattcatacaagattagtgaccctactgcataccttgaattgggatctaatgcctatggcgggttcggcttaggctgatgattaatgccttggcgtggtttcttcttgaatcttctcttcttttagagatcttgattgcgccggggggggcggagctagacgtgattgtctataagctaagctctcctgtttgacgagaatctgaaaacttttctttccttgaaaggggaagtccgtcactccactaagaccgcttgcttatcatgcgctgatgaagttcgcacctgcccggacg

SEQ ID NO: 64718 - DNA, 201 bp, Zea mays
  Clone ID: MRT4577_159020C.1
ggtggagaagctccggtgtgaataggataacacatagcgcggctgaacttggttccctctgcagcaatcccacgagtttagccgaggaccaccgctgctttctcgccttccgtgccattcagtggatgcgtctcgggcagaagggaacaaggccttagttgttttttgtccctttccgatttttggggggggggggaaaaa

SEQ ID NO: 64719 - DNA, 198 bp, Zea mays
  Clone ID: MRT4577_159021C.1
acgcgtccggaaaaaaataactcttaatttatacgagactcctaaaattccaaactgggagggatttcatagcatattgcggaggaccatcaaaaagcacatcaaatgtcacatgccccttgcaagatcgaatccatgattaaactactcttctagcacattctactatccgtaatatgactctatctaacttatatc

SEQ ID NO: 64720 - DNA, 372 bp, Zea mays
  Clone ID: MRT4577_159022C.1
gagaaaaacaaaacaaaaagaggtcatgggccggggcgacagcgggtgcgggcggctccctgtccctttccataccggacctctttttgttttgtttttcttttcttttctgttcgttcgtttgcttgcttgcttgcgccggttcctcattgaccccctggtgcgtctccttgttcgcagggtcggcaagacctcgctgatgaaccagtaagtccgcccctctccgatccctcgatttcacttcactttgctgttgcgttggttcaccggggcctgaaccgattggttgggtttggtttcctgcgcgcgcgcaggtacgtcaacaacaggttcaacaaccagtacaaggccaccatcggcgcggatttcctc

SEQ ID NO: 64721 - DNA, 647 bp, Zea mays
  unsure (1)..(647): unsure at all n locations
  Clone ID: MRT4577_159023C.1
tcnnctcgaggccggccggggaaatctcgtggaccattacacgcggaaatgactgtcgtgtagatcctgctcccgacaccgaacgagcatgtgctggtgcgagcagggactacctatttctgggatctccacgcctggcgagtcccctcccaaggctaccccggccaagatcatctcgagccaaatatgggaatgattgtgtacatgccatggcgacatgagtatggccagccgacaagtgctggccccgacgacaatggtgtctcctgcgaccacaacgacgagaataaggacccttacatcatgatgctcctccgcgtcaacgtcctcatcttcaacgacggcctaatgtgcggatcctgcttcgacatcatatcgccatagaccactcagagtgactctggcaagcccgagctgcgtgcacattacggatatgaactaccatcccattgcaggcgtaccatttacacctacggggcaccgattctcactgtcatggccaagaatgatgaggaccacaagttgctcgaagctggaatcatcaacatgctgtttcaccatacggcatcgacaacatgtgtctaagctcccttgcacttggacaaggaacgcaaccccaaataactgcatctgcccatgacacacat

SEQ ID NO: 64722 - DNA, 395 bp, Zea mays
  Clone ID: MRT4577_159024C.1
aacaaaaacaaggggccagggggggggccaaaccaccggggggaacaaaccctgggaggcagcccgaccgggggggggggggggttacacgccggaacccatccagggggcaaacaaaggggcaaaaaaagggacctggggaaacccctgccaaagccaaacaactttttttctggaacaaccgggaccattgggaccggggaagccctatttaccagccccagccctttaaaagcctgggcgggggggggggttggggccccggggaacacctttatgcgcccccctggcgtacttgggcctctttgcctccccccgccgcttttgggggggccggggcccctcctggcggggggcgcgcccgggtctgctgccgggttgggcccccccccctt

SEQ ID NO: 64723 - DNA, 271 bp, Zea mays
  Clone ID: MRT4577_159025C.1
cgaacaactatagctgggcgatccggaaaggctattacttttgtcacacagtatgatgagtaactctaccagcgcatagaacacttaattgggaagcaactaccaggttatccaacacaggatgatgaggttatgatgctgacagatcgcgtcgctgaagcacaaatgtttgcccgaatggagttaagggagcatggagataagaagaaacgctcgcgaaaggaagctggcatataatgatgacacagagggtgctattggtgtcaggaac

SEQ ID NO: 64724 - DNA, 1598 bp, Zea mays
  Clone ID: MRT4577_159026C.1
gctcgataagatctccgagaaccgcgccgactacaacatcgagcacacgcccgcgccggcctgggccgcttgctcctcctccgccaccaccctcgctgcctgggacgatctagaggagtacacggtcggcctggacaagtacagcgacatgcttaaggcgcagctcctcgacgactccgtccccgcgcgcgcgctcgtggccatcgccggcgagagcagcattggcaagacgacgctcgcgcggaaggtgtaccagagcctcgaggtccgcaaccacttcgagatccgcacgtggacggtgctcccgcacaagtgccgcgccgccgacgttctccgcgacatccacgagcagatgacctcccagctgcggcggaccccgtccgcgtccaactccaagcaggccgtggaagacgcctgcgatgacaaagccttcgggccgggaaaggacatcagcaaccagctgtacaggagcatgacggggaggcggtacctcgtggtcatcgacggcagcgttgccgtcacggactggaacagcctacgagcttccctccccgacgagggcaacggcagcagggtgcttctgatcacggacttggaaggcctggaggtggtcggccacgctcaggctggccacacgtacgacccgatcgagctgacccggctgagcccggagagcacgtacgaggtgttccgacgccgggtgttcggcgcccgcggcgactgccccggccggtacaagtcgaggtactaccaagacgtgttccggatcacgcgtggcctgccgctgtcgatcgtcgtcctcgccggtatcctgcggtccaaggagctgcccgcagagtgggacgaggtgatggcgcagctggccccgccggcgcgcgagcagcaaaggggcggcagcggcggcagcagcaacagctggccccggatcatgtcgcgggccttcgacgacctgccgcaccacctcaagtcgtgcttcctatacctggcggcgatgcgggagagcaccccggtggacgcgcagcgcctggtgcgcctgtgggtggccgaggggttcgtgcgcccgcgccgcgggagcaccatggaggaggtcgggcaggggtacctcaaggagctcatctcccggtgcatggtgcagctggtggacaaggacgacttcggcgccgtgctgacggtggtggtgcacgaccggctgcacgcattcgcgcaggacgaggcacaggaggccagcttcatcgagagccacgacagcacagacgtgctcgcgccggccaccgtgcggcgcctcgccgtcctcaactccaccacggacaggtacgtccagctcagcaacgcgctccccaagctgcgctccatcatctgcgacctggtggagggtcgccgagtcaggtccagcaacttcatccgcaccagcgacctgagcttcctccatgcttccaagttcctccgtgtcatcgacatccagggactcgagctcaagaggctcccaaacgagatcggctccatgatccatttgaggtacctgggtctccgctgcggccacctagagaagctcccaagcaccattggcaaccttgtcaacctgcagtcgctcatccgcg

SEQ ID NO: 64725 - DNA, 1873 bp, Zea mays
  Clone ID: MRT4577_159027C.1
aaacggaagtgaacagggcccgtctcttccaccactccgcagaggcgcagactaccgtctcatcctactactctagcccagtctcacgatccagcactcagtcactagcgcttgtcgtcgccagtacaacaacggcatgggtgagggtgacgacgaccggcgggacgagttgttgggcgcggggcgggaccatgaaccagagccggcggacgcggaggaggccaagaaacccgcacccggcgaggcggaggccggcaacggcgccggcgcggaggcggcgacctgcgactactgcgggaccgcggcggcggcggtctactgccgcgccgactccgccaggctctgcctgccgtgcgaccgcctcgtgcacggcgccaacggggtctgctcccgccacgcccgcgccccgctctgcgccggctgctgcgccgccggggccgtcttccgccgcgcctcgacctccgccttcctctgctccaactgcgacttcgggaggcaccgggatggcggtgacccgccgctccacgaccgctgcgccgtgcagccctattccgggtgccctccggcgagcgacctcgccgcgctcctcgcggtgcccctcttcgacaagccggccgccgaagatggtgcctggtggaacatctgggaggagccccaggtgctgagtttggaggatctcatcgtgcccaccaccccttgccatggattcgaacccctcctaacgccgccctcgcccaagaaccggagcatctcgccggaccggaaggtgaacgaggagattcttcggcagctgggggagctcgcagagtctgatggcggtatgcaggcatcagcaggtcgtgaggaggcagagcaagctggtggagaccagttcccttcctgggcgtcaccacagtatgccactggacatggcaattttggaacagaggacaaccatgagaatggcagatggaacaacagtgaatatcatgatctaaatgatgcatgtaagctcgaggtcacatatgatcaggctccagtcaactcggctgaaccgtgcttgtcttcatttgctccactgtcggaaatctgccccagcatgagcaatggtagcagtaaggaagataaccaccaggctaatcctggcattggcatgccaatgcaaggtctacccaaaaggagtggatttgatgttgtcccatgccctgaccgtgactcggtcatttcgcgctataaagcgaagaggaagacaagaagatttgacaggcaggtccggtatgagtcgcgcaaagttcgtgctgatggcaggctcaggatcaaggggcgttttgcaaaggcaaaccagacatgaacctaaatctgcagttctgcactatcctaagcatctttcctcaagaaatatgctaagtatcttccaacacgaagaagaaaactggtcaggggcgatgataatgcaaaaatgtgccagaattttgtttgccttcagttcaatagctgataaccatagctccatatacagttgaattgaatgacgtgtgtatatattgctgtcatgtgactagtagctacattgctttgagagatcaaaacctgtatatgcacctacacatgtgattttgccatgacggacataataatagaaccactgcgtttgattgatgtagttattaacttattttgcaatttgatttccaatgcaaaagcttctttcactgatgagcaataaacaccgttgtgatgcaagaactgagaaatgatgtttgctaagggcccgtttgtttgattggaattgggctgaattggaatttaattcttgggctgatttgtttggcaaactatagaattggaaactaactttccatccatttcttaggcctgaattagagtctctgaa

SEQ ID NO: 64726 - DNA, 718 bp, Zea mays
  unsure (1)..(718): unsure at all n locations
  Clone ID: MRT4577_159028C.1
aattacaagaccggcagcctcgtctcttccttctctccccgacccgatctcctcctaggtttcgctctccaccaccgcggaacgaaccggaaatggcggcgcggcacctcagatccggcctcccgctcctccaagctcgcctcgcggccaacgaatccgcggccgtcgctcaggtatcgagggggctggcaacggaggcggataagcctaaggagaacaagatcaaggttccaaaagctctgtatggtggcaccggcaactatgctagtgcgttgttccttgcagcagccaacgcaaattcgttggaaaaagttggatccgagattctcgatgttgtaggggcatccaagaagagccctatgttttctcaattcatgaaggacacatcagtgcctaaagaaaccagggtgaaggctataactgaaatattctctgaagccgggtttactgacatcacaaagaaattcttgtctgcactggcatccaatggaagactgaaatatgttgagcgcattgctgagagatttgttgatttgaccatggcacatagggggngaggtgaaagttgttgtcaggactgttgttccacttcctgataaggaggagaaagaacttaaggagaccttgcgtgatatccttgggaaagacaaaaccatcttggttgaacanaagattgaccagagtatcatgggaggactggtgaatgaatttgggcaga

SEQ ID NO: 64727 - DNA, 1772 bp, Zea mays
  unsure (1)..(1772): unsure at all n locations
  Clone ID: MRT4577_159029C.1
cattgggtacctcgaggccggccgggagcgatcagggcccgtctcttccaccactccgcagaggcgcagactaccgtctcatcctactactctagcccagtctcacgatccagcactcagtcactagcgcttgtcgtcgccagtacaacaacggcatgggtgagggtgacgacgaccggcgggacgagttgttgggcgcggggcgggaccatgaaccagagccggcggacgcggaggaggcaagaaacgcacccggcgaggcggaggccgnctgctgcgccgccggggccgtcttccgccgcgcctcgacctccgccttcctctgctccaactgcgacttcgggaggcaccgggatggcggtgacccgccgctccacgaccgctgcgccgtgcagccctattccgggtgccctccggcgagcgacctcgccgcgctcctcgcggtgcccctcttcgacaagccggccgccgaagatggtgcctggtggaacatctgggaggagccccaggtgctgagtttggaggatctcatcgtgcccaccaccccttgccatggattcgaacccctcctaacgccgccctcgcccaagaaccggagcatctcgccggaccggaaagtgaacgaggagatccttcggcagctgggggagctcgcagagtctgatggcggtatgcaggcatcagcaggtcgtgaggaggcagagcaagctggtggagatcagttcccttcctgggcgtcaccacagtatgccactggacatggcaattttggaacagaggacaaccatgagaatggcagatggaacaacagtgaatatcatgatctaaatgatgcatgtaagctcgaggtcacatatgatcaggctccagtcaactcggctgaaccgtgcttgtcatcatttgctccactgtcggaaatctgccccagcatgagcaatggtagcagtaaggaagataaccaccaggctaatcctggcattggcatgccaatgcaaggtctacccaaaaggagtggatttgatgttgtcccatgccctgaccgtgactctgtcatttcgcgctataaagcgaagaggaagacaagaagatttgacaggcaggtccggtatgagtcgcgcaaagttcgtgctgatggaaggctcaggatcaaggggcgttttgcaaaggcaaaccagacatgaacctaaatctgaagttatgcaatatcctaagcatctttcctcaagaaatatgctaagtatcttccaacacgaagaagaaaactgatcaggggcgatgataatgcaaaaatgtgccagaattttgtttgccttcagttcaatagctgataaccatagttccatatacagttgaattgaatgacgtgtgtatatattgctgtcatgtgactagtagctacattgctttgagagatcaaaacctgtatatgcacctacacactatgtgattttgccatgacggacataataatagaaccactgcgtttgattgatgtagttattaacttattttgcaatttgatttccaatgcaaaagcttctttcactgatgagcaataaacacagttgtgatgcaagaactgagagatgacgtttgctaagagatattttataggatgaggaattgtaatcagatagatgtttttattctgaaatagactagaatctagtttaaatatgtattgtatttatttaggacttttagaattggcttctatatgtgtacgtaacactgagggttcctcatccaatagatcaacatgtaacacacgc

SEQ ID NO: 64728 - DNA, 549 bp, Zea mays
  Clone ID: MRT4577_15902C.1
acccatctctggtaaagccctgctgaaagtactacgccttaggaagcgatgtatgtacatatatatttctaaggcttggggaaaaaaaaagcaccaattagaccagacgttcgcagatagatctattcaaacatgtgaacagaactacaagctattccagatggtgtctcgaaacgagtccaagccaggtctagtcgcgacactccgtggtatcccggcagtatgccgtgcactttgctagcctcgtacgtacacacaagacagtctgacccagtgtacgaccataaagtatctatgcgctttcaggtcaggaagcaccccggcaggacgcctgacacaataatcccagtaagcgtatgcgtcgagcagcaccacaagtgtccacggtcacacattggggtggagggatgtatattgcttcacctttcaccccaatgtaagaaccatgcatgccataagcaacagatactaggggaacggagtggtttaagtatattgcggctgacatgagactgtctgatgagggtagctctcacaacgcccttgctt

SEQ ID NO: 64729 - DNA, 586 bp, Zea mays
  unsure (1)..(586): unsure at all n locations
  Clone ID: MRT4577_159030C.1
cctcgaggcncggccgggacactgtttacgagagtgagtgaaaaactgccggattgtgccgacttcctaacccgaccgatcctcgtgtgctgcggccatgaagacctccgaagcgctctccgccggcgcgaatcccatccagatctaccggacccgcgctttgctgggcaagctgatgaacgcgtttgtgctgcgcaaggaccgccagcacgcccacaggatcattgggtgccaggcggccaggagcatctccgacaaccgcgtccccaagatgctgaataggatgctgatgaagctcctcctcctcgggggcatctcgttgcacaccgtcgccatggacgtgcccgaggacggcttcttcgaccatgacgtactccagaacgccgtgcggtgggacctacgccaaggactaagctgagctgcgacagtcatggtgtaggcgtagcatcaacacgcaaggtgacgagcatcggaagttcactcgaggcttcaacaccgaccccacggacctgatgtggaatcacgaccagacgctcgcctacctacgggatcaacgccgtgtgcacctaccactgctgcgtagtgc

SEQ ID NO: 64730 - DNA, 4536 bp, Zea mays
  Clone ID: MRT4577_159031C.1
gaaaaaaaacacacagctgtagttgtcattttcctttttttttccgagtaacataaggaactagtttaaatgattgctagtggtattaatctttgtttcttttttgggagaaccaatactatagttcctatagctactacgttctgctttcttctttgttaataaaaatgaggtcgaggtaatagctgagatttccctttcttttgtctatatccttttgcttccttattcctctataaaaaaattgttacaaagatacatcaacaaataaacttggaattgaaacataaactaagctgcaaaaaaatggaataaactactaggcaacagtagcatgtatgaccaatttgcaggtctaacttccttggcacaagatttttaatttatgatacacaacccccctataatgatacaatttggcagaattcattccgcagcacggcttccttctcgcagtcgttccgtagcactgcctcattctccaagtccatcatggactcatccatggactcatcaatttccggccagcaatgtcttcggtacgatgcaaatcaagtcatcatattcttcagtcctgtcccgttttttgcttggtttctagcaagagctgttctttgtatacttcaagccgagcacgtctctgagctgttttttccgacgagcgcgaggtagacgagggcgaggaagacgggggagacggatgagggcggcggtcctgggtagagatgatctgggcgacgttgcaagccctgcctttctgttttgtcttcggcacgaagccactaggactcatctgatccaccatccggcactatcctctgcgtcctgaagacaacgtcaacatattctgtagaccggacaggcattcctcgtggtacccagcgagaacaattcattgtttacttctcagcttgattttgtaccttgaaaaccatttgacaagctgattgtttcttgtacaagatctgtcgccgacgaatccaaaccattggacatatctaagtctggagaggacggtctttcatgcactgatcagctggaagatatcaaaaggagccgaaatacacttcatctgcttagatgaggttgttgtcttcctctagttcgccgtcttccatgtcattctcatccaatgcgacaacatcctgggtagtgaattgatgaaaatctactatctttcactggatgcgttattcacaagcatatattgagttctcctatgccagaatctattgtcctgcctccttggcccccaatttgatgtttatcgcaccaaacagccctataatcgggctatagatacacctgccgaaaggacaagcaggcggttcaactccacaaaagtctctccaaagctgccttcagtcagttacaacatcgcacaggtatcgtatgagttaaatgtccttggcacgagaggtcctaggcggatgcgttgcatcatgcactccatacctgcatcatcagtggagccaggtggcacagtgcctggacagccccaattttttttgcttgtataactatttgtacttttgtgttgtcttggatcttcctttgcctatcatagtatcatggaaccatggcatggatgaagtgaagtgtggcctctagcctgtctatgccacctcatgatcgatatgtatccatccgcttcatctagattttctgctccatctgcataccggtcaacatgattgctgattaattcctcaccaacaaactgaatggcaggtggagcatggctagccggtccccgacgaggagagtgaaaccaaggggagctcactggttgatttgtgaagaccatgacaagtggttaattaagcttatcacacgaccccaatagctgatcagctcaaaaatgaccatcagagattcaggtctggagagaacagggagggtggcgctgttcatctgcaggattttctttaaccacgggaacctcactcgccacttcgaggcggtggcattcttcttctaggccacggtccaacatgacgttctcatcaattgagacagcatcgtggtagtggactgctgaaaatttactatctttcactaaaagctttattcacagttagccggtgaataaatggagaagaacaaaggtaaaggagaacatcaggttgcttgcattaggccatctgtgtacctctttccatctggctctcgtgttgccgtggttgtatttgtgcttaatgtagccatgaatttggtggcccatatatggacgcatgtgttgttgttggcatcctcccttagaagtgattaaaagttgcttttggaccacatgacccaagcttgttctcatttatggtcatgaatgatgtgtagcaccaatgaaaatgtcctactgagttttgtgccaaccacgaccaacgcatcatccaataaaacatcatcctggctggagaattgatgaaggtcgactatctcatgtataggaagaggttttcacagtatttacttctatatgtggcctcgctccccttaatttttggcattcctcataaatgccggcacaacaatcatatatctccagctctcgcagggaggccctccttggacagcgatctggtgttgaggccaaatgatatatatttcccggtcgactgttgttcctcagagcatttgtcaaccttgagattgttctgctccatttgggttttcagctcctgttgaatcactccaataccattgactctggcgaagagcacatcaaaaaaattctccatgacttggttccagcgtgacttgtcatcctccggccgatgatggagctggatcttgtcgcgtgtctggcatccggtgcaccaataccaggagaggccgatgtccccaaccagggtcgaattggatcaaccacagcacagaccttttttaggctcactacacagacctatgggacctcacgacctcacgagatcgacaggccaacagggttgcaatctaaatactagatgagtctcccgattcggactgtcctactgaattttgtgctaaccacgaccaacacatcattcaataagacatcatcctggctggagaatcgatgaagatcaactatctcacgtataggaaaaggttttcacagtatttacctgtagagtgaaaggcatgctgaagcagagctgtctgtgcgaaagacatgcagaagcaggtattcaattttgcacatcagctttgaaggcaaatacatctatatctggccttgttcccttcaattgctggcatgcctcataaatctcggcacaacagttagttatttgtagtagtcgtagtgaatcggggaggccctccttaggcagtgatatgatgttttgaggcccacggataattatttgctggagagaaggaaggcgatgcagtccttgggggagagactgcagagccctgcagtcatagaaaccaagggattcgagagacgtgaggagctgaagcgcctcgtcctgctctttcgtgaagttctccgtccgccaatcattactgaagcttaacttctcgagggtagcagagagcagcctgcagatgggagcaacaagcactcccgagatgttgtccacataaagtctcaccagtttgaaggaaacgtccggcattgttttggtcctcaccaccgttacaagtagatctgctgctacagaatacggatcagtcccatgatttctctgattttccacccaaagactcttgatgctgaatgtgatgcgaggatcaaatccatccattgtgatatttctgcaattaaataactctagactggtaagagatgttagattcgcgggcagagccatcggctcggtgctttgctcacaaccaagacaattatgtagtgtgagtttctcaagagatgtcaaattcgggagcagagcttcctgaggcagagtttccatataataaagggagagtgtcctcaagtagggggggagagggttgatgatgctctgagtctgagctgctcgtcctccgatggaccaccgagagaacagcttgttacattcctttatggccacggactcgagcgacgtgaggccacagaatccagctccttcctccataggtaggatcagattcttacacccattgaaggtgacatctctcagcgagctagagggtggaaaatgcagtaccacttcctcggggtcctcatccgatggtgatgccatcacatccaaagaagaaagtgctggaaaacatttgaatacatttgacaaagaatttttggtaggtgtaaattgtccaagttcgagagattggactgtgggtatcgcaacaccatcatccagtcctctcaaaaatgtttcatcgcatctattgacccatatacgtctcaaggaatgtagctttttaaggtccataaatgaaaagagtagtggatccttagctatcaaattctccaggtcacccagattttggaaggctaatctagaggggtttttaatttccaacatggtacgatcatcataaaaaaagtctcccgtacgaatacgggatacctttgaagtgtgaggcaagggtggaaggcacaacttcggg

SEQ ID NO: 64731 - DNA, 361 bp, Zea mays
  Clone ID: MRT4577_159032C.1
aaaaaaataaaaaaaaaaaaaacttaaaatataaaatttatattttaaataacactaaaaaaaacaataccaggtaaatacaaacaaagcgcccgggaaataaaaaacttcttcttcaaatatcacactaatataatcttaaacatctcactttctattcacaaaaacattcaccttataaacatatttttcttctctctaaccttactaactcaatccttctcttaatttatcacactttcccatcattcttcatccgtccccttcttccattcccacctaactccaccttttcttaccacttcattcatttctcttcctccatcaatttctctatttcacttatgaccttctccttctc

SEQ ID NO: 64732 - DNA, 281 bp, Zea mays
  unsure (1)..(281): unsure at all n locations
  Clone ID: MRT4577_159033C.1
tccgttacccgcttaatttactagctcatcaaaatatagttcatgtgttcttttnatcctagaacattgtgttgtaataattaattatcttaagcatatgagagttatgtttgtggatgatcgatcatgtttgtggactttgaagtttgaactatgttccttgtcattatattatgtctgtcaagttatgttcttggtgaaatgaacatgaccacgtactcatatggtattttctggcgggtaacgggttgcccaatatcggcggatatcctgcgggtacg

SEQ ID NO: 64733 - DNA, 608 bp, Zea mays
  Clone ID: MRT4577_159034C.1
ggtccggattcccgggtcgacccacgcgtccggatctgcttacgaacgaaggcccggcacccccgccgccgccggatcgtggtttggcgcttcagaacccgtgcgtagcgtgtaggatcaattggcgctccacgttccccgatgttgccgaattttcagagtttgttgggtagattgacccccgctacctccactgtggagcaggcttcttctacaatctcaaacatggttgttgcaaatggtaatgtcgacacggaggaaggaactcttgagattgggatggagtacaggacagtctctggagttgctggtcctctagtcattcttgataaagtgaagggtcctaaataccaagaaattgtcaatatacgattaggagatggcacaactaggcgtggtcaagtgcttgaagtcgatggggagaaagctgttgttcaggttttcgaaggaacatctggtattgacaacaaatacacaactgtacaattcaccgggtgagggttctaaaaactccagtgtcactggatatgcttggacgtgtcttcaatggttctgggaaacctatagataatggcccaccgattttaccagaggcttacttggatatt
